United States Patent Application Publication US 2011/0014706 A2 - sequence listing, part 29

SEQ ID NO: 63757 - DNA, 1596 bp, Arabidopsis thaliana landsberg
  unsure (1)..(1596): unsure at all n locations
ctgtcaatggcacttgtcttttcatgtcagtcgcgggtttgctccttccacgacggcgaacgatgtgcttttcgacattactttcttttaattttcttttctttaagttgcctatttttcgttgttgttgtccattacgccattattacttttactaaacaaataatatccaaaaatataacaactaaaaaggccaattttttttaatgacccctaaatttgagaaattaggaaactggccatttgaactttgaagcgcctagannnnnnnnnnnnnnnnngaggcagagctacattacacagtgcgggtgggcatctttttctgaggttaatgggccaagtggtccggcccgtataggcccttaaccaaaaaaaagaagaaagaaagaatcgtacatggaagtttgaggtgtctcttagcatcatgagccatagtgtacaaatgcatcaaaagattagactaaaaaagagttgtacgaatagtgtgatataagcagaatattcgtctttgaaacatcttatcattgcccaatttggatatgattcggctagtgaaatatgggtttatgtttcatcgaatagtagacatttatcttatgaaaagtgcattagcataaacgaatatatggcttccttaagaattcgttgtatttgtatctgactaatggagatttctttgtgcaagtagagtattgtttcttttttgtgtgtgcgggcatgtacttgtaaatgacttgtggaaatttcattattcaagtacaaatacaaagaaatttccattgattaagatgttggatagtagtagctagttcttttttcccttcgaaaaaattaaattaaatggaagatagatacatagcatctgctcggatattagtatgttgaagcctcaaaagggcctaatccaaacatcgcaattcatagtaatttagagtatgaccaaagtcaaccaatataactatctaaagttatttcagtttttctaattttcacatctataaagtaggaaaatgatttggattagtataaaactagcaaaaaagaaaatttaaattgtagagtttgtacctataagtgtagaccattaaattttgttctgcatctgatcaaatctatacaagatcaatattaatcctatacgaactataaatcatgagaaaatcctcccggaaaaagtaatccaaaagaaagattatgaaaataggcacactgagcagtaatcaaaatctgttttatcagatgagaaattgttctaatataatggatcaagattaaactccacacgtctcaggttttagtcgacaccatttttctttctgattttggacaagagcaaatcagcaaaatgtgagtgagtttctatggttttgtcacaaaacttttgtgtgtgggctcgttggaaacacaaacaaagtcaaaggttagaaatttattgagttttgggtatttccggttttagttatgagtcacatattctttcacaaaattcagacccacgtttttagcaattgaattcaactgtttgagttttcgtctgttttactttctcaatataaattcttaactttgatactatatataaaatttttaatataa

SEQ ID NO: 63758 - DNA, 267 bp, Arabidopsis thaliana landsberg
tttactatctatcgcaaaacaaactctcccgtcgttccattcgattgcggtgtgattcagcttctctcgtttgattagagtcatccatagaatgttttttttctatgttttccttcacttgtcttgatttgtcctctaactaaatggtggtagctccaagctcgtgtttttacagatttgttctctctaatttctttagaaagctgtgatttttttctgcttagaggaagaagaattcctatgtttcgtaatgggtgcaatcttatt

SEQ ID NO: 63759 - DNA, 451 bp, Arabidopsis thaliana landsberg
gaccaacaacccaataagaggggcaggttttaaactgtattgctttccgaccccaccctctgttttatcatggatttcgcaagctcctattatcccaccaaatacatgatattttaatttagtttattgcgcaatagcagcgaaagaaagtaaacattatatattggatcttccacttacttgtcttgcgacgtcacagttagagttagttttgcataaactctccacgtcaagcagcttcctcttaaaagaagacgtttcttggaggtgatgactttgatcccaagaatcaagcatggccggaagatttccccccggaattgcaccaaatgggaacatatcagggagcaagaaagcatgatgatcagaagataagacattcgcactggtgttgattgttgatgaaaacgaccattgtaaaggctagagaggccaagcaacctcgtctcgc

SEQ ID NO: 63760 - DNA, 1900 bp, Arabidopsis thaliana landsberg
tgatcggaactcatcaccggtcctgttttaatgctatgtaatatatgaactagtgtgcacgttgacggacttccctaagtatcgatacactttccaagtcatacataatagagaacactggaaaacaagttagctcatacaacaaaccgaagtttgtaagtatgtcatgataagtttaccataatttttctccgacgatctaagctctatcttctttttgggatgggcgatctaacctcggtggctaatactactcgaatccaggtggtggagacttttctctcttgtactaccggacttggtttcaaagagtttttttttctttcaaacatgtactgatataaagtttctcaaaaaccaatattagattaaaaaaatttattcatgtagcttacaagagaaaaaaaatatactgcaaaaatatgaaacactaatcaaaacaaaaggtataataattgtagttgaactgaaatatttttaatagtggtaaccaaacgagttctgaaagaaattgaagaccgaaccatatcacattatcacctaattaccgtttggttcggagaaccgaaccgaacccacccgaagacttcaattgcccaatcctagccaaaccgtagccgccatttccgtgaatgttgtgattagcttattattatcttcgttgcccaaaaacttaaaagatccaaacttcgaacaattttggtgtctgctatacagaatccaaatccaccttctccgattaaaaatcccttctctttcgatcatggatgtgtctaaagttgtcagcttttcccggaatttcgccgtcttggtcaaagtcgaaggccctgtaagccctgatctctctttacccaattcttgttttgagattctatccataaatttatctactttacacatgatcgagtacaaagtgttaatcatacttggtttcaattttaggatccaaagggattgaagatgaggaagcatgcttttcatcaataccagtgagcacaagatgactttttttatatgtattatatgctttagttttgtttctatcatggaacttaatgtggctgtaattttgttattgaagttctggcaatgcaacactttcagcttctgggatcttgcttccaagagatatttttttgagtggtgaggtcgctgctaaggttctgtttgaagctggtcaggacatggccctggttttgaccgttgcatctgttgttgagccattcttaacattaggtcacagaactagtagtagtatctctcaggttagatacacatgctccacttcaatatcaatgatacatgtttttgcttgatgtgctacttcttcaatcttgatgtctgttttttttttgtaaaggatccggtgaagcttattccgggtgctatgattgagattatggtggaggtatacagatagtgtttatgaatagtttatgttgaatggtaagttgtttggagtttttaaggtgtgatctagatgcgtattcttttcagggtcagctaaagtcagaaaaggaagctcctttttgggttcctgcagcaacttctttcgctggtacgaatgcaattcctcttctttcttgctattagaagtgactgttgatacctccctgtggtgatgatttatgaagcctctaaattgagtttacaagatgtgtgatatgcacttcttatggcatatgttgtagctccctttttatggcatataaaattctgttcgctgctgatttttaactaatatgttacaaggttgatgtccctgtatcttctgctgcacttcaatctcttattaaagcttcttctggttcgaaagattctggatggaataaaggttggtctttggtttctgctgctaatggttctcagccttcaatcaatgtaagtcaaatgcaaacct

SEQ ID NO: 63761 - DNA, 1353 bp, Arabidopsis thaliana landsberg
tattgccaggcaacccgaaagctgctctgatcatttcacttaactctgatatcctcgcagtccttttatcgtccgggttttgccacagattgtgagctgaatctcccttgcagtctatttctccggacaagcctttaaaaagagcggtttcgtatcccaatggtgaaagaatcgcgtggcggaaacaaaccggtttggtgaagttctttgcgtatctgattccggaaaacaaagctgtccatgtttcttctagctgcgtctgcaaaaagattcacaacatggatatgaaactcatacaagattcaattttattcatcaaaggagggaaactaaaaccataaacacgcaagaaatccaaatcctataacgaagagtaactaactacaagtctaaactggactttccctgctcatataaggatcatgaccatgaacaagaagaggagcataccgtgcagtgtccgtcaacgaaaacaacgtgcggtcgattaggcaaaccggtgactctagacgaaacataggcactataccaatctgtcacagtatggaagagatttgcgtactcgaatctagtgacaagcaaggtcggttcctccacccactgcagccaaacaaaaagcaaaccaaacatcaaaccaacaagatataaccaccacacataactacatagtcttccaagaatctcacacaaccacaacctaattaatatgaacaatgtaaagctcaaaatcagtgattcattgctgcatatgttgaatgaaaagtctccaattatgcaatcttttcaccaaaacacaatcttcaaatccaccagatcaatgagtaaaatgcacaaacctcttcacaaacgaaatcattggtatcaacagcacgaatcgaagcaaccaaatctctcattgtatgtctatcaattccaccttcttgcatatattcattcaacatctcatcattcaccagccgccgagaaaccgcactacctccttctcctccaccaaaacgacggtgtctcttaaaacctaaccgtgaagaaacctcttccgctacctcaaacgcaccttgtcgaaacgcaggaagctcctcctcctctttcctccccataacttcctctaacttctcacctcctctcgacataacaatccgatccggaaccattctcagattccttccttcacaaatcgaactctgtaatgtctcactgtaaaaacaacggaaccagcttccttctcctcctcctccaatcctcggcttaaggaagtcaactctctttgtaaatccattcccgaagtaaccttcgcaggagccagatggtagattcctctgcggcggcgtccatgggaggtaagaaggtaagatc

SEQ ID NO: 63762 - DNA, 979 bp, Arabidopsis thaliana landsberg
atgaaggacacactccaaggaatgaggacacaaatttattgcagtcacttgcccaagtccaaacaccaagaaaagttgtcctctcaggaacgctttatcagaaccatgtaaaggaggttttcaacattctgaaccttgttcgacccaaattcctcaaattggatacctccaaatctgctgtgaagagaatcttggcttatactccatgcgatgtcagggggagacttactggaagtaattcagatatggcttcaatgttcaatgaaactgtggagcacaccctgcagaagagcgaggatttcacagtgaaaattaaagtaatccaagatttgcgggagatgacaaagaaagtgcttcattactataaaggagatttcctagatgagcttcctggacttgctgatttcactgtggttcttaatctgtctccaaagcagttgaacgaagtgaagaagttaagacgtgagaagagaaaatttaaggtttcggctgtgggaagtgcaatttaccttcacccgaagctgaaagttttctctgacaagtctgatgatgtttctgatacaactatggacgaaatggtagagaagctagatttgaatgaaggcgtcaaagcaaagttcttccttaacttgataaacctgtgcgactcagctggtgaaaagctcttggttttcagccagtatctcattccactaaagtttcttgaaagactagctgctttagctaagggatggaaactagggaaagaagtttttgttcttacaggcaataccagttctgagcagcgtgagtggtcaatggaaacgtttaacagttcgccagacgccaaaatattctttggttcgataaaagcatgtggagaaggtatctcgcttgttggagcatctcgcatactaatattggatgttcccctaaacccttctgtgacccgtcaagctattgggcgagcgtttcgactccgtcaaaataagatggttca

SEQ ID NO: 63763 - DNA, 2194 bp, Arabidopsis thaliana landsberg
ctttctctcttctctctctctatttcgccaaaatggtgaaggttttgggtttagtagcaatactgcttattgttttggccggaaatgtgttatcttatgatcggcagggtactcggaaaaatttagtgatccatccgactaacgaagatgatcctacgttccccgatcaggtaatatttacattaaaatctatattttttgttatatattatgcatattggattctgtatcatttatgtaaaatccttgtaagtagaattttgacacggcaagtctcaagattttgtctttcagtattgatatgtgttagttttcaaacataaacaagatcgacttaagttttctcatgaaacaccaataatacgaatatcaagaaaacttggatcttcttcacctcttcggcttattggattcagtaatgttatctcttgttaaatgtttttgagggtaaaaatttattaaagcagaaaattgttagattgatctattgaattaattctttctcgtgtacaaagttacgttacggaagcattgccataatttcgggtgattttgtttttttttccaatttaaacctttgtatacacatgctatttgaaacgacactgtagtcgcctttttattaattacgaaacgttgaatggagacattttcaaactatacatgcataaaaaggttttgtattaacaatttcaaaatttgagacagataattaatgataattgtttaaggaaacatcccctctagtctctagataatctattcagaatccttgagaattaaaattaaaagattttcctatgtttgataaaaaatttgtttccacagtagtcaataacagtttaagttgcaaataattcagagattcgcaacgtgcgtgtcatactgtcatgtgacgtatggaatcagcacgtgtctaatgaaaaaagcattactacaaatttacccactttgtcttctttctgttagatctttcgtcactcatctgttttgcagttttgcttgtacgctttgtctttgtttatttatagtaatgtgtgttcctaaattacttatgaatttgtgacgtttaaattcaggtgcatatatctctggttgggccggacaaaatgagaatatcatggataacgcaaagctcaatctcgcctagtgttgtatatggcacagtctctggaaaatacgaaggctcggctaatggaacgtcgtcatcgtaccactacttgttgatttaccgatcgggccaaattaatgacgttgttataggcccattaaagcccaacacagtttactattacaaatgtggaggcccaagttcaactcaagagttcagtttcaggactcctccctctaaattcccaatcaaattcgccgtgtccggtatacattccatgtttcctcttcactcatataaactctttagattgtcatatgtaagtatagatttatgtcatcatggttttgtagctttatttgttattttattgataatcttgatattttttgataaaaaatgaaggtgaccttggtacatctgaatggagtaaatcaacattggaacatgtatcaaaatgggattatgatgttttcatcttgcctggtgatctgtcatacgctaacatgtaccaaccactgtgggacacttttggtcgcttggtgcagccacttgcgagccaaagaccttggatggtcactcatggcaaccacgagctcgaaaaaatacctatcttacacagtaacccattcaccgcctataacaagaggtaagttatttcgatttgtctagccaacaaccaaacctacttttctttttaagctccttatttattgtattaattttgggtttatcagttttattatagtctactttttattattaaaagaactttgttatgctaattttagatatttttgtatacacgttacaggtggcgcatgccatttgaagagagtggctcgagctcgaatttgtactattctttcaacgtttatggagtccacattataatgttggggtcatacacagattttgagcctggctcggagcagtaccaatggttagaaaataatctcaagaaaatcgaccgtaagaccacaccgtgggttgtggccgtggtgcatgcgccttggtacaactccaaaaaaactcaccaaggagagaaagagagtgggagataaagaatccagggggattctt

SEQ ID NO: 63764 - DNA, 2623 bp, Arabidopsis thaliana landsberg
atctctgaaacttgtccttcctcccaacacgatctcctctttccgttgctacgatttcgtttgaggatgttgattcgtcgaataaaatctgttcctttctatcatcatcatcatcactaggcactaattgcatctcttaaacatactaaaatttctggaaatgaaaaaaaactgagaaacgcaaaagaattcaacacagcatcagaaaactagatctaggtttcgccgggagttaccaaaaacattagaaaaaatcgatacttacacgaattcaaccaattctggagaattttcttccaaggcaagccattgcttgcgagtaagaagaaattggtaaactatgactgcgaatcagagtgaagagaatttgattttgttagtctcgattcatcactatgtgttgaatacagagatgacgaagatcttttgagggttgagagagaagaagctaagaagattgggatcaatcaaaaacgatggcgaagaaaagtctcaagggtaaaattggaattagaaaaaacatgtggagagcacgtgacacgtgggatttatctgagtttcacagtagacctgtgaagttcatcctcttcatcgttaacttcgcagactctgttgattagtcaacacagatcagaatctgaggctttggccgagacgagagaaaagcagaagaagaaaatggcggagactgtacattctccgatcgttacttacgcatcgatgttatcgcttctcgccttctgtccacctttcgtcattctcctgtaagctcatcaatttgtgattcgcaagtctttattctagttctcagatcagactcgcacacttttctggctccttaattcatagcgaggggtgcatagccgatatctttaaatcctttcccattaagtaggacttgataagagtctttaattgaaaaagcgattcaatgattctttctctggccaatgtgagtttccagatttttaggaaacaagggtagatttaaagctacaaaatcatatttagtgagttttaagtaatgctcacaagtttcatttctttatgatgcagatggtacacaatggttcatcaggatggttctgttactcagacctttggcttcttttgggagaatggagttcaaggacttatcaacatatggccaagacccactttgattgcttggaaaattatattttgctatggagcatttgaagctattcttcatctgcttctgcctggtaaaagagttgagggtccaatatctccagccggaaaccgaccagtttacaaggtatgttcaattagtcttgtgtggtggaagttgatgcagatgacaactgtacggttcttttcttgctggccaatggtctgtctgcttactttgtgacactagcaacctatcttgggctttggtggtaagaaatgtttccgatgactttggtttggtttaagttattgtttacgtatcttaagcttggattaagtgttgcacctatgtgagttcatttctgtgcgttattcaggtttggaatcttcaaccctgcaattgtctatgatcacttgggtgaaatattttcggcactaatattcggaagcttcatattttgtgttttgttgtacataaaagtaagtgtctattgcatgaatggtgtgttctttgttttcttagtctctatttttgtagaatttgaccttttgtgttgctaaaacttatttttttttcttgtacagggccatgttgcaccttcatcaagtgactctggttcatgtggtaacctaataattgacttctattgggtgagttatttctgctgatcagattctcattctttttgaaattgcttgttgggatttatttgaggaactctggtcttactagccatctcctcataatatttttgcctcttttctcgacatttggaggtcaagtttcactaaagtttccaattttagtagacctgtaaacggaaatgttcttagcagtatttatctttttattgatttaagtacaagagaactagtttggtgtgaatgtctgtcggtgaaggaaaagaacaaagtatgcagtagttattataacaatatcaagttgagatcttctctcaccatgtactcttttgctccaacttatcattaacacaatccaatttgtggcaatctttttctcactgtgtttttcgcgtcgtgctttgcagggcatggagttgtaccctcgaattggtaagagctttgacatcaaggtgtttactaattgcagattcggaatgatgtcttgggcagttcttgcagtcacgtactgcataaaacaggtattttctggataattcttatgtaaatactacactctgacgacatagtctggtggtttctttaagtccttatttcattagagagcttcacctctttctgatttgtgattcctgtactttctttaaccagtatgaaataaatggcaaagtatctgattcaatgctggtgaacaccatcctgatgctggtgtatgtcacaaaattcttctggtgggaagctggttattggaacaccatggacattgcacatgaccgaggtatgcttctagaacataaataaaatttatatcatcacatcctcatatagggtacaaggaaaggacccc

SEQ ID NO: 63765 - DNA, 442 bp, Arabidopsis thaliana landsberg
  unsure (1)..(442): unsure at all n locations
cgccacccccccaccaaagcaacacgcagacaaggcacttttcccttgcacagctgatgcatcagcaccatggagcggttaataaaattgccgaagatgcttaccagctcactgttattcgcatcctggaagcccttccaggtaaactcgctgtccttggtttccggtgcaatctgtgtaaggtaatagcgcaatacatcagccatctgcgcgccgccgttttccttgtnnnnnnnnnnnnnnnnnnnnnnnnnnnnnnnnnnnnnccagttacggctggtgctcatcttctcacctctcaggttcatgaactcgttggcgggaacattggcaggcagtatattcccatgcagcttcacattacccgggaagaagatacaatggaaaacgatattttcctttcccacaaaagcaccagcttggtatcttatcttcccagtaa

SEQ ID NO: 63766 - DNA, 371 bp, Arabidopsis thaliana landsberg
acggttcatgggctgattttcgacggtatgggcgatacatgtgatgaaggacccaccacatttcggttgacccttatgccgctaacgaactcaggaagctgctcaatactgagcctgccaaaaaactactctcttctgcctaacatgatactggggggcttcttggcgacatcgcgactatggcgaggttctacgctacccgtaatcttgagaagactttcacgaggtgggcgcacagccttccccgtggcaagatcattgagtcatccgatttcgagcgtgtgatgcctctactgcctgcagcatcaatgcagagcgatgacgaactgcaagaccgattggccgcgctccttgaatcggctgcaaccgca

SEQ ID NO: 63767 - DNA, 1264 bp, Arabidopsis thaliana landsberg
tctgtaatatccaggaaaaaaaaaaacagaaccaaaaaattattcagtagagtttcggatcaggctctccactctagatccagatactgtttcgaacaaaaaccaaaaacattcagctagtagcttcggagatgctctgaagagacggcctccatgttttagactttaagagggaagttgaattccttataacacgaaattgcttcccttgtttcttctcctatcaaataaaacacaaacctcattaacttgattcgtctatcgatcatttagacgaaagaggtcacagttttttacgtcacaattcaaaaacagagtaaagatagatcttttagcaaaatcccatgtctttaccggaactttcttgtccgagaacttcttcgccgtggttgtcttctcaatctgatgttttttcgtcttggcgctcttcttttcccgtaacaccttcatcacttctgtaaaattacaataaccatctaaaaccataaactccaatcacacacacgaggagaaaaaaaaagaaagaaagcaaaaggcgaaaccttgtgaagtaatgagccggtaagcgtgaccgagcacaagattctccgttggccggagaagctggacacgtgtaaacctcacagccttcctctgcttcttatcatctcccttctccgtcgctggaatattcttctcttcctcctctgacaaaggaatgatgagagagacgtagtgaccaggatacatagccatgacctcggtgacggatacagagctatagtaccggtcgataatcccgccgggatgttgtagaaccagcactgccgcattcaccgcctgacaattccccatatatgcagtgggagaaaaaaacacactatcttttgatgttacctaagaaacgaaagaaagaagaaaaaatgaaaacagagtagaactctgtgaaaaaaggagaaagcggaagagaggaaaaagtttgccggcgagggtaggtccacacactctgctactctcactttagctttacttataaacatgcgaaaatcccaattttatattatgattttatttgttatcactagtgtagagttatttatgattattattattgttcatgtagatttgactgtgatcagtgccatcgggaattgaataggaataagatggtcagaatttaaaagtcggttagattggacaggtggcgacgcccagactatgaaacagatgattaagatgtgataatttaaaatgaatcaggtttggtatacagtatcaaaaaaca

SEQ ID NO: 63768 - DNA, 506 bp, Arabidopsis thaliana landsberg
gctcgcgagggtgtttgccggatgcgctggcatcaggccgacctccggcccctctccccagccctctccctgaagggggaggggggtagtccgtgccgagaaaggatttggtgtcagccggcaacttggtacaagccggctaacgctgaagcatcagcgcacgccgaacagtcccctctcccttcagggagagggcgctcttcaggatgcgcacaggccccgccgacagaactccttcgcgagcaagcccgctcctgcagtgccggggaagcacggctaggcgtaggatggcgaggggcgaagcgatacccatcctacgaagagcgcctcggcgcaatgcaggtggtcctacagagcgcgcatcgccccgccaattcggatcaagccccggcatttggatgatgtggcgagcttcgaccgggtacggagtggcatgggcgaccgatctataccgacgtttcctgcggctgagatgtctgggccggggccgggagcacgccgggccg

SEQ ID NO: 63769 - DNA, 609 bp, Arabidopsis thaliana landsberg
cagaacgaggaggaaatatgcttgtgagagcatcacgtattgaatttagataaagaatggacgaggagggagagagagagcacatgcaaaaaggtatcccaactgccattacctaacattttcacgtctcaagattggtgaatggtctctctatttttaatcacccatgtgatctttttttcattatttatcttctttttctttcaaatagtaactttttgtctactagtatcataggagaaagttcaaaacatttcggtcggagcaaatttccattagtaaatttatatctcatattttggaattttatgattctgaataaaagttatacaacaaaacctaaatttaaatgctaaaacgatgacttgtttatcaaaacttattcaaagcttgatatcgcattctaattcatacatttctaaccattaaaatcagttcactcccatatcatataaagagttatggtgtgggcttcttaaccagtaaatttgctcaaacttatctaaaatatgtatgaagataatatctgaaaatgatttgttaactgttgtccggaaactgtctgaaaaatatattttcccgtgacctatggggagagaaaaaaaaacc

SEQ ID NO: 63770 - DNA, 180 bp, Arabidopsis thaliana landsberg
  unsure (1)..(180): unsure at all n locations
aaaaaagatcagttatanaagaataattaggtaacatttagactgttgccccaaaaacgagaaaaaatgatcgaaaaaataatctttattggaaaactctcatcaactttccgtcatacttgttttctcaatctaattagactttctttctctctttttctcatcttaagagcactctaa

SEQ ID NO: 63771 - DNA, 699 bp, Arabidopsis thaliana landsberg
gtaggccatctagagttttatccgaactattacctacatagtagatgtgttattaacacaattggagactaattaatacacaaacatttcaaacgttaaaagttacaacttacaactatacaaagcaacataattagcatcaaatctttgtgccagcaaagagaattttaccttttgatattagtttaataattcctaccttttaaatataaataatttgctgacaaaagaatatacaaataagattaaacatatgattcttggcagaataacgtattgttgctgcggaggcatgaatgaatgaatcaatgatagacgaaaacatatagtataagctacatagttgaaaattaatactttaatagattaaaaaaaaattaacaacatatcatgcgtgaggggatggtgggtttattttataaaaatgcaaatgttttattaaaactaaaacaacaacacattctagtttctacaacatttatcatcccataattcagagctaaacataactctaagttttgctcataatgaaataattttgctagtaaaacagaaaatatctatgtttcataaaccatcgtttatcgttatcgttttcacacaggttagaaaactatttgaatttatataaatgttcatactttgattagttttagattctttttttttaaagtgtatgttagtaaaagtcatcctttt

SEQ ID NO: 63772 - DNA, 1462 bp, Arabidopsis thaliana landsberg
gactcatcttctgtttctgcatctgtatctatttttctcaccatgtttcgcttacactgacatggaagttcttctcaatctcaaatcctccatgattggtcctaaaggacactgtctccacgactggattcactcatcttctccggatgctcactgttctttctccggcgtctcatgtgacgacgatgctcgtgttatctctctcaacgtctccttcactcctttgtttggtacaatctcaccagagattgggatgttgactcatttggtgaatctaactttagctgccaacaacttcaccggtgaattaccattggagatgaagagtctaacttctctcaaggttttgaatatctccaacaatggtaaccttactggaacattccctggagagattttaaaagctatggttgatcttgaagttcttgacacttataacaacaatttcaacggtaagttaccaccggagatgtcagagcttaagaagcttaaatacctctctttcggtggaaatttcttcagcggagagattccagagagttatggagatattcaaagcttagagtatcttggtctcaacggagctggactctccggtaaatctccggcgtttctttcccgcctcaagaacttaagagaaatgtatattggctactacaacagctacaccggtggtgttccaccggagttcggtggtttaacaaagcttgagatcctcgacatggcgagctgtacactcaccggagagattccgacgagtttaagtaacctgaaacatctacatactctgtttcttcacatcaacaacttaaccggtcatataccaccggagctttccggtttagtcagcttgaaatctctcgatttatcaatcaatcagttaaccggagaaatccctcaaagcttcatcaatctcggaaacattactctaatcaatctcttcagaaacaatctctacggacaaataccagaggccatcggagaattaccaaaactcgaagtcttcgaagtatgggagaacaatttcacgttacaattaccggcgaatcttggccggaacgggaatctaataaagcttgatgtctctgataatcatctcaccggacttatccccaaggacttatgcagaggtgagaaattagagatgttaattctctctaacaacttcttctttggtccaattccagaagagcttggtaaatgcaaatccttaaccaaaatcagaatcgttaagaatcttctcaacggcactgttccggcggggcttttcaatctaccgttagttacgattatcgaactcactgataatttcttctccggtgaacttccggtaacgatgtccggcgatgttctcgatcagatttacctctctaacaactggttttccggcgagattccacctgcgattggtaatttccccaatctacagactctattcttagatcggaaccgatttcgcggc

SEQ ID NO: 63773 - DNA, 2215 bp, Arabidopsis thaliana landsberg
caaccgcaatgttcagtctgtaaaaacaataacatgacatgtcaagataaaaaaacacaagaagagtgtaatgcaagaatcataaactagagactagttttaccttaacaattttgatctttttctctttgcggaatggtctgtttccacaactttcaggacagctgcatccctttgaacagcttatgcattgaaccctgagagaaatttttcaaaacggaaactattcaaaacgaaatgaatgttaacagagaaaatttgtttggttaattaacaaatatacctgcaaacacagcttctatcgcaattagggccacaatttgtgcacccaacaccatcattagcattatcacgctttttcttaacgaggtaaatatcttaaatcagtcaaggaaaagacacactaatgttgtgaaaaaatgagaattatgtacttttaaggcagaaatattgaatgtggaaactataaaggatactgcgtctaatgtgcacataagaaggcggatcttccttcacaacagaatctttccatgctaagtcaatcttaaactcctcttccacatatggcaaaggcaactggcaaaagacttcctgaataagaaagtagataaacattcagtgcctagctcttgaaattgtgtaagataaaaacaaaatatccagctttcaaatctcttccctctttttgattttcgagcggcaagtctatgtaagaattagtttcctttactacaatcacatttggcacgtggcaaataaacactgacctcaatctcactctgtgcaactgcatgctgctcaatcaacagagattttgtcagtcctgtgagtaaaactctatgaaagtacaaatcgtaagaagcttcaagaagtatcttatgaaagcggtaaactaaaaaatcaacctttgtgtctagccgccaatcagttggatgcctccaacaaactgctcttcctggttggtctttcaagtgaagtatttcttttgaccatggagaatgtttatcatgagcagccattggacacttaacacaccgccattgtgttctttgcttgcagacaaagcactcctgcatactccattctatcagaaactgaatgataccacacaatcaaaataatccatttcaattccctacctaaacactattacttagaactaactgttaagtatatcctatttgatggcctatcgtctctctgagcatttctaccaaaaataagagcaacaaaatatgatttgcttcattgaatacaaagccagccaataaaaatgaagagaaatcttccttagttctaaacaataaatgaggatcttacatgttgagggcatttaaatttgcttgacttagaaaaaccaagactttctttcgcacaaagcgagtgataagcgccttggcagccacgaacagaacacgataagtcttcccccgggtacaccggcttatggcaaacaagacaatcaacctgacaccaaatcccatatagtcattatgtcaataaatctaataccttagtcactaattgacttgaagattcgaatgacttttaaaagtaaactagtagtcaaacaatatctaaatgaatatgagatcttacacggacatcactaaagccaaaaaaaggtgatgaattcaattcacagatgcaatatacttcaaccaaacttcataactcaagatattatgtatatcctaaaatccaaatcccatgtagtctatatgtcaataaatctaaaaacttcacaagtcattaatttgacataacaaacaacataccattttcttggcaccaacaagaaaaggaaggaaacatgtcgactctgaaacaccagaagccactcttctcttgacccaatccttcacatgatcatccaagacaaaccctttcttgactctgtcagacggattctgtttccgggtaaaagcagtgactccattagcaattttaatgtccttgacctcttcctccggtggaatcattggtaaatgtttcccattgcattctccggctagattttccggggaaattgatagatttggctaattcagggcctgaagccgccggaagaaaagaagggcaacaagtgagagcaacagatgcagacatagacatgtttcccagatctaacatcctaaactcgaaagtacaaaagatggaagagtaagaagaagaagacagttacgttttgtctttgttggtaggcgaaaagcga

SEQ ID NO: 63774 - DNA, 1256 bp, Arabidopsis thaliana landsberg
  unsure (1)..(1256): unsure at all n locations
aacagattggaatgagtataccctcttatcaccatttttgaaatctgctagaaatgtagtcacttggttgttggtgcatggattaggtgtttagtggaaccagtaattcattggccttttccgctttattttcattcgactaacggaaagtaggtatacctccaagcactttactgtagaaccctgcagtctggcttacttctggcattgttcattagacttgtacatcgcttagacactctattcagtagaaataacaggaccactcctctttgtgccttttccagggtgtcaactgatttgagctttgctagcaaaattggtggtgttctagttgaatcaggatctaatttccaacaaaagttaaaaggtactatgtccatccacatatttatgattctgtcaacttgaatggctaattccttaaattgtcttgagttcttaattcccttaaaaatagtacttgatacttcttatctatgttgatggcgttagtgtttctttcttctttattgtagggttttctcctgataaaaggtttcctcaagcccagttttcaccctatgaaaacgttgagtacaaatggaattcagctgtacggtagcgtaaactctgtctggatctttgaaattacttcttcctgtcaactcttttatagtgggttggaaattgtttcaatcagttatcaccaaatccatagtcaagcatttccgagttatatgctgttttcttctggaactaaacttaactacctgctaacacacaaataccataaatccttttcttatggtataattttactggaggaatgcatgtatctgcctagatgatcacttataaagaagttcaaaaatctgttgcatatttatctaccttaattaaaagatagttcctcttattgttatctacggagaaaaaatgattttgattcttatgagtagttgcaggcgataagtctctagccattgaccattgctaaaaaatgattatttgcaggcatcaagcatcatgtggagaaattataattttcctgtgtacttattgtcagaaagtggcatatcagctgtgcatgaggtaatccttcaaacttgcattcttttgcaaattttaaatgtgtctatttgtgttgtcagaaaagcgaaattgatgacatttttagaaatatgaggaaatgaactcaaggcttacccccctttatgnctgttggtcactcttaaaaacgaaattgcttgatgaaaatatggctgtaaaatatg

SEQ ID NO: 63775 - DNA, 251 bp, Arabidopsis thaliana landsberg
gttattcaaatgatttaagactaacactttttttttttttccttgttttctcaagaaatttcttaacgatgaagttaaccaaaatggaaatattgatctggaatggcttcgaaatgctccatcacatttagtgaagtatgtttatgttggtttttatgttctcatagatctcattattagtaagcgatcataaactttttctattattatatcaggggatattctgcggagatcgaagggattgggctgaa

SEQ ID NO: 63776 - DNA, 495 bp, Arabidopsis thaliana landsberg
cccaacaaaggaagaacgtttacgtccgatcggcatgcaagcagaccgtccccctcccgaaacgagaaccaattagaacctcatcttacgtcttgtaaggctgacccttgtggtgcgatccgttgaccttgatgtcaacgacgtcgcctcgcctgtaggtgatcagcgtccgcgacggcggggccatgccgtgctggcggaacggcttcccgaacatgtagcgcgtcgcgcgcttgcgaccatgagagtggggcattctaggttgaagcgctttcgaggatacgatgcatccgtcgtttgtagattggttgtttattgagccgtcgtcgtcgtcgtcgtcgtccaaagccgagcgggggagaggagagagagcggagttccgatccgttcgttcgttcgatcgacaacgccacgagagagagagggagagagagagagatcgtcagttcgcgtttgtttctccaacgatggaagagagacgaggaggggggagat

SEQ ID NO: 63777 - DNA, 1726 bp, Arabidopsis thaliana landsberg
atttttattattatatatgtgaatcagaagtttatttttctttaaaatattaaagtataaccgaatgtcaaaacatataatacatctctacatatacatttatatatgtatattgttcaaatatgtgaacagatatgcataaccaaccaaaaacctgcgaagtggtcgcagatcttaattacacatctcacagaatacccacgagtttaggaccaaaaccttaaattgttttggcgaggacgtattaaatgagatagctctactctcaattattgacaaatctatatatatccactacatgatcttgtccaacaaaagacatttacagtttgtaaatttatcatccttaatgagtaaacgaatctaacaccacatcttgcttcatcttggaagggtatttaaaattgtttgaccaaaaaacaattacatacagtgacctcatattcgatcattgatgttcaacaacggtaaaacttccaaattgattatttaattcgaaaatttaccatatctattaatagtatacaaatattaataggaaagtaaaaaaaacaaaaaaaactacaaaacagagagaagaatttaatgagaaggaaaaagagagagcatgtggaaataaatgaatggaaataagagctctgtctcttataggacaaacgaaatgtaaccaaaaacaatatggttgctctctctttctcttctttaatttctttcctctccattaaaaccacttcactttctctgaatatttttttatcttcaacttcttttattttttcaaccaagcattcaaactagaatgaagctatctgactggttgttcaatcgggagaagaaaaaattgcaaactaaaatcattaataattaggcaaaacttagtttaccacatcctttcactatatcttcaaaacgtgttgtagcttcttttttaattccattttctagttttgatgacatagactaaggtaattatattttacaaaagtatcacttgtaaagaagatatacataatcatgtatgtgttgctggattcttcttgttagaaagaggtgtgtttggtctgactaacacacacggaaactaatattcatactttttagttggaataatctgatgtagctcataggaacttgacaagagagtatatagttttaaagttcatgttgttgtttaaacccaaaaaaaaaacaaattcatgctgttgtcacacgtaatataaacctattgccatatgtataatttcttatagctatctgtttggtattagagtatttttcgaatttactctgtattaactaatcttttttttttttaattgttttggaaaagaagtatccaaaacaatctgaaaatgtgcaagtcttaggtttgaggaaaaggaagaagaagaaaattgatcatggtgcagaggcatgaaaaagaactttgctatatcagcgagcagcaacaacgtctaatgcttcttttcgtggagaagtaaagttattcattaagggtatgtttgattcttctttcaatagttttgcctagaacatcggcaaaagattggcgaaaacgaaaggaggatgtatctaaaatcaagggaatgattgctacatgtggggttacaagagaaacgacttcgacaccgtcccaactactaaaagtgcagcataattctttggtacgtaaaaagtagcttttgcctatgttacctttgggggttcttgtttcttttctttgatt

SEQ ID NO: 63778 - DNA, 443 bp, Arabidopsis thaliana landsberg
gagaaggctgacatgcaatacaacaatatttatcggatgaccaatatacgatgcgtttcactgatatttaccctcacacaaaaaatatggtcaatttaacagcttacctccctagacaacttggtatacaaagtaacacattcctatggttaaataacatataacacctgcgtatcgagatcttctattgttaaaaaatgtgaatatatatctaacatcttattttgatatcgtcatgatcatatttaattaacattattcactgccaaaaagtttttcactgtgtaatgcccatcgatcatatcggcatttgtttcattgcccagctccatcatatcaatcttcataaaccaaacccccctactccttagtatatatcacatgatgtattctatcatttgctctttggttttattaacccctgcattacagttttgggacca

SEQ ID NO: 63779 - DNA, 757 bp, Arabidopsis thaliana landsberg
caccgaatcatatctcctcacctaaagattcttcactcgatcaccaagcaccaaacccatcactcctccatcattaccatcatcaccaccaatctttcctccctactccgatcttcatacccaccgtatcttctcccggagctccggtcatccccaaaagaccacgtttcagcacttccagtggtctctctcctcctcaatggaaagccttgccgtctccttccaccgtcccaacggcttccacaatctcttcatcaccgacaccttccaccgccgtggtaacagcttcttccaccgaaaccgccggatcttcaccaccgggtcaagaagcgaccaacagtgaaaaacaacaacaaccaaagacggagtcgtttcaacataaattcagaaagggcaagtacgttagcccagtgtggaaaccaaacgagatgctatggctagcaagagcctggagagcccagtaccaaacccaaggaaccgggtccggatccgggtcggtcgaaggaagaggcaaaacccgtgctgaaaaagacagggaagtagctgagtatctaaaccgacacggtataaaccgggactctaaaatcgccggtacgaaatgggacaacatgcttggtgagtttaggaaagtgtatgaatgggaaaaatgtggagatcaagacaaatacggtaagagttacttcaggctgtctccttacgagagaaagcaacatcgactttccgcgtcttttgacgaagaagtctatcaagaactagc

SEQ ID NO: 63780 - DNA, 1596 bp, Arabidopsis thaliana landsberg
ttaattcaaatatatatgtatatatatagatattttattaatgacaatacgaaatactctctagattattgtacaatatgaaaataaaataacaaaacagaaaatctttcatattatacatttttggtttttaattttgtgtcatgtacatagagcatttgttgaagatccaaaattcttaatgttgttttgatgtctttactggaaaacctaagattatatgaatcttgtataaatagcatctcatgtatttgaatatctaattaatttaattatcccatacaaaatttaaatatagtaaacttataagaaatgaagtaaaatgtttttttttcgttaaacataaaaatatgtaacttctctcaaattagagtatatttgtttacattaattttaaaaagatagatgaactttgaactcgaaaaatatttatcgatccacaagatacataataagttattgagcttactttagtggtggtctatcaacgcaagagagcgatcacagagcgaatctaactagcatgttaaaatcgaagtcaatcgagtcaaatcatgagttaatatcccatttttaaatccttctctgttggtgatagattgttacaacttgacatgtacataatgcataaattatttgcaagatcacggctgaagtctactgtacccaaattttgaaactggttaatccaagaactgatgttttcatatggtttggtaattgcaactcgaggacggcaacaaaaacagctattcgtctttaaagatcctacaagcaggtattaaaggtatataagtataacacatagtcacattataatctctttgatgcgatctatgtgactatgcccggacttgatttcgatctatgttggacttcaattaagttggaagtaagcttataaataatttagtaacttgcagataataatgccttgagtaaattgtaatggaggataataaatagagtagggtgacttaaatttcatgaaaccgttaaaaacacagaaagacaagtgaaaaatgatgggcacgatcaccaaaccattaactcacatctcttttgcaatttctcctaatttaaaatttaaaccctagtttctctctctttctccctatatatgcttttctctctctaggtcggctgctgctcacctaattaacagaccatacataaacactctctctcatcactttcttgtcatgagatttttgatttgttgtatgcatgaaattaattaattgttgccctaaaagggcacatacacatgctcatgcctcatcaatggaggtaaagtttgcttttcttgttctaacatttatagaaataatgtgtctttgtttccacaactatttatagggaggcatcactttcttagttctatcctctcaaacctcgatagttgatatcatatcaacaatattttgttttggatttacttttgaatttatttgggtttagataaattgacaaaaaaaagaagaagataaatttcggctttaaatcttatacacatattgtaatcggtattttaagaaagtagcaaaaggtgtcaaaaaagaagaaaaagtgggggagaaaatctatatggctgct

SEQ ID NO: 63781 - DNA, 491 bp, Arabidopsis thaliana landsberg
taacgatgacataaatgtgtttttactttttattttcttaataacatctgaatcggttgaggtacggagtgtagtgattttatactaaatgttgtaagaaaaaaatggttcaattggataaaagagcaagttagatggaagatacccaaagacaaacattcgtagaaagccgccgcaacaatcttcgctacatacttataattttgtccgttgtttttctcgtagaagtcttacgtaggaaaaaaattggcaagatatgtaaggttatgagtctataccaaaatattggatatgttcaagggtgtttgtctttgctaacattatttcggggtttggtagattttacaaaagaaaaaaaaaactattccatcctatatcgatgggctgatatgattcatttgtgctagtggattagcaaaaaatgtcatcacacgttaacactaaaatcatcattttttaactcctcacaatgacaattcttgcaaatgaaa

SEQ ID NO: 63782 - DNA, 392 bp, Arabidopsis thaliana landsberg
cttaccaaaatctctcctcgtccaaaagaaaatctctctaattatttctcttttatcttccttttcgtgtattcggcactctctatatacctgggataacgagatatatattgatttcattatagcatgattaagctttgaaaagagtaataattatataaattttctttgcacaaaaaaaaaataattatataaattttctagaaaaaaacatttgacaaaaaaatctagaaaaagattgtaggttttctttcattctatatcactgggaagtaacataatgatttggttcatttttaaatataaatgaagaaaactaaacccaaacgaaagggaccggaatataacgaggataaatacagcacgggatcttggaatactgttgaaaaaaa

SEQ ID NO: 63783 - DNA, 1267 bp, Arabidopsis thaliana landsberg
  unsure (1)..(1267): unsure at all n locations
acctaattttgttgattatgtagatttattttcgtaaaagtgacctaattttgttgattcgtgcgttggagttagtatatctttgtcgtttgcatagtatcatcggctttagggattgactatgtttatgtttttatttttgtaagagtagttacaagaaaaacttcatgcaacaaaacaacaaagacaaatttttgttgtcgcaatttatactctttgtagctgattgagtttgcaaatacttgcattttcctttcatatcatctctcaatctctgttgggttctttctcattttgcactgaaaagaaatagaaagcagttcacagctgtagccgcttaagatatcttaatttttaaatttcacaagtgcatagagtacaatcatgcttaacaatttaacattgcaagattagtgcattgaaagttgaaaaccatcacaattcacaacatacagacaactctgtttctttgtcccttgagcgcaaatacaacatttttgctttctttattcagcaaaatgccacagacgagaacttaggtataatttctatatacgtacttaagcctgcatcggtttagagtgcagtttcagcatcggtttctacttgcttcttaaggaactccagtacagagagccgctgcatgcatgttaaaattacatttgtcagataaagttttactgacattcagcagctttggataagatacaaataaaaagggagtcgtgcaagaatcttacccgttgctcgagagcagaatcttcagagtccagtttcaaagattccagcagtctcatgccttccttgaacccatctgtcgctgcaacttcattttgtagagtcctgtctatatccgcaactttggctaaggaaacagccacatccagaatctacataaaaaatgtagaaataacaaaagaaatcaatttctacttccggacagacctttgcttactatatttgagttccaatttctctaggcaagaaatcaagtataaaataagaaaacaaagagaagatttccaaccaacagaataacccaattacaatgcacgtaaatctaattatatgtatccaaaagagagtaactttatcgcagagaattaaatgacacctcatccaagtatgtatactgcaacgacaacacgtcagttacctaaacctcagttcaacccaggcaacaaaatagcaattgacttgaataaaatctaggaaattatttagagaatttctctgaacattcatggtaaagtacanataagtaaat

SEQ ID NO: 63784 - DNA, 1575 bp, Arabidopsis thaliana landsberg
ttccctatgacaacaacctaccgttcaaaccaaacgtgcctcttcccttaccctatttccccatgagtagtagttgtaatggcaactcaggtgtggactcggagcataaagagaaggagttagatccgttgttacctcctcgtaaagctagcaagaaccagagaattgactggttcagaagaaagctacctgagctggagatactgaaatcgactaccaagagcaagagtttccatacaagagttttggacttgtacaacaagaattgctctgctcagttctttatgatttggctttctcctgcaaattcttttggaccaagagagatgttagctattgatactctcttcaccaccaatcctggtgcttgcttggcgattttgtccaactccttagactccccaaacggatacactatccttaaaccattgtttgatcaaggtttcaacctcattgctgtaactatagatatcccgtttctcgtcaagaacactcctgctgaagcttggctgaaaaggctaaagagtggcaacatggatcccggttctatccccttgttcatgaatctctctgatctaacaagactcgcagtactctacaaatacggaggagtctatctagacacagacatcatcttcctcaacgacatgacaggactaagaaacgctattggagcacagagtagtgatccagcaaccaagagatggacgagactaaacaacgcagtgatggtctttgacatttaccatccgctaatgcgagaattcttgcaagagtatgccacaactttcgacggaaacaaatggggatacaacagcccttacctagtctctagagttatcaagagattaggaaacaaacctggatacaacaatctcacaatcttttctcccgatgctttctatccagtaaactggatcaaaatccaaaagcttttcaagaaacctgcaaccacaagagaagcaaaatgggtagagaagacagtacaggacatgaacaaagggagttacatgatacatctgtggaacaaagtcacaaggaagattaagattgaagaaggaagtgtaatgcacactctcgtctccactcactgcacagtctgcggaaacatcacaaactctcacatttaaagatccaaacagagacagatgattcatccatctgatctatctaagtatatagattctcgttcttagtttgctttactttttcaatgtaaaagactcaatgattcataaagatgcaaacttttcataaaaagatgagaactttggagatgtttttaacaacaaaagagtcgtagcatcaaagcttttcaaaaaacaaattaaaattacagtgagagacaacaagtgaagaatctcatatttctaattagagaagagagactcgtcgatatcgattttgatcttctcgtcgttctcaaacttatctttcctcggtggtgctggaggaaccggtactctctccggtcctcttcctttgctctggggtcttggcctcgcctgcttacataaaccccaaattcaaaaccaaaattgtgaatttgcaaagtaaaattactaaatccgaaag

SEQ ID NO: 63785 - DNA, 354 bp, Arabidopsis thaliana landsberg
aaaaaagggagcgcccaacacggacacaagagctttttaaaccaacgaggatcaactcaatataagcccgaaagagccatgttgtaagaaaataaccatgcaaaaagctatagcatacaagaaaaagcagatgaataagcattcgaaaacttacggttagggaaagagaaaaacaaagaaaacaaaagaagaatgccaagcagacacgacccagagcaccaaaaaaagacgattggaaaggaaaagaaatttgctttatggtctcaaagaacaaggacgttatcgccggaggccaaaaccaaaacagaagaaaaaacaaagcaaagaaagaaagagaaaaaaaaagaacaagga

SEQ ID NO: 63786 - DNA, 387 bp, Arabidopsis thaliana landsberg
  unsure (1)..(387): unsure at all n locations
gaggaaccgngacccgcacaaggncaccgcgcggggcgaaagccanggcgcgaacacacngttcgganaggacngaacgcccnaagcgtagggcggcgagaagcgaacaggcgcccgccacccgaacgccgacccacagaaggagcagaggcgcccaaaggcacgggtcgatggcgaagaccgcacagcggaagcgtgcggcggaccgccccgaagaataaataccacccaccggcggaaagaaaacaaggcaaacgaccgaacagcgcaacaaacaataggcagccgggacgtaaccgtgaagccaaacaagcacgccaaacgccgacataagactggagaaaaacggaaaccctaaggaacacgaagaacacattcaacaacgca

SEQ ID NO: 63787 - DNA, 2106 bp, Arabidopsis thaliana landsberg
aactattcaccaccaaggatcttgttcttgatgatatcggtagcgtttttagcggtgcctaaaacaccagagacagaacctttagctttttcagtgatggtatccgttgtctcagtgactttctccgttacatcttttgtcatcttagtcacctgttttaccaaattaactaatccgatattataaatgtgataatatcatcaattcacaatttatatctagaaaatgtggattgatcaattaattactcggccagcagtagtggaagcgacatcttggatgtactcagtagtttccttcacttgcttcgctccttctttcactgcctctgctgcttctttcaccttttggcattgctctgcctcttcttttccctattccaatttgagtttaattataactaaataacgttgtgcttgaggactttttttacattgtttcttacctgtaagggcctcggtgacgctgaaacgaatgtcctatatagtggaacactccttgccgttttaccattagagatcagaactttacccagttttgatgcatacatcttaacttctatagaatcaaagtgttgaagacaattacgaggtaatagaacgaatatgttcgagagaattaagtttatcgcaaatcagatcttttgtttaatatcctaagacgcaaactctaataagaagctttattttctcttattatttataaatgagagtattaaatttgtccggttatgagcatttgtaggtttctttgtggtttgtctttaacaaaacccaaatttctcaaaccctgattgttcgcctatagactcgatcttcgttttttttttgtcttaatcactcaataatatattgtctaaagtacattgtatatcattagttatgaattatgatgatatagctcgacatataaattaataatagaattcaaatgctcgctcgctgactgtagtaccctgatatcactagccaatacaacttacgaaaaaatgaaaaatgaaaaaaattttaaactcgaccaatcaatcgtccatggtatagttgtatcatcagacagcctttactaaggaaaaatgttataaattgggttcgtggccaaatttatgactttcaactgtcaccaaccttacattttgctatataaaccctaagaaactcattataaacttcaacaacataaaagacgatcaatataatctagaaaaaaaaaaagaagagagaagagagaaatgtcgagagctttgtcagtcgtttgtgtcttgctcgccatatccttcgtctgtgcacgtgctcgtcaggtgccgggagagtctgatgagggaaagacgacgggacatgacgatacaacaacaatgcccatgcatgcaaaagcagctgatcagttaccaccaaagagcgtcggcgacaaaaaatgcatcggaggagttgctggagtcggtggattcgccggagttggtggtgttgccggcgtgggaggtctagggatgccactcatcggtggtcttggcgggatcggtaagtatggtggcataggcggtgcagctggaatcggtggatttcatagtataggcggtgttggcggactaggcggtgtcggacgaggtgttggcggtctaggcggtgttggagggggtgttggtggtctaggtggcgttggcggtctaggtggagctggtttaggcggtgtaggtggtgttggcggtggtattggtaaagccggtggtattggcggtttaggtggtctaggcggagccggaggtggtttaggtggagttggtggtctcggtaaggctggtggtattggtgttggtggtggtatcggtggtggacacggcgtggtcggtggtgtgatcgatccacatccttaatagagagtatttgttggttagggttttaattaaggaataattaattagtttcgatgttattgttggtcttttaattctgtgatcattagggtgacttttgatctattttctagtttgggcttttgtaacgtttgctttgatttcggccgtggtgttatgaaatgtgcgactctctatgtttgaatcgttttggtttaggaggttctcttcttccatacttttgcatgttcaaagacaaa

SEQ ID NO: 63788 - DNA, 380 bp, Arabidopsis thaliana landsberg
  unsure (1)..(380): unsure at all n locations
acaaaaccacggaatagacgcttaagaccacccccacaatgccgttcggaaattataccccaggcaaaacgaccgggaccacaaggaagcngcccacagancaaaccacnncgcggacaggacaccaccggaccgcccacggccccaccgcgagagcccggggcagaagaacagaaaaaacgcaccgccacgccaaaaagcacccagaaccaaganccccccccacaaagagggggaaaagaacaacccgggcgaagcgaaaagaacacacgcccggaaagcaccgcaagacccagaaaagggcccaaaccaacaacccncccggggagacgaagaccaaccaaagcnagcacccngacaccaaaaaagaagccgaccca

SEQ ID NO: 63789 - DNA, 471 bp, Arabidopsis thaliana landsberg
ctctacgggtcggcgtcgatgacgtcgatgtcgccgcggccaccgcgctcggcatcctggtctgccacggcccgaccgggacaactgtttcgcggtctccgagaacaccatcgccttgatgctggcgctgctgaagaagatcgcccgccgcgacgccgatgtccgcgccggccactggcgcgaggaacggcacgccgccaccttcctcggcgcccgcgtctccgacggctatcccggcatcacggtcggtctcgtcggcctcggccgtatcggcacgcgcgtctcgcaattgctcgcgccgtggcggctgcgaatcatcgcgtacgatccttacgtgccgccgaccagcttcatgctcgccggtgtcgagcgcgtagattacgacacgctgctgcgtcactgcgatgtcatctcgtttcacgcgacgctcagcgacgaaacccgcatgatgttcggcgcgcgggaaatcga

SEQ ID NO: 63790 - DNA, 1807 bp, Arabidopsis thaliana landsberg
gctagacacagcatatgtctccatctcaggacttatctcacacaacgaactcagcatcgcgcttgcgattctctctttggcttcaacgctactctatgcgtcttccgaatcgtttctgataagctcattcagctcctgtttagttttctgcagcttagacaccgtttcttcgatttccatcttactctctgagctttccttaagtaatggtaaaaagaagaagtttccaattgccttgtgcggcaagagagaggaagaaactctaggtcgcaagtccattgtctgtgttattgcaaattctttcaccttacccgactttgaatgccctgcttttgtcatgcatcttaacagcagcgccgtgatggactcaatacgggtagcttgtggtacacgtttgccacttgaagctctgtttttaagcttttcaatcatcaaagaaccaaagacaaacctctttgtcttagattttgtttcgtgtaccagtaatggaggaaactcgatagaaatatcagcaggagggtagaaatcggcccccacaaattcaggatcaactgtgtccgcatacccttttgaagcctttgtccagctgcaaacaaacgttgacaacgaggccgcatcgcatatcttgtgcgacacgctaactgcaaccgcaaatcctttgtctttaaagaagatgaccttgacgtgcaacaacggccatgtttctggatctgcatggtccggagagacaatgaacttttgaatcaattcagcatctgatgggtttctcagaaaatcgaaaagaaatatttcagcccgtgcctcagtaaacaaagctccctcatcgttgcaatggacagtaactccatctttgatttgtccagcgagtggataaaaaagagacagagtttgagagagtgagcttttgagcctctggatgtcttcttggtttgagtgatcatcgtaaaagaaaatggcggaaacgtaagttgaaggaagaaactggtcgaagagagaaagagaaagggtttgtagatgattaggtgaagcgggtttgattacttctttgcttaagagttctagcttcattttctcacttcgtctttttcaacaaaatattctaaataggtttgagagttgcacatatgggcactttgtgtatgcaaatatatagacatagatatatgaatctgacacgacatataggtcgacgatatcaacactatgttacagtgtactgttttagttagtggttaaatgatctggtaaatagtcaatgtttcgtacagaagcagtgactttttaagagcacaaacgaaaaatattgggcgtcttaatatatactgtacttatgttggtagctcaaaggacgagttgggcaccgctattttaaagaatttctttggaacttccgcctaatttattttacgatttgttgaatgttgaaattaaaaggttattacaagatgcttggtccgcaatatgcatgtacgtacattatatttctaaaaaggttttaagaaattcatgtagatagcattaagaaatttcaaataataatatctctttatttacgcatagtttttaaaatcaccaccactttcttaaatacaaattacctaccatatcctaaatgtaaagtataatgcctattaatatcactttatttacgcaaagtctcgtgggaattcgatttcattttcacccgttcccttcagattattaggggaaagcaaaagtcgatcctaccagattatgacgaattcaagccgtaaaaattgtgatagaaggaattaccaaaacgatacgtagactgtatattttacat

SEQ ID NO: 63791 - DNA, 597 bp, Arabidopsis thaliana landsberg
  unsure (1)..(597): unsure at all n locations
cacccaaccgtatcagggtgattttgtaaacaacaagttctaacatcttcaaccggaaaaaaccggcaggancgtgttaacttctacgctttcttctggcgaataggctagatgggacgccacggccaccaacggcgatcatttgacactggtggacttccaactgggcggaacgactcatgcgagccccccgccctgcaacgtggcaatcgatccgaccttggtcacgctgccgaccgtcgccacacaacaattcacaagccccggcagcacgctgggcaagacgccgttcagcgtgaaactcaatcaatgcccgagcgggatcaaggttttcatcacactcagcacgagctcgccgcagacaggcactgccggagtgatcgcgcccactaccggtccagggttcgcaaacaacgtcggggtgcaaatactcaagtcggacggtacaacgccggtaacgttcaacagcgcgttcgatgctggcccggctacaacaaccagtgattaccccatccatctgtacgcgcgctattaccagaccgacaccgcggttactgctggcagggtcaggccactgccacctacacgctcacttac

SEQ ID NO: 63792 - DNA, 450 bp, Arabidopsis thaliana landsberg
acaaatgagaattgtgatagacgaaattctaaaagtcgtccaaatattgtagatggattttgcggtttctttgtacatatcatgttgacgtaacactatttcatcatttctctctagttttttcttataactttcttggttaattcaaaaatgtcaaactgacaatgagaagtgtgtggttcatccgaattgatctctcctaatttgatgcatattctatcaaataaataaacaatcgaataattaaattatttcagtatccaacaattgatttgtctttggccttaatctttttttagtgactgaaattaaaaatggaaagaaaacagctcgcacagcttggtacgcggtttcactcttttgtcaccccgtccagatcttaatgagtggtcgagacttatagatggtattacagatccatcctatgtcatattgtaccgagattattgc

SEQ ID NO: 63793 - DNA, 2030 bp, Arabidopsis thaliana landsberg
aagtttgaaactctcacgattgaagtaaaaacaaaacattagtattcaaccttaaatattaaaaacagagctaaatacagatttcgtttttgtatatatgcttaaacaaaactacatgatcagagacatgtggaaacttatgtgacatgcaataagcattaagcatacatatatatgtgcttacatatgacaaataaaatataaaatataaaaataaataaatacaaatgtgcttacatatttctaccatgcacggtgggaaaatgaatatccagcccatggtgaaacgggattaacgagaccgaccgtcccacattaacataaggtcttactcatacctactagcacaactgcataatgttttatttttgttgtcactgtgtttgatattgaaaagaatgaataatgccataataatattgtactggtttcatactattctcgattcatttaatatatagatacttaggaaatactgttatatatgtttgtatatttgtgattagtcaccataacacctggatataagagaatatcatgaaatcagcttatgtggttgaggatcacgaggctcccacggtccaaccaatcacatcgactcaactacatctcgaatctgtcgtggtttgccaccatgggaagttcattgttttttgtccagaaaaataaataaaaatgttgtaatctgtagaaaacttccacgtagctaccgtttacgattcatctaatttttctctatattttctattacaatcattgaagcataatagatcccaagttttataaatataacgtgtgtttcagtcatttgtatatttttatatgaagatgcgatattttaaggaaaaatcaaatcaaaaatttgaaaagaaaaatgaatggtggtatgattccatgatataaagaatatataagtagtccaaaataaaattatttggccgcgtccaaatatttatagccaccaaaattgtgtaccacttggtcgctcctctttattcccctcattctttgatttttttttaatgatgaaatttgtttttttgggttaaatattgatttattggaggtgtattataaaatatgatttaacagttacaatttatggtatggtccatggacatgtgataccaatctatttaatatttttactgaaccaacttatgaatgcatgtattgtatattgtctgtcatgcaatatgaattgtattcacattaatttcgccattttttctgtgtattctagtaccagaatgtctcaccttactagctaaattgatttatattctagggatttaaattattgatgttgttgaccaaaacgaattatagatgttaaaatattcacatcaaaatattcttaaacctaactaatgtaatgcatgcaaactgaaaatgttaattataatatcatgtaatatagtaattatatgtgtggaaaacttaagctatataataacgtacaaaaagtatactcagtgtagacgactaattaagacgagtaaaatattaattccttcactttgaagttgcttttgttcgtaggctgcaaccaatgctagctattattatcgaagtcacagaatcatctagaaaatttcgtcagtcatcaccgtcgtcaaatttaaactgaaaagagacacaaaactataatacatgtgcaaccaataattccatttgaatataacacaaagtaatatatatccatcagtctattcgagtaattttccccctaaagaatatatatttcacaataccatcttctccttcatgctcatctcgtgccctccctttctctttctcccaatctcaaaccaacaaagaagagagcaaattcttagtctcttctttctccataacaatggcagcttatggaagctttcaccgaatattcgactaacccaagacaagacaactctccaaagtcgtttcttgatactctctcctcttcttcaccttggaacccaagcaaagggctccacgtgtaaaccaccacgacgaaacgccacggcgtttacagagatattcggtga

SEQ ID NO: 63794 - DNA, 658 bp, Arabidopsis thaliana landsberg
gtccgctgctcccgcagggtcgtgccttgcagttgcgggaatccgcccacgacgacccgggtgggttcgccgcaggtgtgcgagtcgatgatgtcgatgctgtgcatggcgtcatcatcggcctgcggatcgggtatggtctagcagcgtttctcgttactggatgcggaagtcagcacaatggccaaggcgcgaaaatctccggttcgaccggcttccgatggcacgggtcgtggcgtcgtcgaccaggttggcggtatcgattcccacccgccgatgctggtgccagccagcgaactggaagcgctgctggacgcattgccggacgtggtgttcttcatcaaggacaccgccggccgctacacccacgccaacctcaccctggtgcgccggctcggcctgaaacggcgcgacgaagtgatcggacgcagcgtaaccgagctgttcacggcggcactgggcagtgcctacgcgcggcaggaccagcgcgtgctgctgggcgaaacggtggaaaaccagcttgagatgcacatcttccccaaccgcgcgcccggttggtgcctgacctgcaagcgttcgctgcgcgagcacgacgaaaatcccggcgtgctgggcatctagcgcgacctgggccagccggatggcaaacaccccattt

SEQ ID NO: 63795 - DNA, 505 bp, Arabidopsis thaliana landsberg
  unsure (1)..(505): unsure at all n locations
cggttgaccgattccgattggataagtggtttagcagatgatttgctacttcagatcctctcgaaagtcccttcgagggtatccggtttcacaagccgtatgtgaaagcgacggagaaatctctggagacacgttgctgccttggacttggactccagtaaattccctcatgagtcggacttggaagatttctttgatagctatctgcagtttgatggtaatcttaagatatgagggattcaagtggatttacaacgttgaagagcattgtgaccctgaatttgcgtctcggatcgatcatgtggcgaaacgtggacttaaagatctaactattctcagcaaggttnnnnnnnnnnnnnnnnnaattcggatgcctgtctcgctatactcatgtgcgactctggtgaattaaactctgtatagtgtagtattcgatgcttctcgagcacagatggttgctttaccctgcctcaagactatgcgtttagaggcggtcaaacatgac

SEQ ID NO: 63796 - DNA, 1630 bp, Arabidopsis thaliana landsberg
  unsure (1)..(1630): unsure at all n locations
ttcccgtccctcctaggatagcaagtgaatcattagggataattccggataaaattggacaattagccaacactagagtttggagacttgaaccaattattattattattatatatttacaaggaaaaaactacataaactatcaagaaacattagcttgcagtaaaagaccataattccaatattgtgtcaaaaaatagattctaagacatgatgatatataaaaaaaaacttggagaagtgtcaattccacaaacaatagccaagccaannnnnnnnnnnnnnnnnactatcgttgtacatgagaggctttgttaaaggaaagagaagtaagacgaacccaaccacaccgcctaagaacgctgcactcaccaaacctgagagaagaaccataaccatgtttagcttattctttagcatttgcatttgttaacaaccttgaactttctgtcttaccttttccatttgcgtatagcacaggcaatcccatgtagttgcaaaatatatgagcaaacaaaggagcagcaagatgtcctgtaaaatttacacaatgcaggagacaatcatccattagaaaggcttttacatgtataagatatataaatgactggaatgttaccggttctgatgaagagaaacgatgcatatgcaccaaaaatgactgtgtagccaagctgaagacctgatcaacggacaagtgaagctcaggactgatcaacaaacaatattattatgattatggatggcaaagacataccaacaataagtgaagcccggagatagctgcggttgtgcctgatgtacatctctctaaaatggtttaagtgagctacacaaaacatataaaagtcagacaaatccagtaattttcttttcactcgagttgtaaactgttattcacagagagagagagagagaaagaaacaaacccaagctaaagagaactgggcacagaaagatggcagtgttaatcctaaacccagcacacagaagcaaaggtatcatacatgatcggaaaaccagctcctcagttactggtgcctgcaaatcataagaaacgccagctctaacagattataacttgttcgatttagaacttacttatacaccaaactgatgcatatagtcctcagacaattagcaagcaatgccttatgcaatttcaataaagaattgacaagataagcacacagagatggcaaacatatgattaccacgataaaattgcgccaaacggaaacattagaagcacttgtcaataccgaagcagggattgtttggaaaaagcttctgatgtaattaaaggaactacatcctccgccattttccttccatgattccaggagaaataacaacttcaacaccaaagacccagcataaacgagcgaggtcaatagaagaggatacaccactccttgccactgttccatatcacaaaacataaccattttaatatgaatagtgtacaataagctacgagtaaacaaattgagacaaagaacttaccagatgatcttttcttatgccataaactccaagtatataagaggcctcccagctttttatctaacattactcaagcaaaaaaggaagaccaggttcagagaatccctgtaactagcggtgaatt

SEQ ID NO: 63797 - DNA, 423 bp, Arabidopsis thaliana landsberg
cacggaaacaatatacatataatctatactaagaaattagtaagattgtttgcaagacggccgaaaaaagtgattgggcggccaaagtacagcactgagaaatataacaccgcaatatacataattaaccgagtacgacatgagaggagggaaaatacacaaaagtgacattcttaacgaccatacaggatcaaagacttatccataatacacaaacatataaacaacaaaaaaaaactggtaatacgaaatgcattacaaacaaaaaatgatgtaaaaaaactaaaacaaaagatactattccaggcacccagaccgaaaaaaaaagacgacaaggaaatgtatgaagtattggatcataaaagaaaatttgaaccgaacaatagaaaggtaccggaagaaaaaaagacgacacaaacgcac

SEQ ID NO: 63798 - DNA, 422 bp, Arabidopsis thaliana landsberg
ggcgatgtgtattgctgcagtggcgccacacaagagcggtgtccgctttttcataggttctttacggtgcctgaaaaagacggtcacccacgcaggctcatttgcaggggaagaaagtgcccgatacttaacttcagccgatgatgtggagaccacttgccgctcgtctggtatgcaagatatgtgagaagtgccctcatacatgccctagacctttgtggatctgcgagtcttctttgcagaacgtaaagatgcctttgcagaaaccaagaggtggttattcatcgtgtgtagatgcaaacataccttgtccaacaggcgccttttatgtagagggagatctttatgactgacatttgttgagcttgccgaggagcataatacgacttggctgtgctcgattactgcacaaccacatgtag

SEQ ID NO: 63799 - DNA, 1656 bp, Arabidopsis thaliana landsberg
accttataattaaccaaatcactaacccaccaaccccttttaactttcctatttggtaaagagacatatagaaacaaatcttttatattaaagttgcctataactactattttctacgttgcatacttgcatatatcccgataaatacttccgtcataacagagtaagagtttgtatgtaacaaatttcaacaaaaagaagagaaaaacaatgggagagaaagcgaaagcaaatgtgttagtcttctcatttccgatacaaggtcacataaaccctctcctccaattctcaaaacgcctactctctaaaaacgtcaacgtcacattcctcaccacttcctccacccacaactccatcctccgccgtgccatcaccggcggggccactgctcttcctctctcttttgtccccattgacgatggattcgaggaagatcacccatctacggacacatctcccgactacttcgcaaagttccaagaaaacgtatctcgaagcctctcagagcttatctcctcgatggacccaaaaccaaacgccgtcgtttacgactcgtgcctgccttatgtcctcgacgtttgccggaaacatcctggcgttgctgcggcgtcgtttttcactcagtcctccaccgtgaacgcgacctatattcatttcttgcgtggagagtttaaggagtttcaaaatgatgtcgttttgcctgcaatgcctccgctgaagggtaatgacttaccggtgtttctgtacgataacaatctctgccggccgttgtttgagctcattagtagccagttcgtgaatgttgacgacattgacttcttcttggttaactctttcgacgaactcgaagtcgaggtaattctcaactttagagttttgttgtttattgtatttttcttaattatctgcaaaatgcaatccaaataaaaatatttggaggtgatataattgtggatgatatatactactatcttactgaaccaattagtatatgatgtgaaataagtccttattccaatatagttgtagctagacttgtagctttataggttagtggtgaaattttttttaattcgatgttggtacataataatagcaaaaagatattagatagaaaacgcatcattatttcaacggacaaaaagaacatcattcttcttggggcccaaagatatagatatatcgattggggcgaaaatcccaaggtgcagattacttataatatatcttatgcaattggttggggtattaatttaacgtggcaaatatgtagccagaaaacgaatatcgtctcaaatatacatacgtgtcacgcttccattgaaagcatacatactggctaggcatgtggggatgtgtccctgaccaaattgagattttgcacaacaatttgatttattttttaattctagtttcattagtttagttttatcctttattcttttggtttaattcattagtttatttcatatttttattaacgatgtttgcattttcgcaaattactgtataaatgtgacatttgtttttaaaaatacttgctaaattgctttaatgcgtgtattaaagggaatgatactttaaaaaaaaaaatttattacttccactggtccctattcatctaatgttcttgaagtcctttctggagcctgaaat

SEQ ID NO: 63800 - DNA, 1374 bp, Arabidopsis thaliana landsberg
tacacataccaggatggtattgaaattccgtctggcttcagaaacttttgggttctatcaagacactcaggagaaagatcattggttccaaatgaacccagcagttcgctaacctgcatagaagaggcaaacgagaattagatgaactgtatataatgtcagcatgagtattagctacaaaaatgtgtacatactgaccaatatatcagcttgctcgggagcattccaaaaacgcatgtcacaggatattatcgtaacaacgtcttcccatccttccatcttaaccaaattctatcagaaaaaataacaatgctctgagttaattagaaaccacactgcacgtccgaatgaaatcacaggaaaattagcaattttttaatcgactcagtgctgacaactcacatggagtgttacaacggcattaggattcttttccacggcataaactttcaacttccgatcagtttcttcagctgcctggtaaaggaaacaatgaacacatttgattaatgaaacaaatgaattttcaatgtctccttgtgcatcaggactttacctgtaacgatgccctcacaaggggtccccttcctgcccccacaaccatcaggacctaaaaactaaaatttcagtcctactgaagtatttcatatgaatagcagaaaaaaaacttataaatgaaaatgccactttgtaagcaaaacattgacatatgacatacagtagtcaactcggatgctttttcatcaggtaccctgtccaccaaggctttctcaactgctctttgatactaacaacacaaagatggacgaaagttaagcatgctttaaaaaaaaaccaggctatgatattaaattgttcaacatgattcatccatcagtccactctcctctgcaaaccgaagcagaaatagacgaggggaaatctagaaaccaaaggagttaaaatttaagatgtgaggggaaaaaactagaatatgcaacatacttggatgtatttaacagagtctctctcaaacgtctcataggtttgggcttcgaggttgtccataagaggctgtattcattaaaaaaaaacagtagaggctctttacagtaagaatagagcattttcatacagggtaaattatcatgatgaacggatagaaatcagaattgcttatgaaaagaggctaacctgcaggggtgcctgcaaaaaatccctgtaacccagctgtacaaagagtaagatttagataactgtcagaatacagttgtatctgccagcttgcatccagtgataaaaaacatagaaggaactgaggcaaaaggatgcaaaaaacgacctcgatgcgttcctgttcaggaagtgcctccatcttttgaacagataagcaac

SEQ ID NO: 63801 - DNA, 1424 bp, Arabidopsis thaliana landsberg
gcagtttaagtgaaggtggtagactaactaaatctgataactaaagtccatgacatgatatatattatttcaaagtttctacagatatatctttatcgtttagctttggaaagatggtgataaagacatctcattcaactctttctgaacccagtgaaaggaaaaagaacgtaccttgtaaagataaggtaacctttacagagaaaccaaatatggcaggaatcaggagcttttttgcaaacgaatatggctttcttggactttagatccgtcattttcctggcaatacatatttaagttgcttatctaaatttcagaggtcaaatcatttgaaaagtataagataaaatatagaatcatatcttaccatgagtaatgcttatctgatgcagctcccattactaaccacttaattttgtgccgagcaattagttctacgatacattcctcgatattttgccccgcaatgcaaagtttatctgtttgaatctaaaaagaactaggtcaatccggttatcatatgaacgattcctgaataagaatgcctaataatttaaagatttctaagctctacatttatgacgagtgcacacggcacaaggtttttccatgtaggttatgtcattatatgaacaaaaattatatccaccaagatcacaggtatattcaaaatgagttgccttacttcaattaaacttgaacaccaaaacagctaactgatagtttgtgtgagattacaatcaataacaaccttacacgaaaaaagagagaattgatacctcagtttcagataaaagttggagataagaattcatcagttcatccactttgggtttctcaactcgctcaatcaccttgacatcatgctttttaaagctaccaccaacaagtttcttgtgcgctgcaggtaaacaagtcttaacatccttggcaatggacaataattttttttccctatacatagcagctaaagtcatcacaatgtcctgcttccacaaacaaattaaaatttccaagctctaagacagattggccaagcaaaccaacatatgttacagtgttttatacaatgtacattataactaaattatagtcatcatcatctccttgtgtacttcttccaaactcttaaatgactgatcatgaaaatgttatagtactttcaatggcttatcttcctctagttcatatagagaataaaattacacatttctcaacttattcctagcaatcaaagaaacaatcaatatctcccagaaaattttaaaaaattccagaattctcagaataaattctaaacaaacaaaattcgattttattctaaattttgcaattcaataaacagatctatacaccaaaaaccataattcaacaccaagaactaatttaaaaagtgagaaagagaagaagaagatctcactcca

SEQ ID NO: 63802 - DNA, 388 bp, Arabidopsis thaliana landsberg
gcacgcctgttctttttgtgtgtgcagggtgctgctgaagaattgtggcctactgctttactggcacttactttataggagatataacatatttacgtgctgcaaacagaaacagacttctttacttaacattcaaactggctcaatatataggacagcttgcgatcacttaacttaatgctcacacaccatatggccagacggtacactaacctaacctatgaaaggaaacccatccaccacccacaatctgaatcaacaaatttgatactaaaatatacgggcccagcctctgttacatacatcacccatgagatgcagtgccgtgaacataacaatattaccatgctctgctacgacatgccatcatgtgcatgctaggccctgt

SEQ ID NO: 63803 - DNA, 1543 bp, Arabidopsis thaliana landsberg
ctagccgatctcgagaaagacggagacagtaacagagaccactctagaaaacctgtcaacaagatggtccttttcgggtcaaagctcagagtccagatcccatcatcagctgattttggaactaaaaccggcatcagatatcctccttgtcaacttagtccttgtgtccaaacgaaggtcttagccgtgagcgagattgaccagacggaggactacacgcgcgtcatctctcacggtcctaacccaaccatcactcatatcttcgacaactctgttttcgtggaggctactccttgctctgttcctttacgccaaccagccatggagaccaagagcaccgagagttttctaagccgttgcttcacctgcaagaagaatcttgaccagaaacaggacatctacatatacaggttcgtacctccacaatctttaatctatgtatttgacttaaatcagatcatagagtagttccaaaactaaacttaatcacaatggttgtggtgcaggggagagaaaggtttttgcagcagcgagtgcaggtaccaggagatgcttcttgatcaaatggagacctagctagcactccttctccatctcttttcatttttattgattttgtcacagcatcatctacttttgtattattcttttagttctctgatgcttcttctctttctttctttttttgggtgggggtatttgtatttctagtcataacctttctcgcctgcagatatgtgaaagatagagagagagttgataacttttttctttgtgtcatgagagtgagtgactcggagggctcaattatatcataaacttgcagaatactgccatctgaatcagaaaatatcaaaagcatcagtcttttccataacctaacattcgtcgtggctctatgcggtcttgtagaggcaaaaggccatttgctttttgatttaattttgttaactttgacagcgccaagtgaaaacaatatatcaagttttgttaccgtttacctcagattctgaactcagactcatttttcactcgagaaaggtttctgggaagccattgaactcgtgtttttatcctgtgatatgagtctgatttggtgtttacaagtaagtatataataactctaatcgcaatcaaaccaaaccagatcaaaccatagatgcaggggaggggattttgagtggttaaatatcgatgggctatatcatgcataattaggccggtccgtaataatacgggccagatatgggccgtttctaatagtgtccgcaagtagtgaggttagagtcccagggatgattgcatgtctcggtggcgtgcccaatttgcaagacagataactaaatgttgaggaccctcatcacttttttttttttggaatagactcgtaaatttaatatcagagcagctagaaggcccaatctcacggaaccatttaattgtaaaaacaaagtgtgaagttgtgtcagtatcatgtttaagtttattattcgtatcagccagtaccttaatatatgcaacatggatgtcggagtagatgtta

SEQ ID NO: 63804 - DNA, 2421 bp, Arabidopsis thaliana landsberg
gcatgaacattgccatccagcactcattcacagggacttgaaatcatccaacatcttattagatagcaatttctttgctaaggtaaacaaatcagtgattaaagtcataatgtttcaatatcatattcctttgttttttttgtctaaagctctagctttctatgaaatgtaaatttcagattttggtctaactgttgttgatgggccaaagaacaagaaccataaactttccgggacagttggctacgttgcaccagagtatcttctcaacggtaacaccctgaaataacaatctgtcaagtcttactttaaaaaaaaatcatccttaaagaaacttgttgtgtttttatgagaagcatttcttactcatcaccatactgcatgtgtttggttctataggccaattgacagaaaagagcgacgtgtatgcttttggagtagtgttattagagcttttactcgggaaaaaacctgtggagaaactagctcccggtgaatgccaatccatcatcacttgggtacatatataataaactcatacttatgtttctctaaaactcttagacttggaaccaactttgaattgtgtttttttattcttctcaggcaatgccttatctcactgatagaaccaagttaccaagcgtcatagatcctgcgattaaagatacgatggacttgaaacacctttaccaggtacgtttgagaaggatttagttgattgtgcaaagtatatagttggttttgatgagatagtatcaagagttttgatgcgagcatgtgaaatgtgtaggtagcggcagtggcgattttgtgcgtgcagccagaaccgagttatagaccgttgattacagacgtcttgcattctcttatacctttggttccaatggaacttggtggaaccttaaaaaccatcaaatgtgcttcaatggatcactgttaaacaccatagaaaaccggtgtttttttttatagaaattcggtttaatattgaccggtaggtggttttgatgtgtatattgggttagaagttgtaaccggaacattacagtatccttttgaaatgcttacttgcgcactgttgatgaactcttttctcatgtgatttctatttacgaaaaaaaatgaaaattattataagttgtaaatggtgacattagtagtaggtgtggacaagacacataactaactgcgtctccaagatgatctaaccctggttgcatagtaagttgaactataaaaaaacatgaaactttgtagataaactgacacatagtaaaaacgaagaactgagcaaaaatgtcttaaaagaaatcaggtggaagctaagacgttggcagataaatatggcgacctgtaatccttcacctctaagaggcaagtaggtaactgaatatagccttgcaatagaagatcaactttctcaactaagttttctggtactggagtgatcacatataatattcctctctctgtgtcaatacccctcacgattcctacattcaacatccaaaaccaacttcaatacataatcataaacccatgttcgatcactgattgcaatggataaatagaaacttaccaagacctacgcatgatggcaaatcctcaaacacctcggtgctaatgcccaaaccaacaatggaagcattcaaactataatacacttcagaacttgggatctaaaaagaagagaaccccattattggcatcatcaatcatatggattagaaagatatgacctttatactgttttctttttacctgacaatggagatggttgattgttaaactcgatattggaacttcataaggaatatgggaagcgagttcatgtgttagttctttgatcgtgtttacttcttttcctttaaagcattgcctaaagtaggcgattatacgcatgtccctcatcaaacgagcatccttatgtattaaaatgctgtacaaacaggatacaaaaacttgtaactactcgaacaaagcatattggtgagattattcgataactagcattgtacaggacttacgattgattatatctgtcttggtaagcagattggatctctatcaaatgagctgtctcatcatcattaccgtctaaccagaacaacccagctggtaggttcttgttgtaagcagagatgttaattttcacaacgtgggaaggggaaacatatctcagcacgtccaccaataactcatagccaattcctaaaggttgtgaatcatttctattagtgaaagaaaaaatctgttccttttgttttgaaaggataaagagagtgagttacctttaacccatcctggtgtattaatgacaagcggcaattcagttttgttctcgctagacttgcagaagtgtagctgatagtaatcgaataaggtatatacatatcttaaatatgcctttggatccct

SEQ ID NO: 63805 - DNA, 335 bp, Arabidopsis thaliana landsberg
  unsure (1)..(335): unsure at all n locations
ttcccggacgaagtgcttctctttggaacagtcctgggcgttattgcctatcgcttaattgcgcgtaatcgtttaattccctaaaagaacagggatccggaaactcttataccactttttccaattcctggaacacaattcccaaatcttccagctcatccaggatcggattataaatctccggttttgtaggcaataaaacacctctttccgaaatccggttattcagaatgagtttcgcacaaataccaacaggatatcccaccgttttggacatggccgtatgctcctggtcatcgcccaggttcaccnnnnnnnnnnnnnnnnnnnnnntc

SEQ ID NO: 63806 - DNA, 1714 bp, Arabidopsis thaliana landsberg
gacagtagagtttatgtgaagagaaatcacgacacgtccggggtgtatgactaatggaggctctataacgctgttatatctggaacttgagagtcgatgacatatatacgggccaccaaagttcctaatatgagattgggaatgatacttaattatttggagagactaaagctataggggcatacacaggtttaacatggttttttgggagaaggcgatacatgtgttgataacattcttgaatatacaacactattgacacccatgctgggattattggggatccattcattattgtttcctcttcttcttttaggaatcactcatccaaatcgatatccagtattagatttaatttaagtatgacttattgaaaacttataagccttaaggtatgcacctaagacgcgaacttatgagcattgggacgagttagagaataatcatgtgatcatttataaaaatcaaagacatacaactacaattttaaacctagcaggaacggtggtagcaacttaaatttcattatttcaaggcaacaaccgttccaataaaatacaaaaaggtggaaactactgcaaggctaattcatattttctttacatttgtccttatattttggagaattcttatgttttagctatccgtataattcttatgtttttggcatttgccataataaatctatcacaattgtttttggaaaatattttctaaattgttttatcagaagatttaggttaattttaatctattgtatcaaatggtgaatattttgaaaagtataacccgatctaatgcagagtttgtaatttctccaagttgttttgcaatagtcaaaactatacatccatggaaatgagatccgggtcactataaaaaactaaacaacttggtaacgacttgcgacctttttttttgcttcaagtccctgttttgtttggttatcgaatacgcgttagtcgcttgtgaacatttcgtagaaactctgcataatcaaatatgtaaaattatctcatgctatattaaaaagatggttaattaagagttaattgcaattttcttatattaattagatatgaattattttagattatcagtcctgcgtttacaaaaggccaattagatatatcatcactactactttggaagattagtaaggtaaatacagttttgtatggttatttcttttggggtgttttttaaattgtccagagagcagtaaataatatcctaccaaacaaacaaacgaacaaaaaaaacagcaattattattgaccaagaaatgcaaatagattatccttcgaagatgaagtcacaatcaactctataatttataaaatatcgtacaaaacttatagtcacgtttaaagtataagtgtataacaatagtatgaagtctgcatgctcaaatatgagtattcacattatgctcatggagaatttttggaggtcaactgcggaatgtatatagctattagctactacccgcctttcttaatattctcgtataaattttggtattattaattttataagccaagttgtcaatttcataactaattattatattaaaatttaatttcatacaaggataacatattaagtatacactgagatatatattaacaaattttagtgttaattaaaaatagtttccgattattatgatataaaatacttattaagttataatattgacaatttttgatga

SEQ ID NO: 63807 - DNA, 605 bp, Arabidopsis thaliana landsberg
  unsure (1)..(605): unsure at all n locations
aaaaaaaaaaaaaaaaaaaaaaaatttaatttttaaaaaaaaaaaaaaaaataaaaaaaaaaagggaagnagtagaaaaaaaaaaaaaaaaaaaacaaaaaaaaaaaaaaaaaaataaaaataaaaaaaaaaaaaaaaaaaaaaaaaaaaaaaaaaaaaaaaaaaaaaaaaaataaaaaaaaaaaaataaaaaaaaaaaaaaaaaaaaaaaaaaaaaaaaaaaaaaaaataaaaaacaaaaaaaaaaaataaaaaataaaaaaaaaaaaaaaaaaaaaaaaaaaaaaaaaaaaaataaaaaaaaaaaaaaaaaaaaaaaaaaaataaaaaaaattaaaaaaaaaaataaaaaaaaaaaaaaaaaaaaagataaaaaaaaaaaaaaaaaaaaaaaaaataaaaaaaaaaaaagtaaaaaaaaaaaataaaataaaaaataaaaaaaaaaacaaaaaaaataaacaaaaaataaataaatacaaacaaaaaaaaaaaaaatataaaaaacaataaaataacaaaaactaaacataaaaaacaaaaaaaaaataaaaaaaaaaaaaaacaaaaaaaaaaaaacaaaacaaaaaataaaaaaaaaaaaa

SEQ ID NO: 63808 - DNA, 128 bp, Arabidopsis thaliana landsberg
ggaatagacattagcctatgcatcatccgtcttacgcgagccaatggaaacccactttgactggcttttatacccttcacggaccaattgactttatatgctatgctagacgtgtatactcactagta

SEQ ID NO: 63809 - DNA, 239 bp, Arabidopsis thaliana landsberg
gcaaaatagacaggtgagtaaccaattgcactggacaaagaacaatacttttataaataagagtagaaagaaaaaatggggaaagtttctaagcgatcatggtttgtgggtttgatgcttgtggggctcactattggagttgcggaatgtagaaaacttgagaaggagactttgggaggtgggggtcttggaggaggaggttttttttttgggaggttcccccccacaaaaccgtcatt

SEQ ID NO: 63810 - DNA, 1119 bp, Arabidopsis thaliana landsberg
  unsure (1)..(1119): unsure at all n locations
ctaaagaaaccgtgcggaccagcttaagaagacagagtttaagaatcatttaagtcgtcagcaagaaccaagtgattccccactaaaacacttttctttcttctgtctctctgttaaatcagatgcttacgtacttaaccccattctaaacaacaaaagacacttttatttcttagtaattaaacaaatgccctagggtcactgacttttgcttaactctaaggcttgtggatttatttattatataaactaatgtaacctagtactcttctctctaaccaaaagaaagctagaatgcatgagctgttcctattccaaagagggtgggggagagatttgtaagatcttcctgggtttcctgtaacagaaaaagtcatctcagtttagtacttgtatcatagataaagaatgtgtagctactaccattgatgaactgtgagcataatgctagcttgtgtgctgtataactctatgatcaactttaataacctattccctgtcttttcgaggtttattgcgacatgaacaaagcaagtggattttagtttatgttttcaagagattctgtggtcactaagtcttaaaggatttggtacaaagatacctttgattatatattatacaacaacaaaagaaaaccattcttactgttatcagattgtgtccaatatcagtactcagcttctatagcaagtagcatcctacgatatattcccggtggttgatcacgtattacttagtcctctagaacataccaataacatgtacnnnnnnnnnnnnnnnnnnnnnnnnnnnnnnnnngtgttattaagaacctcatgtggtttatggatatagatctacccaagacacgtttcaatattcggtatataactcagtaattagtaatttagcaatcaatgttttgctattaataatgctattatccataaaactaggttggtttttctagtcccacttcctctgctgaaggaatcaagaatgatataattaagcaactagttgacatgcttagaatgaataaagaatgaaataataattaggattctctaacgtaagcaagagtaagaaagttatgacatagttaaactaataaaagtggaacaaaaagggagctga

SEQ ID NO: 63811 - DNA, 531 bp, Arabidopsis thaliana landsberg
catccggttaagtgacaacaaccaacagttgcaatcttttttgttacatatgtgttctttctttataaaaaggggggggttcgtcatgacatggaccaactcatataactaaagcaacaaacatctcttgatcatggttcgggccgagatcgaaaccggagctcctttccgttctgttaaagaggctgttactcttttcggcgagagaattcttctcggagataattacatcagcaagtccgtagaggttgtttatatatatatatatatatcaaatgcatatatcaatcgtaacatatgtgtatatatgaactatatattaactttcttgcaatgattttggaccgtgtgattagagaagcagttgcaaaagcattcaagatgagctggttgaagcaaaggagaatctgaagaaagctgaggaagagaacaaggtttcgtctcagctcatcgaaagccttacacaagagcttgacaccactaaagaaaagcttaatcactcactcaaaaatttcccagaacaccctcaag

SEQ ID NO: 63812 - DNA, 120 bp, Arabidopsis thaliana landsberg
aatcccatgtggacgcctttaaaaacaaatagcttcaacgtttatatagtatacactaggttatgatcccactctacgcgtggatctagtactaaaacttgtaataattttttgtgccga

SEQ ID NO: 63813 - DNA, 416 bp, Arabidopsis thaliana landsberg
  unsure (1)..(416): unsure at all n locations
ctctgtaatcagacggacaccttgttactatgattctcgtctttgcatgcccatgcttatctcaagatgggtctgtaggggccggcataaaggacccattttcttctaaccacatctatttatcggcattctatcaatgctgaggcctccgatgctatttgaccatggttcaagagggacttcggaggtcatacaatggatgcgagannnnnnnnnnnnnnnnnnnnnnnnnnncatactctgctcattcatttgggtctcttacgctacggtcgctacataaccatataccgtgtgctacatctactcctgcaccttgctacctgaactcatccatatactgtggctctcatgtgcaaaccaggaggaacattgcttagtcttggcctggctatgctcatgcagcataggcgcac

SEQ ID NO: 63814 - DNA, 397 bp, Arabidopsis thaliana landsberg
aagctaatgcggtggcgcatgtgtattctgggattagtacctatcctactgatgggaatatgcctattcctatggctcatccgtatggttcttcgactcctcaggatatgccagatgatatataaggtgggtacatcgatcatcttttagcggacacttctacacagagtgcactaatgggttctcaggttcaagctcaagctcatgttcaagcttctgatgctgcttcaagcgcacttactactactgtctctgaacataggcttaagagggtattacctttacattttgcgtctgaaattaatattcccttctactaacctgaaatatagaaaatattcatctcactttagcagactcatacactaactttcttacaaaatctgttaccacatga

SEQ ID NO: 63815 - DNA, 121 bp, Arabidopsis thaliana landsberg
agttttaacacacacaaagacgaagtatatattttattcgatacaaattctttttttttgaagatcctttgtaataatgagaaatattgctgcatatccgcacaaatcggttgcgaatccc

SEQ ID NO: 63816 - DNA, 708 bp, Arabidopsis thaliana landsberg
tttcaatgttagaatttaaggattttcatggtttgacttgaccaattcaatttcttcgctctttcttttattccaaatttaatccattatatatccttcaatagaaatcgaacgcatgttctcatcgattatgtaactgaacatatccggatgtggaacagaactaaacccgaaccgaattaaccagttagcatgttcaccgtcaaaatacataaaccgttcatcactccttctaaaccattttcttaatgaaaagagttatgaatcttgcagtctatagtatcttggaccggagactaagtagtcgtctcgtctactttccacccaaaaaaaaaaatgttctaaaattttaagctcttccttctatttgattttcaacaaaaactgccttgcgccttgcgcgtcatatctttcattttcaactgaaattatcaaccaaaacattctcgaaacaacttcaaaaattcttgttaatctttggtccatatatttacggcttcggaccaagccaaggctgattcctcattgtcatatatatcttttttggttcagtatgtaaagtgacatcaagaaatctttacgttgtttaacagtttaagtagagtatgtgtaatgcattgcagaatttttgtgaaatatcaatgcgttgatcccaaagttcttttattgtctaacaaagtaattaagggttgtcttattgtcatatat

SEQ ID NO: 63817 - DNA, 480 bp, Arabidopsis thaliana landsberg
  unsure (1)..(480): unsure at all n locations
gatttgacattgtcgcttattttaggctgatgtgaggcattttgatttttctaggaactccagatacatgcaattctgtctgactgttgtttctcttgagtaccatgtcaagtctctcaagttgaaaggctttggccatcctccaggcaggtacagacccccacccataaatgaaatcaagctcataaagttcaacatctgataaatatgtctcacgcacaaaattaacaacttcttttccatcagttaccccaagcgaagagagatagatgtgctctcaacttagctgtcagctccacaaaagttgattaccattcatgagcagcaattggaagaggtgaacccactgttcgagctcaagaaacgtgaatccgtacaccaaagacttgaccgtttagccatgcatgaacatgtgctttggccatggtcgctacnnnnnnnnnnnnnnnnnnncctgacagagccagaaacctttccaca

SEQ ID NO: 63818 - DNA, 641 bp, Arabidopsis thaliana landsberg
gtctttccagatgacgatggtccgactaggatgcacaaccatttattctgcacacaatgtgcaacagcttccagattttgacggatttcaggcaaaagtttcaactgctcactggcaatattagactgatttaaatttcgtttaatggcagcagttccaacaactaagtacgcaggatttagctgaacccgaggatacggatttatcgacggggttttatcaaaaatagccttatagatacgcagaacttctttacggtcagttgcagtacgcattctttgaatgtacagaacattgagaaagctttcaacttctaagtcatgtatcgcctctgaaacgacacgagaactcaatttagtccaagcaactgtcacctggaaaaaatgtattatgaaaaatttaaatgactctagctactaccttgcataaactggcatgatcttatcacatcccgtagattgaattcccatggtgagccatcgtgaccaaactttcgatataacatagtaccatcgtgtaactgtctgttgagagcaataagctttgaaagcaatggactaggaacagatgggtaaagtgagcgacagatgaagaggtaatcatcttccactaactcgtccacataaacctgaaaacatttg

SEQ ID NO: 63819 - DNA, 970 bp, Arabidopsis thaliana landsberg
ttttggaaagacctcggtgatcagaatattggctcagttaacaggatatcctcttaatgaattaaatctttcgtctgcgactgacagctctgatctactcggatgctttgagcagtacaatgccttccgtaatttcagattggtgatgactcgagttgagcaccttgtcgatgagtataacagtctgctattacagtcttcccaggaggcccttttcagcaataggagtggcttagtttccagatggctttcctatttaaataagattgattcctctctcgtggagaacccattattcttcttgaacgactctgaaacactgtctacattagaagaggttgtagaagacctggaacaggtcttgaaagaaggtgttttacccgttagttggtcaaaaaagtatctggaacaaatctccaagactatattgcagttacaaactcatgagaaaaagcagtctacaaagtttgaatgggtgacaggaatgctgataaaggcaatagaaaagggagagtgggttgtcctcaaaaatgctaatctctgtaatcccacggatattgttataatctccctttttaatatcatgtactggttacattccttttgcgttaaccctgataattagaaacaattctgataatttcccttgtagctaatttccatttttaacttaaatttcaggtacttgatagaattaactcattggtggaaccgtgtggatcaatcactataaatgaatgcgggatcgttaatggtgaacctgtcactgtggttccgcacccaaactttcgtttgttcctgtctgtaaatccaaaatttggggaagtatcaagagcaatgaggaatagaggcgttgaggtatttatgatggggccacattggcagctcaatgaggatggctcaaactgtgaagagcttgtgctgagaggtgtggaaaggtttcttgctctgtcaggtattccaggttata

SEQ ID NO: 63820 - DNA, 565 bp, Arabidopsis thaliana landsberg
taggatggagtgggggatgacatacattatactaaatattttgatactatttttttttctattttttaacctttctctactatttttgattaaactatagcaatagtataaacccgtttagaaatatgtgtagattttatgtattgacttataacaatttctaaattaaatcgaaaactacttgggggttcatattttttaatctattctcttataaattaatgagccggtctttataaatctgtctaaacctcttataaatcaagttactctatatatatgtaatatatctatatatatatattggattgaatgtaaaattgtattatcaaccaaagaagcttttacaataaatgcatcatattttaaattaaaaattgaaaatgacttacactgataaaatggtatgacgtagcttatggatgaacttaattaagtcattaaaagataactctctaattagttgttctctttaaaggatggactttataatggttataaacaacgaaatattattaattcctttataaattacctgttacctttttattaaaaaaatatatgc

SEQ ID NO: 63821 - DNA, 1677 bp, Arabidopsis thaliana landsberg
tacatctatacataccaagttaaatatatcaaaatatcaaaaatgtaaaatttgacttatggtccgcatgttaaagcaaggatgttgcaagattcgacaaaacatcgtgtaatgaacagaagaattgaaattagtttgaatactgaattgatctctttggatcaagatgagtttttttttctcactccagtttcaatcatgactaatcatacaaaatatttagttattcgacatactcttttttggtaaattaatgattatcctacatactctaatgactaatgggtttaaccaaaaatttgcgccttgaaatcttcagattatgattaaaaaaattattttcctgaaacaaaataaaaaccagatgttgagtgacaattctgaataactgcatacaagtaagccaccaaaaaaaatgagataacaactatgccacacccatttcatattgcttataaccatctttttgagtaaacctttaattactagcacacaatattgaaaatggtgatgaactatacgtttgttgtgactgtactactccaacaaaaacgaacgcattagattcgtgaaattgttggtgtgtccaccttcaggcgcatcccacttttggtagccttttagccgtgaaagcaagatcttgaacaaatgcgaagataacttgaacattattagtccattgatcgatccaacggtagatagctcttctgtaaaaaatgggaatgtccaacttacttttgattggtttatatctttctactttcaaaagattataagtggactggtatattctttggaatataccaagttcattctctttcgacctttctttcctctcgtacgtgcttcaatcatttctcttaattttgactaattttatttggtcagtaattttgaactgattcaatttctctcctctgacggccaatgcaaggtcccactaaacatacaattagagcgaggcgtcataattgtgttaacttaagtgtttgattggtttgtttataataaaaatataatgatcatgtgggttttgtgttgcaatttctcattaatatgaagagcctgcatgaaaattcgataaaatgggacaaaaggcatccaaacaactaatccctttgggacttgatgtgtgatgcctcgagtccatctatgttaccagtagaagtgaaataaactatgcaacaagtaatgcaagtatatattcattatggtctaatcatgatatattcttttcgacacacgtacatatattgttggttaaataaatatgaaggtttatccttcaaccaagtgaatatgttgtctataaaacttggtaggaatcatgaaggtttattcttacatacatcatcccttttcaaaatatgtttaaagcttctaatgcaattttggctcactttctatcaatatatatatgaaaggttaatccttcaaccaatacgttgtatactatttttggtaggaatcatgaaggtttattctcacttacaacatgccttttcatttttttaagtttctaatgacattctgtctcacactttctatcaaactttctttaatttgggacttcaaacctgcattaccctatgttttattttaaggggtaataatgccaaaattaggaattttattttgaaatttacaaacccttgattaaaaaggaccttttataaa

SEQ ID NO: 63822 - DNA, 278 bp, Arabidopsis thaliana landsberg
  unsure (1)..(278): unsure at all n locations
gatgtccttcgaaaactacnttaatataaagaacatactccatctatttgactcgaagctctgatacaagattctcgacagtacctacaaatccactacgaatattggtgatttagatttaggttttttaaaaaatatatctagtggactagaatcaaacatacataaacaattaaataaaaatttatggagtggactattacaacgtcatttaagcacattaatgcgattcatattacaagaaaataaaaggtatgagttccgcacccctttttata

SEQ ID NO: 63823 - DNA, 542 bp, Arabidopsis thaliana landsberg
  unsure (1)..(542): unsure at all n locations
atctatggaatgtatctttactcattcgatctcaccaaacccatcaccacaagaagaaccaccagcttatatctccccaccaattgacgacaatagcacagaatgaattgtaccttttatattagattgtatatttgataactaccgatgttggacttagtaactctttaacctatttgtgacacacaagttattacaaaaacacaagttaacctaatttagtatgtcttcccattatcaaactctcacaagtctctgacaccaacaaaggttccatggtaacggatcgattacaatcttcatgatcagactatggatttctaaggaaatttcaggaatacggaaccgaataatagtgtagttttacaatgtgaaaattgccttnnnnnnnnnnnnnnnnnnnnnnnnnnnnnnnntgaatgtcattcaagatgatgatcacatttcatccttgcctgcgaacagctcttgacgccatagcttgcaggttagctcttgctcgcgacagagtagaaaccgatgaagaagaagtttcagccgtc

SEQ ID NO: 63824 - DNA, 1765 bp, Arabidopsis thaliana landsberg
gtctcggatacaatccacgctgtttgaatcacataatctccatatggatttacaagaagtgaatcaatgtcacttagcagctccgctatgatcctcctggaggaaaattctctactttccaaacacttctgcaccacgtgactcccatacttgtcataagagagttgcacgtaatttccatcaagatgtttcgagagagcacttgtcacctcataatctttcaaacgcaacaaatattgcaccacgtagtttctgaccaatagagattttggtgtaagagtacttaatgtgatttatacaatgattaacgcaaaatcataaaagaatcttatcttacccgtagcaattcccgcataatcttacagcaatactgattatctccttaatcaaagggtctcttagctctcgagaggattgtctaatcaatttttttaagcatacaacatccattttgatctattgcaacttgataacaattttgaacaatcacttcaagaagatactgtcaaatatagaagagaccacacatgaaaaatgatcagtaaaaagcatatattaacaagttcaaaccggtttacaaaattaatacttatggtctaccactactcattttcttgtaacacaagcaagagagctcgaaagcctttgttacacttttcccacacacaaaacaatttaagttttgaaagctatgtaaccgcgagattattaaaaccaaatttgatgaaataacaagttcatagttcgaatcgggccatctaaattccaaaaatgtgttggaaatttaagtattcacaatcttggttataagaattctggtgaaaatctctattagctataaaataatgtttgaggaacaaagaagtaaagatgcttactctggtatgtgaaggagaaaattgattgaagcagaacaaaatcacacgatgagcaataacgtccttggtcaatagaagtgaaacatagcatagagtttccatgaaccgagatatttgctcttcagaacaaagactacgcatcaaaccttgtattgcatgtgttctgttatctccaacataagagagaaaaaaacaaaaaaagcaagtcacatgaatggtattagtgagactaaatgaaatggacataagaataatgcgtacccgtgtgtatggacacaaagcctaacaaattcaaaaggttcctcaaggactatatccaaaacccgagtgatctgttcatcggtgcatttctccataagctttcgaaagactttatggccataataatcaagcatcaattcacatacatgtgagatcaaattgtcaaatatcttatcaattgtctcctttaaacccttggcaatcacatattgcaacatgtgagactctataccgtctttagcacgcgataatagagtattgcggattccatacatataaccatatgcatcatcactccaaggggtttggtcaaagaaaggattacttggtaaataaggaacgtcttctaaatttccgtatggagaacccatgacactagcactacgactacgttcatgaaaagacctaagagcatcatacccattaacataattatctttcaatctctgactgattcctctgttctcgtccagtgttttgctgagaatctgaaggaaaccagttcacacgatcggtcataccttgatccccacggtccagttcggagacaccaaatcttctaaactcatgttctagggtttgccaatcagaagaaaataaggtttcaggtgagtaatccctccagg

SEQ ID NO: 63825 - DNA, 1964 bp, Arabidopsis thaliana landsberg
  unsure (1)..(1964): unsure at all n locations
attggtaataggtacttgaggagtgttcctgaggatgaatagtcaaatgttgatgcaagagtggcgacaccagccaaacctgaatccattcctttaaagcctagtgaagaaacatgattcagccaaaatctgagcattacattttaagagaaatcatcagcctataagcttaccacatcttgagagcaaggcatataacaagatnnnnnnnnnnnnnnnnnnaactgctagcaactttccatcttttgacttggtttgagtccttacatagtccatctgagaccaacatttcatataataattagacatataactccaacagaatgtcaaattgatgttttttttggttcagttctacagaaggaaaacaacacaagaggtgtcacctcaccgcagaaggaacatcttcttctagatagttatcaaaatcccaattgtaatgagggataagttcaaaccgctgcttgaaatctcccgctctctttgatagacggtcttgcatcccaaggatcttggaacctgtaggaggttctttctcagtaactagaccaagattctcttctctgttcttaaaacagaacaaaaccaaatcgacagtataaaatggatcaactaacctccatcaagaacattttccagcctttcagatacacttatgaaattctccaatagattcgagactatccgctgctggttattgcctttaccaagctttgtatcaacactgagagaactcagcccggctccacggagctcaagaatccatgtatcaaatcctgatccagacatggatcttgcaaaggaacactacaaatatgaatatccacagaaacacaaaagaaggttttagcttccaaatacaaaacttgagttacaagaatccatttcactataacactattataagctctcgcctaanaataactaaatcataatcacctcaggggaaagatcgtatgtaacagcattggtcccaatcccagacaatagaagcaaaggatggttcctcttcggtgcctgtaagtgtagaaacatgataatacgtatacatatacacctatacgtatggacacatcggtacatgactctatataccggtacctttggggaaggaagatatcgccagagagcgacgcgccaatcggagttgggaacaggaacgtagtgaagttcatccgccgtgcagatttcattcactgtcgtcctcgagaccgatgtgatcgccggagatgatgagccgactcggccgagttgcactgaggagaagaaataccgtgactgactgtgtaaagaagaggcggtgacggcggaagtgaaggaagctgagcttaactcgaatcggagggtatccataaccaccgttaatcactagcggtatcccgacgatgtcgccggagcagaactaaggtttatatagaaggtgaaagatcttactcagtcgctttccgctccatttctaatttttgtggtttaagattttcaatttcaaaatggagaaaaaatgacttaaattagtgaaattggataaaatgtcggtgcaattttatccaaaatataaaatatctttacgattccaaagcgtgtacttaactaacattttgtttatataactgtccacgaaatagataacttatacgcaatgtttgggttgttgatctaggtgttaaaatagcttaacttcatttacatacactgatccagttacattctcaagagagactctgcgtagctgagaaggttccggactcggatagataattgagttaagaagaagatgcaaaggatcagttttgattcatatacaagtagtaaagataacaggaagaagaaacgcaactatttccaaatttaaggattttttttttattcactctctattgctaggccaaattagacaacacaatcaagaatgtttcctcaaaatctactaagaggctcatcaatcatacacatactatgtttca

SEQ ID NO: 63826 - DNA, 1438 bp, Arabidopsis thaliana landsberg
  unsure (1)..(1438): unsure at all n locations
tttaatttaagaacgccgcgctttgaccagtgttatagggtaggcccaattattgacaagcccattgcttactcaaactgtgtgccgtttcaatcccacaattattgattgaaaaccaaaccttaattccgaaaccatatcaaccgttttacattggttttctcaaaccgagatttttctccatagaaagaagcagagtggtaaagaagagcacataagggaatactatcatgggagcatatgagaatgagattcagagtcaagcgttaacctaacaccttccttgaaagaagttggagagagctcaagtgtatgaatcagtttagttatgtccatagatatatctgctggtgacactacgccacgatcaatctgacaaaatagctgagactcattaagtgactgatctgcaatattcaacaagtgagattcatttgtgaaagcctcatacataccgatgatgcagacacatgtttaatcaaggacaggtcgtatcctctgacttctgcaaccatttgagccatttgaacacgagatagcctctcgggtccaccagcattcagaactagccgcatctgtttatcatctgaaagcagcaacaacatgttgttatgattctacattttatgtacaatgatgcagagcgagagaatgaaactcagtaaaaaagaatctaccagagacccatctgtctattaatttgaaagtgatattcacaagatccttaacgtaaatggggcaacgaaactcgtcatggaagaagtctaccgtgtcccctttctttaaggagctatcaatccactaaaacataaaagacgaccagtttcatggctaactcaatgaactcaagtgtgtatatatatctctgagaaattgtgttaagaagcacctgaattgggagagtcttggggagaggtgatacagtttgaggaccaaagatgatactacttctcaatattgcaaagctttgacacttatccttgatgagaagctctgctgcaacttttgatttcccataaacgttgactgcaacagtctcatcttcttccttgtagaaagacttgacaccttgataaactgaaattgagacatgaaaaccaagtgcaaaagcataagtcatgactcatgatgagattaacactataacagtggctaatgcaattggcaactaaccttgatcagtagagagatgaatcaacaaggttttgttagtctcaaaacttgataaccagtttacaagagaagtaggtacgttgatggacatggcggaatctggatcttgctcgcaagctcgtgggacagacagagcagcacaattcacgaccacatcaggctataatcaatggaacaaagtgttgcttttcagaccagagagtctaatacacagattcacattgtcatttaccannagcattctagaggaaagacattaatcgag

SEQ ID NO: 63827 - DNA, 1730 bp, Arabidopsis thaliana landsberg
accaattaaaggtagtcatataattatttatactctacaatacgtaacttcatcatatcaagtagagaaaaccaacctgaacaatatcaactttatatttaaattcgagttagaaatgtcatctaacaacaacttgttcacatcactcactgttttggatacaaacaaaataatatccgtcaataatatagtgaaacattttcaaacaaaatgctaaagaaaacagcacgaaattattaatttctcacataactgcatatctaacaaacttagtagttctttataaattcttaacatatagccttaataaaggggataggtttaatagaaactatttttgttaaattttagaatgattactaaatatactttttaaaactaaaacaagcaaaaaatatattattttaaaaagtataagcattcaactaatgaagatcctttaacagaaaagaaaaacattcaactataaatactttgaaaagatgcttcaaaaaaaaatgaaaatgaaaaatagtacattcaatttatctaattgtctctcggtagcaggaaatatggcctatagacatctatctagagaggcgagctgtgtgagatgtccagatagtagagaaacagtgaaccacctattattcaaatgtagcttcgctagacttgtctgggctatttcaccgatcccagcatatcctgaaggagagtggactgattctctgtacgccaatttgtattgggttcttaacttggaagtggaaattccaaagttgggaaaaattggcaatcttgtgccttggctcctgtggcgtctgtggaaatcacggaatgagctgatgtttaaaggaaaggagtatgatgccccggaagttctgagacgagcgatggaagactttgaggaatggagtactagacgggagcttgaagggaaagcctctggtcctcaagtggagagaaatctttcggtgcaatggaaacctcctccttatcaatgggtgaagtgtaacacagacgctacatggcagttggaaaatcctaggtgtggtattggatggatcctccgtaacgagagtggaggagtcttgtggatgggagcaagagctctgccaaggacgaagaatgtgttggaagcagagctggaagctttgcggtgggcagttctcacgatgagcagatttaactataaaagaataatttttgaatctgatgctcaagctctagttaatctgctgaattctgatgacttttggccaacccttcaaccggctttggaagacattcagcagctgctccatcattttgaagaggtcaagttcgagttcactccaagaggcggtaaaaaagtggcggatagaatagcacgggaatgtatttcgttctcgaattatgatcccaaattgttttctattgtgccccagtggcttagaagcactttgatttaatttggagattgtaaacacgttggttaatgagtatttgaagttgagccaaaacaaggaaaaaaaaaagtgtgtatgggtgtagactagtccggcctaagaaacccaaaatctattattcagatctaaactcttcgatgtgagacctattttgtctagaattggccgagtagggtctgacgcgaacctaggatgcacccagattgacatttcagcaggatgatgccatgtcctgtacaatgtcaactttaagtggaaagtataaatgctttagtgacgtggtgtgatctctaccgtcct

SEQ ID NO: 63828 - DNA, 162 bp, Arabidopsis thaliana landsberg
aaaaaaaaaagacaaagaaaaaaagaaaaaaaacaaaaaaacaaaagaaaaagaaggacaaagtagaaaaaaaaaaaaaaaaaaaaaaaaaaaagaacaaaaaaaacaaaagaaaaagagaaataaaaaaaagaagagaaagagaaaagaagaaaaaaaaaa

SEQ ID NO: 63829 - DNA, 240 bp, Arabidopsis thaliana landsberg
  unsure (1)..(240): unsure at all n locations
aagaaaagaagaagaggggnnncggaccgaataaaacactttataaacacgcagccaaacccacgangaagacaaagagcagagacnnatacgacaaaaagaaccancngganaccaaagagcagacaaggagcagaggacacacggaaaacagagagccacgcaacaaaagggaggagaaaggacagaaacgggcacagaggacgaagggcggagagacagcagggagaaaaggcaaca

SEQ ID NO: 63830 - DNA, 344 bp, Arabidopsis thaliana landsberg
  unsure (1)..(344): unsure at all n locations
gattaattatgctgtcctactattttattctatttcaaactaccgactatccnnnnnnnnnnnnnnnnnnnnttatatatcaaaaatgcaagatacttgattatgtacatacttttacagatcataaagaatgtttaggatgatatgcataatgatacacaaaaaacaggttaacatacatctatctgtaaacagagagatcatattttagttttcgacaaccatcccatcacaatcactgttgatgcctcaatgcccggttgatagatattacttggatagaggaactttaaactttgcttctgggtggcggactatactgcatgtacatatatcatatttat

SEQ ID NO: 63831 - DNA, 426 bp, Arabidopsis thaliana landsberg
cttgctatataaacgttatagagaatgcactttgggagctttgtattatctaacaattgatctacagatttggagaagttgagcttgcatttgagcaactgttggcacttatgaataaaaaagtcattatgttactactgataagctatttatacagacattaaaatacaaccaatactaatagaactgcctttgttcctttgtgattgattgctaaaaaaaaaagattgtcggaaaaggattgatacttgagattccgaacgcaatctatttgagccgtaatcggtagatatggaacttcagatacatattaccgaatatgattggttgaaagttattgaacattgaaatgacaatatacaatgcatggcatagcagcatttgatatatcttattagtatatgtgagctttctataagatccaat

SEQ ID NO: 63832 - DNA, 693 bp, Arabidopsis thaliana landsberg
cttcttcttcttcttcattttaaaagctttgtgcttgtggaggaatcgcatctttgaacttgattgaaactgcttagctacgctgagtcaggtgaaaaacactaacacatatgagcaacaacctcgtcgctaattcaaagccgatcgagaggtaaaatgaattgaataccttgtcgaagagtcactaacatcaggtgacaacaacttttcctgtgactcagtaacatcaggcgacaacttttcctgttatgtataaacaacaatttgtaagaatcaatcaataagcctagacggaaatttcaattgcaaaggtacaatggaaaataacctcaaaatcatagcggcgggcgaaacgcggatttgtagtataacttcgcacttgaagtctggaaacgcagatatgaatttgagagcaaaaagaggctctgtatgcgtgatgggcataaattctacccattattgctctccgtgccgcctccttttcctaggtgttcatatatacaagtgcctgatgggttttccagctcctgatctggcccatactattgggcctatactagatagaacgaggttttttagataattgttttcaaatgttcttactctttagacctcctgcttgatctcgggtcgggaagaagcaagcaaaccctttcaagttttttttcttctaaaaaggagtaaagaaaccta

SEQ ID NO: 63833 - DNA, 424 bp, Arabidopsis thaliana landsberg
gccacggaaaggatggcgagggcgaggacggtgtctatccgccgctggccggcaattcgtccgtgctcgatccttccggcctcaatgccattcgcgcggttctgctgggcggcttcccgccgaccacggcaggcaatccgcggccgtactcgatgccacccttcgcgcagaagctgagcgatgccgacgttgcggccgaggtcagctatatccgccatgcgtggtcgaatgatgcgccggcggtgcatcagcgcgacgtgttcaagtaccggcatacgccgatcgagtgaaacgaaactcggtgtctcccgctgcccggccgtttgcgcgggcggcacgggcgtgtgcggcgtatattactccgggcggcgcgcaaacgccgggcccatagatggctgaccgcgaaatctttacgcgctctata

SEQ ID NO: 63834 - DNA, 1233 bp, Arabidopsis thaliana landsberg
tatcatattactggaagcgtgccacagggcttattatgcatttcatgaagaaaaataaacaattccaaccttgtgagaagacgcaactagaaaatcagcattaagcttctggacatcaaccaccatgtgaggaacactttgacaagcatccactagaactttcgctccaacatcgtgtgcccataccacaatctcttcaataggaagagaagatgctaaacaaaaagaaacataagttagatacttaccttctttcatggaaaaattaaacacatatacaagccaaacaaattgaatatgatgagaacatgaaaaagaatctaccaagaacattagaaacatgatgaacagcgacgagctttgtctttggagaaatcaattctctcaacttgtttatgtcagggacttcatcctcattcaaagtcacaaactttagaactgctccagttttttgagatacaatttgccaaggaacaatgcaactatgatgttcagcaactgtaagtataacctgaaaagcttgcatcattcacaatctcatttggaagaatctcaacaagatggattgataaaagtaaagccaaacctcgtctcctggtttaagattagaaagaccccatgaataagctacaagattgatggcttcagtggcattccttgtaaaaacaatctctctactatcagaagcattgatgaaacgagcaacttttttcctagctaactcaaattcatctgtagctttagcacttaaatagtgtattcctcgatgaacgttggaattatagaactcatagtaattctgcaaagcgtccaatacagctgctggcttctgagaagttgcagcactgtctaagtacacaagctttgacccattcacttcctgaaataaaaactcaatcaatggtaaaattgcttaattttcaaatccatacaattcaaagttaatcaggtttatggaaagtggacaaacctggtggagaattcggaaatcttttcgaacgcgatggccgagagagacggattcggaatcagtggagatggtggcggaggaagcggcggcggcggaacaaacggatagcgaagaggagcaacgaacgcgggagaagctccggtggccgatggagatggcgttagggaacgacgggagtttcatagccacaccttccatggtggagaagacgaatgaacaagagtgagtcttcaaagtcacaagttcgaccacaggcggcggtc

SEQ ID NO: 63835 - DNA, 708 bp, Arabidopsis thaliana landsberg
taacaaactttgacgtcaccatttgaattcttatccaattcccattttctaacagaatttttcctctttttctctttctctttttcattccttagagattcttgattctcccacttccttctttagtcgttacagtctttgctctgttttcaaaaaacaaaagttggttcctttctcaactttttccccgggaaagtgaatgagaactaaaagggtttatcatgtttgagattccgggtaatacaattcctctcaaataaaaagtttccatttttaatcttctttcgaaattctgtagttttatggataagttagggttgagcaaacggggttattttgatttcgctctcaagaacaaaaaatggatattattagcagtaagtggttacggtgcttttagggtttatcattctccttcaatttcccagaaacggaaacgaatctctaagcttttcactcttcttctcaatctcatcgaagctgcttctgattccgctgaaaccgttagtgttatctccaaagatctaacagagtttctcagatccgattcagatcaaatcccaaatagtttgaagcagatctccaaaatcgcgaaatcagatgagcttaattcttctgtgatccgattcactcacgctatgaccgttggattgatccgtggaattgatgatggatccgggtcgggttttactgatcgggtatggataa

SEQ ID NO: 63836 - DNA, 709 bp, Arabidopsis thaliana landsberg
cattaatgaaataattgcattagaaatgaatcattcatgttacttttatttttatatcataaagaatcccatcgaattttagatatcgtaagtaaaagatacggccgtgaatgatacaaaacagaaaaaataaataaagatatatattggtgcatgcatttgggtgcttgcattggttttgtatacaaaattggcccggtcaatggtaatgaagacatgtatcatataaaattgttgtagatatatctaagattatttatttatgttggcatgtttaaagaatgataaacctacaaactcttggtaagaaataaaattattaactttcgaaaagaagaagaggctggtaactgaatgcattataaaattaaaatttcggccgccagtgactttttagtcttcatcaaaagtgtgaatacttagttctggtcacgcatgactcatagagtgaaaaaacaaatacgtacgggagacctgatactaagtttattttataagaaatgaaaaccaaattctgaaaatttgctacttaacttctctttttcccaacaatgcaaaattgaatatgaatggtgagataacaacactattaatacaatcattaggttatatatgcatgacatttatactattttaatttgtttatgtttatacgattatatattcgatgtttcggaagtgatgtgtcttatatgtttttaatttttct

SEQ ID NO: 63837 - DNA, 563 bp, Arabidopsis thaliana landsberg
cttacaacatctttggtagcttctctctttacaccaaacgattaagactccgtgagtaaaccaatcggaagctttgttatttgataatctgcggtctgttgcttcgagtttttgacctggttcggtggattttgggtggtgtgtcaaccgttaacgcatacatttttacagcaaataactcttgtggaagacctttctgatcctggaaattatggttttggagaaaagactgtaaatttctgaaccaacagttcttaattctatgaaatcaagattataaacacacaaaagaagtcaacctttgttctatagagatgtaacccacattggcgaaagagctgtttgaagtatggatccgatctggtgatgctatgatcctctttatccaaaacaaatcctgcagaaaaaaaaaaaacatatatagcagtttagtatcagatcataagaataccaaagtgagaatccaaaagagagagagagagagagcgaaaaggaaccatttttagcgagattctctttcacgacgaaaaacccaccaggtttaaggtatccctgagatcaac

SEQ ID NO: 63838 - DNA, 500 bp, Arabidopsis thaliana landsberg
  unsure (1)..(500): unsure at all n locations
tcttcttcatcccgacatcttcgggcgttttctggccctggtgatgatcctcggcgtcgcggtgatgatctatgaccgtcgcccgcgagacgtcctcgccgccgccggggtgctggccgtgttgtgggggtgcctgcttctgacgctgtcgcggtccagcctggccgcgctgttgcttggcatggcggccctcgnnnnnnnnnnnnnnnnnnnaaccaagctcgtgatcggcgccatggtcgcggtggtcatcgtcggcgcgatcgcggtggccgtcacgcccaagaccttcggcctcaaccagggcctcaatggcgcttccagcggacgcgcgagcctggtctccggcggcctcacgatgtttggcgaccgtccgatctgggggtatggctccggttccttcgaggccgagtactcgcaccagaacggcggcacctgcggcgaggtgtgcgcctcccacacgatcgcggtgacgatcgccgccgagcagggactgatcg

SEQ ID NO: 63839 - DNA, 145 bp, Arabidopsis thaliana landsberg
tcgttttgacatttttgtttcaaactcacttttcaccttctttatcatctctttggcttctgcagactgttgagtctttccaacatctccactcatttcttctcgatatggcgatagagctttaaagttaagaaacattcatacc

SEQ ID NO: 63840 - DNA, 370 bp, Arabidopsis thaliana landsberg
gtccacctcgttggagcttaccaagtctttgctcagcccatctttgcctttattgaaaaatcagtcgcagagagatatccagacaatgacttcctcagcaaggaatttgaaatcagaatccccggatttaagtctccttacaaagtaaacgttttcaggatggtttacaggagtggctttgtcgttacaaccaccgtgatatcgatgctgatgccgttttttaacgacgtggtcgggatcttaggggcgttagggttttggcccttgacggtttattttccggtggagatgtatattaagcagaggaaggttgagaaatggccacgagatgggtgtgtttacagatgcttagtgttgcttgtcttgtgat

SEQ ID NO: 63841 - DNA, 492 bp, Arabidopsis thaliana landsberg
  unsure (1)..(492): unsure at all n locations
ggttgatcgatattttcagttaacaaacaaaagcccaaatggcgcgtaatcggagtgtcctatcttttttggcggacacttaattctaataaacggcggcagaaaatgaactctctgttcaccgccttccgccgcaacctcctcttaaaccctaatcctcaccgcaacttctttcttcatagattgttatcatcatctcgccgttcatccccgctcattcccgtcgagcctctcatccaacggatacaatcacccgccgtacccgattctacatgtactccaccgcaacaaaacaccgtctcgaaaaccgatctctctactatatcgaatnnnnnnnnnnnnnnnnnnnnnnnnnnnnnnnnnnnnnnnnnnnnnnnnnnnnnnnnnnncggaatcgaaccgagnnnnnnnnnnnnnnnnnnnttgttcgatcggttaagttcatcgccgatgttgcttcactcagtgttcaaatgggcggagatgaaacct

SEQ ID NO: 63842 - DNA, 1055 bp, Arabidopsis thaliana landsberg
ttattttaattagctcttcttttatatataattttgattggctttttatatatgattcaaaatgaatatacaatgtttaaatatagctgtggcttgtgggcatggaccgacataattgaaaaacgttattattttgctaaatcaatatagtgatacaacatgaaacccacgatttgtctggagaccacctaaaaaagctcttatgctccatcaattgttggttgttgtctacttctacctcatgtatgaatttattgctttttttttggtctatttctttagtttttatatggtgttgctgaaaaattaaatatatggattgtagcataagttgggcctacgtgatattttaggcccaataaaagttggggtgaaacaattaaagtatttcctaactaaaaagagggttcagaatgttgaagaaacagaaacttagggtttatgtggtggatgaatgatttagcagcgaattgaagggtgtggtggaagatggagttttgtccaacatgtgggaatctgttgcgatacgagggaggtggcaattcgagattcttctgttccacatgtccatacgtcgcctacatccaaagacaggttcttttttcaattatataccttttgaaagtttgtgagcaaaccgttaaaattctctcctctgttcctgagtgctttggaattttgacaggtggagataaagaagaagcaacttctggttaagaaatctatagaagctgttgtgactaaagatgatatacccacagctgctgaaactgaaggtattttcagtctcttgtcttctcttcttctaattttaggactgtgatgagttggttcagagttgatctcacttggggaaagagtagagtagacttttgtttcactttctttctcatgttgggattgtttggttttaacagccccatgtccaaggtgtggccacgacaaggcatacttcaaatcaatgcagattcgttcagcagatgagccagaatcaagattttatagatgcttgaagtgcgagttcactcggcgtgaggaatgaactgactgatgat

SEQ ID NO: 63843 - DNA, 518 bp, Arabidopsis thaliana landsberg
cctggccgatcccgtttgcgacttccgagacgtcgtcggagttcgcctcgcagaaatcggcgatctggttgatgaaggagatcttgatggcgaggaaagcgcttgctgcatacttgatgacttcagcggcattgcggccggtatagaggattggagcgccggtggcgcgaagcggctcgtagagcatcttcatcttctcggtcgcccagggaacatcgcagccgacgacgacgcgatccgggctcatgaagtcatcgatggcgctgccttccttcaagaattccggattggacacggcggcgaagactagatcgggacgcgaggtgcggatgatcgcttcgacggcatcgccggtgccgacaggcacggtcgacttggtgacgacgacgaggccgtcttcggcgctgagcgcgatctctgaagcgacggcataaacgctcgtcagatccgctacgctgccgccctggcgggtcggcgtgccgacggcgatgaaagcgaaatcggcgcctttgagcgat

SEQ ID NO: 63844 - DNA, 1183 bp, Arabidopsis thaliana landsberg
tggcgaaacggcttaatccaagtctctctgttgatgaacttgttgctgcttgtgacaatctggattcagtttcgaggaattcttctgttagcgagaagcttaaaactatggacggtgatgatgataagcttgagactgggaaaatgaagtatactgaggaaaatgtggatttggttaggaatattataagaaacaatgattattatgcgattttgggtttggaaaagaattgttctgttgatgagattagaaaagcttataggaagttgtctttgaaagttcatccagataagaacaaggcacctggttcagaggaggcgtttaagaaagtttcgaaagcgtttacttgtttgagtgatggtaactcgagaagacagtttgatcaggtggggattgttgatgagtttgatcatgttcagaggcggaatcgtaggccgaggaggagatataatacgcggaatgatttctttgatgatgagtttgatcctgaagagatattcaggacggtttttggtcaacaacgagaggtgtttcgtgcttctcatgcttataggactagacaaccacgtaaccaattccgagaggaggagattaatgttgctggaccaagttgtttgacgattattcagattttgccattctttctgcttttgttgctggcttatttaccctttgctgagcctgactattctctgcacaagattcagtcttatcagataccaaagacgacacagaatacggagattagtttttatgttagatcagcatcagcctttgatgagaagtttccgctcggtagctcagcccgagctaaccttgagggcaacgtgatcaaagagtacaaacactttcttttccagtcttgtcgcattgagcttcaaaaacgtcggtggaacaagaagataccaacccctcactgcatcgaacttcaagatcgcggatttgttgacaggtaacagcttttactttacctccacatttatgttttagatatgtcatgtacttcatagatccccacgtatcatgtttactaagctcctccacagttagaagccgagttgaccaatctttttaagatcttaacaaatgaaggcttttagacaggttaagatcgtaaacagggccttacacatagaacccatatctctcatacaaaacgtggaacccatacataacttattac

SEQ ID NO: 63845 - DNA, 463 bp, Arabidopsis thaliana landsberg
ggcacgagtttgcatgatgatcctaaaggcctaagggtgaaaacttggccagaaaggggcgaaatgattgtatacagtgagcaaatgccaatctgagtgatgataaacgcgcacctcaatggagtaataggcagctgaatcagggtgactccattggctttaaacccacgctaatactagtgaataagaagggattcaccggtgggactttaattaaaggaacaacctacgacggctgtggtctaatataatacaatgctatgatcacgatggaacatgtttgccgtatggaacagtgtctgcttcaaatatgccttaaattggcatagaaattcatatttttcgctctgtataaggctgccatcttatactaatgggtacctaggacagcttacctctttgaccatcacgtgatatcgtaaatataattgtcgaggcattttgcttgtactaatttactacg

SEQ ID NO: 63846 - DNA, 1767 bp, Arabidopsis thaliana landsberg
ttccttttccctccattcatctgcctctcgatcagcttgttcaaatctttcaggctcctgaaaccatttagacaggatgatagagttaataactcaactactgctacactgcaatataagctaaacagagcaaacaaatccaccttagcacgcatctctgcagcacaccgtctctttcgtttcttccacagtttgttccttattgatttcttcattttgcaagtcaatcttactgctgcagatttctcttcccatggactattctcatcaacaacgaacctaaaaggctcaagctgtgctctcaaggtagacatcaaggagttagcagcatccactgaaagcatttcctgctgtcccaaatccatctttctagcctctaaatatctcaaacactctactcccgaatcttgtactgcattttccacagaacctttggcgtctttgatcatcttcaatgcttccagttctttctccctaaatataccccagcttataagaattcaccaacaatgaactagattgtgattcactatctataactatacccagaaatcgaaactccgatactcaattgattcattaacacaactatacaacttcatgtggctttacttacattgatttagccaggttaagcgtatcttgaagttgtttaagctgatcggttatgttctttgtattccaaaacataccacaacgaggcgggtctggaggtaacatcggagcccagtggaacggaggatttggaggctgaaaattcgccggattcatcctggagaccctcttaccagaaaaccccaaaatccagcgatttcagttccacaacctaatgtgagactcagcaacgaaaacaaaaaaaatggatatatggaagttagcttatagattaaaaaatcactaccaacatggaagttgataatcgtgagactaattgagacttacagatagaaaatttctacggaggagactttgccgagatccgacgccggcaaaagcaaaacagagcgcgcgaggttgagaagatgcttatgaaataattgggctttaaatttatacactttggcccattaggaaaaatataagcccatttaaaaggttttgaatccgccactaaagttcattgaatcacaaaaataggatgctaatttttaaagtttagaactaacagtacttttccactttttcctgcttttgtgattttattctgttattgacaactttaaagttgctcttgaggatactctagtttttctgagtcaaccactaaaagaaattgatagacccacccaaactaatgacaaattgacatattaacatgtaagacaaccttgtcaaatgtcactggagttttcctctaatcaacaattccatttatagagttaaaaggtaattaaaaccagtggattttttattgcttaaccatttaaaacggttctaaaaataaaacacaagtgtcaaagattcgaacatcgattccaaaacagtaaacaaacaaaaaacacacacacaaatataaggaagagaaggcgtagaatcgattcagaatctgtgaattacgaatccatagagagaaaggttttgcatttgcaacctttctgaaattgtgttctgtgcatttccttgcactttggataataggaactaaatctctttctctggttcatcaatggcggatcaaacgaagaagagatacgttacaagcgaggatttgaaaaaacacaacatacctggagatttatggatttcgattcaggtaaagttacgacg

SEQ ID NO: 63847 - DNA, 693 bp, Arabidopsis thaliana landsberg
ctgcaggtcgactctagaggatcccctaccagctcagatcttcctttttcaatgcccaatctcacatgcgcctcaagagtttcatcaaatttcgccttggcattgccctgaaccattgataaaaacagcatcagaaatgaaaaccatacgaacaaaagggatgcattgccctcactcactcaacttgtaaatcaactcagcaacaacaactattaccagtttacagaatccacaaatctcacagtaccaccattacacaaaacttgcatgatctaaactaatccacaacgtctaacaattcttccaagactccttatgtttcacattatatagtcatatgatcctaatcatcatagcttcctttataatagtcatttgaaatcccctaactacgaaacaagcaaaaaaattaatcctttgacacaaaataaataaattaaaagaaccctaaatagtgtagcttccattctattacaatggcagctcatattaagaatcctgaccttaatctctctaatggcctccatgagatcgaaaataggtttctttccatgcttcaactctggtttaagcaaagttggcaaaggaagtgaagaagtatcttcttcaacagcatcagctcttaaaaaccttcttctagctcgacaaataaattcaatcctcttcctctgcctctccatctcctctggagtt

SEQ ID NO: 63848 - DNA, 375 bp, Arabidopsis thaliana landsberg
ggtgctcgtagacttggtctttaaaccggttaaggccggtttgttcctcagacgtatcgcacacgcaaccaggaagagggttagcataaaaattctcctctaactttggactcatgcctgcctttcctggctgcctaagatacggtgctcctattctatgctgatgcattttcttaacctttgacgagaaatcttcccaagatatgagtcctgcatcgagccgatcaatcaatcttacgaatcttttgctgaaaaaaccaccgttaaatgtctagtatagatcgcattgctagtttaacaatctttcatttctttccctaattttttattcttcttttttctcattactcattttcttaatccttattctttatt

SEQ ID NO: 63849 - DNA, 1342 bp, Arabidopsis thaliana landsberg
tgtaactattttgtaactgtgtgaacattgggaatttgctgatgatataacattctaaaccttcccgatattatgcgcggacaacgaaatagatttcacattatacatatccttgtttatctttatgtgagcagacagatcagaagataatgatttgattttctccataatccaacattagcttctctttggtttcccttgatttgttactcccatatacgaaaacgattaccattcaagtttttagtatcggagtagaatttgagaatttgagaggtatttatacaacagcagttgcctcataggagataacaacgtatcggagtaaatatagagaaacagaagattgacatatatcctaaatctaatactatttaaccttctataaagttattttcatgaatacaccatatggccaacacgaacacatattcagaaatcacattgagcaaaatcgtcaattcacgcaaacccacacgaaagacatgtcgcaacaatcagccaatgtcacgtggtcacaaaccaaattaaaccgaaccaaaccctctttaaccggaactcccactcttgcaataaaataacaaaaccaatgaaccaaaatcgccgccgaaagggcaaaaatcgttaataaacaaaccacacggaagaagatgagtcccgtcacaatcaaatcaggccaatctcacgttatcccaaaccaaaaccaagtaaaccggaaattccactctttcttttaacaacaacaaaccaaaaaacacgatcgccgccacaagggcaaaaccgtcaattcacaagtagatcctgtcacgtgatcccaatgataaaaccaatcctctctctctctctctcttttctcgtagtcctttttcagtcatggcgataaccgcatacgacgctctcacggagagacaaaaagcccccaaagtcctccttattaacgattttgccatctcttcttcttcatcatcaccacctttcttcaacctcgccgcaactttccgcgacaacatcagatcgttcctccgtgaatatgccgagattgaagattacaccatcgacggagccaccgtctctactattttccttggaagccaagcaaatggcgtcgttttccctctttacatcatcgaacaacaaatctctgattcttctccaaaccctctctgcgatttctgtcgatgctttggtaaataataaatcttaggttttgttttttcgttgttcttggtaaagtttcgattttggatcgtttacgtgtgtgtatatatatagggtgggtcatcactatgtaacgaagaggagtatcatatgataatcccaaaccgtgatgaatggaatgagc

SEQ ID NO: 63850 - DNA, 1706 bp, Arabidopsis thaliana landsberg
cgacttttgtcgaaaattctggttaccaccaatacataaaatcatcatcttgacttttgttttgattcacatatatatgtgcaaaggaaattaacagtttcatttttaattaaaaaccaaacgagttactaaaaaaaaaagcgatgtcaagctatcaacatttaactaaacgaatgtcttattttttggagaaaaaaataaattcaaagaacatatcaaagatcacttgacgtcacgtttgtttatttatgggattttgcagaccatgcatgttcttgattccaaattatgccaacatacaagaatcacttgtaaaattgtagcgtccaaatgagtctagcaactttgttatcgtgaccaagccatcatatcaattcatgtatgctaaattcgctgcaaattcagtaaaaagtatgtttaaaatgacataaacgaaatctgttatagtgttggtagtgagtgggtttggctttggcttcgcataaactaatgcatgggtcaggttatcgatccgacctgccaagatagttccgagtttaaaattacatggttatgttaattaattatgcactatgtatgattcataaaataatttcactggctttggacttactatttttttcttttcttgacatcactaaaacactattgtttgatatgtttctataaatgtattatttacacaataacaaaaaaaaagagagaaagaaactgttgaattggagaggaaagagagtggggggaaagatgtcaaggctggtccagctcaaatcgggtaaaaactattatcaaattccaattctgtccctccctttccccaaaaatctgattgtcacataccctaccaatcagacaacgccacgtggacaccttagacatgatggtgggagaggacaacaacatgggaggcacatgattttgtgtttattatatttctccaaaacacaatttttacccaaaaacaatttaatcggatcactgagcaatgagatgtttgcggatccaaatttaacttttaaagccttccttactctttgctttataacaataataataatacacataaaattggatttaattaaatagatgtggacctttttttctaaataatataaaagaaggaagaaaataaaataaataaagaaaaagagagagtgaagaaaagtgggtttaacaataatttgctgcaaagttagaagaggcttcagctttattaacttcttgtttgctttcattctctttctctctatctatcatcatcatcctcgtaatcctctcctttctccttcagacccctcctagttgctgtttaaacaaacaaaaaaagactgcttctctttcttatttctctcatcatcatcatcaatggttttatgagatttatatcaaaaaacattgaggagctagagagaaagagagagtgtgtgtgtagaaaaagattgaaacatcatcaagattgatggagcaaggaggaggtggtggtggtaatgaagttgtggaggaagcttcacctattagttcaagacctcctgctaacaacttagaagagcttatgagattctcagccgccgcggatgacggtggattaggaggtggaggtggaggaggaggaggaggaagtgcttcttcttcatcgggaaatcgatggccgagagaagaactttagctcttcttcggatccgatcgatatggatctactttcgtga

SEQ ID NO: 63851 - DNA, 220 bp, Arabidopsis thaliana landsberg
aaatagagcatgagtcaagacattttgcttaaatctgattgcaacttaaggatatttatattgtgattctgattaggtaacgtgtttgttaacataaagattactaagctcgcatgtggtcatgtttgatttggtgactctcctatattttggaaaactaagcaacaactctatagcgttctaatcctcacacacactcactctttgcccaactctatag

SEQ ID NO: 63852 - DNA, 580 bp, Arabidopsis thaliana landsberg
  unsure (1)..(580): unsure at all n locations
gtacaccggcaggtaaataagtaaaaaatagttatttttacatacctgatcacaaagcccgcctatgaaattcaatcccttagcctttattatcaacatcgctataccactggcaaccggtgcaaccggcggtttctttactgcacattctgtaaatacctggtacccctgcactggccaaaccagcttttaacccgcccaactggatctttgcacccgtatggacagcannnnnnnnnnnnnnnnnnnnctcggcttacctggtctggcagaaaagaagagaaattgtccattttccgcgtactgctgccatttatctcatacagctgatcttaaacctgatgtggtctttcctctttttctatgcacagcaaataggcctggcactaatagagatcattctcctgctgatagtcatcatcattaacgccagggtattctacaaaactgacaagaccgcgggactgctatatataccttacgcgctttgggttagctctgctgccctgcttaccgcaggcattttcagattgaactgacccaaacccgaatcaagtgagccgtgtaaaaaaactactga

SEQ ID NO: 63853 - DNA, 1146 bp, Arabidopsis thaliana landsberg
tgtctctcctggccaaccttaacccttaagcgaacggtgttcctttgcggattgcgatcgttccgtcgatcccttcatcgcccgatctaactctctaatccgtaaatttatatttcaggattgttccaactcttttgcttgattttgtttctcgttttccgtttctgtttatgattttgtacgattggagataagttagttattttattcaccggaatatatgatcggtgattttagtggtttatcggagagatctagaggtttatgattccgttttgattgtttgaattacttctctcttttttttttggattttttaatgtatattattaaagctgaatgatccattaatgattattgaatcgtgacaaattcaagcaaattagaaaatttggaatcactaatttcattttggtcaatgagagttgttgattagttgatttaatcctctgtgtttatttgtgctaatttatatggtgcttgtgataatccagtgtcggagattaaaagcagaggttttgtggtgaatcatgtctgatgtcccttcttgttctagcggtaatgatacaaacaacaatgattcgagtaacttcgaatgtaacatctgcttagacttggctcaagatcctattgtcactctctgtggtcacttgttctgttggccttgtttatacaaatggctccatctccattctcaatctaaggactgtcctgtttgcaaagccgtgatcgaagaagacagattggttcctttgtacggtagaggtaaatcgtctgctgaccctcggtccaagtccattccgggtctcgaagtgcctaaccgtccatcgggacagagacccgaaactgcacaacctcctgatcctaaccatggttttgctcatcatcatgggtttggagggttcatgggaggttttgctgctccgatggcgagtgcgcggttcgggaatgttacattgtctgcagcgtttggcggtttgattccttctttgttcaacctccatttccatggtttccctgatgcagccatgtatggagctgctgcttctggcggcttccctcacggtttctcgaatccgtttcatggaggacactcgcatatgcatagttaccagcggcacacgggtcgacaaggacaacaagacc

SEQ ID NO: 63854 - DNA, 197 bp, Arabidopsis thaliana landsberg
tggcgacgttctgggtttactagacagtaatacgttccagtttgagccatcctaagaggacaacagacttgtgtctgtagcaaggcctggagggccgaccatctatacgaagcctcttcatggatttatttccaagcgccatagactgggcgtgttccgatgcaagatcacaatcggctccatgatgctagttagac

SEQ ID NO: 63855 - DNA, 566 bp, Arabidopsis thaliana landsberg
ctgaacttctcgcaaaatcaaattagaatctttcttgtttgggtggaattagtttctactaatgagaaaattaatttctatctttttttttttttttgggttaatctttagctgagtggttgatatatgtaaatataaacttataggtggtgatgcttagtaaattagaagaatgaaatttgtattatccgttgaggaaaaaaaagaaatgaatggaaatcttaattttactatttatagactctttttactccagctttggagggagtgaaataattattttttacttggctatcctgacaagatagtcaattagtcatacttttggtctaacctttcatggaaccttgtcgacctgatattaatattttacttacccctttacttatcctaaaatggttcttgcagttttttgcgataaagatcaattcactgagccacagtatgtggaaaggccggtctaacaaattggtaaaaattaactatttcagttgagtatttttcttacgttgaggtctttggttttgaccatttaagttactcgtagatgattattaaatattgga

SEQ ID NO: 63856 - DNA, 1322 bp, Arabidopsis thaliana landsberg
ggatatagttattgctcatctctatttaagaccatttcagttttattatatagctgtatctaaagctgaaatcaccccttgccaatatacttcacctgctttatttacggaaactatttttttttatcaattggctcaggctatcactgctcttaaaaaaggagcttatttgcttaagtatggcagacggggaaagcctaagttctgtccatttcgcctttcgaatgtaagttgtgttgatatcattttcttttactcttatgtaagagtctgtagagtccttttgtttcgttatattttctctctgctgcttcctgctgtgtgcagcttcttgttgttctgtgtcaagtaaatagtctgtcctgtaactttcaggatgaatctgttttgatatggttttctgggaaggaggaaaaacatttgaagctaagtcatgtttccaggatcatctctgggcagcgcactgtaagttttgacatccgtagacatgtcatttaatctttccttaagctggctattaaatgttcagaataagttcgttagactagtattatccatttttcgatgcgtttatatggttggatatctaataagagtatcttcttctggttgtgtctgagctctactgtcatgattgtgagtaggatggcctcctaatgtgatctgaattgttgtttatgatttttccaagtggtgtatgttatgcacaaggctcttttcttagagtcgttttatcaacataaactcaaatgaagattacgtgcttatgctatgtttgattggattcatcattttttttcatttcacttcagcgtggcaggtcaatcttgatttgactttgcatgtttcatgcatcatttgcatgagccagtttccatagtcgtaggttgcatatttggaccttgcatatctagtgtgatattctgacaagtcttgcaatggtgtttctcttgcagcctatttttcagagatatccacgtcctgagaaggaatatcaatcgttctcgctaatatatgacgagaggtcactggatttggtgagctttttcttatagtatattcttttcctaatttcctctatgaaatcattattccatcatttaaatgcctgttattattgaaagttcattaattaggtgtcagaatttcatttcatagatatgcaaggataaagatgaggctgaagtgtggtttagtggtctaaaagccttgatatcccgttgtcatcaacggaaatggaggaccgaatcgagaagtgatggaacgccatccgaagctaatagtccgagaacatatacccggagaagctcccctttacattc

SEQ ID NO: 63857 - DNA, 505 bp, Arabidopsis thaliana landsberg
ggccatacccgagcgtgggggtaaatcctttacgtcagcaccaacatgagagatccgtgttgagtgtaactggaggacgtgctcatcagggaggggcacctgctagatcaccaccaaacttgctggaaaaaactatagagagcataacttacttactcacggagctctacaagtgctcttgcgtgaagacctatttgcttcatctccttattctcagagattgagcacaacattcatgaagagcatagatcgaattcttgaaacttatcatagcgtgattgagctgtttcgcttcgtgagccgtgatctttgcatcagcctggtatacatgtttggctgatatctttacaatagtacctctaattcggagaaaccctattgtcaaatcagcatagcttttctttagcttcaaagaagtatgtcttattgactttaccgccgacactagcttgggcagcaagaattgccttgttcatcatggtgtatctggactatggccactgaa

SEQ ID NO: 63858 - DNA, 1380 bp, Arabidopsis thaliana landsberg
atttggtgaagaatctttgagaattgggtcaaatgaacatttaagaatgttacaatttatcgacatgtcaaagattggttttactttggttttcttttccattccatgaatgtgaacttgcttacttaaaatatttaactgtaattttataacattactttacgatatgaattaatttagatttaccagcaacacatggtattaggattgtgtacctttgtaattgttgatatatgagtcacttgttctaagaacacatttcattactttggattttgaaattctaagttgaaaatctttgttttattttcttggctagatttgatgcgtgtcataatctaatccaatttgaaaatatgtaatatgttgtataaaaagttaatatgccaacaaaaggatagatcttagttggtggaatcaacaccattagatatcaaattggtcgtatgcaatgtttctgtataatatatcatttgtctactgaataatatatatcataatgttaattgttagctttctgtcgggttatgaagatggtattggtaggtacgttgtataacataagaattgaaaacgtaaatattattcattagtagacagctcataataagcacacccacacatgcatgccacaagcaatagaggttttttaaaaggttttcttcttttaacaaaagaaaggcctttctttgatttcaaattttcaatgatattaatattgcaataaaataccatgatataacatattttagatttatattaatgatttatgaccccaaaagaaaaaatatattaattaaaatatgtagttcaacaataacctcagcctatttggctattatacaatcttgttttgggaagaaatcaacacatgcttatgaacttttatgttcctttttttgtcttcattagcaaaagataaagggatcaaaccttttttacaaacacttgcatgctagtatgcttcaggttcaatcaccgccccattagattctctctccctctctaaagaccacacctttatgttccctctatatctatataagacgcaaacacagggaccattctcttcaaagacgagaaattataagttaggaaacgacaaagaccgatctatatatatatctcggagcaatatagctagcacaaacatgtttcagattgggtcaagctccttctctatatatacttctgatccatttctgcagatttaacaatgacctctcttttgttctaacttttcttttctatgtatgaaatagaaaacacgcattattcatgaatgtgagcaagaactttcttatcaacggaatatcctcatcctcatcatctcattcaacttcaggcaagtaccatcttaatctcaaaatctggataaaa

SEQ ID NO: 63859 - DNA, 1854 bp, Arabidopsis thaliana landsberg
gcatggcttgtttatgcaatcatttgataatgccttcccctgttgtttgacgtaaatgaaaatgtggggtcttgtgtatgcagatcttcctgagcacaagatgggctattttactcaacctgcacgttgagatgttccgtgtaaacaagtatcctttcttccagacatttatcaccatcgtgtggctgttaaagacattattatgggtttgtctatctgagatatgcatgctgctcaagtcccttgtgccatttgactatattgcaagcttttggattccttagtaaattcagtgtggaagatattctccaagttctcatagtcttcatcgtggagtctctggagttggattttgcactactttttcctgagcggtatattcttctccgggttctacctgttcttgttgtcttagcaacaccatctgagaaagataccgaggctttatacaagagggtaaaactcaacagattgataaacattttcaaggtattgagattcatgttatacctgttttcgcattcacaaccaatataccgcaaagccttgtttccaagtcgctaattgtcatatttgttgtgtgtttttcggctatcagaatgatcctgtcattcctgcgtttccagatctccatctttctcctgctgcaattttgaaagaattgtcggtatactttcaaaagttttcatcacagactcgccttctgactcttccagcacctcatgagctccctccacgtgaagcgctagaatatcctttaatattttcactgttacttgcgtattttaactattatctggattattgttaaccgtacacatgctttgaaaattgcaagccttaacatattttacatatcagaggcactatttgatagtcaatcacattggagctctccgtgctgagcatgacgatttcacaatccgatttgcttcatccatgaatcaggtgctcaagctatctctatccctggagctccaattttcttgttcttattttgagtctctaggatgttgttctcacttgctttcatgcagttattgctgttgaagtcaaacgatggagcatatactgaatggtgcagagaggtcaaaggaaacatgtacgatatggttgttgaaggtttccaactgttaagtagatggacagcacgcatttgggagcaatgtgcttggaaattctctcgcccatgtagggatgcaggagagactcctgaagcctccggatcatattctgattacgagaaggtaatacttgtgaaatattttcgaaaagttttatcttttatggtaacaagttttggattcttttaaataggtggtgaggttcaattatactgcagaagaaaggaaagccttggtagaacttgttggctatataaagagtgtaggatcgatgctgcagcgctgtgacacattagttgcagatgctttatgggagacaatacatgccgaagttcaagattttgtacagaacacgttagccacaatgttgcgtaccaccttccgaaagaagaaagatctctcaaggtgaattggttttcctttattttctttctgtttcaagtccatgttctcttaaacttaagctttgcatattgttaacttatcatatgtatggttgcatttcaggattctttctgatatgcggacactttcagctgactggatggcaaataccaggcccgaacatgagatgccatcttcacaacatggaaatgatgaaagcagagggaatttcttttatccgaggcctgttgccccaacagcagtacaggtttgggtccatttcaagattattttaagttcaaccactgatggtttctttccacagccttgaactttccgctttttt

SEQ ID NO: 63860 - DNA, 602 bp, Arabidopsis thaliana landsberg
  unsure (1)..(602): unsure at all n locations
tgaattcatcaaccatctggtgatctattatattcatataagttattttgattgttaagatggatgtattgttcaataatcattgcagttgcgatacttctattccggccgcgatcactgctcccaggcctctcgggtcctggtcaaaacgttttctttcgaaatagaatgcttcatcaaaacctatcnnnnnnnnnnnnnnnnnnnnnnnnnnnnnnnnnnnnnnnnnnacttttttctgtacagccatccatcccctgatggctttttcgcggtaggatttctcaagccatccttttcttacgccctttgccattgccagtgtaaacatggcagtgcaggaagtttcttcaaaggaagccgggttgttcaatacctggtgccacatgccggaagcatcctggtaagttgccagcacagacatctgctcacggaaagcagccagtatttcagagtagccgggatgtgatgcaggcaggtgttcgagcagttccgtagttgcccaggcgatccagcccgttgcccttccncagcttaccnnnnnnnnnnnnnnnnnnnnnctgaaccatccatgcctgtataaatttcgtccgggatcgagc

SEQ ID NO: 63861 - DNA, 1227 bp, Arabidopsis thaliana landsberg
gctccattttaatggcaattgcgtagtcctataatactatatttataatactacgttgtccctcctttcatactacgttttgaagaatatgttaaaaattataatactatatttaaaaacaagtaactaataaatatatttgtttaaaaaatgtaatcgttttatgatcaaataaattgagtagtcctataaacaaaattttaaaacaaatgaggtgctcttatatttggtttaccctgttagttttccaaattccaacgtaataatttataatatctagcttctctgtttttctttttctaatattgttttttttttgtgaccagcaacgttaaataagagcatttggtgatcagcagatttttgtaacgaactgatgatcctccgatgagatgtgatttgacttttcgtaacacatgcatgaaaaggacaaaaacaaatatgtagcttgaatacatgcattaacaaaaaaaagaacaaaggtattcaagctaaaacggtttgtttgcttggcctcaaagcaggctctccttctgatgttttgcttggcataaattacattgcatatgtccaaatgatatttatgcccctgataaattgtggggcgtggtattgtggaaactagatgttgggatctgggaaattgccaggaacattcgtaaataaatctttttttttttttgactccaacccttatggctagaaaacaaacacttctcattttgcaatagtaaattatagctatcttttactctatttaagtgattttgcacagataattatcctgtaaaacgagaggaaactacgtgttttaaacttttgttacattatttttttgaatgttttagatgaacacttgtagagtttatatatagtttaacgatgaaaccgaccgaagcgtttttttttaagtttaattttcttttgattgtccgcatctttgttaaacaataaagaaaagtgaactgaatcatttagtcatcacaaatcccattagaagccaacattggtttttgtatgaaccaatcaattcaataaacgtaaatttcaccagtaaaataatataaccaaagcatactgcagaaatctagtagtatgaaaaacacccgagggaaatatatatatgaaatcgccatatatagagagcattcacgatttataggctgtatctttcacgtcaactaaataaaggcggaatgttcttccacatcatctagttatcaagat

SEQ ID NO: 63862 - DNA, 2074 bp, Arabidopsis thaliana landsberg
tctccagagaaacgatatagcccaatgtcaagcatgaacttcataggacaactgcttaattctatactagcataatttgagataagggaagagcatatcagcactaagcagtttgagacaaaattgtgcatcctattgaacaagtgagaagtcaataagtgatagaaaatcatctaaagcaaagggagaccaggaaaagaaaggcctttcttaccgtttcgttatagaaaatttggtctgcttaatggatccttcagttgagacagttccttttattacatccaatcccaaatctttcagcgcccgcatctgccacacacatatgattcataagccgaaaacaaggcaagtttacatctgattctgatagtaaaaacgctacaaatcaagaaaagctaaagttttttcacatcgataagatagaacaaaaaaccaaaacaggatatagaatccctcactgtgtcaataagagccccaagacgatttccaaaactgagttgtacaatagtagcttcagggtcagcatcctggtctatcataaccattggcattggaacaacgtcgtcatcgtcttccgatttctgcgatcaaattttccagcaaatgtcatctcaaagcacacgtgaacacaaaactcatacgcagaccgtttccctattaaacatgagaaaatcaaatcacatatcaaatagcatacacatgaacacataacgacatactccctacatttccttgctgagcttctgagagcgaacatacatgcaagtcaaatcaatagatccaagaaacatccgacgaaacaaaaaaagactgaaacaagttactgaccggatacgatggagtagcggccgaatcaatgctgttaatcgaagcatatacacggtttttaatactgcatacaaaacgaacaagcacggaaagatatatcagcaacctcagatacatcatacaaagaagaatttggaatcggtacatagagaaaccaaactaccaagcaacttattctaattatctaaagaaaccataagaacttcaatctcgaaatcgaaatttaatctacctttgctttctcaaatctcttaagttcaagattcataacgaccaatacaactactctaaacgagaatctagtataatagttccgtttgccggatcgttcgagcacatacagagcaaagatttttagtcgaatcaagcttaatagtagctgaacataaaagacgaagcaaagattactcaaatcgatttagcagaaggagcaagaagactataaatctccatcaattctagtaaaggaaagatctaagagcgagacacgacgcataagaaataggaaagagcctaacctcttcgtcaagagagacattacacctccgacgaacttccggcgatcatcgaacaaagcaggcgatagatctggagaagcaatttgagcgggaaaacgagtctgcctactgattgcagaagaaggacgcgaagctaacgaagaagaaaactgagtaacagagaagatggaactcgagaacgccattgaagtttgaaacaagaatattttttttctttctttctcctccgaagtcagagagaacaccttaatctataaaatggcgagagaaattggcgtttagtgataacaaaaagatgatggagtgctgaatctgctgatgtgatgtgtgacgtcactatcgagatgctccacctatacatctactaagcttttattttatttttattttatatggtttctacaagtaactaattgaatatttgcaaattgctatagaataatgtgatcatagtgagacgaatgtagatgcaattatttgcttgctgacgttcaaacttctacgctgcaagttaccaaatatcttctcttttctattcttttaccctccaagccaatcggactggtttgctgtttgcagattttttaaattaaacctgctaaagaattttaaaaaatattttgttttgtctctaataaaaagtttaaagtaaaaaaatcttgtataaaaaattaaaaacttttattcgttgaccaaagaaaaggaaaaaatatctaaaaacaggggaa

SEQ ID NO: 63863 - DNA, 1081 bp, Arabidopsis thaliana landsberg
actcagcacttgccatcctacatggtttgttgttttattttatcgttcatgtggttctcttttcttaatatattgttacaacatgtttgttttgatgtttaggtttcataagcttgtgacaagatgttattgcccatcaacagaagtggcaaaaagggctcaaaaagcaggacttgaaacatcacaaatcaaagtttatggcctccctgttcgaccttcctttgtgaaaccagttcgcccaaaggtcggttttggaatcattcctagctgttctttgttgcttccgactcatccaaatgtaatagtatctgtccgaaaaaatcgcaggttgaattaagaagggagctagggatggatgagaatcttccagctgttttgttaatgggtggaggagaagggatgggtcccatcgaggcaacagcaagagcacttgcagatgctttgtatgatgagaatcttggtgaagcagtaggtcaggttcttataatctgtggacggaacaagaaactccaaagcaaattaagttccttagactggaaaatccctgtccaggtactctacatttgtcactcttcataccaaatccacaatcttaggcgtttgatgttagtcactgaaactgtgttctttatgtcataggttaaggggtttataacgaaaatggaggaatgtatgggtgcctgtgactgcatcataacaaaggtaaaccgaacagagccaagcaagcatataaactgatctatatagatttagtgttacattggttaatattttcttgatggggaaaaataagagtgatttaaaagtgattgtttctttatcaatgtttgtgacttgggcttgtgcaggctggtccaggcactatagctgaagctatgataagagggttaccgataatcttaaacggttacatcgctggtcaagtaagttccactctaaaaacttcccatttatatgttgggttcaggttttcaattgtgggggtttttgattgtgagagcaggaggcagggaatgtaccgcacgtggtggaaaacggatgtgggaaattcactaaatcaccgaaagagatatcgaaaatt

SEQ ID NO: 63864 - DNA, 2043 bp, Arabidopsis thaliana landsberg
  unsure (1)..(2043): unsure at all n locations
tctttttgtaatccgtagatattgcaaacagtgcttggtctagagtcttatcagtcacctgtaggcaggaggagagttcatagactttattatcgttctgagaactcggaagccatccaaacgtttggggtaacacccatcttgttgttggagctggtttaagcgctgcagttggtgtgactggacgagcagttgaagcagatatccgtgcaggtagcggtggatatgctgcttgctacacctacagctgcagcaaaggtaaccatatctgattcatgtgtctctagccaaaatagctttcagtaggttaatttttggttaaggtttcttagacttcctttccatgtctaaactgtgagatttcatgggccactctaaatctgcaaccattctaatatttcaggtgcatttgtcggatgctcgcttgaaggaagcatattcacgacacgtacaagtgagaactcacggttctatgggagtcagtccctagctgcgtccgacatactccttggctctttgccaagaccacctgctgctgctgcactctaccgtgcgcttggcgatctgtatcagaagatgggaaggtgattttaacagttgaagggaatttgtaattctgactccaatgatggaaaagttcttgacctggaaattttcttgttggtgtgcagtgaaactgttcggtctccagcaatttctccattgtctgaagactaaacttgtggaattggcttcatgtctttggaagaataacaacagtattcttgtatagattcatgcaattcttgaatgtacatagtttggtagtttgtggtttgtaaataaacatacattattatctgaagttataaattgtttcaaacttaaacccctgcatttttttctattttttttttagattgtaagactagaaacagctttacaagaaccataagacacaaaagaaacattaatctctctgtcattttgttctcatcttacatagatctaaagcttgtgtggcatgcttcacagagttttaagaccaacacatcccagttatgggctcaagatgcttattcatattgaccactgagccagtctttaaagatgtttctttagcatgcagagttcatcttgattccatttcacttagcaactttcttcttcctcagaagatcttccacttggagctcgttgatcttagcagcaagaatgaagtcgttttctgtcaaaccacctgttgcaaaagaatccgatatcacttaatcagcacttgatgaggggcttcgtaaggttcaggcatttgataagattcatatcttcatataaacacagaccatgattctcaccaatcgcatgtgtccatatctcaattttcacattattccagccgaccagatgcaaatctgggtgatgacctgcatcattatcggtccatgcgtgagacaaaatagtaacagaacttccttgagctatcttcttgttttaatcttattcagaaaggtcacagaacacatgtgctatactgctgatgatttgtttaccttctgattcagcgatatcagctacacgtttgaagaaatcaagccccttagtaaaacttttcaccctccatgaccggtgcagctttaatgtatcattttcattggccaaatcccatccagtaacctgtgtaaaaggaatagttgagggatacatactttacgacctcacctaccataataagaagtacaaacannnnnnnnnnnnnnnnnnnnnnnnnnnnctttgttcggtcatggcgcgcagatccttcgaattgcatggcacacactttttggttgataaatctaagacaaagatataaaaacagagcgaaaagaataccatattaataaccaagttacaaggttttggagttttttggttacaagtgctgaagaatataaacatcaaatccatcttttaaccaattgggtaaagaagtggtttataagggcagcaacaaggaaatcatagcaatatattctccaccccttcaaattttttagaaacgacattacaaaaaatgttagtttttac

SEQ ID NO: 63865 - DNA, 697 bp, Arabidopsis thaliana landsberg
gtcggttgatattgaaatgtatgaaactcgtctttgcttgaaatagaagttttgaatccaataaaatcttataaaagcatcatgcacattaattaggctaacatgtaaatacaacgagaattcatatgggtgaccaagattcacatatttctaatacttaacagaaaaatacaaatttcaaccaacagtaaaaagagcatgtagcctagaaaataaatgcaatgaacttgccaatgtaaattcaatcgcctcttgctgtctttttagttatctttttcatagtaacttttagttgattgataactttatggaaaatataattcaaaacgtcatatctctttcacacaaacaaaacttacctatttgatcaaaacatttttcacgtggttcactgaaccagaaagacataaacatttctttttcacctctcatctattttactatttaaatatcaaacccacttagtattactaaatggttttattttggcttctttcttccaggttacaaatctaatttttcctacacatgtttttccaccttaacgaactttcactattggctgattactgaaaaacacataatgctgaatggtaacgcttttcttggataaccaggattattaaatgaaggtgaccaccagaaacaaattggcacttgccaatagaattatattccaaaaaaaagaagagaagag

SEQ ID NO: 63866 - DNA, 536 bp, Arabidopsis thaliana landsberg
tatgtatcatatggattaagtataaaataaaataaaaattcatagcgatcaagtatttgttattgatgcaatagaggggggatgtcgacaaagaaataataatcgagggaaatgttgctactaaaatagtagtggctaaaatcactatagtcagtagacgtcgtcacgtcgacttacctctgcgcaatacgacatcgtatttccaagaaaaggattgtgagttggaaaaatcgaagtgttgagaatcaatctaaagggagggatgttttaatccagcaagagttttatttatagtactatatgtacagtacatacactcattagagaaaagggcaaaatatgtattatatgttttccactctacatggcctaattaatgattaaaactcatggtcttagtcctatagtagtggtaaactcaagatagattcgaacatgaactgaagatagagaagtgctcattttcgctaaactcgaaatcgccgccacctccaaacaccatgagatcctgagaacccaaaacatcgatagatgtc

SEQ ID NO: 63867 - DNA, 547 bp, Arabidopsis thaliana landsberg
aactatgtatttcttccttaccatttgtcccatttttaaaagcttaattatatattcctatatttttcctttttctcttacgattttacattttttttcagttgatcatacaatatattataactaagaaaggaaacactaatgatttattaaaaacgtacgaaacataaacgttgaaaaccatttgataaaatctatatccaaacaagcatttcagactctactatttagagcttaaaacatctaaattaaattaaacgattatataatgaataactattgcttatataaacgtttagaccatctaaaattgcataaaagtcaaattagcaacctctccgtgaagtgtttttggttacgtgattgattaattagatattagtgcttttacataaggtaacatgttaaattctcagactatacaatttaaatccttcccacatgatcttctatgttgcggattaatattgtatgttgagttgtaaatagccagatttatgagaaaaataataatctgaagtgactgaaataataatcgattaatatt

SEQ ID NO: 63868 - DNA, 521 bp, Arabidopsis thaliana landsberg
cgcattatcaaattattccaagtgcaccgagcaaaagagcatcagctgaagaatgatattaaaaaattccaagtttacaacataattgcatccatttctatagccaagtttatagagttgtgactatggttcaagtccttattctatgagaaaaggcaaataaacccgtgcaaaaagcatgtattattaaaaaaattggcaacagaatctgtaacccaatctagttggcaggctggtatactacaaagccaaaaggagaatagaaattgtaccatctgcttgtcatatcgcttccagaatagcagcatgtctctggatatcttcctagtgcgaattggtgcagttcttgggattttgtatgatctacccaccttcattctgacctgtgaactcaaagtaatcaaatgagagatctaatcaaaaatgaaatctaagtccgcgattaacaacttagttttcgggattatgttgctaatcgccgacatgtaatttggttcttcttttataaaaattctaccaga

SEQ ID NO: 63869 - DNA, 529 bp, Arabidopsis thaliana landsberg
tttttatctgacaccaagtttaatgagatagatcctcttatagcatatcacttgttagcagttttaactattattaaattttctttttcatgtcttcaatttttctgtaacattatattggtgatattttcggagattctaaaacctagattcatagtatatgttagtctagtgttgaaatgaatttacctgacatgtgaatgaattattcgttaagacttttgacattattttgaattggtaacaccaaatacgtttaggttggtaataaaaaatttcgtccacaaaaatatgcacgtaatgtataattcaagaccgatcgttaaccgatgaaaacccttagattacctaataacagtgatctacaagtcatgcatcacttaaataataattccatggccaatgacaaagaggatccataacaaaaccctagaaatagaatttaagtttgttcataagattccaaattaaataaccctctaaaaacaaattatcagcacatgaattaagtggttttaagttttataaa

SEQ ID NO: 63870 - DNA, 547 bp, Arabidopsis thaliana landsberg
ggatttaccaaatcggcttacaaagattgcaatgtatgtagctcgtttaccaaaaatttatcatctttgagactgagagtgttccaatattgttcttgtcttcctcaaaatttataggaagtctaagattcaactttggggggttgaatattctttacttaagagtttctaatctattcttgcacacatgtcattggaagatattaatttacctttcaatcttttttttatcttgatcatctttttctaatatgcacacgtatatttttggtttttaattactagtatcttagacataatgttgggataaaacttccaactgtgcaaacggataatgccatctataattttctaatcacaaaattttacatattcgaaaaacttatttggatttctattgattgtttcattctgaattcacatattatttatttggtaatattcaatagagaaattctgaagctttattcaaaacaaccactggcttattgacagctttgttacctaagtcatatagatcttaattcatatattcaaattgtaattc

SEQ ID NO: 63871 - DNA, 544 bp, Arabidopsis thaliana landsberg
agaccaagtataaacaagttgtaaaagagacggtcaaaagtcaagtaggttaacttcaagatccgaagaagtatttaggttagtaacagttgctaaaatttataaattgaaaaatagcaaaagaatactagcaaaaaattggtgaaaatgtaactaactaattatgttagttttaaaaccaaaaaaattaatacaataaataattatacaaaactttcaagatatatatatatatatatatgtatataatctaataaataacatgtttatatagcgaaacatattacatatatctatttgatgaattagatatatgaaaagaaacatgatatagaaaaagataaagctctatgtaaaactgaaatcacataagcaaacatacatacataatttatttcatttttattttttacattggacgtttaaatttatgtgtgaaaaacatgtaacggataaaataattatttgtttgtaaaagctaaataaaagaagaaaatcgtcttcaaaaacatgatatatcacatagatcaaaatatcctcttga

SEQ ID NO: 63872 - DNA, 304 bp, Arabidopsis thaliana landsberg
tttcccaaacttcttctattatcaaacgaagatggtgttaattttttatttttctttaagttttattgtgggtatgaacacaaatctaatattaaatatttttctatagtttcattggcggctcaataataaaacattagatcattcacttcaatatatatgacgtaaacctttgaatataaaatttacacacccccataaaatccatgagatgtaattttctgggtttggggagaatatgaatcccacccttataaaaagaaaaaaaataccccgccttatcaaaacattattgggttttttt

SEQ ID NO: 63873 - DNA, 328 bp, Arabidopsis thaliana landsberg
caataactctcaagctcaggtctgtacatcttatttttttttctaattacttaaaagttccatttaaaagccttcttattattctattttctatatctcgagtgataaatttgggaattttaagtgaagggactgtgctcaagattggcaagatctgtttttaaaatttcatttcttcgtaagtgtattttcgttacgataagatttagttatcaagaggactatttaaatcgaataatttactcttctatttcgtattttagataattactctgatttgatttggtttagattgtattgatttcctaaataataaatcgccaaaaaa

SEQ ID NO: 63874 - DNA, 1492 bp, Arabidopsis thaliana landsberg
  unsure (1)..(1492): unsure at all n locations
aaaaacaccatcacaagaaatactataagttggtcaaaacgtcccctttttttgcaactcatattgggttgattctttttgcagacgtgtgcaatcccttcacagccttcataacacaatgagttcccaattggctgctgctgagcaactctctgagtgtctctcaaaacaaatgacacatttgaaaatcgattcacctgtaaaaaagaatgtgaagcaggagttgttcgagacaattgggatcccttacgatgcttctttcagctcaccagatgcggtaaaagctaaaaatgcatcttcagcaaaaaacctattactctcttctatccccgcaagtataaatcaacagtcaagacaacgtcagtcatctgctatgaaaaattctgaccctgaaactgctaggaggagaagagaatcactagacagggtaatttttgtatgaaatctttgactcagtactagccctcacggtatatgcacatattctctagtatattaaactgtgaagaatttatatgcactcctttatttatggtgtatcctgacgtgtggctctactttttgtgatctatttacagaattgggctgcttttgagcctccaaaaacaactgtcaaaaggatgcttctgcaggagcaacagaagacgggtatgaaccaacagactgtcttgagtgagagactacggtctgcgaataatacacaagatcgatcactgcttcgcgtgaaagatcatgcatcacctgtagtctcctcgaataagggtgagctaagatatactgcagagtgcattaatttgatctcgaagaatgtttttgtgtttcatttgttttttatatctactatattgcttctctggtttgattgtgtaacactttgagcaggtattatggaatcattccaacaagacacatctgaagctcaatcaaccccattcaaaacgaggccacctatgccacaatctaacagtccctttaccatctctccaatctctgcgtcaaaaccaagtttcaattggtctggaaataagtctagcaatacaacttcttatgctgaggaatctgccccatcgcagattaaggatacaaggacagtttcacaaccagggggatcaagttttcttccgaaacgaccagtggcctcgactgtacttgaacagacagaaaagaaggctggagaattcaaattttccgaagctaaggccaatgcgtttgttgaaacagctgctggnnnnnnnnnnnnnnnnnnnnnnnnnnnnncaggatctgattttgaatctagcaaaggttttggtgctcaattttcaaaccatgtcgtctggtgcaccagcatctagntttttcttcaaaatcgttgtnttggtttcaattccagtagcagtatccctggtgataaatttacttttcctgctgtaacggcacctttgttctggtactccgcttgattccacttccaccttatttacagcatcatagntncagtgtcatcctctcc

SEQ ID NO: 63875 - DNA, 622 bp, Arabidopsis thaliana landsberg
ctccgatccattttgtctatgttcgtagtatatcaactaccataataatcaccgaaaatggatggtgtttctaatagaaaaagggcttaaaacatatactcaccagtcaccaatgtagtttaatcaacagtgtgactattcttctacccacatctcaacaagctcgaccttattgggtctccctcactaagtgtgtctcctatctttctctctcaatcactccatattttggatccatgtgatcgcgcgtattcataaaattagtagggtttaagatacatgttaacttttttttttggccaagatacatgttaactcaaatgtgtttattcaccaaaaaactaaggtagttttcggaagaaaatagtttaacaaaaaagaaaagaaaaatgtgatctcgacgtatttaaaatctgatatgtttggagaaaactgaaatattgtattattcaaagcattttccacacgatttattcaaatcacatgcccatcttcgtgagctattcaaattaacttgggcttcgaaacgaaccatgccttttaaaagcctatttacaatgcccaccacatctcactaaaaaatccagtccccgagtccgtcccttacaagtacataagagta

SEQ ID NO: 63876 - DNA, 540 bp, Arabidopsis thaliana landsberg
gggcctcttgtaatggcccattatagatttttcaccaaatgagacatacgtaatttcacattggctatgtacatatatactgttgggattgatataaactcaaaatgagtcaaataatttattcttaaattaatgacaaatctcgatattgtgattccgatgtgattgtgaccttacaatgttgacgacaaatctttattccaaaattatgccaagacgtggttctgctatactctgacgcaaacattggaacgacaaatattgatttcactacaaacttttgaactctacataagatcatatattagaggttttctaacgataatttacgatttttccagtttgaggcataatatgaatttgaggttcggatggaaaacctcaaaatgttatgatgtgattcaaaagcaaaacattaatgatacgtaaagtcgggtttctactatttacaagcaaaatcatgattctacagccaaactatcatgtcataactagttgaattttatcagtccataacttacacgcaatcatttgtataat

SEQ ID NO: 63877 - DNA, 716 bp, Arabidopsis thaliana landsberg
acgttgaaattaagaaccaaaatttaatttaaaaaatcacgtaatacagtaaaacctatcaataaatgcatacgatgcgacttgccactgaaaagagtttgaaccatattaatcttatttctccttaaccggattcggtttaccatagaccaaacccaaaaccggcttcaactaattacactcaattcctcgggagattgttaattaaacagtaaacaaccctctgactcactagacttctgaatctttcacaaaagaatacgtctttgtaggcttttgctttctaccgttgcttacaagcttcctctccaccggattctccttcaattctccatctttatttgtgtaataagaatccagaatttgcaataacgagctctctttaccttctttactcatcatctgttgcttcttcttctctgggttatctctctctgaaccagaatcttcttcatcctctgagagtgatggttcatatactggaagctttttggtcgtcgggtgggtagttgttgtatcagaaactggaccaagttctgcgaatgccaagtccgaatcatcttcttttgacttggcatttggtgaaggagttgaaggaaagatgtatccagatgctattctcactccatgcatgactcgaatcagagactgcaggttgtcgtaaccgagcttgtcaaccgctaaatggtacccatactcctctaagaagtctttcc

SEQ ID NO: 63878 - DNA, 114 bp, Arabidopsis thaliana landsberg
aggctaaacattatcatcaggttgatgcttaagcctaatttcctatctgattgaacaccttttatttttctgaacaccccacagaaagccggagccttgattaaattgtcaccg

SEQ ID NO: 63879 - DNA, 511 bp, Arabidopsis thaliana landsberg
gtctatgaaaacaaaagaaacaggagtgcacaaaagccaaaaccatctatacaatagggtcaaaccaaatccacaaacacacacgaaaccgaaggatgataaaatatcaatcatcctccaagaaatcataatgaatattgagaagttaagtcatcaaaggtcagagaaaacatcagtttttaatagtttcagatccatcgctcttgtttctgcggtgtctccttcagacctgccttacgagcattggttagcagaactctatgagctaaccttcctctgtttcctatagacagcctaactctctccatccctacattaatgccgccacctcttctcattggttgctgcctcggggaaggtttcatttgcattctcttttgtatgcttcgtctcagtatgctggtcaacgtcttcccattacttctatgtagcttagggctggtgcagagcacttggttagcgccactcttttcatcaggagaagttaatgttgatgtgattggaatgaatg

SEQ ID NO: 63880 - DNA, 487 bp, Arabidopsis thaliana landsberg
  unsure (1)..(487): unsure at all n locations
ggcgtaaggcccgcagccagggcttcgagctggagagccaggcggcgctgtttcgcggcctgaccgccaacctcgcggtcggctgcaacaggtccaagtcgctcgagacggtgaccggggtgttcgggccgaccaacctgaacaccggcgcgccggtgaccagcggctacgtggtcagcctggagggcacccccctcaccccgatccagcccaagtggtcggtccaggtcggcggccgctacgagcacgagcttttcaacgacgtgcgcggctacgtccgggccgactaccgctggacgtcgaagtacaccctgagcttcccgggcacccagtcctacgcccccgacgcggcccagggcatctcgaccgatcgcctgaacctcagggccggngtcgagttcgccggcttcgacatcaacgtcttcgcgaccaacctgctggcgcagaagggcaacatctccggcgggcgctccggctgcccgatctc

SEQ ID NO: 63881 - DNA, 461 bp, Arabidopsis thaliana landsberg
ctatgattttgctgttcttctaaaaagtttacccaccaaattatctaatcattttctatacccaaacgtgttcctgtcttttttttttctctcacctgattttctgaatctttgattagtaaatctattattttctaacttatactttacgtctccgttgaatatgtattgataataattaagtactttaaaatgctaaagttaaaaacttatagattcttcgtattaaaaggggaaagatagagctctccctcttatattgatgtgtcactttttaattctccaatcgaatgtatgcatatggattaaacacaaaaaaatcagaaatatattataggaaaaagtatcatctaagtaacgagtttagctagttgtggcgattctaaagcaacgtcagagtatagatgggggtagatacattggttcgtatatgaatcttgaaggaatggcgtttttacatt

SEQ ID NO: 63882 - DNA, 116 bp, Arabidopsis thaliana landsberg
acgaaaacgatcaccaaacatgcggcgtaaaaccaaaaggccaaccgaaacagggacacccccaacttgagcacgtttcacgaacaagcggcaaacggcacgagcggccgcaacac

SEQ ID NO: 63883 - DNA, 170 bp, Arabidopsis thaliana landsberg
tttttaacttttcaccacatgatgaatatttaattccattcacatttgtgaaatacgtcgcagaggtggtgagctttttacatatatgcataagagattacatgatcatatgcgtaagagacaggcaaccgagtcggaaataatgtatccagcctgctttgaagctacca

SEQ ID NO: 63884 - DNA, 772 bp, Arabidopsis thaliana landsberg
gttccctatgattaggtaccttgtttttggagcttatcactaatcgcctcgaattttgaataacgtcggacatatattcacaatatccgagatatgttatcttagccatattcaagaaatgcgattgtttttaaactttgtcggattgatgtcatataacttttgtggatttatatccagaggaaaaacaaaatgaaggggttttgacatcagcagagcctctggttcttgggcctttggtgctggggccttttgggtctttagaatccatcgtcacaattcaagcctcattagtcatttctgtacagaaaaagcctaaacgtcctacgcaatgttcatttcatttttaacaagaaaactattatcccaaaaaacttacattaatatttttcatcgtcacaatttaaattcaaatgtggaaaatccaggatcctagtgatttaaaatcgtaataacataaagaatcactgtcagtacgatttatctactcattgatcgcgatggaccaacttaatcagcacacgtatctttctatcctttctactcgtattttataatcttaataaaaattgattgtatccttataatatatttattctcctttgtcgtaatattcgatggcaatgtatgtatatagaaaataaacatgagtcaaatctctcaaaaataaaatacataactacaacaatataaagaattgtttttgaagaaagtttctaagaattcgactgtgcccgctcacataattaactaaacgttatgataaacaaaa

SEQ ID NO: 63885 - DNA, 530 bp, Arabidopsis thaliana landsberg
cgagggtgaatcaataagtgcatatgtgtctgtctgccagcgataagtcgttgagaacgcgttggggtttcacttgaagatatatatatatatgtgtgtgtgtatgtatgtgtatatgtcaaattgggcacggtacatgtcatgatacaacaaaaactatgtcttcattagatgagaaagctcgcttcgctttgcaaaactgccatcaacagcctcaatagaggcatgaatgcggccacgccacatagccttaaatacaagaatcaaaaattttaacccccaacttttcgttcaacagtgaaccaactcggcgattgccgctctcgttcatttaccatctctctctcaggtaatgctgtgtctatatgggtatgattggggttgaatgccatcgccctgggcgtggaggggttgaatgtcgatcggatacgcacgggctgcctcttggaagaaaggttcatttgagccacgctttccagcggcacaagcttatttgtcgttgcttgctcctttgggccggaataccctct

SEQ ID NO: 63886 - DNA, 1677 bp, Arabidopsis thaliana landsberg
tcctcgtaccgtttaactaagaaaggttctcatagactcatacgtacatacgtatgaattaagagcgatagttactaatatagttttgtttacctgaccaaactacacggcacatttaatttgaccaagttcttctcgccgttcagacaaccatgcatttatatttttctcttaaaaaagaaatttttgccaacattttataacgtcatcaaacgagcttttacttgacgtcatcactacgctgacattcaatcatccaaagagaaagttcgaattctcaaatcccaactcaatgatccaaaaaggaatttttgttttcacattgccttgcgtctttctttctttcttaaaacgaatcgtttgttaatttctatcgattgcggtctgaaattgaatttacagttggcacatgacatcatcgttccacgaaaatcctccattatttcttatttgcgccacaaaatcaaaacttgaaaagtccaccttgttgacaaaaaaagtaaaataaagttctaaaatgtttttgaccaattttcaataagaaatagtaatcgttataaaattgtagtaataaaagtatttataaaaaaaaaaagtataaacacgattttggtggagttgtggcatgtaactacttactttactcgtcacttaaaggtctgatttcttgttgtctctaaacgtgaagacgattcaccgaatccaaatcctcacaacgacatgttcttcaagtatatttgactctcttataaacctaacgagacaagtttatgaatatgttcctttgtttacacttgtaagaaaaccgaaacccatttacatgtctctgtttcgtcccttcatatagtataaaagattcaaatatatatctggagattcttatcgtacaacttttttttttgtatcagtcatattggaatgaaccattttggtacatgccaaaagctgtgaattttcaagtaatttagtggatttacaaagagggttgtcccgcgagatttaggtaccaaaatcgttaaattcttcttctatgctctgttttgtcttctttactatttccatgttttgttctgtttctcgattctcactttgttctatatcttggtttaaaatatcagacacagcatttagcaattgctttgggagaacatttatgaaggaaaaaagacatttgatgcctgaggtttatagattatacggttgatcacttagaaacaagttgcttcgaagcgtgagaacaaaaaacaagaacacagattacataataatatgggtcaagatgtgaacttggggtactggttccgcggagaagcagcatagcttctttcactaagaagatcatcattttcggcttcgtttccgtctaagcacagaatgttgatgttgtcaacactcgggtcagatgagctcacagtgctgctcgtggccaccggagagcttgagacactacccggccgacttctcacactgtacattgatgatgccggaacttttgtcacaagcggccggaggtttccagtcatgcctcgtcttatatcctacacaccaaagatcgacaattgtgttattattaccagaaagaactttaagaaacactcttcttgcgagtcagatcatccagcttgggcccaatgtttaatctatagcgagcttgtgagaaactctcgatcgaagatt

SEQ ID NO: 63887 - DNA, 467 bp, Arabidopsis thaliana landsberg
  unsure (1)..(467): unsure at all n locations
gcttccatagtaacnnnnnnnnnnnnnnnnnnnnnnnnnnnnnnnnnnnnnnnnnnnnnnnnnnnnnnnnnnnnnnnnnnnnnnnnnnnnnnnnnnnnnnnnnnnnnnnnnnnnnnnnnnnnnnnnnnnnnnnnnnnnnnacgattcctacagattcggttttgtcatgttgagaatccccagaacttggttccataaattcataaaccccccagcatgattagtgactcttaaggttcttagattacaataagcgtctttgtctttaagtatattattgactttgtaaatcgcaattattttttaaatgcttttgctgatttccaatctgattctggtgctctctcttttagataaaaggaaggctgaggatgaattggagacagtgaatccaaagaagaaggcgagtgttcttaaaacctatttttcttcttcatagtgatacaatgactattttgttttcactc

SEQ ID NO: 63888 - DNA, 1771 bp, Arabidopsis thaliana landsberg
agactaccagagcttataaaattttgcactaacaaaaattgaattcctgaaaaaggtaaggggttcgcatgaagaagaatgagaataatagaaggagtatttttggtaataaagtttgaaccaatgtgaagaagccacgcagatagcgttacctggacacatgttaccaaaaatggggacaggtggcgtcgtgaaatgtcgtaacgtgacagacagtcactatagagaaatggttgcgtcggctgtgtgacgctgatatcattcccacgtgtgtgcgcgcgtgaaacgggtccctattgggtccaagtgctttgtggcgcggcgcgtgagccacgtgtttagagttctgcttactatagaaccctgtaaccaaaacaaggaccacttatttccattctacgtatttattagatcacatacacattcgtgtctcttttttttcgtttatggacaaaaaaaactctccaaataatcgtctgaatattttgaaagtcactatgtagttatattttgattaaacgcatttctcaccctgatttgttattcactcgttaaagaaaagttaatgtatttgataaacctagttgtattatttaatgggaaagggcattatggacggtagccattaccgttaaagcgccgttagctgcggcatatgagagttgggtgatgtgtcaggtcagttgaactgtcgtctttttccatgaaacttcgaggagacctgattgggtttcacgtgtctttttgacgccgtcaactccttttgtcctttttttggtataactaaaaatcatgtaattagccttttgaacttgttatcgccgtccttcacgctccttgcattccacactcgattttgtttctttatacgagtaaaaggtaacagcctcatttactctttgattgccgacataaaaaaagtttgtttgtaaattcaaagaaaaaaaattccgattgtgtcttgactcttgaggcattttagtaataatcgattgattatacaaatcacgttagctttttgatacccaatcacaaaatagtaaaaactaggggaatcaaaagtagtaacattattatcgcgtatctttcaatttcataattgttttaacggttttattattctgtcattttagtgttatttttcttccgctatcaattcttcgaactgaaatttatatcaattgttaggtaattttgtctaaattaatgggcttacatgaaggcctgatcaaaattacactaaagagacccagagtatatgttggcctctgggcaattagcctatattgaacaaacttatctagatatggtttttgtttagaaaggatgataactaaaccactaaacaagagaactagtcataaaaattaaaaagtcaaatatctatattattgtttatcaaatataaggtcttggagattttacatttgtaaattgtaacaatacaaaaaaattgaaaaaagccacacccttgattatacacaactatgaatagaaattcctcttaaaaacttggggaaaggaatgcgaaaaaaataattaaaaaggaatttataaatacattttgaaagcagactatgaacataaattaccaaaaatcaatgcatcaaagaaaataaagaagcacaaaccaatgattccatctctgtaggttgtctcagggtgggggattaaagatcacgtgatgattggcctagccatctgcagagagacataaataaacccattttgaaattttaaaatcaaatcttcattaagaagacactgaagc

SEQ ID NO: 63889 - DNA, 1350 bp, Arabidopsis thaliana landsberg
taccaaggtgtagtcaagctcctccaaaagcttttctccaaattcatcaactattagctctgcgttgcaacccagtttctgtagactgaagccatttaagaaggaggcgagggttcggaaaagaaagagatcccgataaattataggctctatttgtggtctctgcacctgtatatgcataaaaataaatgtcaaaaccaaagctttaaaacagtttcagtttgataaacctgtatgaactctgtagccacaataaaattttcatttagaagaccttgatagcaacatcctctccagtggcacgtagagtagctcgataaacttgtcctaagcttgcagctgctattgtttgtgaagaaatcttgctaaatatgttctcaagaggttggcctaactcttcctcgatgatattgaaagcaacctacaaaagtccttcaccacttagcttcaccaggcgatgtgtaaatgataataagaaaaatatattgctcaacaaattccccaaaaagacaagacattttacctcgtttgggaatggaggaacatcatcttggagtatgcagagctcgttcatgtagtcttcacggatgatatcaggcctatttgcgagaacctgccacccatagaacagatattaaagaagaaactttgagaaccctgttaatgccattttctaacaaaaaagatggatccacatacttgtccagctttgataaatgaaggtcccaaattgcacaacaggttcctaagctgcctagcacgaaaggggacaacttcctcatcccttccaaccaaaaaatcatacgttaaggtagaccaatacaacccaagagtccaaacaatctccacaccccttgaaactagagacacgactgctcctcttgattccagcactttactcctcacctgattaccaaacaccagtatatttccaattcaaacaatcaacaacaatatacatgcaaatcgattccatctaagtcataagattcaactaaatccaaagaagaaccagctcataagtgaattaacaaattgcaacagagctcaaaacttgaaattgactgatactaggaaaaacagcaatcatacagtctccggagaatactttcggaatggaacgcaaacgcctcgctcaatatctagctgctcaagcgcggagctcgatttccctactcgcacacctctctccaccccgctcatcgccgttgtcattaccgatgcatccgtcgaattccgaccaccaacatccgtcgccgccgcagtaactgagaaattagaagtccgtacagccgagaacgtcctgctccgccgcaactccacggcgttgagggatcgcaaaagagcatc

SEQ ID NO: 63890 - DNA, 1913 bp, Arabidopsis thaliana landsberg
gtttattgtaggagttcaaaattttgtaagtataaactctaaagtgaatgtggtagccagcttaaaagtttttatgagactttcccaaagaaaaatcaagattattatcattaatacattaccattattggtcctctttccacatctctacccaattctcctttgcctctttgagtccaaaaagagagttagtcttggccgggtccaggtttgtggacaagcttccgtacgcaatcccaagagccgacgaaccaaaggtcacgagtgtggtcaagtatggaacccacaaaggcacgtcccagacgtttctatccttcaaaacttcgagtactttcaagatcgccactcccaagcccagtggtgttcccacagacaccacaatcctccccatcatcctctcgaacacttcttgaggtatcgggggatcgtcttccgggtccgggtctggccggccgggtttttcagaggttctagaagattgaaaccctttaggtccagcgtggagcttggattcccatcttggtttgttgttaggatatagggtttttggattgtgagatttggttttgacggttgttcttgagagagatgataatggtagtaaacggtgtgagcacaagagagctctcatttctatttcttcttctaatgtttttctttatttatcttatctacatgtattatatggttttgtctttagggataatgcatattttgtttttatctttgggatatgttcattgccacacatttcatactatttatccttctttatatctttttcttcatttcatgaaaataataccgttggaacgttttcttcaattttgtattttaagaacatggaattagtgttcagaaaattagaaaaatcattatttcttcacttcaaatgcacactacatataatataatccaattttaggaaccatttgatcttgatagcttttcgtacgatttcctcaacacctgcaaggcaacaacgcaaacaataaacaaagtgcggaattaacttccagcgcaagaaagatactgtaaagcaatttcttgaggctcacggtacgtaccctactaggcgacaagtaataataacgctcattattactgtccggagagagtatggaaggagattgcgctggtggagaagcgtggagtgttggtcggagtaacagagagtgacggtaaggtgaatttattggtgaccgcagcagcgtagagatcatgatgctcggcgacagaagacttgagcgatacggcgagataggagatgccagctccgaagcccaagtggcagtttccggcgaatttcccgacattggcatgtttattgttatcctgtagtaggaaattactgtaaattgcagtctattgtatggattgataattggtgatcataccttttatgaagttcgacgtactggtccgtctcatcatatatttcttccttcaaggttcatcaaatggttaattcaatcacaaacgttatgttagatgactaacatttgtagtgataacatattatagattacctgtataagttcctccataacatcttccagagttataatcccaatgacttcttcatcttcatcagaaatactatcaatgcatcggattggactttgatgactagtttcgctggagttcaacgcgggaatactcagaaaaacgttggcgtctttattaggcgatcctgaaaaattacagaagacgtaaattttctcgtctcaaaacataatatgatttcgaattttatgctctctcatttgtatacgagtctcttaaccattgatgctcttttcatggactggagtgttggtattagtgtggttcttggtcccaacgacagcagccatgtggcttcgacctgtttggaagatgttgaggatgttcgagagaggtaaattcaaatc

SEQ ID NO: 63891 - DNA, 620 bp, Arabidopsis thaliana landsberg
  unsure (1)..(620): unsure at all n locations
tacagcaagcgaaaccctaagacggaactcgaaactgcaagggaataagcatagaattttagaatctctgtcaatttgaaaaaatgaagaaacaagtgatgaggagattacctatgaggccattgctttaagtcatcttctgatggtttcaaaagaagatcaacaaaggattttcctaaggattcgtttgagttaagtggaggtgggttctcatcgattacccaaattttgttccttgcaaacccatgttgatccagtgatccacaatccccaaacttcacaaacacacacacaaaacttcaatgaaaaagtgatcaacaaaagatctcagttcagtgagcgctactagtaaattttacctgcggataacaaatctgaatccctccacgcattgattttgggggtttgaatatagcctaacaaattcataacaatataaaaatcagatttttactttttatgtttcagattcttcacaatgtatcagggttttgtagtgagatcagttaccttattgctagtgaaaagaagctcttcgnctagtttattcctccatgaaatcacttgtcctccatgtaaacttatctggaaaatccaacaccgaatacgccaaacaagct

SEQ ID NO: 63892 - DNA, 1661 bp, Arabidopsis thaliana landsberg
agaaactgttaccttagctaaggttgacgttccctcataaaataagtatcaaatgtttgaaaacaaatcaaaccaaagctaaggttgatccggacaaaagctccataagtttagagagaacataaaaggagaccaatatatctctccgacactgattcacatttgacattgtcctcagtctagtcgttccatctgcaatacaaatttcagaaacttttgatttgtgttcttccaaaatcgatttttatatcaacaatgagactgcttggcaatactacgaatagagaaaccagagacaagtattggtaccttccagagaccgtcgttgaggtaatgcatgttgtcaactcctattcctttgttaatgctctttctgtgaacatacacaagaaaagtttagcgatgcgaaagaaattttatgagcaaacaggggaaacacggccaaaattgatcctggtgcaggtatgtgtatctaagggaagaaggaatatcaataaagtgacaaagatagggttacttggagaggcctggagccaagagactgtattttggctaagatacgaaagtatatcaaagcacatgtttgtattttcaaataaattccagcgaaaaattgacttacatgtcctttgctgacattttggtgaagcctattgctaaggcatgttgctttccttctgcatatatggcctaaacaaatacagattcatggtttaagatcagcatatacaaacaaaaatgcaacccagggaaatactgtttttattcataccactggcctttcagcctcgacttcttgatccagaacgcctcccggggatgtaagaccaggacacattatgtttgcaccagacagaacaaactttatggcacctctatcaacttgaaacctcttcattatatttgggtctgcaaaactccaaacattcagctgccaaatttttgacattcgtggctaattgaaaaaactccaagtttctttctatgtatcattcaagtatgtaaaagttagctgaacgtggtgttttcaagaatattttatactcttctggtaacagccaatgccaaaaccttctcactatgataagggtcagctaacccggaaaacataaaacaaaatatactaaacaaaaatcctggctaaccaatcatacgtggaccttttatatagttcactcgcatgaaaaaagccaaaggaacaacaacttacaggaaccaaaccccaggaagttctaaataactcagagaaaagtgtcggacatactattcaggtatatgcagtatttgaaccaggtaagttctactgcagaccacagtaagactaacaggtgtgaagaagagtgattgtatgaataaaacacccagatatgttatgttttgataacaagaccatatagcatggatggtgtgaaggaaaagtgatattacattgatgaagaagccgcagtgttggcatgtatggcccgtcacggatacagaagaagagggggacattgttgacaacaactagggtcagatggtttgggctgcacgagaaatatagtcaggaatactgtaagacatagatagtgggtaaaagacaattcagaaaacaaaacaatgaatatgaaattgatataatttacagaccacttcactacgataagaggaatctttttgga

SEQ ID NO: 63893 - DNA, 505 bp, Arabidopsis thaliana landsberg
taatcaactacgtaaaaataactaatcaaagacacaaactcaagtatcgatctccggttcggtatgcttgtccgacctctctggttacatgcgttgaaactcatcccctaagatttgacgttttcaaaactaaaaagactcattatcatcacagctgactagtattagcacatatcctcaacaacgtttgacatgttcattacgtctatacattcattctccttcttactcaaaaatatgtaccaataataatacgaattttgttaatttgacatagatccaattctatgatttctttaattatttaattctaacttcaaactttgcaggctctaccattcctgcatgatggttttctcttcaaagttatgataagcataccctcttcaatagggaaaagtccccagagacaataatacctcgaattgtgtttcaatcggatcatattccaaatagctcctcagctcacatggcaaggtatcttcataatcgggaaaggtaatga

SEQ ID NO: 63894 - DNA, 596 bp, Arabidopsis thaliana landsberg
gttgctatttaagtttgttatatgaaaagctttcaaattactaacaattatgtttttcttctttaaaccaccaagacaaatgtgcctttttacgtgtcatcacatatgaattatgttatatatcgatgtgatcaactaggttaatgattattaggtctacgtggttattctaattctcacccgtgaacggcttcgtgatcaacaaactttatttggtttggagtttgatagaaatgacatactatataagcagctagctctacgtattttagactatgtaaacttggatttgagtattaatgtatatatgtaggtatgaggtatatattgattgaatcatactacctaattgttttgaatacatggatctgtgtttggtctttagtttttgtttgttacactttatacttttggttatatgtggttgttgggcacgataccaagagaaagaagagggtatgtgtggtttagatttggcgtatgagtactttagtagtcggtcacatatacgacaaaaaaataccatttttatgagtccacactttcccaacgtcgacaaaaaatgtcaaataccctaatttaattatattgggggg

SEQ ID NO: 63895 - DNA, 717 bp, Arabidopsis thaliana landsberg
atcttattgttcctatatcttcccagtagtcattaaagagataagcctgctcaaaaaatcttgttatcccttgatataacgttagtcattggacttaaatgtgtgcttaatatgaatgttactgacattcacatagaattctttagctgagaagggtataatctctgaaccaaagtcgtttgctgtggggaaacgccatctgatttcaaaaacagttgcaagatatttgttctgcattgttcttagaatgcagtaacagaatatacagtagaactaacggtgttacctcaagagatttaacagtatttcttttttgaaaacataaactcccattgaagctatgtatggtttcttttcagcttcctccttggaaagtcctaaaatagttgtgtctactgcctaaggatgccccgaggttaaaacaatcttcaggttttgttccgagatgctattattgttcaaaaatgattttccgaagttttaaacataccattgctttcaggtcgtctcctttaggtttttcactgaatgagataactcttcctttgtcatctatcttcataagcccaaaatctgaggcacgtctaccatgtaaatagaaagagactataagaaatcatgatctttgattcagtatgataagttggggtaaaaatgaaaggatctatatactcttttgcattcacctgtcatctattggtatgcaggaaatgctta

SEQ ID NO: 63896 - DNA, 777 bp, Arabidopsis thaliana landsberg
  unsure (1)..(777): unsure at all n locations
tcttcctgctacttatattcaagaaaatagtaccaaactacaaatgcacttgaatgatgtgacccgagttgaaatatgagtagtgtttcaagaagatcattaagtttccctttttttttcttttgaacaactaagaggttctgccatgagccgtacatcttcccaagtctaataccaaagcattttatacagttttctcccaaataccacccgaatcaccaatgatctttaggctttgtctgaaatactttacgagttgagttaatgacacttggtaagagattcgatattataaaaacaaagaatgaagataaattcaaacaagagtttaagaaaagcaactcattaattcttttaattcttattaaaaaaaggttctttaattctatgtagcaatttaacaaatgactttctactctaagaatcaggtcaacgactgtttttcgaagacaataatgtttttttatttttattgtttttgagttaatatacgcatacttataatatcatgagaatattcttaactttttaatattgaacatgtatttaaagaagaaaactgacacaaaaatattaataaacatcatatttatatttcctttttatgaaggaattttcatcccttcactctttttttctttttcatacctatcacattntgatcattatattattccgtttgcatgttggtattttaaaatgttgatattgaccactttttgtttattgtatttttatcggttacagcggtatatttttttaccataatagttagag

SEQ ID NO: 63897 - DNA, 317 bp, Arabidopsis thaliana landsberg
cgagagacggacaccgtataaacacatcgactttaaagatacatttagcttgattgtatggaaaattgagagtttcataaactatgtctaaagacaaatcaatcatccaataccaccgctaaatcacctgatatttatacatacctcaaatagcttcgaaagaaccgcagcacatgcgtgaacaccgactatagccaaacactgttgtcatctctacttaccatggttgaaggaccacacaaggcattgatgacggaagactcaaattcagtgaactaccggggctttctaccagacaacattggccaatgtgccat

SEQ ID NO: 63898 - DNA, 1234 bp, Arabidopsis thaliana landsberg
gtatgttttggaaaattttcttttattcaaaagtaaattttacatcctctttttctctttaagtagtgtactagcataaagtctctctggtcatgggtttcaacttttccaactcatagtggatcgtttctcatgtgaaatctggacccatctttgtttctattttcctgtgtccaatcaaatacggtgaatttagtcaattactgtgcattagtattaacatgtctaacagaatatgtggtcttgcttgcaggaaactggttctgtacccaaatggaaacaagagcaagaatacgaaagaccatgtttctgtttacttggctcttgcagactctagttcattaagtccagggtgggaggtttatgcagctttccgtctgtatttactggatcaaaaccaagataactatttgattctacaaggtatctttaacttcttcaaacagtatgtttctctcatccttgtcccactcttattatgcattttgtgttgcaggaaacgagagacggtttcattcggtgaagcgcgaatggggatttgataaattcatcccaaccggtaccttctctgatgcgtcaaacggttaccttatggaagacacatgtatgtttggagctgatgtgtttgtttctaaggagagaagaagtgggagaggagaatgtttatcaatgattaaagatgctactagctctaaacacgtctggaaaattgagaatttctccaagttagacaaagagagctatgactctaatgctttcttcgctggagatagaaaatggtaacacaaatttgccaacaatcccaaagcaaccgtagctttaagctaataaatggtactactaatgcaggaagatagagttttatcctacgggaacaaagcaaggaacaggaacccatctttctatctatctgacccttgttgatcctgaaaccatttcagatggtacaaagatatttgtagagtttacaattcgaatatttgatcagttacaaggcagacacattgccgggaagggtaaacaccgcaaactcaatcacatacttgttatatgaatgtgaatgtgttcacctcttgatctgtaaggtctctggtttacagttactaaatggtttaagcgatcaagctcggagcatggatgggtgaaatatgtatccatggtttatttcacgccgccaaacagtggtctggtgcttaaaaatgtatgtcttgttgaaactgatgtatgccttcat

SEQ ID NO: 63899 - DNA, 787 bp, Arabidopsis thaliana landsberg
aaatccttacatgcaaagtataaaggtttgatcctaaaaaacacaaaattcattctttaaatagaaatttattttactgttgctaatctgaatatggactagttttctctctcgtttctgcatatcttctcatggccagttccggggattatgatggtatcatctcactctccctctatattcttcacttaccctatctgattaaatacactgacgtaccagccgtgaatggtatatgtatatgtgcatatggtcctatagatagaccattgaatgatatacatcataggaaaccaagtgtgatagttaagatttcaacctttggatgatgttgttgccctgttttgttacggatagtgtaattagattgatttccccttccacttaaaggtaaaatgtataagtaaatttgcacaaaggtaacttttgtgagaaatgcttgcagaaattataaagtctatatctgatgccccaccaacacattacatggtcaagatagagtctttctcactccttacaaagcatgctattgagagatatgaaactgagagctttgaagctggtggctacaaatggtatgccatcattgttacacaaccttttctttagtaattaacaaaacccttttgtgattgaagattaatcatcataacacgtgctggtatcttaaaccctgtttactgttggaacatgcctcaactttttcagtgctttttgttgatgggattctattctacattgctttagggtgtggtcagtagttatgttttggaaaattttcttttat

SEQ ID NO: 63900 - DNA, 327 bp, Arabidopsis thaliana landsberg
tcattcatgagagtatgaaagaaacaagggtgatgtaattgtttgataatacatttttagtacaaaccatatttgatgaagtctgtcccagtagttagtttaaagggttactagcggaccttggtactatatatcatacctgtgtcggctataaacacagagtttaagatactaaaaatttggttctacatgaagagcaggattcactagtgagttaaacagaatatgactcgggcttgattccttggtcgcatagttatattcacgcacttttagtaattatttgaaatcaaaactggagtctgttgaccattatgactggtaaaa

SEQ ID NO: 63901 - DNA, 1760 bp, Arabidopsis thaliana landsberg
  unsure (1)..(1760): unsure at all n locations
gtaatattcgttaaccaatccgactttactatacttggtgtcatttgctacttccaccgccatattgtgcaccagcttgccttaatagacgccagtcgtgttcaggagaagctctctactccaaaccaaaccaatacgtaacttctcatttttgcttgaaaatctctcattgttccattttttactagaacatgttctgacattttcattgaactatttatccactgctcattttctcacaactatgctactaggtttattttttttttgggtttaattatgctgctgagtttgtttcaggaatcaggatgtgtgatttgtgttataagattacttacccaaccttttcttcttatcttagagtgtgcatgtacatgcacgtgttcaaccagagcacgttaagaccagtttagctctagcaacagactcgttcgttccaatgttagagtcaccttatcattaaataaggttttttttttgtatggcgatatggaacatttcaaagttgaaaaagtagccaacatctttgtgggagcagggttattacgtagaaaatgaagaataagtcgcttgttgccttctttaatttatcttctctttttgaaagaccatgactatcaaacaaagccaatgacatgtgacaaagagttatattagttgaattttcaaggataaacaatgatatcaaatgtacatcccaatatttttctttacatttatagccatgacttacctgaatcaaatattacttgcatctatacttatggaagttaattagaaagattgctagggcttgttcagttattggccttttacacaggtgatacaagggccttatatttggtggcttggtcacaggtggaaagatccgtgcgggctgggaatgggatgggtcgataaacgaagctatgtcgggtaacttgacccagagtaggatttttccttctatgtaatctttaacttgacacatcaatccaggttaaagttttttttaacattgctcaaataatagtatagatgacttcgagagagaaaaaaattaattcaaaatgaaactactgtacacaaacacaacgatgactcggtcgtcaataactaaataactctcataaatatttctctttagtaacgcttcgttttgtttaaatttatatcatgattttatagatgcattacctcttattcacaaaagagagagatagcagaaacaattagtccatttcaaaggagagcatgagcaactcatagtcttaggcttagccaccagagtttcgacctaataatagaagtcgcgacaacaaccagtagaggcccaataagcaatagctatcccactacctctctctatccatcaaagttgctatgtgcatcctcgttgctagttcactagcctctaaatgtatgcttaatagctttaccaaacttatgatccgaaaaagtcataccatatatttctaaatttaatttaatcacaataaaaaaaatatgaaaagaaattaattgacctaaaaatgaaaagaataatttatcaaacacttacataaacaacaaaatttaattaaacctaaaattacagaacagtactcggtcgtcagttactaaataaacctgacacatgcaatatttntcgtttgtaacgcttcattttctatagaaagataatatcaatttgcattaccccttcttcacaagagagatagagagatatcagaaacaacgggtgcacttcaaaggagaacatgatgcaactcgagtcttat

SEQ ID NO: 63902 - DNA, 538 bp, Arabidopsis thaliana landsberg
atggttagcttcgttcttcttctctggctacaaaaatctttacatgtcatgtgacttgacttttgtcaattacaggctcatgtggatgggcaagttggatatagcgaggtaaatatcattactctgatttttaagattcattgtttttctaatctctcatatgaataagaggcgatgattatgtgatgatttaggaattcatcgagaattcgcggggaatgcaactcttaacatgcaaatggtttccagtcaatcaagaaccaagagctctcatcttcttttgccatggctatgcaattgattgcagcaccacctttaaaggtatctatttacatatacctatatatgcattcattgaagaagaaaggggtgaatattaatgtgggttattcttacctacagatatagcacctaagtttgcaaaagaaggttttgctgtgcatggaattgaatatgaagggcatgggagatcaagcggtctctctgtctacattgataacttccatcttctcatcgatgatgtctcttcacatttctc

SEQ ID NO: 63903 - DNA, 525 bp, Arabidopsis thaliana landsberg
ttttgcaagaaaaaagattttcccaattatacttttaaaagcattaaagttttgtctccatctattatattcagaaggtaaaactcacgtaatagagcaaaccattaatatgatttaacagtaaatttcccaaatccagtgaaatgccatgtactgtatagttatcatgtctatataagtgtaagctaaataccccacccacgagtaaaatgtgtatctgtcatatccaaaacctattcactcccaccaaaatatatcatagatcgcacaactgaaaaacgtatttgatttgagagatatttttatccataaactattcactcccacaatctctgacttccagtagtggagagggagactctgaacgcctctaagtgagaaaataaatacagtattatgtttttcaaataaacatcgatagataaaagacattagtgtggtgtgttttcgttggcacttcgacagtcaattaagaaaatgggaccaggtcattctttggagagctgaatagtagaaaatggtttt

SEQ ID NO: 63904 - DNA, 2740 bp, Arabidopsis thaliana landsberg
tcacacatctacggaggatcaatgcgttcaccattagacacggtaactacgaacttaatgtgttcatcctcttccctaatagagcacttgagcgctgcaatcttgtccaccaatgactcgtccagcaatttgacaagatgacgcccaggcagggccttgaaaaagcatagcaaaagcaggtattatacgtgtggagatagaaatgaaaaatgggggttaatgggcatacatctctcttctcgcactaatagaactgtctgttgtcctcagaggacgaactcgcaagaaccacagtcccaccgcaataacagcgacgtggaatacaagaatgggcgtcgacggttgggaagggtaaactagtccatatgacgtcggagattctgaatgctgagaagattccgatggttgtgtataactatgaaggcccatgttacagtggctgtggataatttggaacaagttaaaaggaaagtgaataattaatggggttggaaaattgagaaagtggacaagttatccttcaaaaggtttgaaagatttgaaggataattaatttagagagataaaaggggggggggagaatttagagagataaaagggcggagcgggtgggggaagaagaacttcagtaacctaggcacctaataatataataatgttaaaaatattaagttgatgtgatgtgacataaaggtaaaatcatagaaaagcgtaagggataaagattagtagaaaaaattgtggagacagttgactgagactgttcttagtgggaagataccccacagtagtccacgaatgtgaagtgtattgcatttgcatacttacaaagccacaacataattgttgtcccctctaaatatataatgtccctccccatccgttgataagtgattttacctccacataaaatattttacataaagataagagttatatatggaataaaaggtagtaaaaagttaagtctccaaaaaacatacaagttcggaataaaagtagagtcactaaatattaaaacagacataaattctaacatggacatcaaacacgaagagcttcaataaactcctcatagatgtctacagcaaatctcatcctgagatcttcaacggactcctcagttatggagtcatggctaatggcctgaaaatgaagctcaataaacttcacaacaagcgggccactgtcatctgcatgctcagtttggaagacctcagggagacgatcataagcgaactcaaggggcacttcatttgtcctcaggtcttgggggacaagcgactttataataagcggaatcaggacaataaaaggtttcatcaaaaccgtccatctatttggcagtcttcgagtcagcgatagggtctagcacacctatggtaccctctttctgatttatgacaatggaaacgcagtggccggcagtgagatgtaaaggagtgtacaagatgtcgacatcagcgaaccaagcctatcggatgctacggccagggaggatacctttcacatagtcccagatcttactgttccacgaccagtcagatttacttttggccttcttataacgtggatagagctcaacaaagttaagtgcgaacgaagaatctagtataacagccatactctgtacgaactcatcgccatacctccgcgccaacaggcttagcatagcctcgatgtattggattacataaagacaactagttagatctgagtaaattttaacatattcccaggtttagcattgatttggtacatacctcctggtggacagcagcctgaggagtgtgcatgtccttgaaaaatgttttagggacaacatgtccctcgataacgtacttcctgaccattcattcataataatgattaatagatacgtaaaagaatattagttaccaaaacaataattcagcggaaaacttaattacctttggcgataagctatgatagtggacaaaaagcttttccgaacctcatcgtttactttggcaattgggtgcaaatcatcatggggccctttgactactgagacagtaactgtctcacaaaaacgctggggttttttcttgcccttctgggaggaagcataaacttagaaggatccccttctacaacctatctttttctgttaatcctacagggagaagtctctgaaagaggcacaccagcatgtgcattaccctataggacaaagattgatgtcagatccattatagaaaacaaaagatggaaaaacacatagatgtatacctgtcgatcggatagatgatgaggatcaacttttgaggattgaagaagctcttctggatgtatagcaacagtaataacaaaaggtttgctaatcgcaataaaagatataataaggattaaatgaggaatacttcgttcatggtctgatcatcttgttgatcaccggggtcagaccttccttcactctcatcatcaccctcgttcccttgttttggatctccgtccccttgatgagtatcatcaccctcgtcccctcgttggggatcttcgtcctctggattagtatcatcaccctcgtccttttatttgggatcttcccccccttgaagagaatcatcaccctcgtcctcttggtttgctccgccatcaaagtcgtcttcggattcagagtcactaactaagacagccttaatttgaggcgtcaggaaatcgtggggttcaagtaaaagaagaattaaggtaaataaatctcagacctaataatttt

SEQ ID NO: 63905 - DNA, 513 bp, Arabidopsis thaliana landsberg
  unsure (1)..(513): unsure at all n locations
cttcgtcgcggggnnnnnnnnnnnnnnnnnnnnnnnnnnnnnnnnnnnnttgctggcggtagggatgggattcgacggcgatgacgcgagcaccccgaaaggtcgcgttgacgatgccgcctaatcccaccggacccatgccggtgatcagcacagtgtcgaagcgatcgacggagagggcctgcatcgccccgaaggtcgcgcccaacccacagcacgccataccagcatgaatgtcctcgacatcgtcgggaatcggcaggagcatccagtccggcttgagcagatattgcgcgtaggtcgccacgcccgaggtcgatcctgtatccgccagcacgtcgcgccccttctggcagtagatatagtcaccggccagacataaccggcaggttccacaagcggatagcggcatcgcgacaacgcgatctcctacctttacttcgcccagttgagcgaccttctccacgacgccgacgctttcgtgtcccagtgtctcgttcggagcaccatctt

SEQ ID NO: 63906 - DNA, 457 bp, Arabidopsis thaliana landsberg
gctcaacgcaaaggaaatgtagagcttggtaatgtaactgaataatttttgcgataaattaagaatttaatagagattatttaacatcatgtatcattaaacgacgtcgatggtccactctttaacacgtgagcattaagctcatcaaatctcagccgttcattcctttcacggaccgatcacagcgtcactaaaccccaactaatccctcatcgttctctacttataactaaacacacaaagacatcccaaaaccaacttcttaaacagattcaaggaaaattcttacgattagattagacactaaactaagcaaaaacacagagataagttaaaacagaaacaatgtccattttcatcatcttcctccttcttctatctacttctgtatccgtctccggccaaaaaaagcgaagtgtctaccaggttctcgaaaactacaccttaccacgaggct

SEQ ID NO: 63907 - DNA, 656 bp, Arabidopsis thaliana landsberg
cgtcactgtgaagaaatgatagattatacagtcgccgtctttggagggagataagaagaagatgagagaaagagatagagagagagagagagagacgaatcctccaacaaactttttttctctctcctttttataatatttaaataaaaagactcagtgagagatttttataaaaaaaaagaaaaagattgattggatggtattggactaaaggagtaaaggtctttctctgatttcactactctcattggatgctttcttctattatcccactattttctctttattttcgattttgcccctcgttgtcgtttttctgtgttttatttaccgtttttagttttacccctcaagtgtggtaattatttaatgttgatccttaaagtattgtttaagcctatgagagctgactcaattattggatagtttttttttttttttcttgggtgctttttcatttggataaaagacttgttttgacaaaaaaaaaaggattaaagattttgaaatggttatagattttttgaaattgtttacggcttaagttttttccaaaaatctactttatagccaattaagattgggagaaatggttttccttataaaaaggaaggaatctagatttttaaaggaaaatctaaaatttatgtttcatt

SEQ ID NO: 63908 - DNA, 535 bp, Arabidopsis thaliana landsberg
acgatggtgagtgatattcggagtgttcaaaagattctctgtctagcagctataaatgtttcgtaggcttcaacatccagtaggattatcatttcgcacagagttcgtataatttagtaattagcaggaattctttttgttggttcaatatttgtcaatagtagtagtattcttaactaaattatgacacaataatctatgttttaataaataaacttgccttgatcaagtaaatgacatattaatctatgttttgtgacctggcaaaacaattttaaaatgatatataaactacatttgtatgactaattttcaaagtaaaaataaaaaatcccacaaaacaaattattgtattaataatatagtctgtattatatgcataaatatatcattaaaatgggtcaaatatattccactatacatactctaatattacattatgttttcgcactttcatttcttttgattaataaatcaacggtagaagatgtacgacagccttgcaaatcaactttaatgcacaaatctatgagtt

SEQ ID NO: 63909 - DNA, 587 bp, Arabidopsis thaliana landsberg
tgcttcatggatttagcaacaatcttcaacgccaagtctgcctctgttttacctatcttggagtgcacgttaggtaaaacttcagcaatacgacgacaaatccaaccgtaaatctccataatctcactaaccacattctccatagcttcattaatcacaggtatcatcatgttttcaccaatcggtttgattctaatcaaagaatcaacaataatctgcatcttacgaataatcacaagtcgaatcagaaccgatgattcttcgttgtatcgatgacgattcccatcgtgaaacagaatcgatcttcgatcaagaaacgcgaaataagcacgtacgaagagattaaacccaccggatttgctcataatccgtgaattaccttcgccgaaactcgaaagatcgaaaggtaaccgtccgatcgattctgctacggttgatttacagaggaagaagccgtgcattagcattaagccttttaaagcaaccgcccagcttcgcgtgcgtttcacgcgagacgagattaagcttacgagaggcttgaggcttgacgggctagagagaacgtgacggtagatgaattgagcgct

SEQ ID NO: 63910 - DNA, 1302 bp, Arabidopsis thaliana landsberg
cctgcagttagttcagcggggtgtgaagatgtcttataccaccaatagattccaccaatttttgcaaccagcattacagagcttttctcttcttcctgacgtctccgcaagacatcggctgcctttgcaagaatagcatcagcatgacaaatcaacttcccactgtaccattcctacaatgaaaagcagttcacgttgttatctataatccagcctactagccacttttatatcataacaatatattatatcagaatcaccaaagaggctatgatatagaacatactagaaagaaacgaccatagtcagagagaaagctatcattgccctcctcaaagaacggaactccagatggaaagctattatagcagccggtattcggaggatctctgcttccccattgaggtttgccttcttgggatgccactgccatcaagtcttccatcctaaaccaagtagtataaatctgtaagtgtgattagtacaggcaaatacaaattttcaataaataagcactcacatgtacttgtcatggcattggaattcaccaattccaggaaatttccacctcccatctccagaaggatgtgcaggatatctgcaagagataactgtgtaagaaactcctattgtagctattgtggctttaccggtggtagtccacagaagatcagaagtacctaagctcccccgaaggaccaagacctatacttatttcttcaatcacattcccaagatatggctcaaattttgttgaaaaactgagcataaaatcttcatagcattgaacagcagtacggccaccgaacaaaggaagttgatcgactccaagtgtgagatagtcattgttggaaaatccgcttttatctctatagtatatgtccttattgacgtctccaatctggaaattataaggtgaaaagcagttgagctaaacttcgtaacaaaggaaagcattcccaacgacaacataatcaagttagcatctatgattgtgtaacagaaatctatagtctccaaggtttcatcagaaaaagttctcaaccttaaaaatattcaaaggaagaagaaaaatccgcatcaggcaaccttctatctctaccgcaaacaaataactaaatacctgtaattctaacaataccaacctctcggatccagagtggaagactgatgccttcttttccaccaaacaaatgcatatttgaatgaaagcaaagagcaacatgtaacttcaaccctgccttagaaatcagtttaaaaagctcttcatacagtgaccatttaaactcaagaggagagaaa

SEQ ID NO: 63911 - DNA, 1644 bp, Arabidopsis thaliana landsberg
aacttttacgttgaatttctttcatattgaactggtgtcatttacaactgaataaagtttttctttatatcacaaaatatagacaatatttactgtaatgatttacgacactggattccatatcattcttgatacgcaagtttttactgatttttgcaatacatatatcaatgtgagaaggtaaaaatatcactattgtgttggtagactttgtagtaaacaaaatggtctctctgtgtagacgaagatgacaaagaaaacatgtgcccatctcatcctcagggctttctctgtctcaatgaaatcacatgtgctgaccttttgtagtctttagaaatttgacattttgttaccattatgggaccattcctcaacaatttcaagatcctaaactgataatacacattcataataacatggtctattctttttttttttgccaacttaaatgtgtctttttaagattcttttaacttttttttgggtcaaaatctttttacttattttctatttattgatccattttttagtttgtcaatttattacccaaaattgataatacacatccctactaacatgtgtcttcttaaaaaaacaatttcactaaaatcatattaatttttggggtaaaataatatgtcctaattatttcttctttattatttcatttatatattttttcttatttttaagatatttgttacctattttctatttctgtttttggtctaacaatttgttacctattttgttttcattttattacatcaaagatccaaagtacacataagatacgtccaacatatgtttcatcgtgttatgttttttttttcttctttacttccaaaaatttcattacaattatacggacaggcacaaactcaatctctatccacaaagctctgatcaaagaagtctcagaaaccaattcatgggatttcaatggtgaattctctcctccttcttctcttaatccttctccgatcaccaatcaccggcctccaccttctcctcatctttcttcactctcttttataactctctgttccttcagaattttccccaatcttcttcttcaaattgaagtagatctagtgatctctttaatggcgtcagtgttcttgtatcatgtggtgggagatttaactgtaggaaagccagagatggttgagttctacgaaacagagacggtggaatctgcgattagagctatcggagaatcgacggagtgtgggattccggtttggaggaagagaacgacaccttcgcttcctgggtttgttgagaatggtgagatgagacaacaaagattcgttgggattttgaattctttagatatcgttgcgtttttggctaagactgagtgtttgcaagaagaaaaagctatgaagattcctgtctctgaggttgtttctcctgacaatactctattgaaacaggttgatcctgggactaggtactgttactttgtctttaaaggatactgtttcttgatttatgtcataaatgatactgtttcttggtttgattctgtttgttgtgtctgagagtagtttccttttaagttggagtcttactttagtcaaaagtggcaatgaaaaattgatgtttgatttgctgattatagtgatctgaggctaggtt

SEQ ID NO: 63912 - DNA, 1634 bp, Arabidopsis thaliana landsberg
gtgtgatcgagaactttgaaaacttgtgctagttgctccaacttttctgcttgaaaggccctgaaaagcagaacataacgcataccaaagcatgagatatagacttggaatcagtcacgaaatgaacagagtgcacacttcattaacgatgctgaatgtgcattatgcagaagcatctagcggtttcaagacctattgaaacaatatacatagtatccgtaacttagaatacttaatactttaataatatgaagatggcatgctaccttcatcagtatctgagctacatcctcgtagctatctacgtattcctcagtcaagttctcgacatagataccattctttgcgtcatcctttatctgccatatgacacaataagcaatcaaataagtttacactcaacaaaaattaacatatgggaagaaaactgttgattagtgaagttaaccttaaggtttctctgggtttgatcgatcaaatcactgatttgtccattgtatatctgcaggaaaagattaagcaatctaactcaggaaattttagaagcatgatttgtctataaaatccttcatatggtttggcaaaggcacctcaagaaaagaacaacggcactgataatttacttcttttcctccagacttgatcttctcctaaataattggcaaatgtttgatgcttattagatgaaccatccatcatagctctcataatcaaacaaaaagcttgagttatatattcaaaagcataacttactctctggatttcagaaaacagcatctgaaagattcgaggcgcgagtccttgctcgcctttaggagatggatcctcaagcatcgaaccagcaggaccccacattgtgtaggtcttcccacttccattctaaaggatccaattaaagaacataacttcaacatcgtctggtgactataaaatttggtttcaaaagctccaaaaacataattattcagtacctgtccatatgatagcacactagtgttgtaacctgataaagcatccctaaccaaaggaacaccaatttgctgaaatacatcgtcctggcaacaacacaaccaaagagaagataacttagttctcttcaccctaatagaaacttatccaaattatttgtgagagagagagatgaacctgatttagatttgagtcaagaacagaatcaaatgtaaaatggcgatctctaacagaatatgaaactttggaaactttcttcactttccagcaatactcctttgttggtttaatcctcaccacaacctataaaaatgaattagaccagagagaggccaagtaaccaaattttaaaaaggaaagaaagcaaaggctcttaatttcattaaatccgagcaaacaaaaatggaaacaaccaacctttacatgtggattcgaggctccttcttcttctacttcatttcgagttttcaatgccgatattgcccttggctgatatttaattcgccaaacaaaaaagatgaatttcacatcacaattcagtcaaatgagagtaatgggaaaattttaagagtaggatctttcaagtacccgagaagctgaaacttggcttcggcaattgggagaatccatctgattctttgaagccgttgatttactagaaacag

SEQ ID NO: 63913 - DNA, 1985 bp, Arabidopsis thaliana landsberg
acgaggcagcccttctcaagtctgttgcaagccaacctgtaacagttagaattgatgctcatcatccagattttaaattttattcaggggtaatcgaaaaatgtatgcattaataaattcgcagagacaaacccccagagaatggttggcaaaaagcataaagctataaatgaaaattttcagtataaaacaaaaaaaagtttcagtaagacaaagcaaaaattaaacgagaaatacgttaaccaaaaaggcccaaaacggatttgatgctgtttctgacgtgaacgttagaagtgaacccagtggactgtatccaaatgttattttttccaattccaacactggaatctgacccgattcacagaaccatcgacccgactcgttttacagaaccggctcgtcgtcacacggtctctggtgacgaacaggccacgcgtgattacatacataatttggtttctctttttcttttgttcttcttgttcctctttggtttttgacattggttctggagaagatgagttcggtagaaccagacatggaagatctgttccaggagaagaagcgtgtcaggaatcctctcgttcctctcggtttgtgtcttctccatttcctatttcttctgatctcatttcacgaattttcttttggactttcagatgtttataggcttctctttaccaaattggtgattttagtttctgggtttttatctacccgatccctaaacacagttacttgttccgtttgaatcatgagattcagaaatgattgtgaaaatatgtaattgaaattcaatttgtggattttttttgtttgtttgttacaactctgtgtcggtatgtatgattttgtctttacagaatctcaattctcaagaatcatggtagatgtcagagctatatagagagtaccttcagattgtagaaactccattcattatagatgtaggtgattgtttgtggagttgaaaacacatttgaaaattagtgagaacaaacctcgaattagtctttatgttctcttgctggttcttatctatggaggttgtttcattggcaaattgtatgagaatgtgtaactttggacctcagcgagcaaatccatgactatatgtatctataaacattgtcagagacaaaactgtttcattgtgtcaatcactgacaaaatgcatggcttcccctgtaatgagattttgaactattgaggattgtttaagttttgttttgttgatgttctctgaatagactccaatattctcttggtcaatactgttagacatttcaaaaattgataatttctttcaatattgcaggtgcacttatgaccgcgggcgtgctcacggctgggttgattagtttcagaagaggcaattctcagttgggtcaggttttgatgagagctagggtggtcgtccagggtgctactgtcgctttaatggttggaaccggttattactacggtgataatccgtggaagaagtgagctccaactacttgttcgttttcacataattgagatgacactcgggaaatctgcgggcaaaggtgtgtgtgctctcgctctgagtgtagaaatatgcggtcttgctaggatttagtaagggtacattacatgatttgaataatttgaagaacgaacaagtatcgttgtatcttgatcaattgattatattgatttaaggaaattctccgaaaaccatctttactctatctgtcaaaatctcattatctttctgccgacaatctctgtgttgtttatttacttacacttatgtttgagttttgacttcttgaaagatcctttgagaaacatgggacaatgcattatcacatagactctattatcaaaatatataatggcaaataagtgggagtgaagagactatgtattagaaggcaagctatgtttaatgatttcagaacatcttagtggaagacaatggtgggcctaatagtttcctaatcatattcttgcgtttt

SEQ ID NO: 63914 - DNA, 525 bp, Arabidopsis thaliana landsberg
cactaccggtctcaaacgttcttcgtcgccgcgtaaaggagtcgcttcggcatgccctgttttgacctcacggccgccctgcatcggcggcaagggccgctgtaccgccaggcggcccgccatttgcgggcggcgatcaccgagggcactttgaaggtcggcctgccgctgcccaccgaggcggagctggcccagggcttcagcatcagcctcatcaccatccgcgccgcattgcgcgaactggaggaccaggggctgatccgcaagcgtgccgccaagaccgccctggtggtcagcgccatcccgcttgccgagcgcacccgggaagtcggcacgctggccgatctcgccgccgaccttgccgactcggcgctggaaatcgccagctatcgcctgacccgttcggtggaggcggcgcggacactggggctggacggccgcaccgtgctgccctgtctgcgcggcgtgctggcgcgcgacggcgtggcacgcaccgacatcgccatctatctgttgccggaactc

SEQ ID NO: 63915 - DNA, 201 bp, Arabidopsis thaliana landsberg
ctttctcattctcattaattgtgagactcatggccgacaaaataacgaatatcccacggtactcccgatgttcttcatgttggacctgaattatgccaagcgttagctggtatcccggcactatcgcaaaatgattgtacccgtgatcataaaataagcttacgcgaaccgagattgcgctattgaacctgctgagcctaa

SEQ ID NO: 63916 - DNA, 306 bp, Arabidopsis thaliana landsberg
  unsure (1)..(306): unsure at all n locations
ggccccgacactagctggcacggctgcaccacaggcatggccacccaacgcttcgaacaaaagctcaaaccgccaangaagccaacaattaggggggaagacccgaacagacgcccgaaagcggacgcaaaacacggacgagacagggggagaccaccaccaccaccaagagaaacggaaaccagcagaagccacagcccacgcacggaagaagaaaggcccgggcgacggaccagaagggaagcccgcaccaccngcagaggccgccccagccggggacaaaagaancccgaccagcaaaacaga

SEQ ID NO: 63917 - DNA, 1549 bp, Arabidopsis thaliana landsberg
ttgtcaagacccataagtgagtgttaaaactcaacgaagcatggcttttcgtttaaagacatcatagcactcatttctccgccaagtagattagaagatatgtttgagaaacttgtgggattatgccgaaaacacaatcttaaaggacttttttttttcttttctttatttcagcttaacttgtttgatgtctcttattattcacatcaaatgagtttgtaatagaattatgaggtcaaacaatgacactctctgttatgctggtgagctttttgttctaccagcaatagatgaaattagtcttcatttgtcttctgttgaatgcttttatctttcatctctcgtggtggcttcatcccattaacctgctcaacaatagcgccagcagcaccattaacgagaagtcgcggatgatctgaggacccgttagattccacctgtaagttcaaccagtagagagcttctggtaaagcctgtttggttcatattcatgattcttcattactataaggaacaatcgctagtgaggaaataacattcagttgaatcaaaatgtaaagaaaaagccccaacagacattttggctttcttacactgtttcccttagagcttctagttatttcttataagagaacctaggtatctcatttttcaattatgtcttgttgttatctacatatccgccttttctaactcttatttctaagcaggcctagaaaatgtaccagtaatgtataagcatcactaattcttctattgtaaccaactacatttctttgaggtgaattataccagatgtccatttacgtctaaccatctaatattacacacaatatgctgttataaacacaataataaaatttacttaccaacttccttcagcagagtcgctcaactcattgttgatttcttcctttgcaaactcttccagtatagcacgctgacgttcattcacttcactagtagatacaaggaaaaaagtaaaccgcataagcatataccaaaaatctatcaatattagctcttgacggaaatgaaaagaagagaatccaacacatccacatgccaccagaacatcaagaagcttatgtaatcagatttaataatcagacggcagggaaactaacacaatgttgtcctaggaaaattatttcaaaaaccgtaactttagagcaacaaagtgtcttttccattctaaacactagtagagtttttagcatagcataatgtggatgtctccaacaagtgtattacttgaacttcaagtaaaagaaatcttacgtaggaaagttaacgcggaagcgaacatactgatctccatgatctacaaaaaagccttgcttcggtagtcctgcaggaactaacctattaagaagagtacacgcaaatacacaaaaaaaattgaacatataggctgataattatatgtacctttgcctcttaaaacaagaagttgatcaggctgagtcccctttggtatctgcaacaattacaataaagtacctctattatctccaaaggcttgagatctaaccttcctcttggtcag

SEQ ID NO: 63918 - DNA, 1617 bp, Arabidopsis thaliana landsberg
tcaatcatcaaagaaaatggagcttaaggtcaacaacatcacaaacccctaacgacgctttcagccatttccaccgaggattcctcgtctctcccgtctctcacctagacccattctgggcgcgcgtgagtccacattcagcgcgtgaggacaccacgcgcaaccggacaaggaagagcaaaaagccatagcggaaaaagggttctacttccttccgagtccgagaagcggctccgagccggcaccggagcttttgccgctgtttcctcttcgttctcctaacggcactaatcaccggattcatgaagataatcatcgagactcttagtcttaatttagaacgtataatttgagttttaggctatttaatcgtaagttggggacacgtgatatttgctgttgctttttactatttttgttagggctagttaatatccgttttccatttaacctagacttttttcatccttcattaaactttttcttcaagggtcaactatttcggcgcgtgtactccacttccttttggaatacaaaaaaatcttattctatacgcggcaattacttacattagtcaaggaagacatcatttcacgagcatataaatcaatgtctttttagatcttttatctaacgattaatacgtgggatccaaaacacaagctatctagtttctaaatttcttgaaaaaagataatataaccacaatgctcaattttcttttggaaagtagtactttttgacaagtctacaacgatcaagctagcgtaatcgtcttcgtatcttaaatttttccttataataaagttgatgatgtgtgtatggagatgaatgaaaagataggctaaataggccgacttataatagatacaaaaatgtgttgactttttggttaagaaagaaactaaagaagctaaattctctgtacagtataacactgctccaattcaattgtttgtgtgtgtcataaagctgccagccgttggatttaatgacaaagctgtgacgcagaacgaagcggcgcctatttcctctgcagattcaacggctacgatttaattctcctgctgaaaatataatgcacttttcttttgtatcgatattaaatagatgttacttgtaacagagggtgtctctgcatctctctttaaagtctgttgtcagtctatcttcgaactctgcccctcaggtgtaatccatatttcaaacctctgctctaatcctagccatccatttgtctcaagcccatccaaaagcccatttaaagatcaaaagttcatcattcaaaatctggtctatttgggcctcgagtaaaaaaattaataggactagtctatgaaacccattaaagttcttggataccaaaatcaaggctcctttaataaactttaaaagttttgtgtcgacacatgtttcgaaagtttgtttgcttgcaattatataattagatcagttttgtgtagagaacctaaaagttcaaatcttccttttgaagttttgaatagagaacataaatatttggtgaagcgacactgaataaataccatatttctttatctggatgttcatgaaaagagttgtagattgacacacgagactacccattggtttgctgcg

SEQ ID NO: 63919 - DNA, 487 bp, Arabidopsis thaliana landsberg
gcaatcgtctggagagcaaatgtaacaggcaaaggcataagtactagtctagttgttcttactgttcaagaagaatacaatcatcacaaaccaagcacaaaaatttactaaccatacacatctatccaaacgggaagaaacagagagcttgatctctatcacagacagttttatcgtgaataaaatcaggtagactcatctgatcaatcaactaatacgctttgactagaactagtaaagaagatgacacatagatggatatcaatagatgaatctcaagaagccaggatgttttaaatcaccagacagctaatagactcatagtttcactcaaaacaacagaggaaaaaagacatatacttccttagtgaccatttttcacatccaaccaaactcacccgtctgtcataaaagaaatgtgatcgacgaaggaagaatcggtgacagaaaactatagcagtggctattgttacctgagggactgggt

SEQ ID NO: 63920 - DNA, 185 bp, Arabidopsis thaliana landsberg
tcacgaaaaaaagaaaatgtgaatcctgtcatttgtgagacagccccatggacccccctctccctcaacatatttgtatgtgaaagatactttgtcatcttaggaatcaaaatgagggcttgaaattctgtctttatgaggtcttgatcgacaggaacgcatacctaaatcaatgttcaaaccca

SEQ ID NO: 63921 - DNA, 500 bp, Arabidopsis thaliana landsberg
ttcttgtgttatatttagtttagatggaatttggtcgccatgaaaaagcaaacactgatctgtatattgataaatcggaagagaatatttcgggcagacgcagcataaatgggttcagcattattcagaaaatcatttctcttaaataaaagaacttctaaaaaagcacatttttctattataaggtatttatctgataaaataaaaaaccacaagaaaaatcgaaataatagccttattttctctcctttaaattttgtcttctttcggtgccacctcctttatttctctcacacatcctgcattaataatcagcaccacacggttttgaatgtcaaaacttacatatatattcatacagtacatgaactcatgcttatcgtatacctatatgaatcttttgtcaaaactccgcatatatattcgctgtaaaatacgtgtgtaagtgattaaaacctcgatggttcaaaaaaattaactaaaaacatattttatttcat

SEQ ID NO: 63922 - DNA, 535 bp, Arabidopsis thaliana landsberg
taattcgttttcatgtttttattttttaatatatggatttagatgataaaagagagagaaagagatgaactaaatacacttcattgtttctttgtctctttttatatcactcaagtttacatcttttttctttaacgataaaaacaaatgaaacaaaaccccaaattagaaaaaagggtgaaaagaaagctataacaacaaatcaaaatagtaaaaagtaaataaaagctttaagctttttggtacaaataatttttttttttttaataaacttttttcctcttctaaaaactctcttctgcaatcatctgatctccatggtatagatttgtcacttctctaagctgcaattcctgcaacaacaccattttcatatgatatcatcagattttctacaaatgcttgaattctcggatagaaaaaaggcgttcattcattcattattcatacctccgtttggttgcctgttgatgtatccagctggtcctctagacatgaagtccaatggtcccattcccaatccttcctctgcctt

SEQ ID NO: 63923 - DNA, 1529 bp, Arabidopsis thaliana landsberg
  unsure (1)..(1529): unsure at all n locations
ccaccaacatgaactcctctcattgcttctaatcctacacctcctctctcaccgtggtagctactgcgtgcacgtgcagctgttccccagttgcaccaatgctgcctagtgaagacattccagagtttccactgaagctgcttcttgatatcggagagtttgacatgtaacctagaccaccatttccccataaatggttctttggtgctgcatttaggacagaaccgttcccaacactagctcctcccgactccatttggctaccgaacctgccgagactcgcagcatatccagggctaaagggtcgtccaaagcctccactggaaccagaaccgtagttctgagtctggtttggctcaaaattcagctcgattccgtatccatgtccaaacggtgagaatcctcccctattacctactgctggactgtacctaacttcaggtttcactccataaccagagattggactcgggctgaatccctgggtgtactcattcagtaatgaactgattctactagtgccaaagctatttacattcatttggttccgcattgtgttgagagccatatccttaggaacagccagtttgacctccaccatcttaccattgagttcgtggaatgtcttctgcagtactttgtcaacagcttcctcagagtcatatgaaatgaacccaaagcctctaggccgctgggttctgtggtcatacatcaccacaacatcagtgatcatcccaaactgagcaaaatactttttgaactcagcctctgtcacggatgatgccaaacctcccacaaagatcttcttggagtttgatgggccaggtgatccctgaaggctgctgttacttttattaaatactacgtgatcatctcttggaacagccttctttgcctcaacctgtatatcatggagaaaatgaacacacgacacaactcaaagaaagcagtttttcattcattgtgaaccactttctttcacatgaggatatgaaacgatccaagttttacatttttatttgtgagtgtgaaatgaacaacttctgacaaagatatgcatttatcagagcggcaaagctgattgtaaacaatagagtctactaactaaaacaggaaggaataaaagtgagtagctttgctttgctttgagaagcagcaacctcaannnnnnnnnnnnnnnnnnnnnnnnnnnngaaattggaagcaatgtatgttggtatatagcaggaggaaacttacaattttaccatcaatgatatgtttaagcaagacgactctttcagcaacattaggatcagcaaagacaacgaaaccaaagccacgagcacggccagtggcacgatccttcataataacagcctctaaaacctcaccaaaactgtgaaaatagtcacgaagacgatcttcactggtttcccaagatataccaccgatgaagagcttacatgattccatttccatttctgccaaacaaacaaaanaaggtttgtttttgattccagattctatatcgatctaagtgagaagga

SEQ ID NO: 63924 - DNA, 537 bp, Arabidopsis thaliana landsberg
  unsure (1)..(537): unsure at all n locations
gattgcacttactggctagctcacttttaccatagccgctttcatacgctttctgggctaccacagctgtgaaaaataaaccggtatcacgaatagcagttgctatcgcagtaccgtatttatctataaaatcctttgtggcctgatatgtcgctttaccgtataatgccatcacttcttttttgataggattaaaaaactagcgcctataagcagcaatcctgccccaaatataatcattgatttattcttctcaataaaatctgccacccggatacgcagtagcttagattttaaccccctggcataatgctctgcagttacaccataatacttcctggcttttagcttactggcaaaatcctccggagtgctggcagtggccaggtcattaaaacttaccccgccacgggtaattttatagtttctggtaagcaaatcctctacagactttgccggactgctataataactgtaaannnnnnnnnnnnnnnnnnnnnnnnnnnnnnnnnnacttgccggagcggcactaccctt

SEQ ID NO: 63925 - DNA, 930 bp, Arabidopsis thaliana landsberg
  unsure (1)..(930): unsure at all n locations
tgactgtgaccttatggctaggcattgattgtttcgaacacataacttttttttcattaccaagcaaattccgaatctaaatttagtcatctttcccacgatgatagtttaaactcgtaaccttgagacacatgttctttagaagatcattagtacacgcatagagttagaaatgttggattacaaattccaaattgtaaacaaaagatttgataaaccactaaaattttgtaatcttaacataaaaataaccacaaacacaaaataaaatataatcgaagcgtataagatgttacaaggatttgttgcacgaagaggatattattggtttggctatatggtcccattgccaacaaaggcgtcagatttgcattaaaccttagaaggaaaatgtcttatcaagttcagagcttgttgaaataatgtagaactcattaagaaatgccaagaaaacttgaaatcaatgggttgatgttgtacatatctaattttcaacttcagaatcgaactagttctcatttagttttgccctgataaatatttctcccttttcacattattttatgttcttgttgaatgcatactataacactaatcagaaatattaacaagatgacatgatatatatagcatgtaaccaataagtaaatttactagtggccaaattcacatatactcagtggatatatcatatacttgtttttaatagtgaaaactcacctaaaatttgcaaccccaaaaaaattcaccttagttagttttttgcttagtaaatttgtttaaattatagcattcaaatacttttgaggtcttaaacatagagtcatagattggttaagccaccgacagtactattacagctggagagaaaggatgtatccatggagaaaaaggcaaacaatagcattcaaatactctntttcaaaatta

SEQ ID NO: 63926 - DNA, 488 bp, Arabidopsis thaliana landsberg
taatcaatccaacaataaccattaaaccatataattctccctctctctatgtacatatagtaaatgccttacatgtcacatgacttgaattcttcaacttgttaaagatcgtctaaaaataatctgcagctggaactactcgatatggtctggttgtgagcttgtgctactaaagagttgaagttgaccaccaccgagaaacgaagggtaccttgttgggaatagagaactcatagtttccgccgccggaggattgagattattattattatagttattagaaaatgcgacagtgacgttaccagattggtctagtagtgactgttggagatgtccaaggttgtagtgataagagctgctagacgaagtaattgtagggaaataaagcttgttgctctggattgaattcgagaaatggttgtgatgatcgatgtgatcaaacacatgatcaagattaacccatttccttttctcaagatataaagctt

SEQ ID NO: 63927 - DNA, 324 bp, Arabidopsis thaliana landsberg
gggacaaactgatactgcatttgaaccattcgttaaactgccctacgatatgccactcccacaagatctatctagtggaaaaacactccctattaatgaagcaacggcccctatgttcccggccggacacgtcctagcccccaccgaccgtatctcacccccgatggaaaaaacaactcgaaggcgttcttgtcagaattatcgctccaataaaaaaactatacctgagaaacgacctgtacctggacaaaaatctcgcgcgagcacccttactattcttgccccacaccctgctactaataaagatgtagaccttttaaaata

SEQ ID NO: 63928 - DNA, 584 bp, Arabidopsis thaliana landsberg
  unsure (1)..(584): unsure at all n locations
ttgggccaataatttggggtgtggctctaaancaggataggatacagctaagctcgtaaccaaacaaaaccggagcaatttctttgttcctcaattaggtttagacgatataatagaagcccgacgcagaaattaaaatccctttcgcctcaaaaccctaatttcaaatctctccaagcgcaacaatggcgaaatcaatgagatgcaagagggtgaagagattgagagcaataagaagagaaattgttgagaaggaatcattcactctaacgagagaagacgccaaatccgccgctattgaagccgcactcgctgctccgaagttaccagttcgtcaagccccagtttctccgtttatggaagttgcgacgccgtcctctgagtctgcatctgcctccactacaatcgccaacgatagtggtatgcctcctctaaatttgcctctttgattttgtacgatttggttttagataaggtaacgcttgaagaatcgaatttaagctaagctttagaatctgaaatttaactgaatcattcattttaggtgaaatctttgaaggagcttgttagttcattactcttgg

SEQ ID NO: 63929 - DNA, 556 bp, Arabidopsis thaliana landsberg
actaatagcgactcctactcgagaatatcgatagaaacatgtcatgttgtgtgaaaatatagttgtcttaagttctgtctttggggagcacgagcaaaaacagaggtcactccgtttattgcaatgcttaaatgaccgaaccgcataaacatcgagactcctaccccgagaatacctcgatagaaacatgtattgttttgtgaaaaaaatggagaagattgagttgatgatcatgagaatcatcacctctttgggtggaaaaacctcgataccagggttcattcttgagttgactgcttcaagcttcatcgataagaactgaaaatcccaaaccatcatatcagaacacacatgtaaatgtatagtaacaaaacaacagaagagagagacgttttcacacctcaacttgacgttgcaacgattgtatatagttaattatctcatcaagaacaacgtgctttttccaataaccctacaaaaacatacacaaatttttcaattcatgtgaccccacttctaccaaaaaaaaatggggaaattcttccccatttggaaa

SEQ ID NO: 63930 - DNA, 2084 bp, Arabidopsis thaliana landsberg
gctaatcaatgtggttaattaagaagattgttgaagcttaatcaatgtatataaacacttgtacacagttttagtttctatgaagatttctcttttcttatcaactctcctctctacttcttccttgccttgtgattcgtcaataattttgcgttaggcattttctgtaatcttaaatcatgttttaaattatttcgttcatgacaatgatttctctcatcgagacctctcagtgaaaggagtttagttccggttagcgtcaaaaaccaacaacattacagctttgattgaccatcacaaaggcaatcgaagtacacgtttgtcactgtgatttagattgctatgagccaagtcccgttcagcatttcaaattgaatctgtatttaccatccatactcacgtagggagagttaaaaaccaaaaaaaaattcagagacggcaaacgtaaaacagaagctaggttttgatcacaacaaataacagagcaagtaatacacaatgaccgataatgagagcatcaattccatgatgtaaggaacgattctatcccgcaccgccaatgctaggacagtcaagagctggttataagttcccgtttaatctatgcggctgttttactttactgtctggttgagttctttaaccagccagctcggccagccgcaatatcatcattcatcacattttccaaaaaaaacatatcacaagagcataacgattaaactcaatgcataacaagtggtgtagaagtattgatacattcctgtaatgtcactagcaatctcaaacaatcatgatacatcatatttctctcatggagccaaaatccccggctggtggaaaaataatagtttgcgcaagtgtgtatgattatttctattgaggtgaaaaacaatctaaggttttctttttacttttatttccaacacaaaattgattacgcatatgtattccacatgcaaagaattttaaataccgggatttgatagtgaacttatgctgcgacagactgtttctcctcgtaatcgtcaagccttaaagcttccaatagccttggccatgactctgggatgcctccaggtaagtcaaactccataagctttcccttggtacggtagtattcttcaagaggctggctctgcatatagaaaaatacaaaaaggcactaattaacacctgattgttcataaactagcaatggaaaaggacaatagaggggcttaccgtttcattgtatatacgaagtcttgctttcaccacctcttcagtatcatcagctcgagtgacaagctttgacatacattgatgtggagggagaagtggatccatactaattccaggtcttccattctcaccctttaagttgatgtgagctacattaaaacccttgccacattgactacatgttctccttccaaggcatttgtcaaccaaaacttcctcaggaagcttcaaattcaccaccaaatcgatgtcagttacatctcccagtatttcctgaaccaaaagacaatccactgttagaaatgataatggagattgattatcaaaaattgcttaaaacgaataatacttacagcttgtctcatggtacgaggaaagccatcaaggataaaccctgattcacctctagcttcaccagcctcaagtcttttggacaataagtctacaatgatctcatcagaaaccaattttccctgatttacaatctccgatagctgcatcaagtaacaagagattgtttaacaattatgcatacagataacaaacaaaacaaagccattgactttaatatatatgaatagatctgttatgatactgatcaaatgtagttagaaacactttcaaatggacttagctcactagatctatcgagagatagacggaaattttcagatccaataatgaaagtccgattagctaaacattcaatttcagactatatggatccaaaatcgaacaaagaagagaatctccatcagaatcacagtaacagaaaatgggaaagaaaaaaaaaggtcgcaccttttgagagagaggtcaagaaaatgcaagctcttcacggacgagatcgccggtggcga

SEQ ID NO: 63931 - DNA, 2003 bp, Arabidopsis thaliana landsberg
ttgcaagcaagaagcaaaaacagaagaagctctagtcttgttgtattttatttttcacaattcaaatatatctttttattaatactgaattaattatgttagttatttatatatgtgtgcatattatatgggagaagttagcaaattgtattgtgaacaaattgtcgcaaatattattacaatgatgaacccaatttgtgtgtaaatatgcagtgatgatttcagttgatatctttctcatacgacaataacaataacaattaagaagaagtttttttttctgaattcaatcataacactaaaattattggtttgtgtaggcttcacaatatatctttaaattaaaatatatatcgtctttttgcctaatgtacctaaggttaggaggaaaaccacatctactagtcagggaaaaaattgcagcctactacacttctcatccattgaacaatattaattaaaatatataataattggtagaaacggattagagttttgactaacaagatccaaaacactagaacatttatataatgggaaataatgattatgttaccactgaatgcatgcaaatgagacttaaaaaaataagccccccatgttggcgaataatcatggggaaaggctaatggtgtgtttaaaaagttatagagaccaaaccaaactaactttttttttttcttggttcttctttctttcttgaaagtttatactgattctagtttttaactcaacaaacaaaccaacaaatacgaattatgtttctctcttttttagatggaagaggacaggcagcttggaaaatagtttttccaaaagtaagttgtggccctatgttttggtgactaatacatctaaggatcagattacacttgtgtactaatacattctaattcatagctaaattctcgagaagtacgaaaaaaagtaattgttttttttctctttgtgaaaccagagatgatagatgataaattaaaggtaacttttgagaaattggtgagaaaattttctatttttgatgagtcagtcctaagtttaaagagaacaaaaagctacagaataaaaatgatagaatttgagtattataagcaaattatgttggaagtacataaatttgcaagtgtggcctctaaatttgatgatatacgtgtggcctacacctgatccggtttagggtaggattttctatattgttaattgtttatagagttgggcaattgagagcctttttctccaagttacagtctctctttctatagatctttgattgggtttagtagttagttgtcttgtgtcgccgagccaagcaacatcgtctgtctacgtctattataattatttaattttactatgtatatatttttatgggtgtttgcttagcaagcactgactcatgtatgatgcaagcaccttcgcacacataaaaataataattttaaaaaataggaattgaaagatttttcaagttgggttgagagattaaaagatcattgaatatgaagaacttttatggttttggtgttactatgtataactatctcataattagaataatgttttcaaccaaaacaatatggaaacctatctacacgatgggtttttgaccaagaaacgatttgatatagttgttctgaaccagagacgttctaattgtatgtggaattttacgtagcatagcaaatatcaagatttcagtctcgttaagctaaaaaacgtggatttcgttaagctagtgtttagttgcttcttggaatgcagaatagcaaaccaatagaaacaagagaagatgcatttgattaagaaacagagtgcatatatttcattaacttggttttctctttggtttggtgcctatttattaactttctatgtatatatgtaaatcatgattttttttttaacaattcctattgaaaaagcttgaaaaaaagttttgacgggatggggaaaagaccatattagctggggggaattaagaaaagcctttttttttattgaaa

SEQ ID NO: 63932 - DNA, 1546 bp, Arabidopsis thaliana landsberg
gatataagctctagctcagaacaaatactcttgggattcagattcttcatcagaaagttgagcatttgtatagctaaaagccgtttctgagaatctccctcaacaacacctaaatccagaatcctcagacccgacttcacaaaaagccttgcatatgcctcgacagtaaaaggattgtgcttggaaagtgccataacaagtgccatatgagacttagcttcacttgaagtagcttcaagagcaacagctaagctttgacaaacattattaaccatttcactagaagcagatcgccaattatcgcaatccacaagtgacttcaagcaaagagcagatcccaaagcaagatgctgttgatgttgcgaatctataagagaatcagagagtggcttgcaaagagaatgaatcacattcgttttcttatcttctggtgttgtaggatcaattccatatctagccatagcagctactgcccttgagcaagcctgttgaacacgtaaagacccttcactggagctcaatgttcttataatcgccggcatgataatgtctatatgaggagcaatcttgactccatgagcacgagcaaggtcttcaaagagagatactgtgtaaccaccagactccaacccaatctctttgacatcagaaagttgagcaacaaaaacatgaaccacctttgcatccaaatctttcacaatcgatctcaaattgctcattgcagtcttgtgggaatctggatctttgtcaagattagccaactcttgtctaaatgccgaaccaagatttcttcccattctccccctcctggttcctctgaaaagcaaaaaaagccacaatgatgaattcagtaagctagacaataaatgacaacagtatcggatatattagtgtgtatcctagtaactttttcataatgagatactaaatgattctaaatcatatccgaataaggaaaacaaatcaatcaacaccaattttcatatgagaaatgtaccataatcaattccaaaaaaaactaaccaaaaaaatgaaaacatcattctccggatgaattatgaaattccgcagaaaattgatgaaatcgatgactttaaacttcccagaaactgatatttttaacaaaaaatgaacatcttgatctgtgaacataaatatcatcgaacacaaaaagggattatatactctgtattgaactattgataaatacacgaaaatggtccttttttgaaattcgaatcctaatcgaattgaattgaagataaccctaatcgagaaatacagagtttcgaattctgaaaagagtaaagttgatgaatagcaaagtaacgaagagaaccagtgtctgatacagcgaagattgacccaacaaaattaaagtaccaattcttctttcccagaaaaaatcaagaagacccaagaatctgagagtccccagataccaatagagaatcgcgcttcttctctttttacgaaaagacgcgaagaagaagaaaaccagagaaaaaaaggattcaaccctttgtttttaatgttagagttggtg

SEQ ID NO: 63933 - DNA, 1905 bp, Arabidopsis thaliana landsberg
tcgcaccggcttcaagttcgatctctctttaaccgcggttcaattattccgggacatcgcctagttcttcatttaaaacggttagtttatcagtcattcaataatctacatcttttgaatcacaagcttcacggattctgagcaaaagtttaaaaaaaactcatcgatattaccaaattaagctcttagcttcgcattaatggcgagatccaaaaactataaattgtttcctttttccgccatatgtgttatttatttattgctcttccctttctgctaaattactgttactattttaagcttcttccatttttttttttgttcattgactagtttcatttgaatctcatttttttttctctgcgttatttcttgatttgtattgttttagttgtttcttctgtgtagtgattttagatctaagctaagtaatgtatagtgaaaaagtttggaaacttctcacagttggactcaatattactgtttatagttcttcatttgtttgaatctattggatactaaaaaaagtttatgtactcttgttttaggagctatatgctttgtttgattctctgttttttcactttcctcttcagcctatgtttaccaaaaagttataatcatgtactagtagttgcttttatgttccataaaaagaaaagaaaatgcaacattcaagctccgagctagtataatctgccaccaaagctctctctcttttacctctgtgcttccagatctatcctcactttcttcaaaatacttcctcatagatcaaggaaacaagagcactttcactctagtactcttgaaagcttgaaaatggttagatctagcaagttttcacaggaagcgacgctaaagagaggagagagcagagaaaaccctactgatttgagatctaagctaactaatgtaactataacacttgtgtgattcaatttgatacgaaaaagttttatgtattcttgttttaggagctatatatatgtcttatttttaattctctgtttttattatggaggattttggtgacactggtctgttaattgaatatgagatgatttttatgcagatatatactattgaaatgcgtgatgtaagatttgctatgagcattcgaccaaggctgaggatagttggcgttttgattttagcggcatggattgggcttgtggctttgtttggtttgctaaaacctataaagaatggttgtactatgacttacatgtatcctacttacattcctatctctgtgacggatgatacaactcctggaagatatggactttatctttaccatgaaggttggaggaagattgactttaaggaacaccttaagaaacttagtggagttcctgttcttttcattccaggcaatgctggtagctacaagcaggtaaggatcctccttttcttggttcaatttctgagagctagaagtaaccccattatagtaatattatatgacttagatggtgccactataaaatcattagatattttcaattgtgcaaagccgaagttggaattctttaactagcagtttttgggtggaggcgttgtttctttaacatgtaaaatgtgttactcttgctgggaacttatcttctggtttcatataccatactccttatcggccctgtttttaattgtttttcactcacgtcaggtctgtggcatccgaatctgatatagcgtataaggggggcccatttgagcgcacattttaccaggaagcttctgtactgcgtgggggaggtgcagatacggagtctgtatactatgatttgcctattcagtgcagtgacagactagattggtttgctgtggatcttgaacgtgaacattctgcattggatggtcgcatacttgacgagcacactgcatatgtcgtatatgcca

SEQ ID NO: 63934 - DNA, 532 bp, Arabidopsis thaliana landsberg
accaatatttcgtgaagaatgaatttaatttataatatatacatatccataactaaacaaaacaaacatattttcctaagtaaatagacaaaataggttgtctatttctaatcgaatcttacaaattcttgaactttatactcctaagtataagtttatcttaagtagtgtatatttttattacaaaagcataatatgaggcaatgtgagaccaacaaaccatatgcaattattgcaaaacctcacgaaaacaaaagtccgaaatgtgtggtgttccaacttcgtgcatgtgtaaacaattgtgcatttgaaaccaaaatttaacaagggttataattagagaaaagggtaggtcaaaaattatttacatatacaactagattcataaaaccgatatgattgaaaagatacaaaggctatctgaaccgtacgggaatgtaataattagctatgttataattaaccatttcctttttaaaaaataaaacaaaatgccaaactgatgtgaacacaaaaaaaaatcctcgtaaaa

SEQ ID NO: 63935 - DNA, 1006 bp, Arabidopsis thaliana landsberg
tgttgagcaagaatcttgtccgcatcatcatcttcttcacataccccatgcttgccactcttatccttcttctttttcttactcattgaagtttctccaaccacctcatcactcctaatagaaggatttttgtcgtctccatcctctgcttcctccttgtcatcttcaacatcgagaagagcaaagctaacagacccgcctttcttcgatttcaacttctttttccgagcagaaaaatcaatctcctcagctttaggtttctcacatagcttcgtaccaatagagccatcgtcgtcagtcacacagcatctattctttgattcaacacctcccatggatgagataagggggagaccatcgtccccaccccacgcactcgaattcctcggatccattgatagaaatcaaatatgaatatagcctgtgattaacccccaataccgaaaacaaaacatacaataaggtatccgatcattaactctagaaacaacaacaataaatcaacaaaatcaactacaatgttcagagcgatagagaagaatacctttttctgtaatgggtttaacttcatattaggcaaaaacaaactcggaagattgacggaacaaaaaacaattcaccggagaagatcaggtctttcaggagaagagtaagcaggtgatttcttttcgttgcagagatatatttgagagctttagggtttctgaacgcaattcaggtttgtcgcgtcgtatttataaatttcgatcgaagaagaaagcttgagtaaggagaatttataacttttaggttaaaataatcaaacgactgcgttttgtgagtctccagtttttatttcattaatacatggaaattggaaaaagtcgaaaacagaagaaaaattcttcaaaggaaaaagtcacaaaactaaattcaaataagaactgcacagatctctgcgattagctcaagggaggaagacaaagacgatcatctaagtcagagataacaatgtctagcagtgatg

SEQ ID NO: 63936 - DNA, 489 bp, Arabidopsis thaliana landsberg
gtaaatgaaaacatagttaagtaagaaaattctacagatatttacaaatgtttattgaaagaaaaagagagaagacaactctattcttggaacgattcaagttttgttttgtttaatctaaacgtacacttaggtgatgatacgataacatggtgtcatgatttgataagaaaaccactttagattatttattgaaagcctgagttgctttataaacacacatatattcccccatcaatatattctacttttccctcaaacaaacaaatattgatcgtactttgttcctttaatctcgaagttgtctttacgtaatatgaaaacataacataactcccttgatattaaatctaggtctagaactcgcgcgaaccaagttttggtaagagaataaaatgaacctaagaatatatcaaaagatcaaaaatatccaaagaatatgcaagagttagaagtgaatcgaagatcacaaagctgagactgtgagta

SEQ ID NO: 63937 - DNA, 1199 bp, Arabidopsis thaliana landsberg
  unsure (1)..(1199): unsure at all n locations
cctgtatgttcttcaatggggtcctagactaggttataagaaaattaaatagagtgcttagggtagccacctagagctcattgaaaatgagataaactttttaatatgaaaactacagtgtaatatgaactgtttaccttcggaaccaagaagtctgagacattcgcnnnnnnnnnnnnnnnnnnnnnnnnnnnnnnnnggaaaaccacagacacatgagaaaatcaagccaatagtttcggacagacagagcgatcttcagtaaaaagcaaacctgtgagttttgttactgcctcttttttccctttgtgtgacgcctgagtgacaacaggtgaagacaaaacccgatctgcagatcccattgaaactgatttctgtcgattcagtgaagttcctgcattaacttttccaggagtgtttttggttccccaactgttttgacttgtaagatgtggaaagtctcccctgctcaaaagaactctcagttagtcgattctttcaaaaaatataaggcgaccataaaatgcaaactcgaggaacaagagatgggttcatactgttttgtgtcctgggttgattgctcaactggaccccagaaaaggtcatcatctcctttggattttgactgagaggaagattgagaaacagcctgcgatggtgaagatgcagaacgcgaccaggaagcaccgccctgatgagcctgaggtggaatagctttctgggtggtaggtactggactagggggtggatgagatgaggtcgtcatcttctcctgctccttcacgatgtccctaagcgagctaggttttgtagattttttgggaccagaagaccatgcagcagccggtggaggattgtttacagactctcctttccagagaacaaaatctcccagagaaggcccataaggaatagccggcaaaacttccttctcctgctgctgcagaatacgagaactttttcccttctcaacagagtttgtttggagggatgtatctacagcaggaacatgtgcagcaatttttgcaccagaagtttttgccctcgcagatttcttacggctcttttttgtttacctagcgtcaataaaggtatcatcgtcgaaagactctgcattagtggtcgcgacttgcataaatgcatcattgatagagatgagttccattacttccctctctttgtcacttggatttggcaaa

SEQ ID NO: 63938 - DNA, 1385 bp, Arabidopsis thaliana landsberg
gaaaatcacaaaaggctcaggcttgccataatcgccgccatatccttttggttttcctcggcctcctttccaagacatggacccaaattcacggcttgagtggtgctgcgatatctcacaaacaagatctaagttagatatgagccaaaccaaaacccaacaactctatcttctcctagggttatcgcctcttctcaacctttccattgggacgtgttcggtcaacagaaacctcccatcttcggagtaatctgattgggtcacgagtgggccttatgggcttgttatggggctttgtgtttaaaaacaaaaaaaaagatttacatctgttgacaaaaatctcagtagtaacagttactgaggatgtttaggaacaaaactctgtttttaactagacacttggaaacagagtccagtcctgcctccagatcacgaaaaccatcttcaactacatctctcctcatcttctcgttctccattgtttctacttcgaataaagtttttctcgaatctaaaatagaacccagaaagacattatcgagactcttcatttcctttatcagaatcagagatttatctgataatgatgacgatacgaaaggaatcgacaaaaaccctatggtagtcttgaatatttttgcgggcgatggtggtggtggtattgttgataggaacaacaaaagatgtctgaacatcgagacagtgatttcgattgtctctctcagaacactcgtggatgctatcgctggatcttgatctgtgttggtggaaatatctctggtttccattttcttgagtgcattgatctgtttagagatttctttatttgccttcttccgcaagttaaaatatgctttcgcctccttctctaagctacctttcctacgaagagcagatttgagattcgtcacgtgttctctcatcgctacaatcacctcccgtgtcccctcatacacgtcgagcaacagaacagatccatctaaagattcttccagaagtttcccttcctggtgatgaagaagagtgtgtttcacgtaaggagactcaagtagctcatgcacgcaaccgtagagctcagtgaggttcacgagtccaatgagaaccgtctcatacccaaacgaagctgaaaccgagattgaggaagaagatctccgccagatactgagccggctcaaagctgttctgagtttaacagagagtggatggattcttgaaggaagactcacagatcgaaccggttggtgtgtggtttgattagacaagaagactgaatcgagaccttccatttttttcagacctcctaattggattgagatgctctattagggttctagagggtttctatatatattgcaaagaagctcacaaacagagcggtcctcggg

SEQ ID NO: 63939 - DNA, 312 bp, Arabidopsis thaliana landsberg
gagtaccttctcgttcttgagaaggtaatgtcttttcattttacttgttagtcttcgttgcattgcttcatgtgtattcttctgatttgggttgtaactcatttgacagttttctggttctgtaaatatattgaactagattctaaggctaccattctaatataaaatccttgttccaccggtgttttagtgactgtaaagggtcttctgtagtacaaaaatgcatatttatactgttatagtatagtgtttgatctgcatctcgggctatattcatgtggatgttttggttttcaggctggtgagtttttt

SEQ ID NO: 63940 - DNA, 603 bp, Arabidopsis thaliana landsberg
ctctctgcttcttctgaatttttttcatgtaatattaatatagcttcttctagtgttcgttcgtgtgagatttgctcataaagcactctgcagtttgggctagtgcgcagttgttgtacttggtagcagtgatagtgtgtgttttttgtgcctcaaagtcaaaattgattgatcatccaattatgtatcactcatcacatgtccttgtctgaaactgggttcttgtgattgaacaaatcagaacagcatgcattattaagtaggataattaccggttataatacagcacggaaaggacaggatatatcttgataaacagtgaaatgaaccacagaaaatagcgaagctaagctcatgaggtagatgagccaacctaaaggaccttgttgccatcgcacataatgtaaaacagcttcccaaagaacttgtttagtggcttgaactccaaaacggtgcgttgcttgagagaatggggggcaaggcgtctcttgaggctcaagttctcgtctttgagggtctcaagggttagagaaagctgtctgatgacctctctcttctcttcgtccttgtctaagagctgtttcctcagagcatcagtctctt

SEQ ID NO: 63941 - DNA, 516 bp, Arabidopsis thaliana landsberg
aagcttttgtcgtacttgttatcgataatatataatcaatttcttttgtaaactacctattcattgccatgttggtaaagggaatctttcccctctttatggatagtgtttatctaactctatgcaagttttgttattgcctcttcttatgggtttaattcttttgtatttttgtatttgatgaagtttaaattgaagaaaaaactacttactaaatattattgcgggaaaaatctttttaatggacatggaaaatcttataaaacatagtaagactttttggactctgatcctagaattaccaatgtgatgtcttttgatggttattcgatgttagaagtaaaaacatttgaccataagacttggtcgtcggacaaagatgaaaatggagtttctttcacactataccagaaaaagaggtccaaaatgtattctgcttttctgatattaaaaaccgtgcaatccgtgtttttttggggaaaaagaataatttttttataaaattttttcttttta

SEQ ID NO: 63942 - DNA, 158 bp, Arabidopsis thaliana landsberg
agaaccaggaactgctcgtactaattggtagccaatcatagatctaagtggagcaaagctagcatgacttatgtttgcaggcgagagatctgatttgagtatgggagagatgtacaaacggatccatcgctcaagcccagtatgatatcgaacataca

SEQ ID NO: 63943 - DNA, 1608 bp, Arabidopsis thaliana landsberg
tggcttcactcattatacaagtgaagaagaggacattgtggaatatatcccttggattgtagctgaggaagactaaagggaatgaagagttcctggtttttttgttcttttgaataatctcacatgattgtgcagttgttgcataacatatgttccaacttgtctggagtttctgtattcttatgtcgtattctagcactgatatttttaggttataaatctgagattaaaactcataatttcatctattatcagaatttcttgagaaagctttatgatacagataaaaacgataccaaagttgcttctgtttgatcaataagttttttggttttttgtcacaagatcaaatacaaacacagatagcaataatgtatttaacatgataagaatctttccagttttaaagaacaacttcatagagaataaaacaaacgaggaatgagtgtaatgaacatataaaccctctgttcatctactttccaagcaaacggcgaccacgttggtttgattgttgcactctgaagttgagttcgtcaacatcatcatgaagatggtcaagtcctttgttctgcttctcgatttcgcttcccatgtcaacagccatgttctttagctcgccgagtatatcactcaagtctgaaagcccatcgtcttgcttagctttttccatctgtaataaaccagtattaagtttagtggcgtccaaaacacatgtttttcactcagatatatatgctcatcattgatgagtcatcaatgtctcaaattgttagcattacaggaccacagataaagagttcatgcatcactcatatcagatgcaggagtatagtaatgttcttatgaaaggaaaaattgaagagagggaagagaagtccaaacctccactctctgataagcatcagctgattcggggagtggttctcgggttcttgattgtcctctgggtgctgagttcagtcccagtttttcccttttctctaagtggttaactcttctcgttggtgagtcatctaagccaaaacacaaaataaaggattcagcaattaggtgaaagtaaaatagctgcgagaagaattgagatatcaatgaccaagaagtaaacctctggttacgacgggaccatttataggacgagtcttctttggtttccaagtctttgaaaacatgcctccaaggcttccaagaagcttctcaccctgaaaaccaaaaatccaaatagtttcagcatcaaatgtctaccgtcttcttatctcacaccaactaatgtcctcagaaaaagattgaatgtttccattttataatcaagaaccagaaggaagaaaaactcacacgactgagatcatggtcgatttcaacggctttatggtgcgtcctagtgatttgctcgccctgatcgtgtaacatgaccaaagttctggtagcatcagaccttatatcttctgctaccttcaaacaaccttgtacagatttcgtagtctcttcagccttgtacacagcataaccttcaagctcctgaaccgtctggttttcaataccaccaaaatcacggaaattgttcttgtactggtatttggagttcgaaaacaatgactgttggataac

SEQ ID NO: 63944 - DNA, 1609 bp, Arabidopsis thaliana landsberg
cattttccgctcatgtgtcgatgagcatgatgaattgggcttctagtaatataattgaattgggcttctaggaatatcagtgaatttgggctaaaaggccgaaagaaacttcttgtagttggtaaggtaactatgaatcaaaaagtaggaccacattttgtatgggaaatttgcaattcaattctattattttggtgtctattatacaactcgaattaaacaattcgtacatgatattgaaaatcaccataaagatgagaaaccataacaccagtgatgttacaaaaaataaaatcaaccaaccaaccaatagacacaattttttttccgtgtaacacgagacgacccaattattcgtcttcctcaaaaagactcgaaaacgacgtcgtattgaattcaccactcacgaagtttccgtcttcgttgttgagagtcggcttccgaaaactatctttcttaattgctttggttccttgccttgccttgctcctcagaaatttttgcttctgtttgattttgtttttgcccctttgcacacatatcatccaaattcgtaatcatttttcacctttgaaagaatctatctccttgctctgttatctccagttctagggcatacgccgatcacatccctagctccttttggctctaataatacagtaatcttaggttttcggggagtgaatcgtgtattggtattctagttttagctcaagaacatgtttttctccggcgatccttcgactcggaagcgagttgatttaggtggccggagcaccaaggagagagatgctcggaagcttctcgagcagactagaatggagcgtaatcgtcggttactacagaagcagcagaactctgctgctctcaaaattcaggtttgcgattgaaaagccttttcttttgggactctgggattttatttgtgttttctgagcaatgtagaacgaacacagtgagtcattttgcaagatatgtagaacttttgagctaaataatgtttactttttatagttttgaggtttagttggaaattgaaccgacattttcctttgtagatgttattctaaatctccattgtcctcgttagatttagcctctggaacaaatttatcctgttacggtgtcctgcggtacaggtcttgtggatttttgttttgagtagtagtttttaagattgaactattgcgattacaaaatgtgagcttgagctgcaaatgcaacacttcaaagtgtttctttttttcttctattatgtggacaagtgcatttgttgtgggtaaagggaaaaattttttcaatcatttatgctcctgatgggcatggtgctgactagtttttggctacagaaattctttagaggtcgaagatcaatggccattgagcgctcgaaggtgcggcatgatttctgtgaaacctatgggaataattgccagaatgttgataggtactttttctttggtctattatgtttgctatagtttttttttggtctttaaatggttctatggctaattagttgtatatttttttgcctacatccagacattgctttgagccaggttcaagtttcctccggcagtttctgttgtttttcaaggcacaaaac

SEQ ID NO: 63945 - DNA, 1467 bp, Arabidopsis thaliana landsberg
aatgataatcataaagaacacatattttgaaaagctttgcttctaacaatgatcttatcactttgaaaatgaatataaatacaatttcaagtaagtgatcccgattcgaatgatcttattctatgcatttgaacaatacaaccctaaaccggcttgtcgcttaaggaaaatcgttgagagggaacataaatctcacccctgggattgtttcttcgggtttttctaccgcttccatagatgacagatcaaacactatcgccgtaatctccttctccgccgtagtctctttctccttcagtccaactaaaggtagaagacgaccagaacggtttaattaatcatcggcgatcaatcttaaccgatcaaaattttcctagaccggttaaatttgtcataaccggtcgaatagaccaatttatgttttcttatacggtacggcgtcgtgttcgtgtattcctttaaaacgctttattttagccgccgggaaaaaaattggtgacaagagcagagagagtcgccatggacgcagcagattgctatctcgaaggaaacgccgacgccgtagaattctgtcctcacgagtcttacgcaaactttctcgcagcttcgacttatacacttcaagaaggagattgtccctctcgatccgggtcagtgtatctatttgatgtcggagatgtggaagatgttggcttgaatcttatccagaaaattgacactgctggagttttcgatatccggtggagtcgtggtggcgatggaggagacgtggcgcttgctcaggctgatgctgatggatgcttgatagtttacaagatagatgagactgaaagtaaaggtactaaccttttgatctttgtaatggaaacatccgaatcaatggactcagtgattgagtgaaataaaaattggaactttggtgtaatctgaagagagatctgtaaaggatcaattgatgggttgttcttaatatgcagctaagttttgttttgttagcttgttggtgatctgagtaaagttttatgcttgaaacaggtactttgagagaagtctccgggaaaagaatcagctcatcaatgtgtctttgtttggattgggatccatcatcaacatcaatcgttgttggtttatcagatggctctgcttcagttgtttcattcacggattctaatctagaaacagttcaagaatggaaagggcatgactttgagctttggacggcgtcattcgatctcaacaatcctaatttggtctatactggatcagatgattgcaagttcagctgttgggatatcagagatagtccggctgacaatcgggtttttcagaattccaaagttcatacaatgggtgtttgctgtatttcaccaaacccaagtgatccttactctatattcaccggaagttatgatgaaaccttaagagtttgggacacgaggtctgtttcgagacctctgaacgaaacat

SEQ ID NO: 63946 - DNA, 566 bp, Arabidopsis thaliana landsberg
taactgtaccgagaccatggcgctcgcacatcgtgagccgctcagtcggcaaactgttggcgcggtcttgggccttggcggcctcaacagccgccatcgcctttgcctcggttacggcaaaccactccccgccctcatgttgctcggcaagcagccagtgagcggcgcactcgacggcctccgcgtccgccgacacgggctcgatatgcaccaggcggacggggcgtccgcgatctcgactgaggtgatagcggcggagcgacgggtctttagtcacacccaccttgtgtcggccctcgctgtcacgtgcgatgtagagatggcggggccaatcgctgaagctggccgtcacgcgtcgtcctccgccgccatcgccttctccaccaggaggcggatcgcctcagatcggctcgggatacggtgctgcttgcgccttcactcctctacgcgccgaacccaagacgccggcgcgacgatctgcactcgctcggtctccgacccctcatcaagcttcggcggcacgccagcctcaattcgatttgttccagtttcgacgggcataaagc

SEQ ID NO: 63947 - DNA, 339 bp, Arabidopsis thaliana landsberg
  unsure (1)..(339): unsure at all n locations
cacagggcgcacggggcatgaggcgagacaacagcggcaggacaccccgaaaaccgacaaacgggagaaacaccccgcccagcaaagacgaaangaccacacaggcncngaagacgacacacgccccagaagaaccacacaggagaaagagaagcagccaccggagacagcgggacgaccgagacgcggagaagcacaacgcccacagacgcggaggccagcacaaacccaagacggagacggcaccgcgaggacagcccnagaacaacgcaagaaacgagagcgccgaaaccgaaaagcagcacgaangagcaagacagagcacaccggaaaggaaag

SEQ ID NO: 63948 - DNA, 119 bp, Arabidopsis thaliana landsberg
  unsure (1)..(119): unsure at all n locations
ttcctctttcatttcttgctgattcgcccctagggattttgacctttttaacgncccgggccccaaagggcccggcgaaagctccgggcctcccgccccaaagagggccccgaaaccgg

SEQ ID NO: 63949 - DNA, 549 bp, Arabidopsis thaliana landsberg
gagacgggctttttcaatcgcgaggccggagagctccgcgagctctgtttgaatgcggatctcttcgttggaaaaattatagacgcgatttttgtaaacgttcaacgcaccgatggcctgtccgccgaagaccagcggcacactcaggatcgagaccaatccttcgctgcgggcgacggcgacattttggtaacggcccgaactttgcacattctgcaattgtaacggcttcttacgccgcaccacggtgccgatgaaactttcgtccaaatttaatcgtggttttttggtgtagtcttcacccgcgccgaaactggcccggagatcaagccattgccccgactcatccagcatcaggagcgaacacatcttgccatccattagatgacaggcttcgcgcgtgatgacgttcaaggcatcactgagattgagcgtggaattaatcgtctggccgacgctctggagcgattcgaacaggcgcgcgcgcaggcgcagctgttcatgctgccaactgttttgaatgaccttgcccgcctgcaaagcgagctc

SEQ ID NO: 63950 - DNA, 445 bp, Arabidopsis thaliana landsberg
  unsure (1)..(445): unsure at all n locations
gagttttaatgctagatgatatcaatctgtgcataatcctgtatttggcgtaagccttttgattttataaggcgnagactnnngggaatggggcgaatatgtaatgacaggatatcacttacaatgggggacgaaatggcacggacttgtattgcgcatctgaacgctaaatgatcatatacttgtctcaggccgtcttgagtcttacagcaagagcttcagcgatgtatatagaggcttaaatctcgaatatcagggtcaagctcagacttaaactctatattaacaaaatgtccgaggtctatcaccatcagctgcttgcgtcgtcaacactcgcttatatatatgttataaaacaacttcgggtctctgtgtgtaactaagaccgaccagtcatggaaaatattgcaggttaaagtggcacaagcgaattatgtggcggttc

SEQ ID NO: 63951 - DNA, 550 bp, Arabidopsis thaliana landsberg
  unsure (1)..(550): unsure at all n locations
agattcacaaactgaaaagtattttccgatcctaaagagaagagcctttattagtgtttggtcaaatccactacttgattcattgcatgtaccatgcgtaattttaaatctactcttcaagctcacattgtcaattttgagaaaaaagctgaaaaccttaaaaacattatatgaaaaggataaattttccaatagaatattaagcaagatgctattcacatgtttcaaacgaaatttgatcctttttgtccacatttctctttggaccagaaccgggttacttttctattcatcaccgaatgtgtaatatttgtttacttgagctaacttaaactcgaattagcaaacaaacatcacgagtatgtgtcagagaagtgtggacaaaacgtatcatgcctctcttgctgatgttgctattgaagcccaaacatatgcttactacgtatctgcctctctcttgaggctcnttacaaaatctggagacaactttctaaaggcttggagccacaaagtttaagatatgagaatttttacagaatgtcatttccat

SEQ ID NO: 63952 - DNA, 302 bp, Arabidopsis thaliana landsberg
gtgatgactcttttttggatatttatgtcgtatgaagttgctggaatgtttagccccttctgctcgaatgaagttagaatctgctctggatgaataatatggtaggagcgcatggacaaatagtgggagggaactggtatcaaacaatgcagatatatcaccatccttactcaatacacagccaaagagagaaactcgcttaggaagagagaggcattgattacacatctataccatgtgaatctcatcgcagagcagcacatggacccttccttttttaggaagaatacccacgccaaact

SEQ ID NO: 63953 - DNA, 1089 bp, Arabidopsis thaliana landsberg
gtcgaaaaagcctacacagtggtgttacaagaatttcctcaactaccaatccatggtgcgtataataacagaacaggcaagtagtccttatcttcccttctccaatttaatttgtttttgtttctttcgcagaaaaaagtagttgaaatcagagatcaactcaaacggattgctcggagattaggcatcaccttgaaatcatgtgacggagacatggaggtaagaaactgtagcactttgcttcatttgaaaaaaggttgcatgtttctaacgttacactgtttcaggctgtgagaaaagctgtgactgcaggtttttttgccaatgcatgccgtttagaagtaagtgacccatttcagttctctgtttctgcacatcctttcagccctataaagaaatctgattttcatcatcttaattctttttgatgttttagccacacagcaatggagtatacaagaccattagaggctctgaagaagtttatattcatccgtcatctgtattattcaggttagtagtatatcttgttgctatggatttagcaaaaacctcaataacatctaaaagttgaagattttttcttttgaaagcttatttggtatatatactctttatacaatcttcagggtgaatccaaaatgggtggtttaccaatccattgtctcaactgagcgtcaatacatgcggaatgtcgtcaccattaatccttcttggctgacagaagttgctccacacttttaccagaaccggcaaaacgctatgtccttctaatcaataagttatcacctgcgtttcaagatatagtaacagttgatcctgacaacgttttctgatagctttatagccataatcaatgcaggaatgtttgtatgtagttacacaaatataaacagagttctattgagtctatgatttgaagtttgaacaactcaacttaatgaataaagcatagactctatattcaatcagatttgcctgtttatagttttggttcttctcaccgtttacagagtagaaaaagttaaagaaaaatgatcacagaatcgaatctcctattcagctgaaaatctcggcgaacttctcgga

SEQ ID NO: 63954 - DNA, 538 bp, Arabidopsis thaliana landsberg
tggatagtttcggcgttgggatgtttcaccatatccgtccgttttctagccttctgggtgcctacttttactcacatcggcatcagcgcggcggatgttggcaaccctagcaggactatcctcaggacaagcttttcgtaatgggcttttaaaaactgcattttatggttgcgcttgcgcgacttccgcggatgtcgcggattttcgtggacctttgccttccaccggtttcaagcgaaccgcgttaatctgtagcacgaattgaagtttgctttcatcaagcagcacattggaagcccgttgcggacgcggagccatttgctgcacctgcggtgcgtaacgagatgaataacggctgtgaggattgctcattacaggcatcgaaccaaccgcgttttgcgcttcctcaggtgccttttgcgccacgactgatttcaccacgaaaacatgctttgcgttaatcaaacctttcatcacgcgcgccaacttaatagagaagcctaggaaggtgaacctatagggcgacacaaacgctaca

SEQ ID NO: 63955 - DNA, 499 bp, Arabidopsis thaliana landsberg
  unsure (1)..(499): unsure at all n locations
ttcgcgaactcgctccgactacgcttagctaaccgccaggcttccaaaaaaccggcggagttataagcttatttgccgaaacnctcggcgaggcggccaagaaccctattttcaccagcaatgccgataatgctgcattgaaatgcactactgttcttccgagcaacaacgaatggaaccagaccctgatccaaggcggccgcaccgactggaacatcagcaagacgctggccgacaagatgaatgcattgggtgatacccgcattgccgtgtacgctaatcccaacaaggacggcctgtaccagggccacgccaacggccttcccgatgcgattgctaccggctacctggctaccagctcgactattggaaaagcattcaccgacgcggcagcccctgaggtgattatgacctatgccgacctgaacttcatacttgccgaaacagccatctgacggagatattaccggtgacgcgaaaaagtactttgaaacaggca

SEQ ID NO: 63956 - DNA, 2145 bp, Arabidopsis thaliana landsberg
gttcggattttgaaaatgaggattaaccgagtatcgagactaggtttaaaatttgatgcttagaacttcctgcgtagaattaaaaatttgcttaaatttctaaaagattgggagttagaattctttacgaaaataaatcgtttaacggtaaacgaaggaaattatccggttcgatgattctaaagagaactctaaatttagttgaatggaacggacgaacggttagtgtttaccacacaacgtgaatggttttggtagatcacgttatgttagtatctaaacaatgtttaaccggttttggaaattaaccggttttgccattcctaaaaattctaaactcttctagagtattttcccactggtttatgtgagagtgaccagaaaaaactcacaattttcaaaacccgacgggaaaaaaaattatggagcgtaatcgtattgcatgatagacttgaaatggaatgcagatctagattttgtagtggacttcatcatgagctatgtataagtccattcaaaaagcccaaaacacctcaccttgtgtgtttagaaggcaaagagaaaaattgtaacatctcatgcatttaaatgatttcgcatacacgttactggtacttaccattcaaagatagagagacattcattacattgtgaatctctaactaaattagtcagatatttcaacacaaatctgtcagctcgatttattatgtaaaccctcacccccttctccatcgttcccgcacacaattaaattgacattgcggtggttcatctaatctgttagtccatagtatgtacattacgtttaatatcactagagaagatttctaaaacaaattacacattcttcattaattcagtactcaaaaatacaactgaatagcacgaaaagatactttaaaatctactgttataaaatgatcattgagtagctatgtttagtcgtgtagttagtttgtgctagagtattcatatgtatggattattatgtaaggttatgagatgctacaatgaaaccctccagacattaatatcttggcttctccttcaaccacctcgtggagagatcttcaaccaacgccagtggacccattggaacttttgattcaaccctctctatttttttttcctaaaaatagagatacatataactttaaaaaaatttaaagtatttcctaaatatagaaaatacaatgattcaagtaagcgatattaaaaaaatgtttttgggactactacattgtcaaaatttattagattttaatcatcatgaaaataactattcaattcttcaataaaactcaaactcaaataaacaattcaaaataaatattaacaaaaaaaattcacaaaaaaaataaagattaacaaaaaaatgaatacagatttacttattttttgcaaaattttcaaaatatcaaaacaatcatagaaaaaacttaaaatgttatatatctgaataaatttccccccaaaagttttgtatagttttttctgcaaacaaaaaaatattttagtcattaatttctttcaactttaccttacatcacatcttcagaaaatgcatatcaattttcggaagtcaaaaagaatagtaatacgtaatataacccttttcaactctatcacttaaaaatttaacggtaacatatattagatttttacaattctaaaaatagcctgattaaaagtatacattgcaaagagttcgatttgataaattttacaaacttgaccgtaagagattatattacttttattttaagaaattaagaaatgaaggataaaattgtaaaaatataatgatttttctatttttatttttgcagaaaacatttttgtaacaactttgtaattatagataataatactaataaagtttaaaaaaaaacatttccaaaaatatcgcaaattcccggtcacacattctccatcattgcacttttcacgctctctctgtcttccttcttcttcttcttcaacaatcttcaaagcaaaagatcaacaacaaaaaaatgtcagacaacaatccagatatcgaatcatcaaccttcaacaatctaaacatcgacgtcacagaatcaatcctgtatcatctcccaatcccttccttagtcccgttcactctcgtctccaaacaat

SEQ ID NO: 63957 - DNA, 505 bp, Arabidopsis thaliana landsberg
tttattcagctgtgttttataactttcttcttctagtatatgtaggatgttgccatgttggtatatgattcctgttatgttttgctattagtctaaatgtctaatgctgatataagtgaaaaacattgttttatatatatcttggaaaaaatatcttgtaatagaatcaacttgttggaccataatgttctcgaatgtaatgttcatgattctcatacgaacaaattctacaaataaaaaaaagtgtttcgatgatctaaaactctattgttcgtgcatatactgacactcatttaaagaaggagctctctctgtgataattccctaatcgaaagtggcaaaaaaaaaaaaaaaaaaaaagttattcagattattttttttctggtgggttttggtgggagttttattttttcctcattcattacccgaagatcggacctttttaccattttaaacccacatttttttaataaaatttaaccattttatcatattttctcccctt

SEQ ID NO: 63958 - DNA, 368 bp, Arabidopsis thaliana landsberg
ccctgtgggcatgccgtacgaagaagactcactgctcttagagactcactgcttttagagtcaacaaaaaccttatgatgtgaaagctgaccaaatagtaacaatctctcaggatgtgggaaaggaattccctaaataaaatgacctggcggctattatcatacacccattgctctattctgggaaaaactataacctttttctcctgaaatcatcaccaacacaagcaacaagaaatgtaaaaccgaacctttgattgaccctatagatggtggggccgttacgttcacatacaaaactatttggatatgagtcgtcacgcaaaggacctagaaaatttagttcacctagattattcacttattagc

SEQ ID NO: 63959 - DNA, 228 bp, Arabidopsis thaliana landsberg
cggaccgcacggaaacaaagcccagcccaaagaggcacaggcaagggcggcgccacaacgcagaagggggagaacgagcaggccccgggaacgagaggcacaacacccaaaaccacaaaacagccgccgaaaagaaccaggcagagggccaggacccacgcccaaggggccacaagcaaaaaccggggcaaagaaagcagagacaaggcaagggggacaaagcagaga

SEQ ID NO: 63960 - DNA, 916 bp, Arabidopsis thaliana landsberg
ttcttcttttggcgtttcaaacgcttcttcgatgttttttcctctgcagctttctgtttctcttctcttcttatagtaaactctgccatttttaaccgcttgttatagtcaatatccatccttgttagtcggtcttgttctctccgcctcatttgccggtactgtaatagaaaaaccaatgcatcagtattgcacaagtttagatgtctagtataataagaaaatgatgtacacacgctttatcaataatcagggccacacttcagataacactcagccacaacctatagaatcaacacaacgaccatcaaccattaattactaatacccacatgagcttctcgcaactaatactctcagttcaagctctaccgactaagtaatcaacgtcacaaaacacttatagactaagaaatttaagattcctatcacatgtacaacaaggaacttctagtaattaatcgactatagcttcgaatccacacttagccatgcctaagaacaaaagaccaggcattcttcacaaacaatccagctgattttcagttactgaagaacagaattcatatacagaagttgaaatcattcacagatcacagccatcaaaagactaatacaggatagtctatggaacattctatcaaactcttatataggcataaaggcattgtgatccaacacaaaactaagaaaacaatgtcaacacaaagtccactaagataattcagatcccaacaatgaacttctcgtaattgattaccacacctaactacgcctaataacaaaatacaaagccttatctgcagtttcagattccagatacaaagccttatcgatttaagagaaaggcttagtttagttacctgatggaaatctccagaaccagaaccagcggaacttccagaagtattactaa

SEQ ID NO: 63961 - DNA, 527 bp, Arabidopsis thaliana landsberg
ggttgaaccgtacaaatgcaattacaaagctcaacagtcaccaacgaggaaagtctcatttactacacattcaactgctttatatatatatacccaatatgtacacatttcacaattgtcgaaacacaagaaattatctaaccatctcgccccttttcaatcactcctctcgttgaaatccaacttttgttacatgttactacacttcaccaattgacaaaaaaaaaaaaaaaaaaatcagctgagcttaatattcgtagaagtcttgttttatcttctaaatatgctacttaaaacaaaaataaataatatattttaccctttttttcgtcaaaataattcataaaaaatctgacctgctaggaaaaatgccttgattagcctcttttttattccttatttttttattctttttttttatttttaaaacattgataacattccaaatgggcttgggttgaagattacaagtatctgatccagttacaaaagcccaatagaaaaaagaaaactatcgacggaattga

SEQ ID NO: 63962 - DNA, 1289 bp, Arabidopsis thaliana landsberg
  unsure (1)..(1289): unsure at all n locations
aggccctttattcacagggggtaagggaaagtaacaaattaaaataaaaagagagtggccactagacttttagaccttctctttcagccgctggatgtgtcctatcgatgatgagagatatcatcttctaattttggcagaatcttttgtctaattccactctctctgtccgaaaatttcccatctttttcactccattcaccaggtaacagatcatttcaggttattataaattttggatagtgaaaattaatgatagagaaccgaaaaatattggaaataaacggggaactttttcttttgctatacctttttaaattggtggtgtgacatttctttttagttggacttcgtagaaactagaaagagtcatgcaattctaaatttactatggataggcgatcattactagctattaggttaagaaatccattttcttttagcaaaagattagtgacaactcatttactatgttttaatattgtagtatagtaaaaaaaaaatgtctttaagtatattaaatttattttgcttaagacttccatttttatttttatttttttcagaagactcataataaatcgatttttgtttgatggtaaaatagttgatgtatttatatcatttggtttattccagtgccattttttcattcgtttatcgaattagttttaattagtcggcacattgataatccgtaaaagacaacgtcaatgatccacctgaacatcttcatcgtccttaatttggaacctactattattaatttaaatagattaacgtcgtacaatatatactaataacatctaccacaacattaagtatggtacaaagatcacaactaatatgtgtcaaacagcccaaaatccgtcccactatatgtggcatgtgtcatgcaaacaagttacacatgttaattactttgatatagaactttgagttaaagagacatttttgctgacgcgcagaagaacaatattacatttgcgtggttgtaaaattataaatttaaggatcttgaaaaatacaaaaacaaaatgtataaagtaatttaatttcaagtcagagaaccttaagaaatccattggttaattccgcaatactttgagtctaatcattccgtatgagtatgttgtattaatttattcagtagatactcttcctgacgtgaataactaatcaaggcacttccgcctgtggctcgtcgatccaccgtggttnccgtgaagttggggattgcgggttctccggatctaacaaaacggccacagtgcaatcgtccatcagaa

SEQ ID NO: 63963 - DNA, 538 bp, Arabidopsis thaliana landsberg
  unsure (1)..(538): unsure at all n locations
gaacttattcattgtctacacaaccaatggtggttaattctgcgggaagtggaatcaaattggtttgatggagattatgaaaatagttttaccagccttgaagagtttgaaaccatcactggcttttatttttatttttctgaaaatcagctaaggatgtctagtcagctgccatttagaagggggcataagtacatgcaacattcagtaaacctagcatgtttggcttgaagaaagtaaatcgacgataacatttaagcggagttgaggggttttggcaaattcaatttccttttctgttgctcttgccccaaatttacaaagcacttcaacatgtgtagggctgccacggtagattgcataataaagtggtgtttttccatccttatctggtgtattggccatgtctccaatgatttctttagcatttgcttttgaacgaccataacattntgtaagaattgtagaaatgtcttcaagcaccttctgtaaaaatttactggcagcttgtgttgaaaaccagatatctttttatttg

SEQ ID NO: 63964 - DNA, 434 bp, Arabidopsis thaliana landsberg
agcctgaacgggaccaacatgatgattgatttggagtttggaacagatgacctttcccctcgccaggaacaccccgccttcacgcgggtttttcgggcccgaggcaatgaatatgccgctggcatattggtcgttgaggtattggcgatgcgcgtccaggtgtgcctcgatggcgtcaagcggtttcaggtaggtaagatccactacgtacattatttgtattcctgtgaagtgagggtgtcgttgcaagtcagtttccatgaaaacgggtcgctgcaaatggcgccggatcgaccaccggttgcgactgcgtcatcatttcagcaagaagcctgccggtgaccggcccgagagtcagaccgtgatgggcgtgaccgaaattgaaccacaagcctttcgtggccgcgggcgccggggcccgatgaatccggggc

SEQ ID NO: 63965 - DNA, 474 bp, Arabidopsis thaliana landsberg
aattcttggttgtttaatcaagaatccctttggtcgaccaagaaatgctgcggtcgaatcataccttcggacgatcggaggttatgataaacccccatctccatctttaagatcaaaatcaaacttcaccatttggataaaccataaccaattcttctcattctccacttgtactatatatcctatgctatttgatacattttgtatgcatctcttacctatagcagcaaggaactgacctctgagtggtgtgcttttgaggaaaataccatcaactcctatgagtgggcgacaagtctccttccatgatgatgtcaaagcagacgtaaaattgatcaaacaggtcttcaccatctgttccagggatgggttcaagtgacacattagaatctttattagttatttcgattgctatatagctatcttgattgctgaaaaactgttataaaatcaactaataacttgacaagtgac

SEQ ID NO: 63966 - DNA, 609 bp, Arabidopsis thaliana landsberg
cgataacaaaatcacaaaactcccatagatagtaactaagagagagattacaaacaaaagaatctatgcattcttattccagtaaatcatatttgcaaacggggcagtcgcttttcattgaaagccatttatcaacacagtcattgtggaacctgtgcatacaaggaagcgttttcagtttttcaccaactttataatctccaatgcaaattgggcatgtatcgtttgaagagaattcattgccacaatctttactagttttttgtgaacttttcgacttagacactggtttcgatttgggtttctctttatacgtatcaacaggcaattgattcagctgagcttttgttaatccttttttcttcggctgttgttgctgttggctcatttccgatgattgagagttactgtaggagtaaacagatgggctatagtaattcacatggtggttaacttgccaggttacattcacaccaggggcttgatagcttccgctgtgagtgttctcatcttcttcttcatcttcttcttctccctgctggtgccaatattctgcgttatcgtctgaagaatcacgataggacatttcatcgctggagtcttcatcat

SEQ ID NO: 63967 - DNA, 1204 bp, Arabidopsis thaliana landsberg
atctgtgaactatgagtcatatgtgggccagcgcatggatgtggttcaacattatatacatcaggctgtgtctgatacaaaactagaaaaccctgttctgttagttgaaaatcatcccagctgtaaaaagaatcttgctggtgagtatgttcttccaaatggggtggtatggaagcctcagtttatgtttctgtgcgtttgtaccaaagttcttggcgatgtccagtctttactgagatttcgtgacagcattggcctgggtcagccaagtagtacccgaacagcttcccttcctcatcttctttcagtttttctgcgccgtcgcttatcatcaggtgcagatgaaacagagaaagagatagataagcttctgaatttggatttagaggaggaagatgagtatgaccagttgcctacaatccgtatccttgggaaatcccggtttgagaagctgtcaaagtctcagaagaaggagtatctcgatgagcttgattacagggaaaccctttatctgaagaaacaattgaaggaagaatgccgaagacgacgggatgaaaagctagttgaagaggaaaatctcgaggacactgaacagcgtgatcaagcagctgttccactgcctgacatggcaggtccagacagttttgattcggattttccggctcacagatatcgatgcgtatcggcaggtgaccagtggctcgtgagacctgtctatgacccacaaggttgggatcgcgatgtgggatttgatggaataaatattgagacggctgcaaaaataaataggaatctattcgcttcagctacaggacaggtgagcccagacaagcaacgcttcactatccaatccgagactaatgcagcttatactagaaactctagagaacagacattctctgtagctgttgaccttcaatcatcaggagaagatctggtgtactcgtttcagggcggcacaaagcttcaaacatttaagcacaacacaactgatgttggagttggtttgacatcttttggtgggaaatactatgtgggcggaaagcttgaggataccttattggttgggaagagggtgaagttaactgcgaatgcaggtcagatgaggggttcagggcaaacagcaaacggcgggagctttgaagcttgtatcagagggagagattacccggtcagaaatgagcaaatcggtttgacaatgacg

SEQ ID NO: 63968 - DNA, 336 bp, Arabidopsis thaliana landsberg
  unsure (1)..(336): unsure at all n locations
aatccatgcgggcagcgcgagcgcaaaggttagccagcaagtaacgccgtgtaggagtgctattcgccatgatggcgctattcgctgagacaactacgtcgctgacgatcgcagttgttcttgctgaatgacgccgatggcgggccatttcaggcgtggctaagttaaagcctgccgagcacagggagagatcgcgctgtctgagcgtcgcagatgagatgcgcgatatatgcgcccnccgcaatgagcgtcagccagcgtagaacagattgccaaggtgttttgtggctgccagtgatacgcccgtatgtcccatagcagaccccaccgagaaag

SEQ ID NO: 63969 - DNA, 2659 bp, Arabidopsis thaliana landsberg
tttacagtcccgcctcgaggtatataatgatcgacagcccatttaagagcttggcagcttgttgtcttatctctgtcaattgcaatagctataggcccttcccttacttcatttctctccatattatctctcatattcgacatcattttccactcaaggaaatgttacattggcaaagtatatatcactattctaaagacgaagatgtcgtcattggttcatggacaacaaaatggaacatctaattagccaatatgagatttgaaaagacttaaaaagaggtgtagagaaatagaaaaaaatcaaagccccttccactttgagaggagaaccgaatctagctaaaaatagaactgttattgcagctaactccaggccatgcatgcacaaaaaaaaaactgttattgaaacataaaaaccactaccaatatgtttcaaacaacaacatgaaagaaaagtcaagtttctctggccgtgttgaaaacaagatctgttggaactaacgcttgatgaagattttaaattatataccataccgatgctgagatacttgaagttgaagcaaattgtcgttaatggtttggagttgggttaattcggatttagcgaaaccattactgcattttaattttagttcggttttgggttggtttagttcggtttgatatcaacattagttacagtttagcgactggtatgtgggcgcacattagcgtgcacggaagaaacaagaaaaaacaaccaaaacaacatcttcttcctcgttatcttcaacctaccctttgtcttaccttgatcctctctctctctttctctcgccaacacaaggttctctccgatttctcttcttctcattcaatgtctcgtcttctacttttctcgatttccagttgaatttttctggggatttaacaatatgtgtttattttcttcttctttagtcggtttattgtgcggtggagagtttctcactctcttcttcttaaccatcggaatttcttgagctcgatttttgtctaattctagtttttggttgacccaagtttgcttcaagaaatttttggtgctctttcgatttctctagtatgaaatgttctcttttgggtcaatactccaacactttccatgtgaataattatatgattgcgaatcttaggtttttgggttccattgagctcacttacataacatggactcatggaatttggggaaaatgggttccattagatcttgcaggtgttttgcatattattttagcaagtgaacaagattgccacttgtggctgagacgaaatgtgccataactttaatatcatcttcttgctgctgggcagatagttaaatgaaaggcttcaaagactgggttttcgctctatccaactcaatggcatcatctagaccacttttgggaagtgacccttttttccgtgaccctcatcaagaacaagataaccactgtatggtatctcttttccttccgtgtatcctctgtttgtcttctgaacgatggatgatgcacttgatttatgggtttatatgttacaatgaaaataaacattgtgagttgggtgtggatatatattacattattactacctcttaaactgatctacttaacctctccttgtgctctaccatatcttctttaggcccgtttattgaaatgtctaaaaagtacttcatgtgttttgcttgaagatttcgttgctttacattgcttttcaaattgaaaattggacttttctttctgatactttagcaaattcttgagattatccaggttgattatatgatcaatctcacaagtttctcttcttcctgatgtattatttgactaataataactttcaatttttattttcagctcaagcacctgccgcaccacaaccagtgacactctcggaaccaccatgttcaaccagtagtgatttagaaattctgcctcctctctctcagcaacaagttccacttgaaagcttgtaccagtcaagtattgatcttaacggaaagaaacataatccactagcaaagattggtggccttcaagtgcagttcttacgccttgttcaaaggtttgggcagtcacagaataatattctagtctccaaggttttgtatcgggtacatcttgcgatgctgatacgagctgaggaatcagaacttaagaatgtaaaacttaggcaagatagggccaaagctttagcaagggagcaagaatcatctggcataccggagcttgatttctcacttagaatccttgtcctggggaaaacaggtgtcggcaagagtgcaaccataaactctatttttggtcagcccaaaagtgagactgatgctttccgaccgggcacagatcgcatagaagaggttatgggaactgtcagtggagttaaagttacctttattgatacccctggttttcacccactgtcatcttctagcacaagaaaaaaccgaaagattctcctatctattaagagatatgttaagaagcgtccacctgatgtagttctttacttggaccgccttgatatgatcgacatgcgatacagtgatttctccctcctgcagcttataactgaaatctttggtgcagctatatggttaaacacgatacttgtaatgacgcattccgcagctactacagaaggacgtaatg

SEQ ID NO: 63970 - DNA, 342 bp, Arabidopsis thaliana landsberg
aatcgatacaactaaaaatgttattttgctttgctttcaagttgagaaaacagagaagttcgatactcaaagaacctgaatgattaattcgatgattaggttaagaggctaaaacccatatattaccaatctcagtgattgatttacgagaagagaaatccaaaaaaaacaaaatcaataaaggtcatacctttgaagcttcagtgaacaaagaaactaaatttgcgattgcccgactcggtttttttttttgctcgaaggggtttgggagcttattaaccaaaaaaagaaagaatgttctttggtctgactataaatggaggaaagggggtttttttttcc

SEQ ID NO: 63971 - DNA, 273 bp, Arabidopsis thaliana landsberg
  unsure (1)..(273): unsure at all n locations
ccccgacccaaagaaacaaaccngaaagccacaccgnccacagaaacccgcagacagccgagaacaangaaaggcccacaccgcagcacaaggacacccgccaccggagccacccagggcccaaagccagaaacaaagaagcgagaccacacgacccaagccacacaccgccgaccgacgccggggacaagcccagaggagaccccgaaaccaaacgcagccacggcagaagagcaaaaccgcccaaaggaaaagaaggggcccaccacgggg

SEQ ID NO: 63972 - DNA, 596 bp, Arabidopsis thaliana landsberg
taatctagttaaagtaacttctgtcttaacattaaaaccaaaaaaaaagaaaaagtaaattctaaagacaaaatatattgtcccatactcccatttccacctttatcttttgtttcttctcttaatgggagaaaaaatgggaaaattatatgtttcaattcgaacaaacagatgcccttttaaaagcccagtttttttcagcccaataacaaaataatgggatagaagcaaacatggaccaaaccagatcattaaccaaaccgaaccaaacctggataaaattcggctgttctaaaccgttttcctttgtagacaacaagatagcgacggcgacgcatttattcttcagagattatcttctagggtttctagggtttgggtttgggtttggggacgtatatgcttgaccaccacataattaatatatatctatatatgcgtacgttgaagattagtctggactatatagctaagaaaatcttagaaaatccgatctaatgaatgaaaagtatattcgtgataatgatgcatgtaaagattagatgataatatcgaagaaaaagaaagttcacatcacacagatcaatatatgtcac

SEQ ID NO: 63973 - DNA, 588 bp, Arabidopsis thaliana landsberg
tcagcgtctttgccatctctcacttccagctaaatctacaagccaaagcttgctttttgtgcattcacttttcatcaggttctttgctttcaccattatagagagcatgctgtaagggtttacaatattaaacaaccctcataatgtgatggcaaacattcaaacaagacagcaaaagaggcatatatgataccagtgagagcggctgctatgctcgttcacattatttgatccaactgatcttgcgttgctcccagcttgaagcacattccagacttcatttatattttccacatttgcttctactaatccaggaacgtgatgagagccatcagaggattgttttatctccaaccttggtagcaaaatcaaatacaattaagatcaacttctgtttcaatccctatctgtttatgatgtaattaggtagagaattcttacttctttgaccctggtgatgttgccaacaagtctcttatttgttcattgtagacctcaagaacactaaccgatatgttatatgaaatggtctctctcctttctctagcaacttcaaacaattgctcgacggttctataattgacaccc

SEQ ID NO: 63974 - DNA, 1754 bp, Arabidopsis thaliana landsberg
atcgatttaaggaagtctagagaggaaatggataagagagagggagatgtgaatttgttaagagcgttattggttttaggactatttttatatggaacttcccacgcgcttcaactatttttttttttttttttatctaatcaacttgctaaatcgaaagtatacatatttattgactcaactttcccggttattgtaattgagttctcggttttgttcggtttggaatctgaaatgtaactcctttctctgtattttgagattcgttaatgagacaactcttcctaatggattccaaattttggtttcactaatggtaataaccaaataaacaatcaaaatcgacacaaaagcctttaatatgttacactattaaatgagcagtttacgtattcccacttatcaaaataaacacgagtattttgtttatcttctagaattttaatgttttttcgtcaaagaaaaatcaaacttagatatcctacaaaaagacaacaaaataaggtcaactcgtaaaccaccaaaaaaacatcggcacagacacggagaagaaaatgcaggaatggtgtgagatacgcgcatcaacggtgcctgaagaagctgagcaagtgtttttgttagtttagtagtaagagagtgtggtcatccacaaactcgtccctgacgcaaacacggtattaggcgatgcctttttatttcttttctttttttatcaacatttatctcaactaatataaaacgactcacatagtcacattttgttgctttcttctagaagcccaaacgttgttgttactgctgaaaaaacttataaatgggccatgggccattacactacaagttttctatcttattcattgttttttcttttctttgataattgaaactcactactatcaatgatgttgaatggtaggttactaagagtaataatacgaccccaaaaaatggctaaaagtttacttcttattttcataaagatggttataatcaggattaatagaacatttattatcaattttttttatgtctatgtttataaagtattttctaaagttttaatgtttaaaaattttaaatggtaaaagcttaccttttatatccttttttgataaatggtaaaagcttgcttggatatgaaaattttatgatggatgagaatgagataatcaatctaggttattctcagataggtttagtttaggcagacttttggcctactaccgaaaaactgcgcaggtcctttttattatcctcttttaattattagattggctgccgatatcttttatattcagagtatctgcgaatagttccaataaaattctaaagtttatataattaaaatttggatatatacataaatacgtaccgtagtttttttttttttggtcgtaaagtgtttcttatttattttgacaaagtatacgtaccaaagttgaaaatatatgtatactatatataaatacgtaccaaataccaaaatagctgtacctaaaatctggattaccaaaaaacccaattctttgattcgttgaccaatatcctttttatccaataattgtccagtataaattaaataaacctataattacacaattgaatcactaaattatctacacgaatattcaaatcatgaacaaaaacatataagcctcaatttctctttaaagtcggacaaaaaatcaggaaaaataaaaggaacaaaatactcgtctacgtttgaaaattgatttgtttatatatatagtatt

SEQ ID NO: 63975 - DNA, 637 bp, Arabidopsis thaliana landsberg
gacgttgtcgctctccaccaccagcttttcggcttcgtgcatgtgctcgtaggccagctccagcacgcgatggctcagcgtggcggagaacagcagcacctggcgctgctcgcgcggcggcaagcggcggaagatgaagcgcacgtcggcgatgaagccgaggtcgaacatgcgatcggcttcgtcaatcaccatcacttcgacgctgttgagaccgaacacgccctgcttgtggtaatcgagcatgcggccgggcgtggcgatgatgatgtcgcagccgtccttcaactgctggcgctgcttgtcgtagtcaacgccgccgtagatcagcgcgatgcgcaggccggtatgctggccgatcgcgcgggcatccttctcgatctggatcgccagctcgcgggtcggggcgatcaccagcgcgcgcgggtcgctgtccttgcggccggccacggccggcgtggtcagcaggcgattcatcagcgcgaccaggaaggcgcaggtcttgccggtgccggtctgcgcctggccggcgacgtctcgcccggccaaggcgagcggcaaggtcatttcctggatcggcgtgcagcgggtgaaaccgctgtcgtacaggccctgcttgagcagcgggtgaagatcg

SEQ ID NO: 63976 - DNA, 347 bp, Arabidopsis thaliana landsberg
agcgcataaaacccaaaaacatagacagcgcccccactcttacggaagtttctaagtatcagcataattaggacttccttttcttattccttccttaatcccgaaaggaaactctaattaatcgcttaaactttaagtcacggagatctttttctctcattcccctatatctgaaagattttttatgtagaaaactcctgttttccatttaactctaaaagattataagatagaggatggatatatactatatatcttcccatatttgatcagctcccactacatcagctttctttaactgatactgtatactggactaatgacccattgattcgagtcggattttt

SEQ ID NO: 63977 - DNA, 726 bp, Arabidopsis thaliana landsberg
tttttttggtatacgtttacgtacctcaacgttatacgttttatttgtctacatttaatcatagcatcggaatattggacctttgggacttccttctgattattcatatttcacatgttttcctttagccacatatgaactagaatctttcgtgctgagttctgttttcgttagacgtcacgttaggcaattattatacttcttcttctttttttttcttatttcatgggcattttatttccaccggaaaacaaagataaaaaatattataatcagcaaaaatatccaagccgagctgacgagccaataaggacacgtggaacgttggaaattgaaaaggacaaaagctggtgacggtgagttcaacaaacacatgtccacgtaggactaaagtactctgaaatctgacgtggcatattgtatatgttcttatcattgatcctaatttttttttaatatattcactgctcctgatctttatctccttttatgattataatatctcaccagcttctacctacgttatatatatataagctcttttacgggttacctccaaagaaaaatagaaacaaaaaatggggaattgtttaaggcatgaatcacaaatgcattgtgctggtgaagactgcgatgaattcatcacagaagatgaagaagatcatcattatagctctaaaaccaccagagatggcaaaccagtaattgtaacacgtgacagtaaat

SEQ ID NO: 63978 - DNA, 538 bp, Arabidopsis thaliana landsberg
  unsure (1)..(538): unsure at all n locations
gatagtataattaactgtataagcaaaacatttattgtagaacatggcgggccaatataatttaattcatttttttagcagactcaaatcnnnnnnnnnnnnnnnnngacaccaaccacgtacatcaaatatattacatgaattaatctggtcaatcgtatctattgatatcttaatagtttttcctactctttaccagaaaaaagacttggaaactttgattgatatcttatatctaaggatttctacgtggaactatagaaaaagttttaaaaaaagaatattttgatagattatcgtcgggaaaagacaatctctatgaaaacatatatataattaaagtagttaagcgaattagttggtcgaaaaaattgttattttagtggagtttttaggatgtcatcatttacataaaaatatatttaaaaagtggagaaatggaaagactaaaattaggccaccaaacaaacaaagagaaatggaggaaaaaggggcaacaacaaccacagtcgcgaggatccatcggacaccactcgtt

SEQ ID NO: 63979 - DNA, 1900 bp, Arabidopsis thaliana landsberg
gtgttttaaaccattttaattatattttaaaatttcaaaaataataagatacatttagattcgcttatcccatctatcccgcctaaacgcacctaaataccgtctaatccgttttatgtctgcattgtccgccaaatctacttcaccgtttaatggatccgatttaaaaaaaaataaaacggtacaggagcgcctagcgtcttgacggacacctagtccgcttttaaagagttacttcactctgtgaatcaaaacagagaccttgagcccaaacatatgactgaaaacagttgccttgtatagactctgaaatcgtgaaatggtacaaagactcttaatcatttagcgggtttaactattaaaagcctctagctcctctagaaggttctattgttccttccttggtaaacgtttcagtttcacacactctcatctgaaaaaaaaaaatacagatgagattgaccaaaacaagccctagcttaagctcaatctccgccgccgatattctcacgccggtatgattcgaacaacattcgcgaccgccatcgctcatttccacacgcattctcatggaggagctcaagctcgtcctctacagaacaacacacgagaagtaatccattgtcctgaagcttggttagtcaaaatcgtatctactttgttcgtgtacagagttccagattcagatctctgtttctgttacttaagcaagaatctaaatccgtttatctcctttgaggttgtgaagaaattggataacaatcctcacatagggtttcgattttgggagtttagtagattcaaattgaacattcgtcattcgttttggacttataatttgctaacgagatctctttgtaaagccggtttgcacgatttagccggtcagatgtttgagtgtatgaagagcgatggggtttctccgaataatcggttattagggttcttagtgtcttcgtttgctgagaaaggtaagcaccatttcgctactgcgttgcttcttcagtcttttgaggttgaaggatgttgtatggtggtgaatagtttgttgaatactttggtgaagttggatcgtgtggaagatgcgatgaagctttttgatgaacatttgagatttcagtcttgtaatgatacaaagacgtttaacattttgattcgaggtttgtgcggcgtagggaaagcggagaaagcgttagagcttttgggtgtgatgagtggttttggttgtgagcctgacattgttacgtataatactcttattcaggggttttgcaagagtaatgagttgaacaaagcgagtgagatgtttaaagatgttaagtcgggtagtgtttgctctcctgatgttgttacatatacttcgatgatctcagggtactgcaaagctgggaagatgcgtgaagcgtcgagtttgttagatgatatgcttcgtttggggatatatccaactaatgtgacttttaatgtcctcgttgatggttatgcgaaagctggtgagatgcttactgctgaagaaattcgtgggaaaatgatttcttttggctgtttcccggatgtagtgacgtttacttccttaattgatggatattgtagagtaggacaagtgagccaaggttttaggctttgggaagaaatgaatgccagaggaatgtttcctaatgcatttacctattctattcttatcaatgcgctctgtaacgagaataggctgctcaaggctcgtgaacttctggggcagttagctagtaaggacattattacacaaccatttatgtacaaccctgtcattgatgggttttgtaaagctggaaaggtcaatgaggcaaatgttattgtggaagagatggagaagaagaaatgcaaaccagattagatcacatttacgattctataatcgggc

SEQ ID NO: 63980 - DNA, 749 bp, Arabidopsis thaliana landsberg
aagtcagttctgaagaggaagggttcgaaggagcttggttcagagctgttttagaggaaaacccagggaactcatctcgcagaaagcttcgtgttcgttactcgacgttgctggacatggacggttcgtctcccttaatcgaacacatcgaacagagattcattagacctgtacctccggaggagaatcaacaaaaagacgtcgttttggaggaaggtttgctggtggatgctgaccacaaagacgggtggtggactggtgttgtcgtaaagaaaatggaggacgacaactatttggtttattttgatttgcctcctgacattatacagttcgagagaaagcagttgcggactcatcttatctggaccggtgggacttggatccaaccagaaattgaggtatgaggttgatttattcgaagtgggtctttgcttgaatgtttgaaactgtctctttgttgctctctttcaaaaaggttgaagctttaatccgttttgagtctggttgcgtgttatggttaaaggtttcagctttagtttcaaaaggctgaaacttttctctatttttcgtttgttgagtgttatagttccatggttaagagatcctttcttaaatccggtgttgtttttgcttgtagctgtcaaaattttgttgctttctttgttcttgttatatgctatgattaaaattattaaaggtttagttttggttgtgaatgcttaaaagtagactttaatttgttgtctttg

SEQ ID NO: 63981 - DNA, 118 bp, Arabidopsis thaliana landsberg
ccggcgggatccccttaacacaagccacctgcctatgagctcgccggctcatttctacaacatggtcacgcgggcagagacccagggcaccctcggcactagctatgagaagcttacc

SEQ ID NO: 63982 - DNA, 440 bp, Arabidopsis thaliana landsberg
  unsure (1)..(440): unsure at all n locations
ccatgaannnnnnnnnnnnnnnnnnnnnnnnnnnnnnnnnnnnnnnnnnnnnnnnnnnnnnnnnnnnnnnnnnnnnnnnnnnnnnnnnnnnnnnnnnnnnnnnnnnnnnnnnnnnnnnnnnnnnnnnnnnnnnnnnnnnnnnnnnnnnnnnnnnnnnnnnnnnnnnnnnnnnnnnnnnnnnnnncctgccaccgcggaagcgtctgcgttgcaaccttcatacatatttttacctaccccatcgaccctatgctatgcacaagccatttcggatcttagatcgtgctattctgagcgactggccgaatggtttaacactctgccactccacctatacctatccaccaatggggagtcgctcacatgatatatccgtaagcatgtaacaggagactcgcctgtgaagcttaactcacagccttggttagcacagaatagct

SEQ ID NO: 63983 - DNA, 1764 bp, Arabidopsis thaliana landsberg
aacatgggcgaggtgagaagactagaagggctgaaaccagaagggattgtaaacatcggacctcctccggcgaacatccccgccgttgaacgtcctccgccaccaggagacaccgacatagttccgttaagaagctgagtaaacgacgtcgtccgttggttatccggcgtcaagacgtcagggaagttatcaacaaacaaagaagagacaaaagaaagtggccctgggcttagactaagcccatctccaccgccaaagaaatacgccgccgtttcgatcgccggaggtctatgaggaactgtaatcgtgggtcttgttggtgccactaacgtcgtcgttcttatcaaagatacatccgtcttcaaccgccattttctgaaagataaattactttaatctcaatttttgtagatctctctagatatggatattactgtgtgtatatatacagagagaaacaaagagacaagagtcttctgtttcaatgtctaattttcttagatcgatttcgtgcagccttgacattggtgtgcaaaagtctacgggctaaacatggaatttctttaataataatattattactaatttattgtggtccaatctctctgttctaattaattttcgcatttaagctatcttttttttattagtcttatgaaaaatattcaacttgcatcttttgttattaaattattttgtttaacaggttgatggaataaccaaatttatggtgtttaacttgtaaaagccatcttagttgctatttgtacattaacatatagtaaattttgtggaccaacaatattcggttgtttactagactttttccttgttgtaaattgatgttaagtatttgagtgaaccataatcaatactttctttatattatcaggtacggaaaattatttacttggtatttcttttttaaagttcgagttgatgtcacgagtcttactatccatgttaatctctctcacatcttaaaacaacaataatcatcagaagatacaaatctaggtcttattttgatattagtagtgaaatagtgggttattatattgaaaccattatatatgtgataagaatatcaataacttaaatggatcacatatattaaaaactaaaaattctgtcttgtcaatgttgatcatagaagcttgttttttttcttttccgaagcttgcctcacaagaccggcactacgaggcaataactccaaatggcgacaaaatgcactttttagtttaaacgaatgtaagtgtaagtataatgtaattaagttctttgagtcaatggttgacctagtgggtatatgttacgttcggactttgatttccaaagaatacaaactattgtagtatactataaataaatcgaaaatatatattagtccgtatggtagagcactagagccttatgtttatcgtgtatggttctatgtagtaaaaataatgttgtacgtcgtcttgtcgatcgtataagtgttggatatagaactgtttacggttccaagtatatgtttgatcttcttttgttcactatttttacaggtggatattaaatgtgagatatggaataggcaataagcattcaccttattcttttatgagccaaacacaaaaggaccaacttgcatttgttataatatagttcagaacatcatcttcaattaactaaaatagccaacagaataactactatgtgtggtctctctagttattgcttcaccaaagtttcgaaactctactaacggtatctcattag

SEQ ID NO: 63984 - DNA, 453 bp, Arabidopsis thaliana landsberg
  unsure (1)..(453): unsure at all n locations
acaaagttatgtgtacatataggtcgatgcggttaaaatataccaaatttaagttattcctagggtttgaaagcattcaagatatttaattttcattgttataattaatataccttctcatttttcctataaggtagtaattaaggatacatcatctgctcttaaatttgtgaacggaaagaggaccattcaaacccatgtgtgattatgggatcaagaagtttgtttaagtcctcagattatactcatagcatcaaagtcatgttatcgatcgggtgacacaagttcgagtgtaataccatactgtgtaggtaaccagattttcttactaatactaatacaaaatcaaaattgagttgttatgtaaaaattttcncttgtgaatgatttctaattctttttgaattagattccttaaaatacaggaaaacaattttttttaaaaaaaaacgc

SEQ ID NO: 63985 - DNA, 385 bp, Arabidopsis thaliana landsberg
aagaggagttattatatgcctcaccgcagcaaaatcgaagtgtttggaaccccattggcgccgggccatgattgagaaaccccctggcatcacgcctgacgatagatcggtgaaccccccacggttgcacatgcagtggcaggagccctatgcagactggatcaaacacctgatactgagggttacaaaaaccatgcccctgtctatgaaccaaaagatccattttgaacaggttcccgaatagagccctcactaccctcaactggggagcagctacctgccatacggtctatttaactccccgcaggggggaattaagaccatgacgacaacgaacaacaagactgcagaagactcaggagggttctttcttgtaaggccttgc

SEQ ID NO: 63986 - DNA, 623 bp, Arabidopsis thaliana landsberg
gtaatattgaataaatatctgaaagacatatatcatctacattattcatcttcgttttgttccggatgttattggtccctttcttactactgcaaagaaagcccacgtcccatacctcctatgatttttatattctcaattggttttctgaaaatattttattataattattgagctatacgcaattagacaattacgcacatctaatttacgtactatataatttatctaatctactcctctgtgattaatattaatgaaccatttctagactaacctccaacacttaagtaattaaacacgtcatctttgagtgttgtagatgtagtcaccaattgtacctaaaacgattataagttgattgaatatggacaaacccaaactgacaagaaatctctataacctaactacctagatcaaataatatttatttttaagtatatcataccaaaatgttgaaacttatattttcattttactccattaacccaaactaacatctactaattcttttattttaatataaatttcctagtccgccatatatataaacgctttcgcctccacctctacatatttaggcaccaacaaaaaaaccccctaaagaattttaatttaatttt

SEQ ID NO: 63987 - DNA, 240 bp, Arabidopsis thaliana landsberg
ctaagtgtacgctacttccgatctatagtcagatggctgcatagggaatacattatcttattttttgtgcagaacttgttgctattcctaaaaagaataccactatgagagctgctattttaaaaaggtatttgttcaaaacttaatttattatttataatctccaccagcaaaaactcacgttttcccatagcacttgttatcacataaggagtggaaaagatgcccaatctgaacttt

SEQ ID NO: 63988 - DNA, 890 bp, Arabidopsis thaliana landsberg
gacattaatcttcaaccccgatctaccactacggctttctctggtggaaatgcggatttttgcagatcaaagaatctgagcaccaaaggagttactacaagtgtgcctacaccaaggaccagaactgtgaagcaaagaagcaggttcaaaagatccaacacaatcctccattgtactcaaccacttacttcggccagcacatatgccagcttcatcaagcttatgcaactttccccattgacacatctgacttcgaagagcacgagggatcccacatgatccgattcggtcaccccaacatcagcttctcctcctccacctctaacctccgccaacatcagaatcatcaggatcgcatcaaagatgaatacatgaaaccggtgatagcagaagattggtctccatcccagtggatgtcgtccgaggttgccctcgccgtggaggctttcgagtttaatcctttctggacatctcacgacttatcatcatgacactatatccctcagctctaatcatacatatatagcttctttaatcctaaaaacctctatatatatatatagtcttatacatctccatgtaatatgtttcaatctctacttggtgattttgtttgagtactcatcatattaacctacaataatacatgaaggttgtactgttgttgccagcttttccaattttatacatacgggaatctttcataaacaaacctttgagtaaagttttctagtacctttcaaccatcagcggacatttatgtgataatatatgtatactactcttttataagaaaagagggtgacgttgaagcagatctagacttggtggatttattctacattgaacagtacctagctagtacccaatgtttgaatccagagaaacaa

SEQ ID NO: 63989 - DNA, 755 bp, Arabidopsis thaliana landsberg
ttccaagaacgagaaacttgaccttgttttatgtgttattacaacttcactttcgcaaaacggtgcgttcatagagctgaaccaaatctctctttcttggattctttaacccgaccaactcagccccaaacccatgttctagtatctcagttctcagcttcttcattgtgtatttcgaatgccccgtgcccgtggaagaagacgttgctccagcttctgagcttgtgcatcttctcggagtcattgtcctaactttcctgctctcttgtgaaactgaatcttcttccgtctcttgagcaaaatctgaacccgaacaggttactgctgcttctaccttcaaacgctttactcgctgcatcggtgttgcttcatcccaaaccataaaagagtcttctttctccatcaaattctctcgaatgttttttgacttctcagcgttgatgattctctgccatttagtaacctcttcttcattttgtttcgctcttgtctccagcgtttcagaaagttccatcttttgcctctccagagcctcgatttgtcccttagctctgtcaatttcgatggtcttttcctgcaacgacagctggagtttcttttcgttgcttcgtgcgctttccacttccattttcatcgaactcactagttctttgaccgttgcagcctcactttccgcatatttaagctacaaacagtctctttcaagtccttcaattcggctcttagctcggtcgatttcaatgcatttatcctcc

SEQ ID NO: 63990 - DNA, 1585 bp, Arabidopsis thaliana landsberg
agctgaacacataaactggagcccactaatttacacgtggcacaatattttgctttatatttcggcaagaagtgtgtgatctgtttttttactcgttcttaatcttcgcgcttttctgatagatcctcttgggacaataaaaccattaaaatatctgagtaaattttataaaaccaaaggcaaaaattgcatagatcagaaaatatttgttgcaactatatgagctaagaatttcaaattatttacatatttatgttggttatgattcttatggaaatgataatgcgtattaaggaataaaattaaaattgattctgtttgatactaaaatatcaaaaaaaaaaaaaaatgttttggcaaagaataaaggttttagtgtactcttctctgtggttaactttaaagttttggaagcatgtcggcgaagctggaaggagattctttacgtagtagataggccacaggtggtttcaatcttccccaacaaccagacgaaatcgaacttaaatctgtaacaatcgaagacactctcactctttaattgatcaatggcgtctcttcaaatcagtggctcggttaaattcgagccgttcgttggatttaaccggatccgccatttccgtccgatcgccagtctcggatttcctcgttttcgacggagattcagtatcggacggtcattgttgcttcgtcgttcttcttccttctccggtgactctcgtgagtctgatgaagagagatttatcacagacgcagagagagatggttctggctccgttcttggctttcagctcactcctcctggtaaatgtcgttaaactcgtgactgagttcttcatagtgtttcttccaatttcctcaacgaacagtgatttattctctgatttgtgcataatctagggattttgtgatggtttatcgaatgtgatttcaatttgtaaaaagtgaatgattctcttgaattttgcttgtggtcctcagattcaaagctattacgtttttcaaatttcagaatctttcatattcaaaaaattctgatataaagtagcacgattttgctcagaatctcgaagatgaactcgatttttccttgtacaggtgatcaggaaacagttagcactagcacaggagaaattacacatcatgaagagaagaaagaggctattgatcaaattgtaatggctgactttggcgtacctggaaatagagctgttgaagaaggagctgcagaggttgggattccgagtggaaaagctgaagttgtcaataaccttgttttcgttacatccgaggcggctccttactcgaaaacaggaggattaggagatgtttgtggttctttgccgatagctttggctggtcgtgggcatcgtgttatggtcatttctcctcggtacttaaatggaactgctgcagacaagaactatgcccgggctaaggatttggggatacttgtaacagtaaattgctttggtggttctcaagacgtttccctctatcatgagtatagagatggcgttgattgggtaaccacttatctcttttagcttaaattattgtggagttttgacaaacgccattgctt

SEQ ID NO: 63991 - DNA, 612 bp, Arabidopsis thaliana landsberg
  unsure (1)..(612): unsure at all n locations
atctcactcaggagacagaatgagggatacctgcattccaatagcattctctttttgatgcagtctatatcaaagccaaggaatgttactgctcacatttacaatgggtcttccatataatcttgcctaacctaggggtgggcaaacactactaacttatcacataatatatatcaatagaggcttctcaatgctaagattaggaaaaaaaatgctctgtgacagcgagagggtctgagagttttatgctttatgctcatattttctgtgcacgacacagccctaagaatatagaccttgttaggacagctggaagccaagactggtgtgagtgaaggtaaataggctttagccctcgataaggggagtcaatagttgattctgaagctaggtggtcaggcacttgctgtgctctttgcttgcgaagcagagcagtgcatgagaagaggcaccggggtggactttaagagcttcctgtgcaccttgacctatgacctgngtctcagttcattctacttgccccagggttgtttgcattcacctgacatctgagcatctatgcattcattcactttttcatttacccagtcacctactcaccgccaagggcac

SEQ ID NO: 63992 - DNA, 601 bp, Arabidopsis thaliana landsberg
gaagagaaatgccagtctcatgcttgagggtatggcgaatcaaccatgggaatatacagacatagagggatttattttccaggatacttggatcaaagacctcacggatcttccattcgaattcttcaaaaagattattgggtcgcttagaagacaaggtatgaaagaaagatatgtacgtccattggtcgccctttacgccagtaaatctgccatacctgaaggtcaaactaatactgatattctgcaaagagctctagatctgcttcttacaagacacaaggcatataggtttgttccacttgggttttattttgcgtgccttgcacacaatttgaagcgtgacactgtgttaaagctgcaagaacagattgcatatcttctttacactgcccatcccaaaaactttatgtaccctaaagccgcgaacaggcaagttgctttcatgcaggagttgcttacaatggaaagcctgttatcagtatatgcatcaacagagtcggaacgccatattacttcctcctcaagcaacgcgagaataggaaaactgtgggaaatgttcctctttagtgacccgatgaacacgagatgaaaactacaa

SEQ ID NO: 63993 - DNA, 1501 bp, Arabidopsis thaliana landsberg
atttcctactttagcctccttttccctgttttctatgagcgaattcttcctaagtaagcaatacagtactgggatttcgtctcttgattttctcgtaatgtacgatggttgcaaaaatatatatttatattcgtagaaatactcaaatcactattaattaacgtatattacataactcgaagaccagatcgtaacatcataaataagcgtcaccaaaatgtctggttagaactatttagagtcttgttacagttaatgcatgaaaaagaaagaaagtgttggagtaaaaaacaaaaatgttgttgaaaaaagcgaagaaaaaatgttataatacaagatttttcaactcttctcaacactcgaggaacgtcgtcttcaacttcttgccttgaattttgagatcttctttttgagctcaacactcgtgcgcatctgactttgacccaacatctactacgcatatatgtgtgtgtgcctgcatgcaagtagccatattatagtttaatgtttgataaaaacgaaaaccaaaagaaactttgtttttctcaaatcttccttagcgtcctcttgtttcgtggatcctagaacccttttcttcctcttcaatccccaaaacacgcaactttcttcttcaaaaatataatagtgaagaagaataaatgaacgaccaaatgtctccagtttcatcataccatattggttttgatatactttatctacttagttttcacaatttatatactcaataatggaaactttcagcctcaaggattgttcgtccgtcgcctccagcccgatttcttctccaaatatcagtacccttttgaaaatcaaagttctttcttggtatgaatctcaagactatcttcgtgatgtcatataacaaatctgaattattcatgttgtagacttatgtaatgtaactgtgtgtctgtgtgtcacaggagtaaagagaccggtctacccgcgtcagtacatgttcgagtttgcaacaagagttttaaccttcacaaggtaataatgataatcaaatctctctctcaagaaattctgttttcaaccaatacatgtagcttagtggtttttgttaatataatgccttattttttttgtttatcttttgtagcgtctcttgtgtgcaaagagcggatattttaaggaaagagaggatcagctatcggagatcgagataccacaagagtttcctggtggagcacagacctttgagaagattatgcttttcatttatggctgtccaactttaatacatcctttcaacatcgctggaatacgatgtgcagctcaatttcttgaaatgacagagcaacattcgtcgggtaacctctgcgagagatttgacctttatctaaaccaagttgtcttgcaaaactgggatgacacgttagttgttctgaacaaatgtcaggatctagtgccttggtctgaagatctactcctcgtgagccggtgcattgagtctctggctttctcggcttgtatg

SEQ ID NO: 63994 - DNA, 1646 bp, Arabidopsis thaliana landsberg
gggattgttatcccatttcggccttcaattcaaaaatccaaactttagatgaatccaaacttgagatgaacgaaagttatggtaataataccataccatccaacagctccgagaagaagagcgtctgattgctttgccctgatcaatgtttccttaggcagtggaactccgacaagatctaaagcaacacctcctataggcaactcctcgaagctaaaatctatccctgatatccaaaaacacgatttcagttgggaaaatcaaattaaattaggcaacaggatgagaaagaaggaaccttcaagagacccagctaaacaaagaacgtcaacagcgactgggatcacttcgttaccgacgccatcgccgggaagaaccgcgatggtgtaccgtttctttggagtgttggcggcacatctgatcacagaagctctcctaaagctctgtttggttgcggacataaacgcaaccggaatctgggtactgctgacgtggatgactcccgccatttactacaacaaagactacaaggagacctggaaagaacttttgtgtttataatcaaaccaatattaaccgttcgattatttattttcacctctggatggctcaattatgatgggcctaagaaagattcgtagaagatagatcggcccaaatgttccaaatattaacacaagtctttgggcccataaatggtattcgggtcaaaattcgcccgttagatgatgaaccctaatttcgtgtgtacagggagcggagaggggaaacaagagaatgctcttgttgcggcgactcaatcgagttcggattgcttccccttactccgttcggcttctgtcagtaaaacctatttcaaatgtcgatgatgcgaagtttcgatctcaggaagaagaagatcagtccagttacgatcagaaaacagtatgcgaagctctcacatgttacagcaacgattggcaaaaggcgttggagtttttcaactgggtcgagagagaatccggattcagacataccaccgagacattcaatcgggtgatcgatattctgggtaagtatttcgagtttgaaatttcttgggctttgattaaccgcatgatcggaaacacggaatctgtgccgaatcacgtcacgtttcgtatagtctttaagcgttatgtgacggctcatcttgttcaggaggctattgatgcgtatgataaattggatgatttcaatttgagagatgaaacatcattttataatctggtcgatgcgctttgcgagcataaacatgtggttgaagctgaagagctttgttttggaaagaatgtcattggtaatggttttagtgtgagtaatactaagattcataatctgattcttcgtgggtggtcgaaattgggatggtggggtaaatgcaaggagtattgggagaagatggatactgaaggtgttactaaggatcttttttcgtattccatttacatggatatcatgtgcaagagcgggaaaccgtggaaagctgtgaagttgtataaggaaatgaagagtagaaggatgaaactcgatgtggttgcttatacccctgtccctcgagccattggagcgtcgcaagatgttgaaatcggtatcagggtatttcgggagatgagggaaagggcttg

SEQ ID NO: 63995 - DNA, 1808 bp, Arabidopsis thaliana landsberg
  unsure (1)..(1808): unsure at all n locations
gcaaaagaaaaaaaatcctcaattatttcgtaaatggtatatatttttatctttaaagagtacacttgcgtgtgtgttccaggtgtgcgggcaaaagaacatcagaattggttctggatatagttctctccactttttatttgttattgttttaatacagtacgttttatgagagtttttttatatatatataataaattatgcgttttctgatagttgttggtccaatatcgagaacaaaaaaaactaactacaagctaaaaacctaaaactatgaagatctcagaaaatataaatatacacgctcacgttagcgagtaaaaaagtagacaccagattaacaaatgattagtgtgatcacagtaaagaaatgttttgcaatatttntaagcaatttttgaaatcatgttgtatgtaataaattgagtaaattcatgctgtacataaattaaagaccatttctttgttagtcattgaaatcataaccaatcaaccaataaaactgaatttttttcgttcattagagagataagttaatatcttcaaagtttaatgttaagctcaattgtttagataggagataaccgataagaaaccacataactagttaacctacctatcttggcatcacatgaatcaatgacgttggatagtcagagaggcttattttaattatacccgaaacgaaccaaccatctataattctctaaactatatttaatcatcatataactctgtaataaacccaaattttcacaaattaaaagccataccaatatcttcaaatatagaaaaaaataacaatttaacaaagaaacaaaatatttcctcaccaaaaaaacagaaacaaaatattgttttaaaaaaggaaagtggtctttacacaaaaaggaaagagaaaggaaagtggtctggttcgtatcgcacccaataagaaccaccaactgttgaagttcgtaaactgttccacaaaaaaatgcataaaagaaagaaaaacagatatgagattcgaccattttttttccatataaatgttttttgggtttgcaaaaatcgacgccattactcttttttctccccaaattattgacctttttataaaaataatttatattctcaatcacacttcatcgtcttcttcttcctctctctctctctctcctttttgtctctgcactgtgtgttgtcaccggagacagagcttgtgttttcaactctctctctctctctctctctctctctctctctctctcttgctctctccgtctccctcactctctctttacttcaaaatcaaacccttttctcagatttctgtgatatagcaaaatgcgcaatctcaaactctttgagagatttaaaagcactcaagtccacgcctttactacacaagactctccctctacaagcagcaatggtagccctcgaatgatgaagttccttgggcatcccaaatccaaatctcgttcacttctccctcatggctttcccaccacagacctcctcgagcctcccttggactcttacctcaaacctatcgatttggtggagtcattatcaaatctatatcggagaatcgagtccagttcggaatccgaggcatcgatgctctaccttgagcagtacgctgttctccgcagtctcggtgatgccaagctcttgcgtaggtgccttctcaacgctaggaggcacgccattgatgtcccttgtaaggttgttttgtctgcttggttgagattttttaggagagaacatgaacttgtgggagttgaatctatggattgtaatgggcttgcttctgaatgtcc

SEQ ID NO: 63996 - DNA, 1122 bp, Arabidopsis thaliana landsberg
atatttggggggttttggaggaatgcgtaagatcagggaaggctcaaagcagatttgagattagggatttgggtagtgagctaagagaagtgaagaagcagcaagagacgtttttaaaaaaatgagagaagctgagtttgaattgaaatgacgacagagagagccgttgcaaagagagagagagagagaaagacagacagagacaaagagagttttgaatttaggaaactgaaagctccctcctttgagctattaaaagtgtttcttttttctatacataaaaggaaaatcttttgtttcaacaactattttggcttttatacatatagcatgatctcatctacaaatatatatagcttgatgatgttttttttttttttttgtcacaagcttgatgatgtttatatttggtatccaatgcagatggaaatatatagcttgatgatgtttatacatgtttcagttcagtttgcagtttcaaacataagagaatttgaattggttaggggacaaaaaaaacacataatttaaaagaggtcataacgattcaattttcaggtgtagaaaaataaaggcaaagactttattgtaaacagtgcaatcactgtatatattaatattccattttgattattataaaattatttcgttgggcattaccacaattcatatttgtgtccgtctcacaagggctccactttcgtatagttttgaatatttgtaatatgctgcattctatgattcgaattacttaaaagttcaaattttttttggactcttgatatttcacaatcagttttttttttttaaaaacagaataaatgagtagaggaagttgttgtggtttgagttgcttcgaagtagcgaaaccaaagagagtagagtatatgagaacgatgtctgaacaattcgataaaatccctaggaagctttacacgcatgaagacttgaatctcacaatgcagagccgatagtgaattcatacttttcaaagttaaacttccgaaaataaaatcaaattaataacatttcaaaacttttaatcagtagtttactagctgttacaaaccgaaatattttaataaacagagagagaaagttaaagagacaatgacaaaacac

SEQ ID NO: 63997 - DNA, 559 bp, Arabidopsis thaliana landsberg
  unsure (1)..(559): unsure at all n locations
gctaatcatttcctctagaattctataagttttttttcttataaatgttttgttacactttttaaggtttcgattgttcgatatttatagtgttttcacttagttttaagttattgaggatggtgaaccgtgatagttctattgtggctttatccttttttatgctctttttgcttgtattacatctgcattttgaaactacaatagctgcgcgaaaaccagttagagtgtttggtccgccaagttctatcgagtggtcaccaccatcaccaacaaaggatgacattgaatggttcgagatcaatatatacaagaacattgaacaaaccgcattccgacccactggtcaaggtcctagccaaggcatcggacacaaggatccacctggtgctccataaaaaaacaaatactcgtatccatatttggtttgagatgttcttggtattgatccttctattgtgtttctctttatgcangcggtttttatttattttatatggagtgattatgaatatgaatcaattaaaagaaggatgggttatatttttgtcctacttac

SEQ ID NO: 63998 - DNA, 1496 bp, Arabidopsis thaliana landsberg
atcggtttactactgtgccttagacacgtatatatgcatatattcatgcttaaatttatgtgattaattagtggtttcactgcatattaattcatacaagttttatatgtaacttatgttgagggagctcactccgttcatgccttctaatgtttggacgaagaactcaatcttttatcttatcggataagaagttacttgtgttcacatttgatgtttgttcgtttccaatcgtattgtgacttttgatatataaaataattattgtatatattctagttatgatatatgattatatagtcatgtaatgatgaccgtacgattttcaactttagtatccctatctttagggggttatggctaaaagcctaaaaagattacttttgctaaaggagtaaagattatgttcataatttgttttaatatatataaatttattattattattctcacgcataacacaaaacaaagaaagaattatcttcataattatatatatatatatatatatttgatataaattattattattattattattctcacgcatagcacaaaacaagtttcttctatatatcaactaaactaaaagacatgtcgttggaaacatactctatatcatattcaaggactcataataatagacatgtaaacaaaatattccttaaattttctaaattcaatatcaaactatatatgtaacttgttatttaatcttcttgggtatataaaactttatcgcatttcttggatatttggacgatgagaattcaaattgctttgtcgatgataaatttgtttagtaattgttcagactgccatcacaacatagctgattactgtcatataagtcatacatattatatttccgatgattctctggactctcaagacaataataataaaaattcagatataagtttattaaggttttctttgttaacgtgtttactgtctagggacaaacataaattattagcactaaacttgttaggttttgaaagtaaacactaatttatacctaaacttaggttattcatgtaatcaaatgtgaaaactaacgtaatgaaattcctctagttatttaaatacagaaaacaaaacctaccttgcggggaaaagcatcgtggcgcaaaaggaaacttcctatgatccgtcatccgtgccgtctcaatttgattggaccacgaatctcgcactcgatactgacgccttacgtggattacttttttttatagaaagaatttaaaattgtttctgaagaggcaggttttgtgtataaaatagagaatgcaagtaacgtgtaatgacattatttctcaaattgaatggttttcgagcatttttattaaccagtgaagcaaccaaaacaggaatcaccagttcttgaaagagttcatcaaaaaagaaaacatttcttgaaacatctaagaaagagttttgttcttcttgatcagaaatacagagcaaaatccatttgaagacatcaaagttta

SEQ ID NO: 63999 - DNA, 481 bp, Arabidopsis thaliana landsberg
aacagcataggcagcataggggccaatgccaatcccgtatgagccggatacataggaaacgggaacattcaactgcaggtatcgcaccttaatatctgccgatgtactgctgatgatggtagccctggaagttcccttgctcacatattgcagcctcgggaaaataccggcggcctcattcgattgtttgtattcttttggatgaaaaggcacaaatacacccaatcccatatgaaagttgaagtttcccgagttcttctgcgaactgccggcgattctgtgattgaaactggagctgataagcccgccgaatatatcgatcctttgagcgtggcaaaaggtaacagctagtaataaaaggagcgataaagcgaattttttagcgggggttagtatggttcttatcatgaaacacaactattttcattcgccgcatatgattagaggtgcattttttctatatgatagggatcaataccta

SEQ ID NO: 64000 - DNA, 270 bp, Arabidopsis thaliana landsberg
  unsure (1)..(270): unsure at all n locations
cacgnaaccgagggccgcganaaaaaaaaacacgccggacgggggccaaaccgggacgaacaaaaaaaaggcccaaggcaggaagcgaacncagaaaccaagcacgcgccgnaaaaaaaacccaaaaccgnagccgcaaagaagaaaaacaaaaacagcgcacccgaaacggccacacagaacacgcaacacaaaaaaacgcgcgcagagccggaaaagccaagcgggcaacaggacaagacncaccacaaacaccagaaaagcgaacgg

SEQ ID NO: 64001 - DNA, 530 bp, Arabidopsis thaliana landsberg
aggttgtcattgctcacgaacacctcttgtcttgccgacggctagcggtacggacctctttgtcgtcgacttcaactttggggaagtgacggcactgctcatcgtggcgcccgccgtctcgatgagcaacagcccgaggatggacggacagcatgatctgcttggcccccaccttcaggacccgggtctgggcgaggcgttccccaacctggccgccgtcgccgacggtaccctccccctcaggaactgcgcgagaagtcgctcctcgggtcggtcggcatgctccgcatcctcgccgccgtctaccgcaacctgacggaaaggggctccgacagccaggaagtcactgacttcttccactccctctcccccaagatggctgcaccggcgacggatgcgttcgtgtggcggaagggccccaagacgtccggatcgttcgagcccggtgccaacgcgccggtcatacggcagcagaacctctcgtacatcgttgacgccatcaccagctggtacaagaagtagccaccagc

SEQ ID NO: 64002 - DNA, 1223 bp, Arabidopsis thaliana landsberg
gagctccacgtgacgctagaataaatttcgaattccgttaccgtcgctggtccccacactgtcactatcaaactctccagtctcaacatttcctttctactatctgccaatttaggatgtcaaacgacacgtagttgattctccgaaatataaaaacgctttggtgtttaattacgtcccttctctctctccagtctccattgaacattcgcatcggcgagctcggataatcaaaaacacagaagctatcatgccataaaatcataacggcgccgctaagtgcttcttcacacttgcttttctcactgctaccgccgtttctcgtccttcctcgccggatcgattccttagatcggcttcgacttgtctccggtcaccggtcgagcctcaggagtacgaggagctcaggcggcccctaccgtccgatcagctaacgccgtcatgctcgcatgtcctcttccgccattcattcgccaacaccatcaacagacctccttttaccactccatacactcccccttccagctgcatatcgccgccgtggtcttatgttgtacttgacctacgcgccgcctcgagtggcgatcagtacgatcgtatctccggcttgtggctcggcggagtggagctacttcgcaccagtacggcggagccgagtccatccggaatcttctggaatgttcggaaagacgtctctaggtattcctcgctctttatgagatccgatttaaatgtcacaatgatgcttgagaacatagtcaacgatgtttacacaggcatctatcatatcaatgtcaccctcatcttctacgaattcaatcctattgcgtcaaatttgaagattagtaacagattagggtttgtggattcccagaaaagagatcaaacccctgcggatttgataattccggtatgtgacggagggaacagagggttctggttcatgatcgagaaccccagagaaacttactcaaaaggaattcaaattccgtccaacactcgtcagattgtgctggaactatatgtatcgttccatggaaacgatgagttctggtattcaaacccgccaaattcttatatcagaacgaacaatctagcaaccgggcgtggcaatggtgcataccgggaagtttttgttaagatagatgggagatacgtgggatccgaggtgccatttccggtgatctttactggtggaatcaatcccttgttctgggaaccag

SEQ ID NO: 64003 - DNA, 194 bp, Arabidopsis thaliana landsberg
ttgctttatacaaatgtttaaaggcgtctttttttttttagaaaaaaagataaaaacatatggaataattgcttgcaggaattaaggtggattggcctgaataaaatggcaagaagggacttgaaactaagagaattatcgaacatgacaattccaataagtgggtggtgtgctattcaattacccgattgatg

SEQ ID NO: 64004 - DNA, 143 bp, Arabidopsis thaliana landsberg
  unsure (1)..(143): unsure at all n locations
caccggaaagcgcccngcgagcaccaacgncgagaacgnngagaccaacagacgnaaccnccgngagcgncacnncaccgccccgggagcacnaccaggccacagcggagncanccaanacgaagagaccccgcaccaaaaga

SEQ ID NO: 64005 - DNA, 649 bp, Arabidopsis thaliana landsberg
acttacctgtcctatagggatttttggatttggttactcgggtcattcggtttttcccaatatctattcttcaatgaaagatccttcaaggtttcctcttgtcttagttatctggtaagtccaagaaacctatcctttacttgtttcacaaggaaccctaatagacatactcatcatccttctttcttatgcagctttagtttctgcacggtcttgtacatagctgctgcggtctgcggctacaccatgtttggcgaagcagtggaatcacagttcacattgaacatgcctaagcacttctttccatctaaagtcgcggtctggacagcggtaaaatacaacattctcttatattctctgtatactagtataaccataaattgatgttcttcaatcttttaggtcattacaccgatgaccaaatacgctttaacaatcaccccaatagttatgagtctcgaagaactcattccaacagctaagatgagatcacgtggtgtatcgatattatttagaacaatgctagttacctctactctggaggttgctcttcagttcctttcttcggaatgtctctatgtatccgtaacttcctacgcaagacactcatcccactatagcttctctgatcgaatcttctcaattacag

SEQ ID NO: 64006 - DNA, 1573 bp, Arabidopsis thaliana landsberg
atggtttgaagtgataacagtctgataagaaaacaatacatgaaacgtttctggagggagcacaacgtgttgttatttaaattgctaaaactctaaggtacttaatcacgtgaagtgaagttaatttgaattcaagcctgctaaatggaatatctccctatatcttaaatagcaccactgattatgtcatggtctaaggttctaaatcaagtttgaagcagagagggcatatctaatcggatgagaatgaaatcttgttaattccagataatacttactacaatcgcatttgaaagttcttgatgggcattatcaagtttcacagcaattttagcaattttgtgcgagagaactttttggcgtgtggtccagtctgcattcttccagagggtcttaggtatttcgctcaagccaaagccaaggagaaatgcaccagtgaccagcccaaaagtatttgagcatgccatagcataacccaaaatgcttcctgtcctgttagcgtacaagaatgtctcagtcaaatagtccaggaacgaatgtaacttccacccgagaaaaaattgagaaagatttggcagcagattttctaaacccagcaagtcagatgagcaattgagttgcaatacttagcagttggatcatgcattttttaatagaagagctaataacaaggtatgatatgcaaagccaatatataagcatatccgatcataagggacaacttaccagtttctgtgcatcatgatgagaaggataagaccgagaagaccaatgaatcccagtactagatagaaaactaagttgacatgcacgctagtcttcaatcgctcagacacggtaaagtctccagcatcttcgaaaccctgaataaggggcaccacagccctgtttagaggtaacatagtttaatatatgaggtaatgtacatctataagctacaaaaacaatgtagatggattgtgtgagtgcattttaaatactgccaaacaaaacaaaatttacgccttaaagataacaaccatgtagatgaacttatttgacctacactggacacgtcctgtcatgttaactaggtaatattttcaaaagtaatctggtttcaccacctaatattggatttgatcaaaagacagacacaatattctgaaaatatgggggaagacgtgtcaggtaaaaagcactgaaaagcttgaccagttcataccaggtgagtagaaacgtactccagtatgaccaactccataagaaggaaatggcgccattctcaggatgatcaggttgcagagatagtgtctgcagaacataagaagacaaatgaagcacaacaatttcatatgagacatctcctagttattctagtttggtttacatccaaatcatacatggcaaccaaaatctagctaccattgaaactttcccaaaaacattcctcaacagctcacaaccatgagagaccaaagctatctatccataaacacaatttgtttgactaccaaatcaactaagcttcatgcttaaaaaccttcagtgagtatttcaaactctttcaccactaaatactaatttcaatata

SEQ ID NO: 64007 - DNA, 701 bp, Arabidopsis thaliana landsberg
aaacctacgaacctcaaatgctggaaacatcgcttgtatgtagcatttcaacagaaacgaagcacaactaatttttacttagtgctgaatgaagaggagaactaataagcgtctttatatcaatggttgctaaatatcttgagatatttagaaccttagctatatacttgaatcgttgcgagtcatcacagatttctactcatctactaatatcgggttgctctattgggtgtctcacactctcactacacatatgatatactcgtacctcaccatagtattattttgaacactatatcagtataaccatcatatctttactctgcatgcatgctgttattaccacttgcatcattcaactcaacgatacaggtacacatgttgttcttaaaggatcgcatagtacgcaccgtgagagcatctcatgcttcttctgtagcagattcttccatagcagcagctatagcggaggtcttgaaagaagtgctacttcagagtgtttctctcaagatcttcacttcatcctcattctcgatcaatctctcgttcagcaattctactgcctccatgtgttctttaaatttattaagccagttatgttcaaaatcgtcaatctgtcttttagctagaactcgttgcatcctgtctttcttttcttgcttcaatctcagcttttcaatttcagtagtgctcaggactaa

SEQ ID NO: 64008 - DNA, 436 bp, Arabidopsis thaliana landsberg
  unsure (1)..(436): unsure at all n locations
catagctttctcggcgtatccaatctcctcttcaattttctttataagcggatcagttggagaagctgtctttttggtcgatgtggtaannnnnnnnnnnnnnnnnnnnnnnngcgtcagatgtcgcctccggccagaagcggactggtccaacaatgagtaaacgaaagaacggtttttccaataacttcccacaaaccgagaagctgcgcgacgtacaagagtcgccattttttttgtgttgaagctcaaattggaagagtgagggtttttatttccctttagggtttaatatagtaaattacaaatttagcgggacttaaattaaaaatcacagaaaatcaggaccggctaaaaatacgggccaatatgggcctagtggcccattacgacattaagagaccgtttccataatcccaacccctagtttgcttct

SEQ ID NO: 64009 - DNA, 1908 bp, Arabidopsis thaliana landsberg
  unsure (1)..(1908): unsure at all n locations
aagaagtgttcaagaatctggtaatgtgacttagtaaccagctcaggggtatcgtgttgctttgctcccaagtgtacaatgtgaatctggagccgctaatcgcgaaaagaggacatacttcatatgtatgccacttatagccccaatactactcaaagtggaatacgccactttacttgttcaaggcattatgttttgccgcagagataaacactccgttcaggattaacaaaagaccaataactagagaacttnnnnnnnnnnnnnnnnnnnnnnnnnnnnnttttcttgatgaacaatgatttttctgattgtagaacaagttgcttggacatgtctttctttgttccatatataacaaacaacgaaattataaactaattaacttcttatcaaaaaacataaacaaattacctagattctaaaaataccacagacggttatataataaacaaattaatatatatttttttaaaatgaaatgtcatatagttattctgatttatcataagcttaatttggattttttggcattgcacctaattagtttgccagaggattaactgtaattagtgaatgttgaaggataattataacagcaaccttcttcctccttatcatcatctgtacattactcattttctcttatttctgacttgttgtgtatttgttttcatcagataatgtttcttgcttccttgcacatctttttgatggaatgatctgacattttttggtaatttaatggaatgatctgattgtccaagttggattttagtcataatgtctctataaatagatataaaaacacacatttaataaaggatgatagagaaactcttggtcttgaacaaaatagttttatgtgtaaatgataagatttctgatttgtatcatgacattttaatatacgtatagtgataaaaaaaaatacactctaaaattatttatatagcaaacaatttgatgtaccatatattgatggactttgcacacaagtattcgacaaattttcaatgtttgttcattagtttcacttcctgaagagagtactttcccaagcatacaaattcagtgatgtagctgtacgagaattatgcaagcataatataaaatcccaaaatgaagcattttgctaagggcgtattgttaccgttaccttatgcttttatgagaagtaagcaattatagtgctcaaagaaggctaataaacattttttaaacctggatagtattgaaaaataacacaagttactagaaaaatggcccaagttcagatacttgtctcctagatgaagaagaagctccgaagatcctaaccctgaaaacagacaatatataaacaagtcatcaagcaaaggccattaatttcacttagagcctaactcataaaatttgctttgggtaaatcattttcactacaatcctaaaactaggtttcgcaatgtaccaacaaatcaaaaaaaaaaaaaaaaactgattcgttggggttatgactcatcggattcaaacaaagatcaaaatctgccaattgcgtgaatatgattcaaatcctcattccaagtcatggagctaacaattagccaactcatttttcaatttttggatattttcttaaccaggaaacattttttagtcatggagctaacaattagccaaacacatatgtgttttctttttctttccctattgcaagtttaacaactatcctttgttatagatatttttttaatgcttcaaacccatagactttgaataagcattttaagagaaagtttgttgattttttttttttttgtcagcaatatacaatattctttacatgcgaaattgaatctgaatggtgatacaacaataacactagcacacgatattagactaacttgcaaatggtttccggaacattta

SEQ ID NO: 64010 - DNA, 1423 bp, Arabidopsis thaliana landsberg
caaactgaaaaatgcaacatataatcacaaaacaataattcattctacaataattccaaaatttgaagcaatttgcagaaacacgaacctaatagcaagtcctttggcgcaagtttgctcaaaaatcgaaatcatttcttctctagatggaagattatctttagggaaattcattgtaattaaccaatgattaaaatcgcatccttcattatccggcatgaaagaatcttctccagtgtatggatcatactgatactgagtcgtcgagaacaatctcgcgggagatcgattaattgccgtcgattgcttcaccacagatctcggtaataacgatggcacgggagtgaaatcggagggacgagatagagtggagaatcgttggaaataggaaggtgcgactattcgtcggagacgatgcgagaacatggccattgatgccggagatttagaataacgccggccggagtcttctacttgaaagtttcaggtactgatgggtttagtagggcttttcgtgtggtttttagtatttgttatttattttcaggccccttatagtttcagttattttggaattgacacaaatgtttcagatttatcaatgtttcccaaagtatatacttattgggccgatctattgcggtttatatcaattgggctattaacaaagacgacaccaattagattaaatgggcaagaacatttcaggttgcaaaaaatttgacttttgagtatttctgaagcatatcgatctagttgtacatgagaatatagttataatattcttcactgtatattgcacaatgaaaaattagttattatatttttcgaatttgagtttattcaaaagtcaacataacaataccttcacaaaagatgctaacacagagtacaacaacaaagactctaacatcaacattcatcggcaatacgagcatgaagccaattaggtcgtccttgtgaaataaacaatcttcttacaagttatagatggtgaaagttcaaggcatcgttaattcgttaccgcaagctaactctatagctcttgagatgggtgtttttcaatgaaaaattaattagttatggcaaatttcaaactatatagttggcttttatgtatactagcatacaaattagtactgtattgctgaagtcgatacgacatataatattgtcagtggatccggcgatggtggatctacaactgtagatcggttgattaatattgaatttgcaaactattattttaatttgtgatacatctaaatttaaaatttgtagccatatttttatttggcaaatgatcttttctcggttgtaaacgatttcattacatgtatactcttgattgatcttattagcaaatgatacatgtcctttgaacacttaggcaaagaattaaaacgattacgcagataaatct

SEQ ID NO: 64011 - DNA, 1993 bp, Arabidopsis thaliana landsberg
catgcatagatcactcacgcgagaatattcattaatgcaggggtcttagttggtttttaacgcttcgctctgaagatgtaacctagtagcttgtactaggtaccaccgtaccagtgtgccatgttgtaacattggttagatatttgtaaattttagaggctttaaatgcaaaagattctattcggactactcgatcataaattttggtctagtaatctgcttgatgaacattgatttgcggagcaattcttgatgagaagcaattttatgattttatcccaaaactaatcgcgacatgatcattcggtgaatttgttgctaggagaaacaatggtctaagataaaatgaaaaagggaagagaacaaatattagttaagattgataaatgagaagtgaagtgagtcagtgtactttgcacaaacatcgatctttcgtctttgagtcatgagatggccagtttaggttagtccaaacattgcctcctcgtgagttcttgctgtatatatttgcaaggacaataattcctcttatttggcgttaatttatttattatgtctagagttcgtaaatgaattgaagaaaattatttactaaacaatcaaggttttgctctccccgcagaattcttgcctatgacattaaaaaaaaaaacgtgaaaatataaagataaacagtactattttggattatattgttgaagtttactcatataatttgtatatgttgataatggagaaaacatataaatatttgcatgtccgtatataaccttatttcccttctatcaaatctaagcaaaaaaacaaatactttacgcgtaggcgctttttcatgtttaaagttccgattaccacatgatttgctttttgagtcattttaatttaccttatactatatacgacaaaaactcgtaaattaccctcttattgtatttaattaattgaaatttctaattcacatttaagatattaatattttaatttattttatcaagattgtatattaataataaaatagaaattttcattgtcaacaataaatatgaattttatatcaaatatgttaaaaatttagttttaagtgatatataaccattttcaagaaaacaaatctataaaaaaaaaagtgtatgaattactgaaagttggtataacttaaaaccttcaaacgaacagacaaaaaactaagatgaccgttaataataagatacttttgtagatctgtatattatacaaacaaaataagtaaaaataagaattaaaattattttggtcttaagattcacagcaaagcacgatgcattgtgtaaatataatacattatacaaatacatggtggtacgtatataatataaacatttgtacatataaatacaagcatgatacaataatagtatcaaagcaaattaaggcgacctagctaaatccacatgctcaatacatattctctcactctctttctcacaaaaacaaaaacaatgccaagagtcatgtggaaaaacttccatctttgcttcccatcaaatctcaccaagccctcttcatctccgtccggtgccacctccgacgatcccaaccgtccatccattcttctcatcaacaactttaacctcctatatgacgactcctccgccgcccaccgccgcctatccaagcctcttatccacgacgttgaaccctcttccaccttcaccgcctccacctccaccgcagctaactcttcttcctcctctgcctcttatgatgattccgataattacggttttgcccctgacgacgactctccccctcctgacttaaccgccgttttagcctcccgccgcttcttcttctcttctcctggctgctcaaactcaatcactgactcgccagatctccgctgccgggataattacgatactgccactaggcttcttaccggaggaaccgccgtgaaacactacgtgcaatctcctgatctgtacacgacttccgacgatcaatgcaggagatg

SEQ ID NO: 64012 - DNA, 2072 bp, Arabidopsis thaliana landsberg
gacacttctgttgctccttctagagttggagttgattcagacataaaacttagttttggtttatcaactaaattaaaaaaaaaaagaaaacttgaccggaaaacaaatatattaacacaaactcaaacaaaagacaatggcagcagctgcagaaagaacatacaaagccgaagactttgataaccaaaaacaatcttcagaagagtaaaagtcatagacagcttcaccaatcaccatagataattacaaatctaagtcgttgcagaaatggaaaacgagaaaaataaaataagctactaaacagctcccggtactttttaattattcttcaatacaactttcctaaatggagtagcaacacaaccagaaaaggctaattaagattccaaaatggtgtttgccaatcagacaagaaaaacagaagatcaaaaataaactattgtaaactatgcacaaaaaacggtaaacatatagacataaaattaagatacctcctcataaaatgtcatagccgtaagcctataacctgctagaagaagatattctttcactgcacagtttaagtctcgacgttcattgttcttcaaaggccctatatcagtgaaggaaaaatctttctttttccgttgaatctctggcctgttgcctccaaactcatccgaatccatctctgagaaataacaaacactatcaggacatagtttggtgattaggttgctaccatgctggcactgatgaaaataacaaagaataaaactcatatgcattataaatgatgctttcatacctaagcagaaaatatctccatggagaaaaatgaaagaaaagaggagatggctggcgtacaggaactggaaacttagactaacaactacttattgcagagaaaaattctaatacattgaagagtctgcacttcagactaagatcatcactgaagtttctgaaaccctaataaccgacttcatgccacaaaacccgaactgagtgtttatacatacacgtttatctaagtagaagattaactacgagacgctaaagatcagaataaatatttcagtaatggattaccttctgacttgtcaatcgaaggaacagatttcttctgtccttcagttttcaatcttgcaatatcctcctgagctagacgaaattcatattcgctgatagctaacttctcagctaaagcttctttctcctccaacaaactttgtggatccgcaactgcattgtagggtaacaattactagctacgctacaaaccaagttgtctaagaaagcctgacactatacaatcaaaaacctgagaatgcgacacaagatccgacatgggtttgttcttggtcataatagtataccccatttaacaagctgaacaatcaccattcaagaaaccttcaattatgattgcttttcaaacttagactatgagaagaacatcaaatgcatgaagaacaaaaacatgactccaccattttcaggattctccatcattttatgaactactgtgcttttcataacttttaaaacatgtccatgatccaacctgaccactattcaactgctttctgaattaagaaagaccaaataagatagctaatttattcacatcatacaacagatccccaaaaagatcactaaaatgtaacgcagctcaaccactctgagagggacgatttagctgacaatttcggtaacaaacaaaataacaatgtgaggcagaatgcggaaaattggcgaacctcgaattgaattataccgagaaatctgatcaggagggaaacgggaaggatcggaaaagaactccttaagacgaattgcttgggcatcgcggccatcgtcgaggagctcgtgaagaagctcaaacgccgtcaagaggtagttctcctccatcaggaagttgacgaaaaagttgcacaacgacgatcgctccgcgtccatgttttgttttcttcttctttcacgggaacactaaaacccaatcagaggaaacacctccttcgttccaatatcactgagcattccgaatgaaaattcaaacttttcctctctcgattcgatcggattcgatt

SEQ ID NO: 64013 - DNA, 610 bp, Arabidopsis thaliana landsberg
tacagaatatgttatgcgatattctcgattagtctcggaagagctaataatttctgcggtaataactgttatctctatgcttaatttcaaaatatcaaactatcatgtaaataggtgataaacaagattatcacgtacttacgtgatatccttcaatatgagtaaacgtctgtacaaaaatctcgtcagggcaggcaatacacgagagaaagcaggatttcaatgattagttagcagtaattgctgacactcgaaactcattgcacagtgaggtagatagttcacactccgtcagccggttctcgaaaagtcacttttagagtatgttaaagtacactttgaaagtacactttataccttccattttattgatgacaaatcaattagtggagccggcgggattcgaacccgcgtccaaacatcggttgaaaaagccttctacatgtttattccgctattcattggcggcgaggaactggaatcggaccaaccgaatgcctcacttagctgaataatcttttgccatacgcacagcctgatatggcagcatcccatttatttttgagtcggcggcgggacttgggtacaggacaacctgcttaacgcggcc

SEQ ID NO: 64014 - DNA, 373 bp, Arabidopsis thaliana landsberg
  unsure (1)..(373): unsure at all n locations
tacatgnnnnnnnnnnnnnnnnnnnnnnnnnnnnnnnnnnnnnnnnnnnnnnnnnnnnnnnnnnnnnnnnnnnnnnnnnnnnnnnnnnnnnnnnnnnnnnnnnnnnnnnnnnnnnnnnnnnnnnnnnnnnnnnnnnnnnnnnnnnnnnnnnnnnnnnnnnnnnnnnnnnnnnnnnnnngagccataccacatggtttcataaatccagacgattctgaaagtctaaagcattggctttggacataatatagaaccgacttcgcctgttctattcccatcagagaggagaaacacgactcgatttttgctcatcaagacattcaatctcttggacacctaacatattgacctattttactcttaaatgtttgag

SEQ ID NO: 64015 - DNA, 183 bp, Arabidopsis thaliana landsberg
  unsure (1)..(183): unsure at all n locations
gcacatgctaaacaaggatgagagtgtcgcgtgggagatttggnnnnnnnnnnnnnnnnnnnnnnnnnnnnnnnnnnnnnnnnnnnnnnnnnnnnnnnnnnnnnnnnnnnnnnnnnnnnnatgatccaagtttaaagctggtaggcacaatcatgcacatggcacctgcaaccgatgagcata

SEQ ID NO: 64016 - DNA, 534 bp, Arabidopsis thaliana landsberg
gcgccctcctgtggccgatgcaggcgataaccaaaccattatgctgccggccaactccatgagcctggatgcctctaaatctaccgatgccgacgggcaaatcgtgtcttatcattgggcccaaatctccggaccttccaccttccaaatggacagcagcaatccggttcaacctcacattaccgggctggtaccgggggtatatacctcttccttaactgttaccgacaacctgggcgctacctcatcggacaacgtctcgattaccgccaacgacgcggtgaatcaaaatcctattgctaatgcaggaacggggcaaactatcacatatcctgcaagtaccgatcatctcgacggctccgtctcttttgatcctgatggaaccattcagtcttaccaatggggaaaaaaatcaagacccgtcggttttaatttcacccacatcaatgaagctcaaacaaatgtttaagaactgatccccggaacttatgtttttaccctgacagttaccgacaacctgggggctaattcatt

SEQ ID NO: 64017 - DNA, 297 bp, Arabidopsis thaliana landsberg
cctaatataggttatataccttgcggggttttctatgtgctgattccattttgttttcgttggggagttgtatttgaatggagatagttcttagagctttttcttcgtttttaggcaattaaatcttaagtttaatcggatttttttttacactacattataggcatttctgtttttaccactaccagataactaaagaaagaacagagagtattttattgggggggttggggaacggccctaacgacatttaactaatggctgaccaaattttgggccccccttgaaagactattt

SEQ ID NO: 64018 - DNA, 1233 bp, Arabidopsis thaliana landsberg
ataataaataaaaagcaatccaatctattgacggttttatccttttagaccaccgtaaccattccagactttagtatactatctaatttaaatctcaataaatatataaaaacacacaatacaacaaaataaatactataagttccgttccaatttttgtaaatttatttgtgtacatacgaagatctcgatgaatatagatattagtatttctccaagactatagagtaaactcatgactaaaagcattattttacaaaatcactgacacaaaaagtcaccgacaccgacaaaactaagactttggttttccaccataagcttgcttacaaatgtaaaatggtttctgcgatggagcacacatcttagctttccctggacatccctgtagacaattattccccaaacttcccattacttctgcgtctgttctcacaaatctcgccggaggttttcccgtcaagaagttcccgtctaagtaaagccgtcttaatgtcttgctccgttcgtattccgacggtataacaccgtgaagcacgttgtatctcatagacagtgaagaaagtcttggatacgccgcgaaactcgccggagcgtttcctctgatttggttgaatcctagctctacagctacgaggttgttttctccggcgaggtttggagggaggacttcgatgcctgtgagagtgttgttcgctagatcgacttgttggattgattcaagtaggaagaaccaagctccgagtgttccggtgaatgagttctcagcgatttcgacgatttcgagctgagttgactcggtgaatgagtcttttgagatgggtcctgataaagtattcgcctttaaagctaaatcgatgaggtttttcggaagctttgggatggctccggtgagcttgttgtagctaagatcgagttgtcggagatttgaaagcgagttcattgtttttggaagcggcccggtgagagagttgtgagatatgtcaatggattcgagtgagttgagtcgagttactgagtcgggtaatgacccggaaaacgagttggatcggaggatcaaggtcttgaggctggtgagggaggagatggaggatgggattaggccgtagaagttgttctcggcgagatcgagcgtgagaagctctgtgaggccggagatgagaagcgtgagacgacccgtgtacccggctgggtcgagagtgagttgggtcacacgtgggagtcagcgagcaa

SEQ ID NO: 64019 - DNA, 626 bp, Arabidopsis thaliana landsberg
acggcatctctctctctctctctctctctctactatttcaagtacctatattgtgaaaagcaataattccttcttaagaaaggaggggaaaaatcattcaataatacaataacaaattaaataaatctatatttgtaatgtatattatgaaatgattctctctcatggactcgctttctagagtatatgccctacttttctatttttcagtatttgtatatatatgattttgtattatctaatgtagcttttaggccctctctctctctctctctctgcaattagagggagatgattaaaattcatgaaagccatgattagtgtcccaagctatcctgccttcgatcccaaggctttgcaacagttgtctcagacgagaatgatggcatccatctatctttgtctactctcacccccacagtatataacacttccttctttatctctcttaattttatctatgaatataattatgtatgtgaatacatattgctttttgtaggggtacatgtgtatgtctaattacgataactcaaaatgagtggatcaagtccaactccaagtatattgagcccaatctaacttcttagttatagaactcatcgttctaacttaacatgttcttt

SEQ ID NO: 64020 - DNA, 517 bp, Arabidopsis thaliana landsberg
  unsure (1)..(517): unsure at all n locations
cgctattcacgacttggcccgccgcgttgcgttcggctttggccttcgacttgaaattcagattttattggcccttcaagtagtccttgcccttggtattatgggccggattgtcgccgtcgcgcatgaacggttcgagcgcaaagaaggcattggggttagccgtttccggccagccttccagctttacagcgagcgctttgttcacgataccttgaagctcggctacgcgctctttgcgccatgccatcgtcgccttgtattcggcgttctgaatgccggtgtcgggatcaatatcggggattttcccgtactgnnnnnnnnnnnnnnnnnnnnnnnnnncgtggtacaggtggactatggtgccaatcggcgtcataatctcgtggaataccggcttgccgccagttgcagcgtaaggcttgcccattgtatgctcctatataatgctaacttgtggnnnnnnnnnnnnnnnnnnnncttgtggttgcggttgcattaatgagccaaactcaga

SEQ ID NO: 64021 - DNA, 347 bp, Arabidopsis thaliana landsberg
agaaatatgttgaccattaaagatcatattagcggacctgactaccagaagtgagacctttttttgttgatacttcttacttactagtatgattcaaacgcttgtatctgtacgaaaattgttaggaaatggatgctttcattgacattgcgcttataaggagaactagagaatacaaaatactgcttcggcttacttggaatttatcctccttcttgtttgggcagggccatgacttcagtatccaatattcttcgtctttcagagttatttgagctggacacaagcaaacctggtgtgcttttagtagagtttgtttttaagatggtgccacaactgctagatgc

SEQ ID NO: 64022 - DNA, 388 bp, Arabidopsis thaliana landsberg
  unsure (1)..(388): unsure at all n locations
cttcnnnnnnnnnnnnnnnnnnnnnnnnnnnnnnnnnnnnnnnnnnnnnnnnnnnnnnnnnnnnnnnnnnnnnnnnnnnnnnnnnnnnnnnnnnnnnnnnnnnnnnnnnnnnnnnnnnnnnnnnnnnnnnnnnnnnnnnnnnnnnnnnnnnnnnnnnnntggtgttcttgcagcatctagtcctggattggggcattatctgcacttgccatgcctacataagcgctgtagggtaccggtatatagggaggcttcatgttatgaggattctcccacaagctgaccgtggcattcttactctcagtggataaaaactgacgctgtggatctattctcttgtggttcccacggacttatatgctccctagtgtgaagtgtttgccagatt

SEQ ID NO: 64023 - DNA, 1865 bp, Arabidopsis thaliana landsberg
ttttggaaactcttcaaaccacatgaaccaagtgaaatcttcacttgaatacgtgtcactccattagccaacaagatcataaaaaccccgtcatcagtcaacatccaacggttctaaaacactttgtttcgcaataatgtagtagccacgtcagagttaccagtacagacgagctcaccggaacaatctcaccgtcgacggcttatctaaaacaaggccaaagttaatttcccgaaaactataaatactcatcttttttttctcctctttcattttcttgccctagattaaaatccctcgattcacgcagccgcaccattgcgtttcttcatcgaggaaaaaaaaaccaaatcaatctcactcttgtagctcgctattctccagaaatttctaagatttagctttctctaaagctcgatcgaactatctgggttttggtttaaaaggagatgatgagttcgtatcgcagcttacacggctgcgatgttttcgatttgggtttgtgatggatggtttgaagatttcttgtcctgtggatgtttcgttgccggctaagcttatgggatctgaagggtgtggtggtggagttagggtttcgtcgaataaagcagataacaactgtgacaaggctcgtgtctcgattggtgttaattcttcaattgagcgttgtagtagtgcttcaatcaacaagaaaggttagctaatttctcttcactttgacttcaaatttcatttggggattttgaaattattcttctttacactgagtacagtttatagttgtagatccaaatttgtgtttttgttcttggtaaatttgcaaactttttcaagtttggttggatgggttttgatttagtcttgttcttgatttaggagcaggaagtagcagtggagcgtctgattcatcgttatggcgcaagttaatgcattcacatgactttgtacatgataggcttactaaacttcgggttgacaattcatctgagcctcaaaatggttattcaccgattgctagtccagaaagtgcggagtctcctaggaaaagaggaaaactttctagaagtagtagtggtaatggcactccgagaaggacgaaattgatccttttagatgaaacggtgaggacacagagagataacgacaccaaggagatatgtggacaaggatctactagttgcttaggtaactctcatgtgatttctttgtctgaaattatgcattcatttagtcagtagcatatattttaaaagaatatgtaatatgttggtgaaagtttaatgtttcacactctgaaaaagtgcctgtgtatcattttgccttgtgaggttacttattaccttctgttgaatgctaaacagataaaccgtttgtggtgaagcaacggagcagttgtaacggcaagcgaggtgataagaggatttccaaagttccggtgagaactttatcaaccatcaattcagcgactggcgagaatgcatttttcggtatgtgattgcttctgaattagccttgtcctgtggtatccaatagtgtactctaattcaacagttgactcctcaacctggtcgatttactttggctagttattatattttcttttatactttcagttctatagattgcttcgtctgaactttgaagtgatttacaagtgaaatctgttctgaggtagctttagaggtcccctcggtcacttgttatgatttttagtttattttgaatcctccctgacatcacattgaaaaggtttcattggctgacatattctttgcatcgctaaggtaccaaagggacaatgtaagagttatagcaccagtgcatttcactactatctcattaaaatgcgaccttgttgatatgac

SEQ ID NO: 64024 - DNA, 340 bp, Arabidopsis thaliana landsberg
tctgagaatctcttacaagaagatgaatcctttttgtgtaccttttgcgacaacaaacatgggttctgctatgcttgccatggatctgggttgattaaatttgaaatgctcttaatatagggtgggtgaccaccagcaatttagtactgaccctttttattttgtggtcatgtatcagggatggatggggccaaactattctatttcaactgcttgtgccacaagcaacttttgcattctgaattcagcagaccacattattaaaggtgaagctggaagtattctccatacacttggaaattccacagtttgggagacttcctctggttctacttataga

SEQ ID NO: 64025 - DNA, 472 bp, Arabidopsis thaliana landsberg
  unsure (1)..(472): unsure at all n locations
nnnnnnnnnnnnnnnnnnnnnnnnnnnnnnnnnnnnnnnnnnnnnnnnnnnnnnnnnnnnnnnnnnnnnnnnnnnnnnnnnnnnnnnnnnnnnnnnnnnnnnnnnnnnnnnnnnnnnnnnnnnnnnnnnnnnnnnnnnnnnnnnnnnnnnnnnnnnnnnnnnnnnnnnnnnnnnnnnnnnnnnnnnnnnnnnnnnnnnnnnnnnnnnnnnnnnnnnnnnnnnnnnnnnnnnnnnnnnnnnnnnnnnnnnnnnnnnnnnnnnnngcttacttgtttatagttagctgcttattgttgtggtcattgctgtgtttgctggtaatataccgtaccctatgagtttacgacctacgggccgaactttcagctaacattacttttagtagagaccactttgagctaacggggtctgctaagacctacagttagaaaacttaagctctcgctgagagtatttgagaaacatgcttttg

SEQ ID NO: 64026 - DNA, 140 bp, Arabidopsis thaliana landsberg
ttgtatttcaagctgggggcacgagtgttatgcacccatttcacatgttaggggtggctggggtattccggcgggtccctttttagggctatgcatggggcccttgggaacttctaatttgagcagggaaaccaccaaaa

SEQ ID NO: 64027 - DNA, 628 bp, Arabidopsis thaliana landsberg
agctgtcttttcattttctatcatttattatacacttgcaaatgtatacatcaaataaattatagttttattttttactgatataaatatgtaatacctttgtcttttccttattttcattggttaaatttgtcgaaaatatggaaaatcgaattaacatgatagtgatggtcaagttttaaggtgagttgtgagggatttttgttttttttctgtgattattgaaaagttgacatggaaataaatgaatttcattcattctttcactcattctcaaatttgggttcgaaccacaaccaaatgtatattgcaaatgcggtttaaagctacttctggttcttgatgatgatactctcacaaatttgactattatagttcctagtagttgccatgtaactttgtcggtgtatctcacaaatagcacaaaagtagagttttaaaacttacgcaactctccttgtgctcaaatctgacattataatgacaaaacttttataaagatgtactcattagtcaaagtttccacccactaaaccggtaaggtaagagacaacttgcttgtctagctgtttccagaaaatatgtaaagactaaagactgagagcacattttgcagaggcaggggatt

SEQ ID NO: 64028 - DNA, 498 bp, Arabidopsis thaliana landsberg
ctccttccctgcacacatgtcttttgcagagactgtttgctgcataaatatccgtctgtagcttccggaggagcttgctgcagctgcccagcatgcagagaatccttcaaaagaaatattcttcttcacgccagtttgacaagcaaaagaaaaataaagggcacaactgggatgctaagaaattcctgtacaaagacagaagcattggtatcaattcacttgaaatcttttttgtcctttggtctgctcaaactgtgttatctaattatcattatctatacatgtttacagaaagaagaaataacatggatgattggtgcagatgcatctgcaaaagctgttgttttcagccgttacgaaaggtttttggagctgataggcaggctacttaccaaggtattctaattctagactatcaactttgggctaggaaagatcttagtttagtttttatgtcttcaaatcttattggtagctaaaagttgttggatgcttaaa

SEQ ID NO: 64029 - DNA, 636 bp, Arabidopsis thaliana landsberg
aacacatgaaacacgagttacttggttcattttcataactactctttcaaatttgttattggtgaaaatactagaatcgtaaaacgtatggattattttacattagttgtgttgaaacaacaaccaaaactcacattttgaagattccctcgttgtcgcctaatatattttgggcaaaatatccattccatgtcggcaacgtgtgccctactaattaacaacacttggcgtttgatccattccatgtcggcgtgagagatggtgagatggcgaaagctgatacgttgatcaatagtattattttaaagtacgtatacagatatactgttttaaagagttagtttcgtggtgatacagactgacaggtacgttaagttcgacttaacgtaataacaaataaaaagaataacaggttgttttgtttggtctacaagactacaagactacaagactacaagtctacaacgaacaagactttttataacataagtaagactttaaagtaatcaacatagatgcctaagatgatttgatttacttggccgtcttactagtcactggttagtgattacccagtttcttaaaaaaaaaaattattatttctgatagttaagcagataattttttttttttttt

SEQ ID NO: 64030 - DNA, 1685 bp, Arabidopsis thaliana landsberg
gtatttgtggtgattcctctgaacagatctctaatgtcggcggcggagaaggtaatcattgatctctgtagttcggaagaggaggaagaagatgttttcggtgatgagaataactatgacgaaacggaagaggaagaagacgaagatacgaattcaaggtcggttccattgcttataatatcatctctcaatctttttttttttggggttatttcatcaattttgagtttttatttgaatcagtgaggatgatagcgattggagccacgacgatgatgatgctacagagtcagatgttgaagctgacgagatcggagtaaaaggcgataacgatgatggtgatgaagatgacaaagtcactcgcctcctcacaggttttgtcatcccctctttcttaaaacctttggttgactctcatgaatacttgtgagattttgaacactcgctttattgtatgtagccggaagcgatttgaaatctgtaaatgtgaaagagtgcaaagcatatctgagaaagcatggtctaagattatctggcaccaaaccagtttgcattgacagaattcttgagcattggaggtattattgacttctggctttcctgtatatagatctctctgtgtcttcttatgattgggaattcaaagtatactttttaatcttctttacaggattaaagatggaactggagaagcagtgtatccaagatcatcctttgctatcaattgtaaaggtaatattactaaaagtttttgatatgctaagttttgtttggcagagtttgatagtcttataaattggtgcaggtgatgtctgcaaaggagacattgttttgtttacacagaaggttcaccacaagtaataacttctctataataaactcatgctttttacttctcctatcactttttttttttttttgtgtttccctaaatcaatgatcttggggttgaataggtatgaaaagatgaaaaagagtggaaatattatggggagaagaactgtcgctggccaggttgttaaagaaagctatggtactgctaaacaacaacacacgttcactgtaagtctcacctctaatgtttgttgatcatctttatattctctgatcttgttgcctggtttcttctaacttccagtctgattaactaactatctggttttgtgtctttaccatagattgaagtgctctggtgtgaggggacacagaaattgccacctttgtatccattactagtcaaaggacgaaatctttataggttaatgaccttgaggcaggtgggttttcttttctattttttcatattcagtcatgagtcttgccggtttgcatatgcttatcagttggttgctccatttcttattccagcgatggccaaatgaagaagacagagtcaaagttcttaacgaaaagcataaccgtggtgccgcagcaagaaaggttatgagagaaaggaaaattaagtcaggctatgtactaaaaggtgagagatgattaagttttctttgttatagaggtgtgtttatatatatatgagaggtttcttttagtgatctttctgtttctgttaccagatggaagacttcaaaagcctggtcatgtgaagaagccttgtcaagtaaagacaagaaaaaacgagaaagatgagaatctaacccagaggcttagacaaaactctccggttt

SEQ ID NO: 64031 - DNA, 1049 bp, Arabidopsis thaliana landsberg
gcatccctggccgctgcatcaggacagttaggatggcaaatagggacagtttgacttatcatctggtgctgactgcagtagaaagtatgaaaatttgggtttatcttttgtactctttcacaatccaattatgtgatttgccttggaaaacctaatagtgtttttatatctgtacagatttgtgtcgaacaagtggtttggtgctattatatttagtggagttgtacttggaagaagttttcaataaagactctctctctgtcaacgaatgaggatgaagctgtagtgtgaggaacctatatatgaagaattgaagtagacttttgagacacactgtaagtgaaacagaggacatggtcttgctacaaagtgggtctccttcaggattgaaatgatcaaggagccattgccagaaaagctgaaacttaactcttttagattagtgactagttactactggttcttgtaaaagaagctattgttgttgtttgggatccatgtcttttcttccaggaggtagtttggctgtatgtatacaatgatcatgaccttctggtcaaacaagaggctttacttttggcttttatagttgacatacgcaatatcattgattttgtaacctaaaggatgttaataacttttcctttttcaatctcaaattgcaaaagattaacattgaattagccgtgtgattgattggagaagtggaaacaactaatatgcagaagatttccacatccactaatttatcttccaatgggacaaatacttttgtttatacgcggttcaactacgtaccaataaaaacacgccacgtggtcatcgtgtctgatctcagacattaaaaagccataagaatcggagatacaatctttctctctcgattgactttattgactgagagaaagcttttgacaatgggccacagacacagcaagtccaaatcctccgatccgccaccgtcctacttctcctcttcctccggcaacgtagtccaccatgttaaacctgccggagaacgccgcggatcatactgtttcggaaccgtc

SEQ ID NO: 64032 - DNA, 1674 bp, Arabidopsis thaliana landsberg
tcgccggatccgaagttggattgtttccgttgacattaaaaccgccatccatattcttcgctcccacgctcctttcgtcctcgatgatcatcggattctatttcgcctccagaaacaggtgaatctcctcaaccttctatctgaatcccccccctgctaaaactgattaggatcatcaatccaaatttggtttcttagggttgctggaaattttcgaattagagtatagattttaaacagaatctttgtttcctgtgaagaaatttattgagctgttgagaaaaggaacacatgaagctgcaattgattgcttgaggacttgtgttgctccctgtgctcttgatgcctacccggtactggaatattccatctctcttttttgtaacatactacacttttttttatggatttgttagattcttgctctgtttttacctccatctttgtaaaagaggttttgttttctgttcctgagttctcaatctatgaagttctgacctctgcatatatatctcaaggaagcttatgaggaattcaagcatgttcttcttgcactcatctatgataaagatgaccaaacctctccagtagcaaacgaggtatgccatgtttctgcagcttttttgtttattttgttttttcttagaatgttatctgatcttgcggacacagaatgtcctatgtttattttttgaactgctgctatacatcatgcagaatttgtattttggattataaggaattgcgctttctgttcttcagtgggcagagaaaagaaggtatgaaatggctggactgatgtcatctgtcttacgagcttctttgcaagcatatgatccagtattttctatgacactaagatatctgataaggtaaggctaagttcgtttttcaactctcttgttattggttgtgttctttttcgcttactctgattaatcccttgttctacctttaccagcatacacaaaggattttgctttcaccaaggaatttcttccgcagtttctgatctaacccacagattgctcctggaggaacgtgatgcaccagccacgcctattgaaagcatgtatgaagtaccaccgtttgatgaggtaacatggcacttagcttcttgatcatcttgtaatttaaatgtgattgtatctataacacgcattgtactgaatttttatatcaaatttcaggtggatatacaggctcttgctcatgcggttgagctcactagacaaggtgctgttgatagtatgaaatttgccaaaggtgaccttttccaggcattccaggtttcaatcccctccatttctttatacattctatgcattgtcatcaatcctcaccatccctttgctgttaaaatacaatgtcatgcgaaaactttagtttgcgcttaatttgtatactgtagttacttactattatcgtggtttaattttatatatctgcactgcaacctaattcgtgcttttacttattgcagaatgaattgtgcaggaagcgattagatgtttctgttcttgatgaacttgttaaggagtactgcatatacaggggaatttgggattcaagttggtgatcaagctttggcagtttaagatcctatcattattctaccctttttctttttagcattattaattttggtcgtttaatcttcatcgagatgcaatg

SEQ ID NO: 64033 - DNA, 563 bp, Arabidopsis thaliana landsberg
ctatgtaaatatatagttggcgacactatggcaaatctagaatgagatatctgcaaacgtatataattagttggcaccaatactaaatcaatctacagccatatatacaccaactgagaattgtttttcttattttaacccaactcagatttgaataaatgataaatagtgtgttcgtatattttgaagagtcgttattctacaagtcctggccagttccattacatcatatgtcttttgatgtaaacaattattatatttgttttataagactgtttggtttgattatgtctaaacaattataattgctttacaaatctaaaccgtgactcagaggatgagttaagagaagtgttctatccacaaacaagatcgttctttataacacttgttaaaaaaacattaacgaatatatagaaaataaacaaattacgtaataataaatttaagaaactacattttctcataccaaaaaaaatatatattaaattttcattagtaatgtggacattaggttaacattatttttttattgcatgttattgaacaacgagaagtgaata

SEQ ID NO: 64034 - DNA, 432 bp, Arabidopsis thaliana landsberg
aatgtggccttggatgatccacatctcaaggtcaagcgctgatgaacacattgaactatccatgtggctgacagccctcattttttacgcacaacgactcaattattacgggcgcgctctagcactaatctaataacccgtcgtgcgggacctctgctggggggccgctttggctcacccaaaatgaaagaaaacccatgtgtttcttttcttattacacgctcctggcagcaccctagaaggccatgggggcgttaaaagcgaacctataaaattatcccaccctctggaaaacagcatataggttgtggcttacttgtaacgtgctcaaactaatcaagggttggccattctagggttacctgcacactatagcacgtctttgtgagtgtaagactgtatgaaacctcttaaagcacaaaacattagaga

SEQ ID NO: 64035 - DNA, 701 bp, Arabidopsis thaliana landsberg
actctactatgaagtgagaacaacaaacaaaacatagataagatagagaccttggaactgttggaaggtaaattcaatacaatctttttaaatgaactttgcttctaaagttgtattaaaccctgagaaccatattaatttagaccttctggagtaatactggttatgttgctgagtttattatcactctttaacataactcttctcattagttttcctttaatccgtgtgctttatggtctaagctctagtgaaatagagaaatatgattgttttgtgagtagcttgtgactgtactaaatgttaggtagctatatttggctttgaggctgtcttacttttttttcaaatgagtggaatcaaatgaccatttaagagaatcatatacatagagacatgtgtgtatttgtgtgtgggggcacttttatgttcttggattctagtttaactgatttggtttgtagcaattatgaatcctgaatactctaatccttttatcagtgtcccataattgtaaacttatgaacaactttgagtatatatatgtatttaaactcattagttctttttgtattcactttcgcacttttttcttgactgttccttttcagaaaaaagttgaatagaaaataagaacgaggggtgttgaattatttgcatgtgtcatgtgttctgcagataaacccatttgggtgttattt

SEQ ID NO: 64036 - DNA, 184 bp, Arabidopsis thaliana landsberg
  unsure (1)..(184): unsure at all n locations
aaaccaaagacgaagggagaaaaccaacccnaagggacacaccaagaaccacaanggcaccaccaccaagggcggngaaaaaaccaaaaccaaagggcncaagaacccaacnggatccctcggccccccggaagaatcgaggcaaccaacaaacaaacaggcaagaagagagccaaaacccaaa

SEQ ID NO: 64037 - DNA, 160 bp, Arabidopsis thaliana landsberg
  unsure (1)..(160): unsure at all n locations
atcaccttaaacctggcagcctgcatccaccaagccgcaacaagggcngntggagcagattatgcgagaaccgcccaagaaacacaggcaccncnggccggaaagaagcaaccacacacagangagaacaaggaacacngggaacagaacaagacaccgg

SEQ ID NO: 64038 - DNA, 487 bp, Arabidopsis thaliana landsberg
gcccaacatactttgctacctatgtaaaaagtacatgcaaacccccagtagcttgcctgatttgagtggactgcgagtgttgtccaaaactctatttcaggtactttaaggtgttgtggatgaaaagatccctcaagctcattctctttagcagattggtccaatttctgttggtaagggacatctaacaggaaaagagattatcacgcgaatggtaacagatatgactacagctaaggagttctatactgactctaatggaagagactttctgaaacgggtaccctaagatttttctgtggtctcgtattttaaacaccaatgagatcgtattgcccggtttcaacaaatagcattaaactctattgcaggtccgggacaaccgaacagactggcatcttgtagagaatgagccaatagctcgaaactactatcctggtaactatttgatgtcccgcagaaattgccaaaccaatacaaatttgga

SEQ ID NO: 64039 - DNA, 590 bp, Arabidopsis thaliana landsberg
  unsure (1)..(590): unsure at all n locations
aacactgcctagtttatcatgctgtcggttattcctgatcgtgatttctggaattgctttcaatctgaattattattagacctaagttcgatcggatctggatatagatctgagttgctttcgttgttgtttacataataacaacagactgatttgttccacaatcactttgtattgaattttgaagcggcgaggcacaacacattgagtggagtaagatccagactcctannnnnnnnnnnnnnnnnnnntacgagaaaatgacccctgtctcccaaggttttattattgaagcttttttggtttgtttcaatatgcttgcagtttctctgtgatactaattttaaaaatgatgtagatgttgccgagaccaagaatctgttggacaaacttgttgtgttgaagcttaatggaggtcttggaacaacaatgggatgcactggcccgaagtaagcattttcttgcttgtctgttttagtctttttttcttttcaatcttattgtgtacagtttaaaatttgctatcatcgctagtgggtgtaatgctcaaattgagatagtgaaccatgatccattgtgaatttttggca

SEQ ID NO: 64040 - DNA, 638 bp, Arabidopsis thaliana landsberg
gtggcggcaggtcgttgaatgccatcattcatgtccgtatcaacaccctgtcgagggtgacctactgacctgcgccatggatgtcccgcacgcgcaaggcatcgtatgcaagactgcgcctcgatacttcccggttcgaacgtcagctggccccatgttcaaactccatcacctgctcatgcgccaaccatcccgcacgccggttgacgacgacaccagaacgcccgcggacacagggtcggcgaccgatgacccggttgctcgacagggcctgttcgtcatcggcgcggcccggacgggcacgaccatcctgcaaggtgcactgaacgattcccgtgagattttcctgttcggtgaacccgcttttcatcgcgacccgggaacccccgactttgcctcgcgctacaacggcatgcaccgcgcctggggcaaccaggagaccaagagcagctactgccctcgcttgttcgaacacgatgcccgttggcacgactacctcgaaaaactggcccggcactatcgctacgttggctcgaagatcgtcatcaaccctcatgacgcgacagcggaatgcagcgagctggtcgattttcagtgccgccgctttttacacttcgcaccagatattcacctttccg

SEQ ID NO: 64041 - DNA, 1427 bp, Arabidopsis thaliana landsberg
gcacctgcagccagagaatgagagagagagacgtacagaatgattagtgtatttaattttatctttcgtctttcttcagatctcctccatttaaggacctccccatatctctctcactcaccaccttcctttaacttcatttgaaaactttctttccctaaccaagaaaccaacaatgtcaatgtcgtctccttctttttgacttcaattttacatttttttatgttttaacttccttgctaatttagaatcatgagttttctaaagctcctgtgaagattttgaatacagatttctcaaagttctctcctttaccattagacccgttaatggatccgacttcaaaatccgacccgcgccgtcaattattgggggtttaaaagcttccgactttctttctttctcatctatcacggcggcgtcgatgaaacgatccgttagacctctcttcagtgctcttctcttcgccttcttcgccgctacactcatctgcagagtggcgattcgtcggagcagcttctccttcgcttccgccatcgctgagcttggttcctccggtctcatgactgaagatattgtattcaacgagacattgctcgagttcgccgccattgatcccggagaacctaacttcaaacaggaagtcgatttgatttccgattacgaccacactcggagaagccaccgtcgacatttcagctccatgtcaataagaccaagcgagcaacaacgccgtgtgagtagagacattgcttcctcctccaagtttccggtaacgcttcgttcttctcaggcttatcgttactggtcagagttcaaaagaaatttacggctttgggctcgtagaagagcttatgaacctaatatcatgttagatttgatcagattagttaagaatccgattgatgttcacaatggtgttgtttcgatttcgagtgaaagatacttatcttgtgcagtggttgggaatagtggtacattgctaaatagtcaatacggagatctcattgataagcatgagattgtgattcggttgaacaatgcgaaaacagagaggtttgagaagaaggttggatcgaaaacaaatatatctttcataaatagtaacattttgcatcaatgtgggagaagggagagttgctattgtcatccttatggtgaaacagtgcctattgtgatgtacatttgccaaccgattcatgttttggattacactttgtgtaaaccatctcatcgagctcctctgcttatcacggatccgaggttcgatgtcatgtgtgctagaatcgtgaagtattactcggtgaagaagttcttggaagagaagaaagcgaaagggtttgctgattggagtaaagatcatgaaggctcgttgtttcactattcgtcgggtatgcaggctgtgatgcttgcaatggggatttgtg

SEQ ID NO: 64042 - DNA, 598 bp, Arabidopsis thaliana landsberg
  unsure (1)..(598): unsure at all n locations
aggtttctaccgtttccatcgattctttaaagagcttagtgaatatcagaaaacaacttcntgttacaagctgaaattattacccaatacgaatgacttttcttccgccaattcggcaggcatgatcagtaacctgcagaaccagcttgcccagcaaaagagtgatcttttaaaagcccagatctccttgcaaagtgtgaatgcgcagctcagcgccgccgccaagcagggagggggattagccaacaatgaagatattatcgcactgagaaccagcttagacaacctgatcgctcaatatacagacggaggatccaaagatcaggctctggcggataagatcagtaaagtgcgcaaccagcttcagcagaggttatcggaggcaggcagcaccaccgttaccactcctttaggggacctgatgaagcaaaaaaccgatttaggcatccaaattcaggtggcagagaaaaccatccaggacctggaatcaagattgaagcaggtgagcgcttcgggccagggagccgccctcaatccgagcgtgatgcaggggatacagaatgagaatgatgttgcacgccagggatatacacaagcc

SEQ ID NO: 64043 - DNA, 1828 bp, Arabidopsis thaliana landsberg
aatataaataattcaatttcttatctccatcaagatttaataaaagtaaataaaaattaagaaataaataatgaaaagatgctttggggagtggatctataaatcttgttatataaaggaggatagatagtgagggttttctaccttcttctatctaaaggaagtctttactcagagaaccaaaagaaaaataaagagaaaagaacccaaaaaaaaaagccattgtaaattcagaataaatggaagaacatctaaatccattagcagtgactcatcttcttcaacacacactaagaagcttatgcatccatgagaactctcaatgggtttatgctgttttctggaggatcttgcctagaaactatcctcctcccaagtaagcttatcttcaaaatcaacctcctacatatataagaaatctaaaactcgatttttcatttcgaaaatatttctactttcttgttattatttttcaattattctgcaagtattattgtgagtttgttttggggaaaataggtaatttttcattaagaaacacaaatctttcaatggtaaatatgtactgatcatttcatgttgttggcaagcagatgggatggtcaaggagcttatgatagatcaagagggaacaggagaaactggtacaataaaacaacctatatatgtcacaaagttgtatgtatatctaaacatttcttggtgtatataattaagatatatatgttgtatgtaaataattggcaggatcttggtttgggaagatggtttttgcaactttgcagcttctgccgcggaaatgagctccggagaaggtagtggtggcggtggtggctcagcggcttatggaaatagtgattttcaacaataccaagggcttcagcctgaattgttcttcaagatgtctcatgaaatctacaattatggagaagggtctgtgaggataatttttcagcaaaaattaaatgatatttacacaaagaaatataaccttttttctatttatatttttgtatatagtactttctctcttttgggtttcactttttttgttaaccgagtttttggacccaagtccatactattttctaactcacattttatatccatatgtatgtatatgtaaataagttggttttagaaatttatgagtcaaagtacctcttttattctatttttcaaagtttatccgtaactgttttaaaagtcttgaacattgtttgcaaagtgtttgatcaaaaagctgataagagaagagtatttaagtatttttttttggcgaaggaagtgttagactaatcattgtcaactaaatattataatggttgttaattaatttaataatactctaatgattgaaaaaatgttattaaattttgtgcaggttgataggaaaagtagctgcagatcacagtcacaagtggatttataaagaacctaatgaccaagagattaacttcttatctgcttggcataattccgctgactcagtaagcatatgcttataacctacctatatgctatacactcctttacatactcacatgcatgctagttccgttttataagaagaaaaaaatgtatcagtgtgtatgtgaaatttacacatatgtataagcattcttattcactaacactaattgaaatttatgtaattgtcagctaccctagaacatgggaagctctagtttcagtctggtatcaaagtatatttctccaaatcttatattatatgtacataattccatttatgcatgataataaaattaacttgtaaaagtgtgtctctttatatatgattacatgaaaatgtttttcagaccaatgc

SEQ ID NO: 64044 - DNA, 548 bp, Arabidopsis thaliana landsberg
  unsure (1)..(548): unsure at all n locations
ctcattgacttatacacagacacaactcatatttttctcattanctaattacgaaaacggtccaattatgtcacctgttttcttttacaaaaatgtcaatgcaatgttcccccatcatcagaaaatagtatacatctttatttatattaaaaaaatgttaacaagtaaaaaaaaaatgaagaagaaactgttttaaaaaaaaaaaaaaaagaacatacaaatatgggcctaaattttgtacggcgaatgctgaatattactaaaatgggccttcttaaacagggccatgattcgttgaagtacaagtaaacgtaaagcccaatcataaattcgccggtcggtggtggtatctcctcctctccccgtttttctgggttactgttattcgtgagccaatggaatcggaggagaaagacaaatacttcgcaactccttattcccgagtcatggcgaaaaaatgcttcttttnnnnnnnnnnnnnnnnnaacggttcaaacctactactacttggaccccgtcgagaacaattcaactggaaacatcagttt

SEQ ID NO: 64045 - DNA, 567 bp, Arabidopsis thaliana landsberg
caggattatagttataaatttaatgcaaatacaatattaggacatataaatcatgtggtatgttccaccttttaggtgttactaaacatatcacatacactgatacacagacttgtatattataatgaggtgttctagtaattagttcttgctaaagaacgtttttatgtcgacacgttcttatcttatctttcgctttagaacaaaaatgcacattcattttctttttcttttctttacatggtccagttctcatcttaatatattaaacaatactcctttcggaactagttggcttataaatttaatgtgcatgtgggttcccaaaaagaaaataatttacatccccacacctgccttcaatcgtggaatttatcctcgtacaagatcaatgtgttactgaccatacaaatcattaaaaaaaaatgactagttttgttctaatatatataatattaatatatgtaagatgttttactatctgtttcttctattctattggatgttttggaaaaatttatgcacgacttgaatacaattagtgttttctaatcattataatatgcg

SEQ ID NO: 64046 - DNA, 521 bp, Arabidopsis thaliana landsberg
ataaacaatctggacaggatgctgtccagtgatagactatttttgcacaaaagaatctacgttacgagggccaggcaaaacaaatctgaacgcaacacaacgaaacacagaaggagaatcgtaatctaacgaaatgggagcacacataataagctagccatgagccagttgcgaaactttccatacaccgacaccaaatacatgggaccgtagccaccaacatcatagactattggtggagtaacaccaaacaaccacgactacaaaacgagctgaccgacgaaagactgaagtggacactaaataaaagagaaatagccactaaggaagcgactattggacttaccgactggatgaccacgacaacgcaatctagggggacaattgaaccagatcaccatcctacgagtacgtagagaaaacgagtgtggactgaaccagccagttggacaagacagtgcacacggaagggggcaggatgaccacacgcagaacacgggaatgtggctgagcgtacacag

SEQ ID NO: 64047 - DNA, 553 bp, Arabidopsis thaliana landsberg
acggacgcgtcggtgctgcctcaggtataccgggacttgcttgttgtggccgaggacgcgggccggggcctgcgggcgggcgagttcgcggcccgcgcggggctgccggcggacaaggcgggagtggagcggcttcgggcgaagctgaaggtgctgaccgcgcggggctggctgaaacgggtgcccgggggcctgttcctgttttccggtcacggagggaaaacgggaaacgccggaaggtgaggggttctcctctctaggttcggaggtgctggccagaaccgtcccgagaaagaagaaccccgtggaagcgtatgccactgacccgttcgccgcgtcgaaagccctcctcgcaggcctcgccggcgagcttgccggccctgccgcggccggcctgaccgccgcggggctggaggaattcatcgacgagaggggccgggaggtgctgcggcagctgctgcaggatcacttctacctgcgcgcggtgcgcgaggaacggcatgccagggagcatccccgcccggtcacgggcaccgacaggatctgcccggcg

SEQ ID NO: 64048 - DNA, 254 bp, Arabidopsis thaliana landsberg
  unsure (1)..(254): unsure at all n locations
acagaagagacacgggcgngaaggcaagggcagaaccaacagcacgaaccaccacgaaggagagaaaaagcagaaaaagggccacacacgaacgggggccaaaagaacaagcagagccaaacagcaananaaaaccaacacacccgaagaccgacggacaaagaggcacacgcacaaaggagagcagaccgcagaacaacccgccacacaacaaagcgggaaggacagccnacgncaagaaacaacggagacaa

SEQ ID NO: 64049 - DNA, 501 bp, Arabidopsis thaliana landsberg
  unsure (1)..(501): unsure at all n locations
ccgaaacaatgccggctgaagagccgagaatggcttagtgtaattctcatctttcggaaataatccctgatgcgggggaggtgcgcatcatatacctgtgcagccccagctccggctccagcttttcgggaaccagttctgtatcgggaacgcggctggcgggtgcaataatggctgcgttcagggtgccgtcatnnnnnnnnnnnnnnnnnnnnnnnnnnnnnnnnnnnnnnnnnnnngcctagcagagattggcgtccttgacaaatatcagcgaagcgccatggaacaccacttcgggctggctgcctactgcgttgcggtagaacatcggtatccggcacttgagcacattggctgtgatcacggatgtgcggccttcatcatgcgtataatcaaacggtgaagcgctgaggttaagcatgatctccggctgttgatccatcagtatagccatcgggcaggtgcggtgcagaggactactcgcgaggatccagatat

SEQ ID NO: 64050 - DNA, 551 bp, Arabidopsis thaliana landsberg
aaatgcttccagctaatctttatgtgcatctgcccagtcaagtcaaaaatgtagaaagagattagaaataccttttatgccctgtggacttgcatgtctcgttagtgtctaaggttactgcaaaagaaaaggagctgtggtgttgccagggagaccagagcctgtcaacagcctctgcacgaatgctgacaaatggcagttaccacatcaagactcatttctttagattccactcagatgaagatgcttaacctttgccgctaaaatggtgtcacgataattacttagcaaaggacctgattaggccacgccgttctatgtctacagacacacatgtgtgtgcggtttattaccagttatgttgatggcatatttgaaagtgtgatttctctgcaagactttaaaacctgcaacattgagaatttagctggaggctgtcacatttggagagaataaaaaaaaatcaacaatgtggatatagcaagttgttatctaaaaatcgttaaaataacagtgtacaagatgttttaaagtagacttcatatactaat

SEQ ID NO: 64051 - DNA, 479 bp, Arabidopsis thaliana landsberg
  unsure (1)..(479): unsure at all n locations
cggttccgcagcattcggaagggttgcactgattgcaaataagatactctacgaggaacactcaagcgggacatgttagaaaatataggccggagagggagcggtcttaacgccaagaataggatcatgagctggaaacagacaggaaagaatgtgattagtgatagagacatgtgcaggatctctcgattgacatataacatgggtgtgnnnnnnnnnnnnnnnnnnnnnnnnnnnnnnnnnnnnnnnnnnnnnnattcctggaggagatctgtgcgatgcctacttatgattgatgtaacgatggtttaatcgaaatgccatgcaccaaataggattgaaagagcttactcgtcattgggacccacactgattactatgaaacttgtcgatccattatagaccatactcatagagcatggttgaggagcatcgatcacaactgcctaatgagcaacctaatggaggaatgaagagac

SEQ ID NO: 64052 - DNA, 563 bp, Arabidopsis thaliana landsberg
ggggactggttcacttgttacattgtcattaagatttccccttattgatttttttctgaataactcgtgttgttctttacttttaactttccagagagaaaagaaaaagccagaaattgggaaagagtacttcaaccataagaaccttgaagaaattgttaaaagctatccgtacaagataaatctacctgaggacgatgtagtcaaaggtaaagtcaggttgttctgatgttctttactttgctttgataatcactggactatcttgcatgatgactgttttttttttttcacgaactatcacagaaactcaaatccggttagctcttattgattttctgaaaggacttatggaatttgatccagcaaaacgttggtcaccttttcaggtattgaacttccttgcttaagttatctatatatttgattttgaaggcttctgttttttgctagccataatggattaacatcaacttttcatgttttaaggcagcaaagcaccctttcattactggagaaccttttacgtgcccatacaaccctccgccagaaacacctcgtgt

SEQ ID NO: 64053 - DNA, 1726 bp, Arabidopsis thaliana landsberg
taacgatttaaaccaaggagcagctcagaggcaccaaatcttgaaggagcttttgctgtctgcttaatatttatactatctggtaaactaggccaagaatacaaatccggtctgaaggacttataagcgtctgcaccaattatgggaatgggtacaactccctcctcaatgacgagaattctgtagtattcgtctttggctagctccaaaagcacatttcttgcttcttttctaataactttagaccctttgttttctgtattatcggctttcaacaattttgcctggattccaattgggaaggtaataagcaagctgaagcatgaccaacaattctacggttttccatatataatatcattgtcctaaagcctaagtgattctcagccaatttcacatcctttcagtaatttcaattctcacccttgactattagcaatcatttcaatctaacatatctaatatattgttaaattctataaggtgaaaagcaaggtcttaccagttttggtatgactcctacttcaaccagaatcttgtgagtcgagcggctaagggctagattggccaagacgccaccagctgcttcctttacgtttacatcatcatcttcaaggaaactaatgagtagcctaaggatatcaaagtcagcaaccttctccctaatttcttcatccacagtcagattccacagagcacatatgcattgttctttcacctgaaaaaaacaaaacatcgaataatcatacatcacaattcaaatccaacaagcaaaagtatactactttggaatcataatccttcataccactgtagctagcgaaggtcggctcagtagagcggttatctcttccaacgctccactctcagcaacggattctctgtacagattcacagaagctatagaccgtataagcccagcagcagcttcacaggcggagctggactcagacttgagaagattgacaattagattcaaacaaccatgaaactgcattatcgcatcaatacatttctttccacccaaagagtacttccatagcgtctctatcgcctgctctctatcaagaggatcgttgtccaaaccgagcattcccacaaacaagcccacatagctatcaccaacacctgaagagctttcactcctcacttcttcaccatctttaagctaagcttatacaccaacaaacaatatcatcatcgttcagtatagtaatcagaatacacaaagcattaacctttaacctataatcaatgttattttcctgatataacacaatctgagaaatccgagctcattagagagacttacagtggtatcggaaccagtttctccactgttggaacgatcaaaactcgaattgagctctgagaaaccatgacgaagacgacggttcgattgaataagtactggaaaagggctgaaggagcgctcgcatcttattcttctagattgttttctagcttcaacagtgagaaaccggatttgggtgcttgagattggtaacagacgcaaacaaagaagctcgagaacgccgctgccagaagctattgttgagagtgacagtgacaagcgaatcaactccaacgtttcttctgtgaagaagctatctgattctgtaaaagttctaacctttactctgatgaactgagacaaaggtactcgaacgtatagctttaacttatgtttgatgctgcccaaacaaaaaaaaaactatttattttc

SEQ ID NO: 64054 - DNA, 435 bp, Arabidopsis thaliana landsberg
  unsure (1)..(435): unsure at all n locations
cgagactatactttcacggaccacctaatggaatccaagatgaaagagataaatagtacaggtttggacattctatataaggatgtactatnnnnnnnnnnnnnnnnnnnnnnnnnnnnnnnnnnnnnnnnnnnnnnnnnnnnnnnnnnnnnnnnnnnnnnnnnnnnnnnnnnnnnnnnnnnnnnnnnnnnnnnnnnnnnnnnnnnnnnnnnnnnnnnnnnnnnnnnnnnnnnnnnnnnnnnnnnnnnnnnnnnnnnnnnnnnnnnnnnnnnnnnnnnnnnnnnnnnnnnnnnnnnnnnnnnnnnnnnnnnnnnnnnnnnnnnnnnnnnnnnnnnnnnnnnnnnnnnnnnnnnnnnnnnnnnnnnnnnnnnnnnnnnnnnnnnnnnnnnnnnnnnnnnnnnnnnnnnnnnnnnnnnnnnnnnntattgccgaaat

SEQ ID NO: 64055 - DNA, 495 bp, Arabidopsis thaliana landsberg
caacgccaccgcttgcctcccctgttcccctgcctctgcaaccaccgtgttctgcctcaatccgtacatcacaaacaattcaaaacataaaaacacaatacacatagaaagtagacaaggaataatagtaaaagagagggttttaggacctcaaaagtgatggcagtagcacagaagaaatcagattcaatggaaacagaggcggttctataagtgccgagttctttaccatcgcagccaaggtctgaagctttatcgctccaactaatcactgtatctcccgcatagctctcattacctatgaacgaaatatacggttttgatttcggcacaatcaccttctccctgcaaacaacacatagcagagaagagattttgaagaaaaaaaacaagagttgataaccaagaccaagatttttgaccaaaaaaaggaacaggagttttttaaccaaaggaccaaagaatttcttaacctcttaccgggtttttaccagg

SEQ ID NO: 64056 - DNA, 1064 bp, Arabidopsis thaliana landsberg
gatgacaatggatctcactacttttaccaatgctatatccaaggcaatgtagatttcatctttggcaatgcgaaatcactttaccaggcaaaaccccttccatttgatcttcttaaatcctttgtatcgaaatccatttgtaaagatattgatcgaagttttggtgtttggtaaccacaggactgtgatatccactcaaccgcaaagagatatggcgcgatcgcggctcatcatagagactcggagactgaagataccgggttctcctttgtgaactgtgatatcagtggtactgggcagatttacttaggaagggcttggggaaactactcaagaactgtttattcaaactgtttcatagctgatattatcactcctgtgggctggagtgactggaaacaccctgagaggcaaaggtaaaaaaaggatcttgaaaattgaaaactcatctctgaaactacagcatttctctctcaaaacaacatcaagcgaatttcttttgcaggaaagtgatgttcggggagtacaattgcaggggaagaggagcagagagaggaggccgagtaccgtggtcgaaaactcttaccagagatgaagtgaagccttttctgggaagagagttcatatatggagatcaatggctgagactctaaatcctttttcaaccggacataaaggtccagctagctaacaggagatgatgatctaattctactctattcatttgtgattagtttgaatttagagagaaatagaatctgcatgtgttaactcataccagagtgaatgaaacccaggttttggttttagataaactaaatttcttacaagctgatacgaagtggttttacatggagttttgtgacaataaggcaaaatacaaatggatttacttttctcctaataaacattgcataaataaaacctaaaacaaccagtactaatgaatcctatgcttagatgattggttaaaacaaatgcaaccaccaaaatcatgcctcttcaattttctatacaacctttacctactcctctgtcctcagcaccaaccaagtcaaacccag

SEQ ID NO: 64057 - DNA, 582 bp, Arabidopsis thaliana landsberg
gaaaaagatatacgagtgagaggtgttaagcttttcatcatcctggcgtggagctgtttttccgtaggacttcccctacaggattggcaccgaagctgagtgtaaccaccaatatcgggatggattggggtggttactatactcctacgacaccaaaatagtaaactatgggctaggaacggcatgcaaaacaagcctatatattcacgattgtgaagctcctgtgcttgactgcagaggtcacctatagcctctgaccacatgtattttctataatttggctaaattataagatttgttatagtatgctaaaagtttgacaagaggttgttctagccggcgaggagtataactatgaaaatataaggatagtgcctgccccaattgattaaggtatgtaggaacactgatcaagtgtacaaaccgttgagatgcctcaaagcatacgtgaatgaacttgctcttgacacctattgaaaggataaacggctgaaattatcatgaccatatggagaagattaaaaagttgggtcacttattacgagcaggggcggagaaacagtcggtgattgcgatgagctg

SEQ ID NO: 64058 - DNA, 746 bp, Arabidopsis thaliana landsberg
gcaactagagcaaacatcacttaatataaaagagtgtgattatcttttgctctgattcaaaacttaaacgtatatgtaagagattagaatggaattagtacttgacaatatagaaatcgacttgatttataagaaggtaacaaaataaaaagttgatcgagtgaagtaatactttgcttagttgctgcatcagtctctacttttggcgtggccacctactcacagttgtttgtattattatctctcagttaggtgggtgtacatttaccacgtgattcccttgatttgatatcaaacattacaatccggtacatacgaggacaagctacttaccatgcatgtacaagaaatacgcatttacacaaggagtgataacagctatactaatttattgagagagtattgcactctattaaatatatcacatacaccattattttttcaatatcagcataagatttataaatacataatgctttatctatgtttatactctaaattctttatatatataaagcctttgaaataatattttaaaatttactaatcgatcccaaaaattacaggatagttctgtgttaatatcgttgttgtaatcgtaattcaaatcaaatcccatgaactgtgcggatcatagtaatgttatttgatctcccgaattaaactcggcaagaaacactaaacccgtggctaatctgatcataccgacactaatgatcacatcaaccccataacgtccaattgac

SEQ ID NO: 64059 - DNA, 1169 bp, Arabidopsis thaliana landsberg
tgttaaaagttagtgggccggttaatggaatacctaccccttaaaacgggccttgagttattagcattcactggcccatgtgttccactcagttcagtgatatatgtatggataactcaatttctagtgatgaatgatgatgatggtgaggcttattaagcccatttaatcaaaaattacatactgtagtgtgtgtgtgttggtattctattattgtgacaactatttaacaagatcttcccatttgcagtattgaccaccggctaatgcacggtagtaccggtctctgcaatagacaggtcttccatcagcggcctcagccgcggctgctgccagatcatcgtcagtcacaacatctacgggtagtcgaagcaattgttcttttctgcaaatttttatagtgaaaagagatgagtttttttttttgtttcttaaataccaaaaatacttatccatctccttaccttatattgaacttgttgctggttcttgaaatggaaacttctggttggttttctgtagatcctagagtggttttaaagaaatcctcgactggtgttgcgaaaacgaatagcacgaatgctgaaacgagtaaagctcctgttccgattaatgtttgtttgagcatcttgatcactggcttcacctaaaaatcatataaatttcctgatttttgtttgtttgtttgctttctgcagtattgaataaggaacattgtttgtgtattgttgttaccttgtaagaacccaacaacctgtcgcgagccaacacctgaaaacacaaatgcaagggcacagcaattaaccagttgcttagttcttcgattctgctagtcaatcaggagtcaaaaatgcattttgaccacatatgttcatctatagtgtcaataatagaacatgctaagaattcaggaaccggtgataacttggcagtgcttcgatccattgatctactagctttttgcaatgttttagaatagattttgctttgcatactgaggtacattcacaacaagctcagttatgggaaactatcaaaatcagaactttcaattccaagctaccagaaatgactagaactatgaaaacatgtgataacttaggtgataagattgagtttctatatttttcccgtagattagctaaacaaaagaagttataaagttgcta

SEQ ID NO: 64060 - DNA, 698 bp, Arabidopsis thaliana landsberg
  unsure (1)..(698): unsure at all n locations
ttgtggtatctacagatattacatttatataataaatgataagaaattattaatatgaaataatgtagtctttattaggcaagttgttatacttattcctagatagttactctatgcggtaggccaataaatttaaattattaatgatttctctaactctgaaccctatcaaataaattccaaccccatcagaactcagaagcacaaagtttccctatccaaagtaaataggtcacacaactaatgaaatcttttacagaactgtcgaatcatgatagcatccgttcataattattattccattaacgtatagttgaaagacactccaaactttcaaattttaaattttttgcatgccttaataacctggaaatgattactgttattctcacttttttttttgctacacaatttttttctcacctttctggtttcaatcttgtcgcaataaaagaataaaaaataataataacttcgatcgttgttgttttaaattagtaaactataggcntttatttattgtatttttgctaaacaaccctacatgatttaaaagcaatattatagttttgggttctacaatatttatagaccgaataaggggtccaaataattcttttccccaattcataactaaaaattttttaattaaaaaaaaattgagtttaagaggtttgacctattatataaatttttta

SEQ ID NO: 64061 - DNA, 746 bp, Arabidopsis thaliana landsberg
tgcacagtaatagtagaagtcactagtcaaacgtcagcatttcctttatcttattgaaaaaacatacctcattttcatggagttatagctgttacacactcacacacatacacaaaaagatagaaagaagaaaagtctatttctatttatttcttcgggtccctctccaaaatttattcttcttcatttatggagtctacactacattgttctgagatttgttctctatatactccttttcagtttttttttcacatttcatggtaacaaataggatctctttcgaactataccaaattctagaagacatgatttctgtctaaatctttcacctactcttttatatacacatgtacatgttgatccacgtggtatgagtctttggtataaagttaaaaaaatgttaggcctatcttatttttagggaccattgtcgaaactagaaagaagtagagtgaggtttctaaggttaggagagggtaggcactagacatagttttgttctgcttctgtgttacatgactctgttattagagaatagaaacaacaaaaatttaagacttaaaggcaatgatgaccctaatttttatgagtaggggatgtatagtttaattattcatcaatattatttggccctacttcgaccacctaccattttcattttcagtttgattttcaaaaaatggatatgatgttgtgaaataacaacaacttcaaataagtatttttgaaattcaatagatagc

SEQ ID NO: 64062 - DNA, 471 bp, Arabidopsis thaliana landsberg
accaacctgcgggtatatgacaccatccctttcattccggatcataccacccagtggcatttcgcaatattataaggaaccgattacaaccggacatattatgttcctgggtaacagcatcaccgaaatgggtgactggaagaaagtgctgaatgacactaccgttattaaccggggtattggcggcgatattacctatggaattttaagacgtttaaaagatgttaccgacaggcagccatccaaactcttcatactttgcggtattaatgacatcggtaaggatattcctgatgcggttatagccgataatatgatgaagattgtaaaacaagtgcgcgccgcctgtccgcagacgaaaatttacgtacaaagcgtactgccgcttaaccctgccatgccgaattatccgcagcattatgataaggaagaacacgtattagcggttaataaactattgaaagctaatgc

SEQ ID NO: 64063 - DNA, 1917 bp, Arabidopsis thaliana landsberg
  unsure (1)..(1917): unsure at all n locations
cctaaatcaattcgaatacgtattttagatcaatatttggaatgcaaaaaaaaaatgacggagggagtataaagaacccatatttaatttgtagactagtctatatatcttcctcatatcttagtgatttgctatgaatctttcaattgtaagaccaaatgtgttcaaaatagtgtttaatctgtatagtatatgtatacattagaaagaaatatacgtacaagtatatatatatatatgcattaaaagatgtgctttatgaattaaggtaaaatatgtgaaattatgtcaacattattcttcccttttagggtgtattttaaaacagaagctcattggtactttaggtttagcataggctataggttttagttgttatcgagaatgccgtgtttacttcatcatgaacatctcatgttaacaacatgcattttaagttcttcaaaaaaaaaaaaaaaaaaaaaanaacatatgcattttaagtctttgtaaagagatgtaacattgtttatcttatctttaatcaattaaatacgaagttataatttacatacgaaaggtaaaaataaagaaaggtaaaaatagtaatcaataagatagagttattttgatcaattatgctgaaatttcatgaaatatgtgagaaatacatctattggacaatccactaactgtcaatctcgagaattagaatcgtgctttgacagttttaactatatatagagaaacacaaatggcgtgagttttaggtttatattttgactgatacattactaaacaaaaatattaaattaagtactaaaataataaatgagtgaagtaatattagattcacgtataagtcatgtctaaaagggaataaaacaaaataatttacatttcttttcagatcttgaggtccacagttccaccttcgtaccaacacccaagtggttctttagagagagagatttataagcttctctttgggcattacaattttttttgtgaacatagaaacactcaaaacttcaaaccaaaaaaaataaatgggagaggttcaagaaaatcccaaactcttatatcagcttttcaaatctccatgaataatattaacaaatttgttctgatctattttattttatttttggtatcaggaagagaagaaaccagaagcagcagaggaaaagaaaatggaagagaagaaaccagaagagaaaaaagaaggagaagacaagaaagtggatgctgagaaaaaaggagaagattctgacaagaagcctcaagaaggagaaactaacaaagattccaaagaagattctgctccggcggcgcctgaggctccagcaccgcctcctccgccgcaagaggttgttcttaaggtttacatgcactgtgaaggatgtgctagaaaagtccgccgttgtctcaaaggcttcgaaggtatgtattaaaaacagatatgtgtagagaaaaaaaaaagaattaattgattcatataattttgcaattccacataaaccttttggtttacatttttaaaaatataaaaaattcagttttccatagaatagtttcggaaacaattttctaaagatgattaattatattgcggctttattttaaaaatatacaataaacacaattatcttgtattctttccagcatcctatgacaattgctgtaactggatatatcttgtttctgtcaactatagtttttttggttaatctcgtatctaagaatagctaatattccgcatataatttgcgggcaggggcacataaaggatttgggtatgctttagtattaatagcttttggtttttaaaaacacttcaaactaaaaaatctgtttttggggaaaaaaatggtaaaagcttaatgggtttattaacaaaaaatatttctacctttggaaattttgggttggaaatta

SEQ ID NO: 64064 - DNA, 1614 bp, Arabidopsis thaliana landsberg
ccggattcggatccttgcaagctcttgttgcagattcagcgtctttaaacgtgacctgaagaaagatatatacaagattcaagaataatcgataacctaaacgtatatattgtttcttggttacttacgaagccatatccttgtgatcgatctgtttctctatcacaaacgacgttcacatggatgatttcaccaaaacgtttgaagaagtttatcaagccttcctttcttgttgtccaaggcaaaccccccacgtatatctttgtgaatgttgtatcgaagttttggtggtggtgagacatgtctctttggaaagtaaaagaaaggttaaagaagaaagtcgaacaatctgagccctagaagaaaaaagtgttatgtagagaattggtgtgtgaaaaaagtgttatatatagaagaagaaaccaacacaatcatagggtagataaagaatagagaaatatttgcattccgatctcaattaggatttctaaaagatactagaaattttgtagtaggacaatatttgcattctgatctcaaataggaattgcgagaagatactagaaattttgtagctaattataaaaggggcgacacagagtcaaacaaggactcctaaagagtttaaataaactaaggaaaaatatcactaagaaacaaattgtctacaagttctaaaaaattataggcaattcttttaaaacagagcaaaacaggggaaaataagaaaagtgatcataatggaatattacatatcctaagtagaaattgaaataaaactcatctgaaaacacacacaatgacaaaaaaaggaaatgcttcaaaatgcaacacacagatttatttcatagaaatctccgaaaggcctctttgtttcttatcttcaaaccatttcaataccaattcctaagcatatattgcttttgttgctactcctgaaccaaacactctcattgttccctttttcttgcttcatctgcaatttccgtccttaaagtctcttcttccatgtcacaacgactaatgagctctttagtagaccatatctccccagtgtgccatctaccgttttcattaacaaatttcccttcgagacaactgtaaacgtttttaaggctaatatactgcaatggcagcattttgactgcacaatgcgctaacatcatgtcattggagaaaatattattaatcccaagtctctttcgcttcgcaccgagggttttcatcctcataataagctcccttacattctcattttctatgtaactcatcgaggaactttctgcttgcaccctacttctctctgcctcttcatttttcgcaaagaaattctccaaactggcaaggaagtcttttgcagttgtaacatcatcaggaacaacgcccctaaatccttgtggaatccggattttcattatcattatactcacgcgattagagcggtcccaatgcttgagttccttaggagagcttggacgctctgtcatgagggaaagatcaagatccataagggcgaggacaagtaacaaatgttctttccattccgagaagtttgatccgcttagcattcggatagaatcgacattcaaaagactagatgtgtatccaatactg

SEQ ID NO: 64065 - DNA, 553 bp, Arabidopsis thaliana landsberg
  unsure (1)..(553): unsure at all n locations
taatatacaccttgttgaatgttaataacattattanttacttcatatcaaatatagctttcactggatcgacttaaaaaaaaaaaaagaatatacctatcattcaattgtttcctctaataattattaatatgtcaagaaaagttgatccatagtcctcttgtaattggtaaggatttgtaaaccattaacaaaaagaaaagagagacgtcgatatctattaattgtcgaaaagctaagttggtggaactttaatctaccaactataatcatagtgcgaattcgtttgtgatttggaacacgtaaatagctggaggcattactacattcttgaccaaaaacgcaacaaaagcaaccaccaattgcattactataatcttgacgcaacaatgcactcattttagtaactatttacactattttttccttacattntctgctaaacaattacaaaataatcaatattacatacacaaattgttgaattattttctacgctccgatttactacaaaatcatgatatctaaagggtcggatgaggatatcaagatt

SEQ ID NO: 64066 - DNA, 2134 bp, Arabidopsis thaliana landsberg
aaaacttcctttcgcttttttagaatctagaggagagaactaccaaaataatagcgaactattttaagatcttaatatgcgaatatgcgattaccaaaactatgcctatatatcaccgtgagtctttctttttttgggattactttgccagtttgcctataaccatgtcattgagtctatgactacaacatggcattgggtttacaagtagtggtcaacatcttatagttattgagatattgagtccattggtaataaaaaaaactcggttaaagaaaagaaaaaccggtttaaaacggtataaaacatgtggttgaatgattatgattagtgaaaacaaaaatttgactaaaaaacttactaaaaaaaaactttaatcagtatacacacaccttgcttccacttaactatcatgaagccatcatcactgggtttacatcggctaagtttgtgaaagtgaatgtctctataaatgcttactctctttttaccatacatattagcctagagaagtatgtagagttcaagtttccaacatacattaatttgaactcaatacgtacgtgaaagcaagccttcctacatcaataaagaccgacctactagtttcttcataaatcagatagaggccgtgtttgaacgtagatgcgacttggtgtctcaatgagtgtaaaataaaaacctaaaaaaggaaaaaggtaggaccaaacacgccccatcccttaatctcattattatcacctcttccacacgttacctccctgcaaacctcacgctccttccctcataacacgtgactctcacgctcctccacctctcaaaaaaaacaaattttccttgtaatttacttgaaccaaattcatatattcacctaaacataactaattcttgatctaactttcgaaaattttcaaattaaaacatctcattgattccaaaaacatactttattgttttatatggttagtattttaatctttacgtaaataaaagacgttggaattggaaattactactagtagattgctttatcagaattttataatctatacaatgtaaaaagccgcgtcatctgttcaaaaattcagaagatcagagtcacgcctatatttctctctctcccgtcactctcactcttcctcttctgcttcttattattacatcgatcctcgttgtccctcctctgtttcttcaatatctctttctctccaacaaaatcaaaatcaagaaaacaaaaaagagaaactctcaagaaacaatggatgcttcattgtctccattcgatcaccaaaaaactcaaaacacagagccaaagaaaagcttcattacctcactaatcactctccgttcaaacaacatcaaagaagacacatacttcgtctcagaactcaaacccacggagcaaaaatcacttcaagaactcaaagaaaagctctcagcttcatcctccaaagcttcttcaatgtggggagtctcactcctcggtggagacgacaaagctgacgtaatcctcctcaagttcctcagagcaagagatttcaaagtagcagactctttgagaatgcttgagaagtgtttggagtggagagaagagttcaaagcagagaaattgacagaagaagatctgggttttaaagatttggaaggtaaagttgcttacatgagaggctacgacaaagaaggacacccagtttgttacaatgcttatggtgtgtttaaagagaaagagatgtatgagagagtgtttggtgatgaagagaagcttaacaagtttctgagatggagagttcaggttttggagagaggtgttaaaatgcttcattttaaacctggtggtgttaattccattattcaagttacagatcttaaagatatgcctaagagagagcttagagttgcttctaatcagatcctctctctttttcaagataattaccctgaattggttgctactaaggtaaagaaaatttctctgtcttttgtttttctcttatgtttctattggagacagaaaatttatgtttctgtacttgttgtctgaattgttacggttttttcatgtggttaaaatctgttttgcgtgttggggttgcttctctttgcatttaaacagaaacgaatctcattcaagaaa

SEQ ID NO: 64067 - DNA, 1537 bp, Arabidopsis thaliana landsberg
agggagaatgagtgcacatcttgatccacaatgtcaaaatttaaaagacaatgattttgtactaatacaataagtttattattgatccattgtcaaaattgaacccaggcccggcccataaaagatacagagttgtggaccttgtggtcaactttttccccctttttttaggttaatcggaaaacaattgtttgtttttggaagcgaaaatcgaactagaaaacacaaccttttaaggctaaacatctacttttctgacaaaaaaagactcaatgttatgtgcctgatgttttaccgtataatatttgttattttcctacacattgtttcgttactgttgtaagtaacgatctggtatttgcatttgtttagacacgtttttttactcccaaaattttatgaagggactagaaacaacaccttataactccgatccaaatcggatcaatcatttgtttagcatattctatttacatgatctgtacatggtcaaagtaagagatatagaagaggaaaaaacacagaatcatatcaccaactattataacagaaaggtcactaagatcgtggagaaaccatagcttgtcgcttggacaatgcccatgtgcgtttgtggttttgtcagaaagctcgacagagtgtattagtcgaggtcaagttagaagagtgttgctgctcaatggggttattggtgggactacagactctgcttctctttggttctgagatcctcacgttggcgattgcaacaacaagcacatcgaccacaccgctctcatcttcttcctcctctgtgttggagaatgaatcagtcggtgaatcagatggtatcttcttttccctgtcagctctgtttaggtcagttttctctgtgggactgcgattctggagacacgtagaagatcctgcttgactcttgtgcttcgacttgatacacatggtcttgagtgtccggtctgtgtaaaagagtatccatggatgccctgaaacaaaagtggaatattatgtcagtttagcctcgctgctcatggattccataatcaaatcagaattcatgtatttgggtcgatatataagtcattgctgcaaataaagaagctgggagaggttaaaaggcttacttagcacttcatccgctgtgattctggcagattcttcccttgttagcattctcgccaagagatcacgggcaggtttggacacagactcccacactcccgtgttgaaatcaagcttcacgtttttgattgcttcgaaaatagcatccaatgagtctcccttaaaagggagtacaccagacaagagagcgtataagaggacacctgcactccaaacgtcaaccttctctgaataattttcggaaagaacttcaggtgcaacataagcaggacttcctgccaatcctgacagtgtttgacctgtacaaaccaatgaacaaacatgtaagcacaaacttgacagctctattaagctacagagaaaaggtcaaaatcttatcacaagttcaaacttgacagctcatttaagctacatagaa

SEQ ID NO: 64068 - DNA, 553 bp, Arabidopsis thaliana landsberg
  unsure (1)..(553): unsure at all n locations
cgacgacgtagccggaattaccgnnnnnnnnnnnnnnnnnnnnnngcatggcgccaccctcgtaggtccatgaacagacgaactggccgccctcgggtgagcaaccctggttctggtacttcacgtcacccgtgttggggtgcgagaaaattgccgtgatcgcgcgttgacgcgcgtaatgcgaggcgtcgttctgatcaccgcgttgccacgccgcgaagaggcccttcgcggcggcctcaggtgtggtgacgggcccgttgggcgccgttaccggcgtggtggtcgtcggctcggctgccgtcgtcgtggtgtccgccgccgtgtcgtcgtcgttgttcttgtccttgctgcacgccgttccggcgagcgcaaggagcgcgacgaatccaattgcggcaaggcggcggtgcatggtcgctacggtagcgaggcgctgcgaggtgggggagtcatgcggctgtacgcggaggtagccaagcgaagctttcgtcgttggtcgacgtatcgcgctgcaacgatcgccggtttcttcaccaactcgatcttcggc

SEQ ID NO: 64069 - DNA, 1605 bp, Arabidopsis thaliana landsberg
gaaattatttatagaattgttcataatgcttataggtaaatctgaaaaattgatcattatatagaaaattatatatcaatatatatatatatatatggtgataatagtctagttagaaaaaaaaaactatatcatattcaaaatagttatatcatgaataacaataagaaaattctgaaaatctcaattaagtaacccgtttatataggaagtttcaaatccaccaaacgcagataaacacaaaatacagaaataaattttataatagtaaaaaccgacaaaaatgctagtaatccaaattagtctatatacagagagataacacacttatacagagaagctcttacaaattgtgactctcaccagaaaaacacacaccaaacaaaacaaaacaaaaaacagagagatggaaaacggaaactcctccagcgacaacaaatcttcacataaaccgatccgatgcaaaggttagtgaagagagaagcttcccaaaactcattaagtatcttatcgtagttgactatatatgactactggcgttgactttatgtttctatgggcagcggcggttagtaggaaggccggagagccgttggtgatggaagaaatcatggtggcgccgccgcagcctttcgaggttcggatccgaatcatctgcaccgcgttatgtcacagtgacgtcactttctggaaactccaagtaagtgtactctttcgtcttcttcttctcttcttcgttttaggtttttacacaaaattagttttaatattttacgtaaaatccgcctgaaaccgatatgcctttttgtcgtatatatatcaaagacacaaatattgactcaaaacttgccttgggatgacccaaaaacgtaacttatgattaattctttattttctacgtaagtttcgaattcaaaatgttaacagacttctatggtcttgggaaaataaacgaaacagacatgttgcaagagacatgttgcaatgtcaactattgccaggcatgttttttttgtttgccaattactgacatagacataaaactaagataaatattttattattgtagataatcggatttagttattttttatttgtggttgttgatacttaacagtcatatttataaattttagtatttagatttacaaaactggttttttattcgacgattttagataaggtccaacattatttgttaacgtgacacaacgtttgacccaataagttcgcggattgaccaaaaaatacttaacaaatctgaacttatgactaaatttttgatttgcaacgttggttcatttggtactcacaataattctttataaaaaaaaatgtccttggtaaaagaaacgaaacagactctaatgtccaatattgccaggcataattttgtttttttgccaataactaacatgacttataaaccaagatattatatttttatattggatatgaacttattgatttaacattttttaatttttttttgtggtcgttgatactgaagagtcagatttacaaattttttgtcatgattcgacaggttcctccagcctgctttccgaggatactaggccacgaggcgatagggttagtctcatc

SEQ ID NO: 64070 - DNA, 1079 bp, Arabidopsis thaliana landsberg
gccatgtgcctctaaagtcagaagaatatcatctgtgaaagaagctattgctagagaagctgcaattgcaggggatatggagctggcttttgatctatgccttgttctaaccaaagaggggcatggtcccatttgggatttaggtgctgcaatagcaagaagtcctgcacttgaacacatggatataagttctagaaagcagttgcttggttttgctttgggtcactgtgatgatgaatcgattagtgagttattgcacgcatggaaagattttgacctgcaaggccagtgcgagactctgggaatgttatctgagtcgaattctcctgagtttcaaaagatggacggtgtttcttgtcttactgatttccctcaaatgcttgatggactaagcagtgatcaacaactagatttggatagagccaaagattcaatttcttgtgttgctaaggatatgccggttgatgatagcgtggacttggaatctctgctaaaggaaaatgggaagcttttctcatttgctgcttcacatcttccttggttgcttaagctgggaagaaataggaaactggataaaagtctagtgcttgattcaattcctggaaagcagtttgtcagcataaaagcaactgctctaattaccattctttcctggctggcaaagaatggttttgcgccaaaagatgagctgatagccatgattacagactccatcatcgaacatccggtaacaaaagaggaagacgtcataggatgctcctttctgttgaatctggtagatgcatctaatgcagtagaagttatagagaagcagttgagaataagggggaactaccaagaaattcgaagtatcatgagtctagggatgatatacagtttgctacatgactctggggtagagtgcacagctcccatccagaggagagaactgctacagaagaactttgagagaaagcaaacagaaagtctcgctggtaagagtttctgggtctattattttctcaaattacctgttttcttcgttctgttttgacctctaagtaccgttttatatatatattcagatgatatgagcaaga

SEQ ID NO: 64071 - DNA, 504 bp, Arabidopsis thaliana landsberg
ggcgagccttgtggcccagccggcttgcagcttgcggcacagatccgggtaggcgttgacttttcgcgtgtgctgggcgcgaggtgaaccacagttcgtacagtccgcacagcaaagccagccgcaccgcctgggctttcggcgccagtggcttttgcagttgctcgttgagccattgattgagcggccgcagataacggcagacaccgaagcacaggtcgcgcatcagaccaccggcgggcccttccagcggatgggcccgcagtgcctcacggaggctggcgccgtccccgcgaccgggcagcacctgcagcagggtgcgcacggcctcacggcgtgggtcgcgctcagccaagaaggactcctgcctggaacagttgaggatggccacggcggatttcggcgacgctcatggggcgcttgccgggcagttgcaactgcgtcaggagcagcgcgccgtcgccggtggcgaccgccagaccctggtcatcgacgctgatcagc

SEQ ID NO: 64072 - DNA, 737 bp, Arabidopsis thaliana landsberg
ccgacgccggggaggataggctttaccagcgctggaaaaaatgttcagtgaagaagttgccatagttaggcttgagaaaatcaagtttttttttgctaatacatgactacaattttttaaataaaaataattttagatattcatggaaggctttaagaacaaataaaaaatagagaacaaatatcatatcaaaagaaatacatataaaggtgtttagatggtcatacatatcctttggagtccctaagactccttgatgagactattcacacatgaccaagtacatatgatcatcgtagaagaagggggagttgcctctataatcgtgtctgagagagttatcaattaagagcctctaattaggaattaatggtcagtataactaggttcattataagaaaattatcgtcggtaacctagtttctccttttttaaaaaaaaaaaaatggtcagttttcataagtttgctttcagtagacaaaaagaaattatgagtatgatcacaacatgagtggacagtaaatttgctttagcaagttgcaatatatcttgttttgtggcttacaaatgaattgaagttgacgcaaccttttgattttgatgctttaaatttacatgggaccaatcaacacagagaataaaaggaaaataactatgatttttctttaaattaaattaaagttaacaaaaaaaaaaatggttggtttgataatggattatgtctacatttcttttta

SEQ ID NO: 64073 - DNA, 167 bp, Arabidopsis thaliana landsberg
ggtcattttatcattacccatccaaggggcagggcagattcatttcttggttattactagggatagaaatcacttatacttgagctctcaggtgtgggaaaacgctttccattgactggccagcttttctatcagcagtcatcaaagtgacctggaaatgcggatga

SEQ ID NO: 64074 - DNA, 714 bp, Arabidopsis thaliana landsberg
gtgaacaacaacaacaaaactttccatagtttgtgtccggtctgtgattatacatggaaatgtttttttttcataattattgggggttcttagaatccttttttttcctccaacggatcaaatcctaaattatattaggatttttttttataatttgtgatagttcttaagtaattttatagaatcataatatataaaatcaaacgaatattttatattcagtacttgttttttacctctgggttcttactttcttaatgagatctcagtgttcatatgttgtttatatgttccagaaaaaatgaaataaaataagccattatggaatgagttttcttttagagttttgtgactcatgttttttcttattgtaaagaatatacgaatttgcaatgaacaagtttggtagatactagatagtatataccaaaccctccagaaaaataatcggactgcgatagtgtgataatgactcttctgattcaataaaactccttttaatttaagaaaaaaaaactaattaattctttactttatttttcaaactgagcaaaaataatggaattggacttgtgtcccacccactattattttagatcattttgtccaattggttttggctttaatctttcacttttattattaggtttgaatagattttctaaaaggaaaaagattacaacgacaaaagtaaacagatcagttgtattaaaa

SEQ ID NO: 64075 - DNA, 1982 bp, Arabidopsis thaliana landsberg
attgacagaccgttgtgcatcatttgcttgattaacatagacttgtagccttttgtgatactctgcaaatattcttgttgcttcatcacattgttgatcatacgcttccaacaatgcttgcttgtgtctgaaaaaaggaaaaataaaactcactaaacaatttgaaagatctactgaacataacggaaacaaatattttgatttgttgtatgaacagaatcaatgcatttcaacagagataaatgctgttgattgagcttcatgaagagggcaaaaagacaatcaatatcaccatacaaaagtgagaatcttaagaatgggcgatgtggcatatccatgaaaccagagaaacaaaatagcctgactaaatccaatatattccattctagggtatatcaaaatcattggagaatcaacaaaaccaaagaagaatacttcagggctatatatctatggctcctgaaatcatagagaaacgaaatcgaaataccaccaaaactctaagcagctaaccatactacacatagcaaccatacttgtaatggttctgttgaggacttaacactaacgataataaagcataacaacaacaagagaaaatattaaatgaacctgagctgagtggtgcaggttatttctattgtattattttacaagtgagaagcaatgtatccaaatacagtattcaaaattgaaagattcaaaacaaacctgtaatttgctctttcatcaagcatcctcttccgctctgcttcttctctagagacctccaacattctagctttcaaatcttttctttgcctcctcactatgttcctcaatctctccacttcctttgcagctaattccctttcctgcaatgcagcttctctatcctccgcataactcgaactctcaccagtcactgtcttatccttccgccttcctttactcttactctcctccttcccaggatttaccgaactcccaatgctagcattactacttcccccatgaaccgtaatattccgcctaattctctccactgtcttctccgatttcactcggtttatcaaaaaattccatataggtatcatattccctctacaaatcttccttatagcatcaatagaaggaacatgagatttgctcgatccattatacggacctaattgcctgtaccccatttccttctgtaaccattctaatatcgcctccggtgtcggagccgagctcgataaactctgcattctctctacaactacaatacctaactcaatccctcaaatcttcatgaaacttccgaaatttctactcatactttgcgccttttcttcaaatccaaacaatcaacgtagagaaatacctaggttactcaaatcgagcgaaaacaggagttcatagacgctataaacctaatacaattcgcgaaatgcagcaacaatcgagcgaattggtactctgatgaacacagagacagaaggaagacgtagacaaacagatctggaatcccgacgactaactcgccggttccggtgacggtagatggaaaattgtgacggagagatggatctggataaagagatttcaaatcgaggtcccgcttgtttattggattttcaattaaaggaatcaaactcgaatttttctgcaagtgtcgtcgactgttgaaagttgaaactgggtaataaccgggtcggactcgggtatgagatgtatccgggtcggactaaggtatttaagtctaaccgggtcgaattgggtaataagaaaacactatgggtcaaaattagaatagtttaaaattacaaccagaacatttagggtcaaaattgaatttatataacactaaagggatggattccgaattgttttaattttctcaatctaaaacccagaggttccttcctagggttttgtttgatactctcaaatcggaacattttgcaacaatgacgacggggctagtaaagccgggagatgtaatcgggaaagcgacagag

SEQ ID NO: 64076 - DNA, 1133 bp, Arabidopsis thaliana landsberg
  unsure (1)..(1133): unsure at all n locations
tcatatattattgcatagttatggagagaaatgttagagatttcaaggctatttntgttgatatttttaagatttgttttgctatgtatatacaatgttgcagggttttcttagtcaaagcacaggtaaactctattaacaatacgtttgtcacaattggaataatggacacatttcaacccaacaaaataatagaacaacccattatgatatgttatatcaaaacgtcagaaaacaaatcaaatgtaacgtaatttcatgcagaaactttaaacagatcagtcttctttgattcacaagctttctaaaaaaaaggtaacaaaagaaagattcataagatggaagataaagctaggtttcgaagttaggcacacccattggccatggcaatgaagtggttaactatattaagagagaccctaagattttgtataagacagatcaaaactagaaagcctgacctagtactgcctctgtcttttgcctggagtgtttgtagtttgagcaggggaagtgcaatctcttgaccaatgtcctgcttttccgcatttgtagcaatctccagttgaggatgtggattttgcttgccctgattgaaattgttgattactagattgaccggtgcagtctctcgaccaatgtccttgcttcccgcatttgtaacattctccacttgaagatgacgacttcatttgccctggttcatacttgggattaccagattgagcagtgcaatctctcgaccagtgccctggctttccgcatttaaaacaatctccagctgcagatgtagactttactggtcccgtatcagactgaacagtgcaatctcttgcccagtgcccttctttcccacatttataacagggcgtgcccgttttcgcattttgatagcctctggtatctgagtcaccaaagttgctgtttttggtaacactatacgacgtaggagagctgactacattgtcattgcaccatttgaagaaaccacaagagccctgaaattaataaaaagccatgttatcacacatacactcaaaggtaagcaatactacattaactacttaacaatcgtgcacaatattgactcggaattcaatttttcacttattccagtgatgcacatagtctac

SEQ ID NO: 64077 - DNA, 1306 bp, Arabidopsis thaliana landsberg
cccaattaatttagtttttaaagaatagatccgttgaaactccctcaactaacaaaaaaattacaaagagaaatgattcaaattaattttcaattaagaaaacatgcattagtttaagtggttaaagcccttgttggcatatcatagtactagtttgaatttaattagatatagaaatagagaaatgtgtctgatgacagaaattaataattctttttgggagcatcaaagagaacaaatataaattaaatgtcttgggtttctataattgctgtcaaaacataacacaacggtccagagtccaaaccaacctggatatagtagggaccaagttttaacactcttttctcacaacaaccaaaaatcaaatagtactacaactggattatttagttatacaagagaggttaattagcattaattaatttactaatcagaaactaatactagtaccaattttttttgaaaaagagagagtaataataataaaaacaaaggagtgatgaaattcaaaatattgggacacttcctcagagtaatcaaaaatggcacagattttatgaataaaataagaatgaaaaggactgtttttaaaatagtagtagtagtagtaataaaataaaagtattgagagagagagacttgcctcgagaaaaccaatctctctctcgagcatctgaactctcgccgcctctctgcgtttcccgtacaaatctggatactctggtggagacttaggacgaggcggtggtagagacgacggagcaagagacgatgaactcactccaccagcagctgattcttttcctcctccttcgccaccgccagaaggagcagacattttcggagagaaatggtttggagtgtctcaagagagaaacatgcagtggtgttattacttaggagagaagtgaacctgaagaagagaagaggaagcggcgagtgagtgagaaaaacaatgcaaagaagaaagaaaaagagaaagagagagagagatgagtgtgtagtagtagagagaaagagagagaggtgggtggcagaggaagtaattatagcatctgacaaggatttattacttaccttccttggccccttttaaggctccgtgtctctctttttttaaaaaccttaattatatttttaatctttaggctttttatttaaacaacaaaaaataattcttatttaatgcaaactttttaaagacaataatgttttttttttactaattcattaaattcacacagtatcttgagtatgattttggatggtaaaacaatgagcacttgatgattctataattatg

SEQ ID NO: 64078 - DNA, 464 bp, Arabidopsis thaliana landsberg
aaagcggttataattaatgcgacccgctataaaagaattgaacaactttgctatatagaacaagtcagatgaatagaacgtatttaatgcccttgaatgtctacacacataaactacggatgtgagaccactgacgacgactacacaggggtacgattaacgaattgccaagtcttaatggattatattcttaccgtctggattaaaaaggatttacattatcgaggacaaaataaagtataatggctatagtctgtcattgcgatcatatgactcctcaacatattcaattgattatttacatggcttgatacaatgatgctgtgatcgaagattttaacaaagacatgcgtacgaactctataatatatgattactgccacacagataactactgtgctgaccatcaccacagacattattatgcgtcatatgaattcgtgtgatcatgatacgttatgata

SEQ ID NO: 64079 - DNA, 452 bp, Arabidopsis thaliana landsberg
cgccaccggcattgatcaaagggtatgaagcgtaataggtataaccggcattgtaaaaagcacctgtgccattttaacagggttaggtccaggtatcgctgctgctgccgttgttgaagaagtgtcgaccaggtcaccgtagggactatgacagtcgtattgggcaatgttttttcgcccagtgcaaaggagatggtggtaccattcaaaacatactgcgaaggaatttcctggccggtggtcttgtcgaaggaataaggtttgccctcggtaaggctggccacgggtgttttcaccaggatcttacccgatgaaagctgttcgaggctttcggtaccttcatacaccagcactgatgcgggtttgatccgcaccgggcgatacaatgaaatcgtatttgagcttgccccccctgaaataaaaggcccggttgattccctggttcaggtttt

SEQ ID NO: 64080 - DNA, 1768 bp, Arabidopsis thaliana landsberg
gcaacaaggctcatatctgccgtgatggaggtaccagtcttttatatagccttagtgtccccttcctaaatgttttgagtcaccaatttaattctgatactatgggtgccgcagtattatactggctcagatggcaggggaacagttgacgatattagcccgcgactacgtgaaggttgcccaagttacttcaaggagtctgattacaaattctacttagctgttgaacgccttgagagagctgctttaacctcagatgctgaagagaaggagaatgttgctagagaggcgttcagtttcttgagtaaggtccctggatctgcagatctccaaactgtctgcaaacgttttgaggatttgaggttaggtttttttctatccaagtagatatctacacacttggtttgttgcagtttgtgatcgttagtcaataaaccttttagttaattttagtttaagctattatacgtagtggcagtcagagaaaaattgaattattttagccttttaaatcgaatttacaattaaggattcactcaagaattaagtgcataaaccaacttcatcaaggcaaaacggccagcttaattcgaaatcaattatacatgatgcatgttttgttaccctctcttttaagattccacttttttgtattctaattttctacaggttctatgaagctgttgtctgcttgcctttgcagaaggcccaagctcttgatcctgctggtgatgcttttaatgaccaacttgatgcttccataagagagcatgctcttgctcagcggaaacaatgctatgagattattgccaacgccttgcgatctctagctagtcctctagctagtcccacgctagacgaggcttcacgtagtcaatatatatgccagatcgttcatcttggtgtgcaatcaactgacagagcgttccgagagtacctatacaaggccatgattgaactgcatcttgaaaacgagctcctggagtacggtggtccagatttggtaccttttctccagaatgctggcagtcactctgaatcacaggtttgctaattacacgttagccctttaaagttatttccattgttatggtgtcaagattttctatcgtattttgtcacgtaaatgaggcataaccttaaatgttcaggaatttgtctacttgttatactaaataacctccatagctaaaaactagcagcctcagtctgccaccaactgcgaaacaaaaaataagtcaggtttagtggtagacactgcaactactttataggaatactcacatttgtctccttatgccataggtcggggctgtatctactggatcatctccgctgggtcactcaggaacacagatttcatcagatcaagcaaaatattttgatcttcttgcaaaatactatgtgtcaaagagacaacatgtgcttgctgctcacgtgtttctaaggcttgcagagagacgtgctattagtttaggggacagtcctacccttgaacgaaggtaaacattcttttatgttatgtgttgaatatatccctaaattaaatgttgaatgtttccctaagtcacattacttgtttcttctactctcccttcctttttcatctctaatgggttgctgccttgtgaatttaggcgagacgacctaagtcaagcagttttacaggccaagaatgcgagtaatagcgatggtttagtaggttctgctcaaggtgtttctgacagtggattgcttgatctgcttgaaggaaaactcgcagttcttc

SEQ ID NO: 64081 - DNA, 6035 bp, Arabidopsis thaliana landsberg
agtaatttttgttttttttacgtattttaagatttgaactgaaggatttagaaaataaatgattccaatcttgagtatagagagagaccttcatacggagtatattacaatgaattatagtctagattgtagtggagtgatcaatattttgctttttagcggggagttatcattttcgaaggctttaaatgtttttttttgcttgggaaatgtgaggagtgtcatgaatatcgaaattaaatgcattcaccaaccctaacgatccaacacttcctttgagttaatgtcacacattaaaatcatatccacttgtttataaccacattttctctcagaatccataaaaagagagagagataaataaagagaaaactgaagaagctagaagatggagaaaagtaatgatcatgacaaggctagccacggcggctccggtggtggtgccacggagaagtgggaggagactagcctcggaatccgaactgccgagacaatgctccggttagctccggtgggtctttgtgttgcagcgcttgttgtcatgcttaaggactctgagactaatgagttcggttcaatttcttactccaatctcacagcctttaggtacgtatcttctccatacacatatataaactgttcatcttcaagatgtagagttatttcttcttgcatactatttacaattagggtttatgtgttgtgagatggtgtgccgaagtttcacatgaaacacacaaaaaaaagttctagtttcaagaaactgactgtaactatgtgcatacatattactatattacatatgtacatgtatgttaacctatatctacatatttcaccaaaatttgtaatcagaatcccaatattttcagaattaattaaattaatctggatcgttaaaccaaacaaattgtgctgactatgaagacacgtcgagcttttggccagtttctaatttgttatttggtttaccagattgattatgaccggttttgtagttgtaaaaattatgttatctttattgaacttcccaaacttttccttaaaattttggccccaaattttcgttcttctcatgaaacaagcggctctgatgagttgaatacaaaatggagaatttttacttttgtctagggccccaaaatgctaggcaaagacacgtattagtcaagctacatttgttggttatcgaagttagcatagatagggtttgataaagtatagttgaaataaactgtttttgtaaaaaaatattgattatcggtaatggtaataaatgtaattacaaacttaggtacttggtgcacgcaaatggaatatgtgcaggctactctcttctatcagcagccattgcagcgatgcctcgttcttcttcgacaatgcctcgtgtttggaccttcttttgtctcgaccaggtctactattcaaaaaattcggttataaatgatccactgaagtacaaaaattaatttcataatgttttattgtctcagcttctgacctacctggttcttgctgctggagctgtatcagctgaggttctatacttggcttacaatggagactcagccattacttggagcgatgcatgtagctcctacggcggtttctgtcatagagccactgcttctgttataatcacattctttgtggtttgtttctacatcgttctctctctaatctcctcttataagctctttactcgctttgatcctccttccattgttgactccgccaagaatctcgaagtcgctgtcttcggaagttagatcctccatttgctcttcaagtacatctagtttgtcatgtttcaaatgttgtgtgtttttaactttggtcaagagaaagaatgcttatgtatttcctcttgtttcattgcttttcttcctattacgacttgtctaactaattgaagggtataaacaagagaatcatacggaaaaaaaaacacaagtcgaatcatacaaaattaccggagccaaattatcctgaacacaagtatacaacggttcaaaacacacattgtcttgtaaattaatttcaagcaaaccaaagtcgttaatccaggattatgataaacagcaaaaaaaaaagaaaaaaaaaaggaggaagctataacaagagtctataagattattaaataacaagattcaacactatcacctttgtttaggcagtctttaacttttacttactacacaaacttttactttaaattcatagaaaccccaacgtttatagatcagagagattatagtaacttctttatttgtactgcaaaaaaaggaaacccaagctaaagagccctaaccaagtgttgttcaagcttatatgcttcaccacaccaatatatatatatatatattgatttcatctgcaattgtacccttttgtttttattcgcaagcaaattattcttactttttcccatggctgctgataaaagagtggcgtttcaagagcttctgggaaggagttcggtgatcatcctacaaacaaaagagttgaaacaaagttagtgttagtgtcagatcatcctgagaaggaagaaaataaagtaacggataagttggtaacaaaccttgcacagagatgcagctgattctgattccattgtctggttttgagggttttcaagcgactggaacgaatcaagggcatcaagagttagttgccacccacaaactgcctcagcacaacctgaagaacccgagctattgctgctacatccagcagcagccacattttcattaacccaaggacagtaacagttatgatactttattggatcaaactccgcaatatcatcattgctgtctccgttttgtggccctgaaaaatgaaccagcatatatttattacactttttataagtgatgaagtttggataggttaatcaaccataagaagaaatctacagaccttgatcattggcagtgtaactagatccggggagtgcaaagccagcgttgaggggagactcccaagtctgggtcacttcttctttagatgcttcataaccagaacacactatcgcattgcaagacaaagatggatgaacactgtcatcgttgatcaacacatttatgttactcatcttttcaccactttcaacagattcagccttcaatgaatcaactattttagaaccactatccgcccttacaacagactgagacaccctatcttgactatccccaagcctaccttctcgatccatttctgcaggaacaaaatcatcagtaaggccttggtctggtgcgaattcaccgctttgtcctagattctctatgacttctgcaactggttccatgtctcccacaacgctatctcccctatggactgaaacgtcagctccgtgtatttctgcctcgtgacttgcacccattcccacactacccccactgacacctaaacttggtccatctcttccctgggcagtgacagtctctgtgttgagtacttcctcaccgtcatttatgctgctaatgccttgttcagcattaaaccgaacaggagctggttggaagcatgcactctgctgagcttgattgctgaaattcagttccgaaggatcattgaagtcagcactttgagctgtcgccacagagggataatttatgtcatcaaaatcccctggatggttttccacactttccatagaatcgtcattggcactgtggcaaattgtatccattgcaatgacagaggaagcacgtgtggagtctctggcacctggaaaagccataacttgttcatttccttcactaaatgggtcacttctatttacttccctctcgttttcagcatccagtgagtgacttggcccccctactgataaatctcgcccatacaagaaaggataagcttcatgcacatcagaacctcgggtacgctttgaaggccctgctgaatcatcattaacctcgtcaccgtcacggtcgacaacagtgccttcaacactatctgcgcgttgtattcgtagataaggcctatcaacagtgcttccaccatcatccaggctccgtttacgagtactaggccctcgtgattcatatgaagcagcacgatcaccaacctcacttcctgaaggctgcctccacaacacttcctttcctctatcactaaattggtaattatcacgggtcacagacatgttcagctgcgcagaggatgatgcaccagctgcattttgataaaagcttagacctacatttgatactaatcttctcttaactgaagtttcagcctcgtcaacatcttcattttgctgctgtcccatgccttcattggcaaaccatccattgattccacttgttgcgctagtgccatgtgtcactcccattttcttactcgtttcaggaagattggcatttatagcagcaaacggaaccggccgagaagtggtcatgaaatcacaaattctgacggttacaccacataaactacaatccagtaaaggtattctggattctgacttatattctggacccaaaacttcataatttccagaggcttttcgggatgaagccgagaattgtttcctgcttggaccaggatcttgcagacgactttgatttctagccggtccagaagggcacccatttctagctgattgggcagaatgttcttcacaatcttggatatttggaagccatctaggctcccatccacataggcttatcagcttttgagcctacaagataaaacataaattaagaaacaatagtagtttatggctagtaagtttgatattcctgaatcctgagttcttacgcgagagtaattactcaaagcctcttctttggacgtttctgcagctgagatattgtccattctgaaactgagatcatcattggcatgtgccaaaaggcggtcaatttgtggtcgtcttgaagcacgcatctggtcaattgcagatggcgaaacaattggtagagaatagaattgtaggagcccatcacaacgatccttgtaacctccaatcaaggctgatggaggagttggaggaaactgaactaagctttctgaacaactttttcctacccaaggacaagagctctcatgtgcatcatcaagctgcttagagaatttttctccggtggtatcagctgttcatcaaagatggatgaggaatataaaatgttagcagcatataacgaggctgattcatgaataatgatctttcgtgcttaaatgacagcgaaaaagttaaaatctttcattgtagatgttggtaaactgaccaaaactcttggctctgaagatactcataaagagtgtcagatactatctttttccgtacagtataagagaaagatgaatacttaaatgttaaaaagacgaatacttaaatgatatccccccaccccttgattccaagaagaaaacgaagataagtttggttacagtaacaagaactgaccttcgagaggattcaacgaatcttctggaggggagtattgtagaatggacccacagtattcacattgaagtttgtccagatcaacactaacccagcctttctgagcacaagccaaagaactagctgtctgtaaacagagattaccaaagcaggacacccctttaatcaaacagcatttcattgaaccagttgaaacttgcaacaaatatcaaaggagatagaaaggaacaatccaaagaataaaaagtaataagcccacaaatgaggtaacctagctattcttcctcatttttccaggttatctttaatacatcagtccctcagattgaattctgaatataaaggaccattgagtatactgttggattcacctacagcaaatttattgagccaaaaaagaactacaggaggatatttgccaagtttatcaatcagcattcagtccaaattttgtttttcgcatcactaaattcactagctctaggataactggactttttgctaggatatgcactacggattttccaaagaattgtagtttgctgagagtggaaaaatgaatttgcatgtgaaagagcaaataacgagaaaacaagagtcatactttggg

SEQ ID NO: 64082 - DNA, 931 bp, Arabidopsis thaliana landsberg
gatccaatttgttgtatctaatgctgaattcgcatagtcaaagagagactacaataagccaacgaacagacatacttgcgaagcaaaaaaacatcccttatgtctctttgttcaatttgtcaagctttacatcatgattatatcgagagctataatccttaataaagaagatgttaccaaaaacaaaacaaaacagaacaacttaaaaaacaaaaacaaaaacaaaaacaaaaagactactgggtcgaattcaattggtggacctttgagtctggattctggaaaatgtatataaacttcggcccaaatcagttaatgggctaagtctaacaagcctatttgagtttacacgtaaccaaaaagaaattattttttgtgtgttttcattctgttgattggtgacaattcaacaagagcgcgcggtacatcttctacaacatcggtaaaagttaccaatcaaaatctatattgttgttgatggtaaaaagttctaagtttataactaacaatttattaaaagataatcacttttgttgttttgtaattgtagatgtctcttggttataatcaagtttccttattacaagttcttgatttttaaagccacctcaaagcactagtggaagcaggaaagaaatgctagtttttgcggtgatctacttctcgtttggcagtcattgatattcacagattatcactaatgcactattttgtggtgatctgaaatcatttacaaacacacttcaacaaaacctctcacaacataagactaaaagcagaaaacaccttccctttggaatttatcttgctgatattcaaagcttcaaaggcctcaattaatgtaaaatgtttctgcccactacagttgcatcaactttatatccatcttttaatagaacttctgaattttaacctatgctagacatatttg

SEQ ID NO: 64083 - DNA, 533 bp, Arabidopsis thaliana landsberg
  unsure (1)..(533): unsure at all n locations
gacttagacgtttaattctatatggttgattcattggcatcatttctattccntactactcgtttctatagacatgnatngaaaaggggcgctttatatgattttgtttctggattcgcatagtccataatctcaacctgtcgctttagtgccattaattttattcctagaacaaatgaaatgatttcagagttagttgaaatcaatattaattgtatacatctaatctaatagtatgttattcacttattatttacttaatgatgctcctaagtattgatatcacattaataatcatgatcccatatcacaacaacattaacgtgaacgaccatattaacttcatatcacatcaaaatttaatgtatcaccttagaagatattaatattcacaccaagaaaatgactatacctgtctaaacagaatgattaaagaaaggaaaattgctagattaacttttcataccaagagtggcttcctttctttagttcactgcgctggtaagtaatgcttgaagcacactaactgatgt

SEQ ID NO: 64084 - DNA, 536 bp, Arabidopsis thaliana landsberg
  unsure (1)..(536): unsure at all n locations
atattgatcctgattatatatggtttgttgtgtatggatggtttctctgaaaccccgttaagtttattttcatgccnnnnatatatttcaatgattataattatgcttgtgatatatttcaccaactaatcaattttgtaaaacaaaaattattaaattaaaaattttagtatcgatttttaatccttactttgtcaaatctattgctagatataacaactaagaaactaataaacttttatcagtgtacgttgttgatcactagctagctactacataacgaaacacttgtatatatgtgatcactagatgcccccttgcgagacaaggggttaagttagctgaattgagacatatgatgatatactaatcctaacctgcaatacgagaacgagacttacgtagaaccatgcacactgagattatagagatacactttgaatatctcaacatcattcttacccttttcttgatattaaattctcttaataaggaacctctgacttggcaggcggttatgattattaacacaaaca

SEQ ID NO: 64085 - DNA, 211 bp, Arabidopsis thaliana landsberg
tctattatcagtttagtccacaagcttttttaccatctcggaaatggaagttggtgcattttgtgaaggggtgagagatggagtaagagagaaatcgagctgagaaattagggtttgtttttggtctgatgaagaaagacagagtatgagtgagagaagaaagaggaaaaagcagagtgtgttatgatgagtaagagagagaaagatagag

SEQ ID NO: 64086 - DNA, 532 bp, Arabidopsis thaliana landsberg
gcgtctcctgccgtccgacctcgacgaacaggccgttggggccgagtcccttatgatacatgccggcattcatggcgagcaggactggcgtccccttcgccgtcatcgccgcgtcgaaagcctgcagcgatccgtagggcttgccgttgccgtccgcgcgggcaaggacgacagcatggcgatgcgggtcgatctcgcagaccgcgtagggcacgccctcgaaaccggtgtcgcggcagatggcggggagttcgccgaccaccaagggcggtttcggcgccagcaccggacgccacaggagcaggccggcaaaaagcagcgcgacggcgggcacgaaaaaagccagcgccgggatcaaagagcgacgaggcatgtcgacccgtcgtacatttggcccaaatgagttgaattcttgcgccatttcccctgcaaaccgagaaacgggttgatacgggtcgccttgggggttatctgagtgacatgtttcagctcgactcccacgagcgcggaagggcaacccatgagcggaatc

SEQ ID NO: 64087 - DNA, 459 bp, Arabidopsis thaliana landsberg
  unsure (1)..(459): unsure at all n locations
atttcgcatgttagtctacacaaatgcaagtgaaagcatgcatctaccattcaagggaaaaatantatttgtttgacagnnacgtaccatcagcatgtactctgtgacctctggagataaatcaccaacaaatacagagtactcctggctggtgccagggccactaacaaaagacagaaatcaggggttatgagatcagaacacgaaagcaagctgaaagtagatcactttaaacgaagaacgtatgacttacgatgaagaggttacgccaccaccagtagcccagttcaatttgaaagtcttgtttgttccaggaatcagcatgccattcagggtgctgatagccttgatggctgctgcaggactagagagctcaacgaaacagtaacctgcgctagcactagtgaagggcgttaacaggagagaagaaacagaccagccggttgtgagtttactttg

SEQ ID NO: 64088 - DNA, 126 bp, Arabidopsis thaliana landsberg
accactcgtgctataccgaatcttgggaaaatcactttcttaaacatttttagcgggggggggggggtcattaatagaggcttcccaagagcgttccaccccatttttaaacataaatcttaccgc

SEQ ID NO: 64089 - DNA, 1777 bp, Arabidopsis thaliana landsberg
aaaaggtctataaatcagaaaaggatttatacacttttgaatactcacttgaaagaaagccttgatcaggtggagtatttcacacctttggaacttggcttcattgaaaaaaatgaaaagcgattcagtgaaaagaatgataaggttatgatgccgtgcaagaagcaaaaaacagaaagttcagatgacgaaatttgtgagaaggaagtgcaacctgaaatgcgagcaactggtttcgccacgatcaatgcagataatctaaagcttgtttatctacgtaagagcttagtcttagagttgttgaagcagaatgatagctttgtggacaaagtggtgggaagctttgtgaaagtgaagaatggccctagggactttatggcgtaccagatcttgcaggttacaggtaaccaagacttgcatgtcatgacctgaatttctctgatccatgtcatgatcactgcatcagaatcactgtcacacctgatatttttccttttctgttaggcattaaaaatgctgatgatcagagtgagggcgtgcttcttcatgtttctggtatggcaagtggtgttagcatttccaagctggatgattctgacataagagaggtgaatcatgtctgaattgaattcatattttaccattatatttccttgattttgggataaaaatatgacaaatctgctgcaaatgctgataaagtatatttataatattcctcctatgtgacttgttcttattcatgatcttatatttggctggtcaaaaacttcgtagaagctaaaacctcctcttgtacacattcattttcaggaagagattaaagatttgaagcaaaaagtgatgaatggtcttctgagacagacaactgttgtaagttgtgtatatcacaagatttggttctctgtttattcattaacatgacgaatcctctggtaagacagagaggtagttaaatcatttggcatttgcattctcatactcaaatcatgtaccgttctttcaggcgcttaaactcaccaatggttttttaaatctgacaggtggagatggagcagaaggctaaggctctccattatgatataacaaaacatgtaagtatctctgaaaacacatacgctaaatacgacagtctgttttgtaactgcatctcacactttgttcttgtgtaaatatcttgaaaaaaaccagtggattgcaaggcagcttaacattctgcagaagcgcatcaactgtgctaatgagaaaggatggagaagagaatatcctttgagattcaacaaaaagcacacacattttcacatggtgatttgacatggttacatttgaaacaccttaactctatccatttgtttacattagaggagtatctagagcagagagaacttctggagaaaccttcagagcaggagaggttactaaaagaaattccaaggatcattgaagacttcatcgagattaaacaagaaccatgtgtcggcggtttgtcacatgaggcggttataaatatctgattaaccaaagagcatcttcaaaaggaagaaggttgatgttgttgttttttgggctggaatattacgacttaagaaactcggctaaatatttctaagcttttgcggaaacaggaagctaactctttttgtaagatggtcatgtatgtagtagcatcaaagtgacatggtatgttttatgttcatgtatgtatatatatgcctaatgctataacttttgaaaaccgtcgttttcgtttatttattcctgctctggttagaaaaaa

SEQ ID NO: 64090 - DNA, 1542 bp, Arabidopsis thaliana landsberg
caaacctcttagccataccaagtaatggtgtgacaagtaaattattgcatttacctagcacatagaagtcttgttggttaaggacaaatgaaaaggaaaaagatgacacaagaaaaacaaaaacggttttaaaagatcattaccatatctattctctaatatacgaatagccctttgatgcgcgagtatagcgttttcaaacttccctattaccgaatacatactgccaacatgcataagtactgaatccaaaagaggttcggagtcttttaaattatcaacaatcttgtttatctgcatttgttaactaactgttttagacaaatacaacacaatccagttaaagcaatgattttttccgatacctggctttagactcaccatatcaagcaatgcggggacaggtttcaagtctccaacagccatataccccaaagcaatgatgtcaagaacagcagcttgttcgatacctttcaaacccgaatccagctcttctttcacagcaacataattcgctcgaagaaggtccattgcgtcactttccttcccaatcttcaccatacttttgacttcattaaacaactcttgcaactccatctcaaactcttccatctcagtaacattgttgctcgaagtagacctgcatagacagacaaaattcatcaaaaattcttgtttttctaaattaaacaaaaaacatcaaaagaatcaatcaaattctcacctttgaacttcagaaacgccagaagtagcataacgtgaagccgttattgaggaggaggaggagactgaatcaattggagtcgataaaaaatggcgagcgggaatcaagtagagcttaggtttgcgtttctgattacgtaaacaaacacactgccatgtcgaatatctcggggaaagacttgactgagaacttgattgatttgccctgaaaacccaaaatcacaaattcagcaaccacacaaaagccaaacctttttggatattcaatatttacagaattacattgagctaaatcaagtcaccttggatcaaacttaagctactttaccgtaatttgataccaaaagactaagcttttcactaaaaggcttagaaaactctaagcgagaaggcacaaggacaaatgaattatttaccatgtggtaagcgaagtggtcgaagagaggagagagttagagaacaccattggaggtagtgtgaagctcttcgttctcgtggccgcaatttcgccgactcgccgagtatagaaataatgccgggaaggaatctatcaatatggctgatgaagtatttttatcagaggctcagaagtaactgaatcttacaatttaggcccaaatgttttaaataaagccaaatagacatatgcgagtgactttcagataattgcacaaaactccaaaacttattaaatttatccgtcttctggacgagtccggttttcgcaaaattcgagtcattgtttaaattaaagaccggagtaaacccggtttatacaactacaaaaaaaaaaaaaaaaaaaaactgagtcaaggggaa

SEQ ID NO: 64091 - DNA, 535 bp, Arabidopsis thaliana landsberg
gattttcgaaaggcgcaggtcttcgtggaccatttcgactttccgcatgcccgacaagtgcgccagggcgtaggggcgtgcatccaccgccggtatggcagcgttgtggggcagcgaagtgcccagtgcttcggccatgcaggccatggtcgaggcggtacccatggtgttgcaggtgcccgccgagcgcgacatgccggcttcggccgaaagaaactcgttgaggtcgatctggccggctttgtaggcctcgtgcatctgccagacgatggtcccagcgccgatgtccttgcctttgtgcttgccattgagcatcggcccgccggtgaccacgatggctggtacgtcgcagctggcggcgcccatcagcaacgcaggggtggtcttgtcgcagccagtcagcagcaccacggcatccaccgggttgccacggatcgcttcttccacatccatgctcgccaggttgcgggtaagcatggcagtcgggcgcaggttggactcgccgctggagaacaccgggaattccacagggaag

SEQ ID NO: 64092 - DNA, 2612 bp, Arabidopsis thaliana landsberg
caagagtcattgtgatcttctgtgctgaagttcctccttagttttctccaagcagtcccatactttaatattccttcgcagaatgcaacaacagcagagtgcggagataggaatggaagtgttgcaactggtgttggatgaagcgatccaaccatcgaagcatgtactcctcctaatatattcatccacctttatcagtttgaagtttcaagtgaaaggaaaaggataagcaactcaatcaatgcatgaagctgtagccgcatagatccctagatggaacacttgaacctaaatctatgggtgcatatgcatttgagaagcttattgaggagttggattgttatcttatgaagcaagataactaggagcggctactttactttactatagatatatgtagaaagccaattaccatccccacaactactgcaggaaacctataccagaccatccaactagcgacatccacaacacagtttaaactttggataaccttggtgaaaacgcagatctaacacttattcatccaatttaactcaatgcattagctcacaagttgttcatagaagaagataaatgtaacttacccatacttagcccacaaacacccatctttccaaagccttcctcagtgtctagccagtgaataagactgcgggactcttcgattgttgccctccctagcaaaagtagatcactaacacagaggagtctcgcaccgcattgaagaaagggacgcctttggccatagaaagggctgcagtggcattatctatgtttgatcaaaaacatggcaaaaagcttcaaaagcggtcaaagcaaaatgatttgctcttaagctttcatcaagggggagaaacaagtctcttttattacctttccaacaccattgttgcaatgttttgtttcaccaacggtccacccaaacgcaatcttcggtcatatgtatgatcacctgtgcctacaacaatgccacacatcatcagaaagatatgatatttacaaatcaagagcaattgtaaaaagacaataacctggaagggctatgaacaaattaagatcacatagacaagcccttctaacaactaggcttcaaaacaccaaatttaaggtctccttgtggtcactttagtgtatatacctataatctattctaaacagagaagaatcaataatggtacctgcaagatgaaccacacaagccatcttttggggaggaacgtttttggggacaagccaagcaaccctggctgtgcgagactccggaggcaaagcagcggtaagctcatcggcacaaggagtctggaaaacaccttctctcaaagtagcggtctttgtctcccaaacagttctccagactggacgaaccagaggcggtggccaattctgaccttgaacctcaagagggaagaggcgttgaaccatacgctcgagcaattcgagattgggaccaccccaacctcgagagaagaagggtggggtcatcttggtgcggtgcataaacgctccatatatatggtcaattacataatggagcattcccaatttggtcgtcaccattgttctcataaataaatctcagaaatctgaccgatttgagaaatacctagccgccggtgaatcgaatatgaatttggaacttgggtgcttcagatctggtgagaaagacgaaagcaagcatccattccccaatttgtttatcgaatcggaggtttgactttgaagtcaagataaagaatatgaatgcaaaggtgaatcctttgttcgagatcgatggagaaatctaagaagaataagaagataggtaagagggtatgggagaagcgtgaagaaaattgggaaaccggagcaaaacgattgaaacggtgggctgatgatgatattatgtgatgccacgctggcatttcgtggggtccattttttgggtttggtctttttgtagagaatcgttatccatacatttgacattgacagaatttgaagcccattggtctgaattatagttggaatcggctgaaaagaaaaagaaaaaaaagttggaatatgtattttcctgataatgaaggttggaatatgatgggaccactatttatttggttgtcctgtaaataagtaatgaatactctacacataaaaaaaagtgtatgttcatatttttttgatagataataatacacatatcagcagaattatcatctttttcttgtgaaatcaacacaagacacacgatctcataaaaggttatttttttctataaaatgtgatgtaaaaaatgggggcttcttgtttcaccctcatactctttctctagtaaaccttggctcattgtttcgtttcaagaacaaatggcctaacacgaataacaaaatatataaagcgggacaaagaaaaaacaacaagaacaaccaaaaaatacaatctttctctctttcgctagtagaattacgatttgccgcaacatccacctcttttcccactctcttgctcgctcgggatgatgattctagttcctttcaagagacttgaattaccatcggcgtaatcatagacagccgttagtgatttcttgctgattattcggtagatctctgttaagatggtcaaaaatactg

SEQ ID NO: 64093 - DNA, 705 bp, Arabidopsis thaliana landsberg
ccaacggctctttaaaccaacttgaataattcacctgaagaaccaaaagctacaagacaaaccaaagataaataaaagtaatttcgccgggaaaaggttttgatatcattatttcactttttaaccttccatgaaactttgtttaccttagcaagcatgggctgcgtacaaactcatcataactatatagtacaatccccaaacgaagatatcataaatttcaacgaatcagttttagatttagtgaataactatagtttaatagtatcgaataatatcgtttgagagaaaaatagtcaaagatacatgaacataaattcccatatactaatttcccatttctcattcaaggaacgtttattatttttctgttcctgaaggtggaagcatagtgcgcctctttgggtttggcaatggtggtttgcttatttgttttatgaaaattatttttgtgatatcatttattgctcatttttaataattccgttagcgttgacaaaacaatatgattaaaccccacctaaaatgaaatgttatattcaactgtccaatttttcaaagaggcgttaattaatcaattccaaggcatatattcgatcaagataattaaagactcctatagtactctcatagtttaagagaacctacgggtcgaatttaaatcaccccttgttactttaaaactttaatcccaaataatgtagt

SEQ ID NO: 64094 - DNA, 692 bp, Arabidopsis thaliana landsberg
gtaattcgtggaagatctgaatgattttaaacaaagatgttaattttgctagccaggtaacaaaaagagaatttacctttgtatttattatttaaatatttttaatacaacataaaataaactcatacttacactaaaaattcaattttgcttaagatgtttaagataataatttatttttacacaaagaaaatgtaaatgttatcattggcaacatcaaaaaaaatcattgacgataaaattgttgacttttgctctatatcttttggtccagaaccaactattagtgatattaactaacgcataaaatagatatcactaatcattcccaaataaaaattcgaatttggattcaaaaactcattctgtctcccaaagtcatttttaaaaccaagtaaactataaccattgtccaaaaaaattactagtgggcctcacgagaggatatgttaaatttcaaatttgatttaagagtggcattgaattagcttctgatatttcatattcttttcatctacatcttttttattcttgacatatttgatcatctcatgcttagttataccattgaacaatactcagtatattaaaaccaatatgcgaaagatatatataagcttacctagcttattttattttttaaagatgtataatctctttattttgttcggggctatttgtattaaacgcac

SEQ ID NO: 64095 - DNA, 536 bp, Arabidopsis thaliana landsberg
  unsure (1)..(536): unsure at all n locations
ccacacgcatattttcagcaagcttaaattccacatgatattataccgntaattgtatcgtaagtgtacaggaatggagaatgagtgaaccgccttaaaagacctgaagtccctgaagtaaagaagcccagctagagcttagtgccttcatgtatccccaatgcacactgcatagtgctatactacagcagatggtggaaaatacttaaccgaataaggaaatggcaccaggagcaatgtgtaaatgtgttatgaaccttcgtcattcaaaacttagcttaaaaattcatatcctttagaaagccttttcttattaaccctgcttcactgtgatcagcccttatatttagaggaaccagtgcaacatctgagtgaaatgtcaaccagagcattgcatcctgggcttcctcggcctttctgtattctagttgtcccatgttaatttgcacttgtctgctattttgcaaaggagattataagtcatttccaactcctgaaaaagtccctttggtaaatacatangcaggttctcatac

SEQ ID NO: 64096 - DNA, 599 bp, Arabidopsis thaliana landsberg
  unsure (1)..(599): unsure at all n locations
gagaattaaattatcttttttcctcactggtttgtaaatttttaataaataattagcaaactatacacaaaatcctcctaatcatcatcaaatctttgctttttaccccgaaacaggcgtttatcttttgacttttgacttcgaccaaaccagtcaacagagggaagaggaagaggaaattgtcatccgtgaccggctgctaagaactgccccctcttgaacggcattagagtcattatctactgcatcagtcacacgttcacaccgaggacacatggttaaagccgaggtcgatgatggctttagcgctcgtagttcttcaacttctacttgtagccgtcgattttgttccttcaacgatccgaaccatctttttagatactcacattccatttccgtgtgctttagcttactcctatatatacatcagattgtgtgtaaccatgattgatggttaatgtggccnnnnnnnnnnnnnnnnnnnnnnnnnnnnnnnnnnnnnnnnnnnnatacttacaccatacgtaagttataggttttatgctataccaaccaatgcagccatatatatncataggttggtgtttgatatatatccc

SEQ ID NO: 64097 - DNA, 424 bp, Arabidopsis thaliana landsberg
  unsure (1)..(424): unsure at all n locations
aaaacattataagnatagagcttttgctctttttaagacgcggaaaacgcacaagancgagcaaaggtgagaacgggatttccgacactacaacgncagaaagaancaaaggccggactcgagacggaaggggaagcccacacaggcagcacttgcgaaacatcggacttatatcaaataggaccactcttgtggaaaaaaagaccaccaagaaaagacttgggaaaccctatgaacggtaaaagggatgccacttgaatacaaacatcagacttaaaaatacaagtaaccactggggccactacaaagttaatcaaccctcatatatatatacacactcacgatgacaaatgttctatgagtatctccatgagacagctggtctgagatgatcaagatgatggcgcgaacgagagccacgatt

SEQ ID NO: 64098 - DNA, 1949 bp, Arabidopsis thaliana landsberg
atgcattcacgtagctagccaatcggccgtcaaatgtggctaaaggtgagtgtagtgtacgatatctcgtctgtgaatgtatttaacaacaaccgcagcttaatatctttgaattagtttatgtgatccatattaaatgttactaacaatttatgtattctactctatagagtatataaatgttaacttgttagcttaaagattcatcaagtgttttgtgttgggatctccgtcggtcaatgcaatcttttattccattgaatttaagtacactgcctttagtattggatgaaacaaaaaccatttttgaaaatctgagatatatagaaaccggttggtcagaccttacgtcattttatacttccacttcgtaatgattctgtttggccttgtttggcttcattacaagtttcttttacacattttatagtagtatcatttaaataattatcacattcaatcaaaaaatacttctgccattatttaactggagtaactttttggtttccccctcgtaagcaacgtgtccaattccttcaatgaaggttttcatcataccagttcaagtcggtttaatccgattaaaatgctcggtaacccaccaatttagaatgttcggttaagctcatagggctaagtatggcaaaatttaacgagaattctcaaacaagatcgaaactgaattcaaatatttatattgtaaaacgaaaatttacttaaaaacaattagatcaatccaactagtcacaacattcatatttctagcttaaatttcttttggcaaatatcaagaagtggtgatctagtagtagatcatatatagtcctttttgaaaagggttgaaacattgtatttataatttgatatttgttttaaaaggattactttactgtaactttaatttccgtttaaaagattgtgtggactccattcaaaagatttcaaataacaaaaaattgcttcttttagttcgattatgcttgcttactaaataatacaactagacaattagttagaacgtaaatccaaacttattaggggcttaaggccaatccaaaaacgaaaaataatggaaattaacaaaataaaataaaagtggtccaataatgtttcttaaaatagtttgagttagaaaatctcaagaacaggattagagaaaatttctattctagtattagtcggccaagccaagctgagctgacaaaaaataagccgagcgtgagagtggcgtgagagagagggtcactgtccgctattttaaatgctgggcgccgcgtgaaggattagaaaagcattgccccttacacgatgctcttctcaacgtcatccacgtggcaacttaccattagtttacacatcaaaagctgaccagcaaatcccaggatgggctgtgatcacctacttactcctccatctaaaatctctgtgcaccttttctcccacgagccgttggattcatccaaattacgtgtgcaacactcacttttaagacgatgttagccgtatttaaccgaacctaaccggcgctgaaccgtcttccagttttgctaatcaacaagcgagatttgattatataattaaaaagcctttgttatagacttagtagtggcacgctgggctcacattgcctatggcctacatgcttggaagtttgaaaatctttaattttttatttatatgatacttaagttaacatctaaagatattcaaaacttgagaatgaaatcattgctaagaggataatttattttctgaaatactattcttactatgttaaatattttaattctttcaagtacattgtaatgctagatactttgcctagcaaaatagttttatattttatctgttgtaaattgtatcaatatacactaactttcattaagaattacagacataaataaacacaccaaattttagtttttgagagtcaaactatatatgaaata

SEQ ID NO: 64099 - DNA, 515 bp, Arabidopsis thaliana landsberg
cccgcggcaggccgcgcacgacgtggatctggccacgcgcttccttgtagaccacgcccggcgtgccgtaaaagcccagccgcgtcatcagctggttgttggcgcccagcttggcgtacacgttggacgccggcgcgccgctcaccggcacggcctgaccgggatgcgtctcgtgttcggcccaggccttgatcggatcggccgcgctcagcacggcggcggcattcggcaggctggtctgcgaaatcaccgccaccggaatgacgcgcaactcgacactcttggccgccaagtacggctgcgcggcctgccacaggcgatggcaatacggacattgcgtgtccatgaacgcatacaccacgcgcccggatgccaccttgccggttgaaatccaggtcgacgcggccagcgcgttccactgcttttgcgtaaagcccgcgtcggtcaccttgcgcatcgccggaccggtcaaatcctgcccctgcaacgtgtacaggctgccgatcaacacatgc

SEQ ID NO: 64100 - DNA, 369 bp, Arabidopsis thaliana landsberg
ccatgacacgatctgtattggctacattgcttattgcattattattgaatggaggttgatttacagaggatatcatgtcaggattaacggtgctggagagggaaactgatccagaatcacaaatgacagtttaggatccatgcacttgtacttggagtaaagactatgcatacttcaaagattctacattataagaatgagcatgatggtcagacctcattatcttgtggaactgaatgcaactataacaaaccaggaccatcgagacgactctgaacactatgagaagatagaacgtttgtatcatcctaagctacagaatgagcgatgtcccactaaccagcattagcttctgtttgcagaagaaca

SEQ ID NO: 64101 - DNA, 550 bp, Arabidopsis thaliana landsberg
aaagaatagccaatctagaagcacaggtacttgcttctttatatcttccaatttttttattttttttgagccatcagatattgttgaaggaacctaacaaatatccattttcttgttaagatcaagagagagaagaacaagtcctcaacttgcttagttcctcttcctgctgtataaaccagctaaggttcgagttaaacttgaaatcacagttaatgcctcaaataagcctttaagctatatggtttgaattcttatgtatttaaagtgtacataatccaatttgattggaaattggaatatagatttcatccctgtgattatgtttatatatggaaattgagttttacaagagtgaaactgcttcttcatgtgcctaccaaaaaaaaaaactgcttcttcatgtggcttctaagtgtttaattacgccttcagcaacatgtagagatcttgagaaattgacatgagtctctagagaatgttgaaagctgtggtcgttgaccaagaagattcttactatttgactctatttgatgggcctgtcatgagc

SEQ ID NO: 64102 - DNA, 518 bp, Arabidopsis thaliana landsberg
acgtcaacgccgcccggttggccggtagcgcgcacggcgtcggcgacccgggtgagtacgacgcctggatgaaggcgatcgagttcgcgatggagcacgacgacggccagagcctgcgggcgatcgatcgcgcggacctgatccttacggcaccgtcgcggtgcggcaagacaccgacgaccatgtatctcgcgctgcagcacggcctgctggtggccaactatccactcgtcgaggaggacttcgacaccaaccagctgcccgcccccatccgggcccacggagacaggtgcttcggcatcctgtccacccctgccagactgagccaggtgcgcaacgaacgccggcccggcacccggtacgcctcgctcgcccagtgccagtacgagctgcggcgcgccgaggcgctcttccacgcacaccgcataccgtccatcaactcggcctcgatgtcggtcgaggagatggcagccgtcattattcagaccaggaagctgaaaacagctcactgagcacga

SEQ ID NO: 64103 - DNA, 604 bp, Arabidopsis thaliana landsberg
tccataccgcgaatgaagataagcgatgcaatccgtgacatgcacatagatgcaaaccctacaagcaaagggaaacggcgttcaattagtacagtctctcaacaaatgcaaagcggaatactgcgttcgagtgaaacaattcaaagcattgttccttttggtaacaacggcagcagcaatgcttcctcgcatgatagcaatagtgttgtccgccttagcactaatgttaacaatgaaactttgatatcgcaggcgacagagtggatctttggtggtgcacttgggagagacagcagcgaggatgaggacacgggctgcagcaacattatcagtgacaataacgcacacaacgagcggcgaacagccggcgctacacaacataagtccactgcgaccgcaccagccaaacgaactgtccctgcatcgatgcacacggacaaacatcaaggtgtaatcaataccatgaagcgtgctggaagtgcaccacgtatagcatactcaaaatctgcattagagagagaaatcctgaccatataggtcataaagaccatatttgttgatggagcaacctaaattcacactgtagacgaacaaaatgtgatac

SEQ ID NO: 64104 - DNA, 574 bp, Arabidopsis thaliana landsberg
  unsure (1)..(574): unsure at all n locations
attttttgataatagcgccttcatttctcctaaattttggaaataatttttttcttatggaccaacaaatttgacattaaaaaagttaccatacacagttttagactgttactaagcaatcatttttctagtgaaaacaaacagaaaaaagattagtagtgttctaaatactatctctttttcgagagctattatctggtgagaagaaaaaaattggtttctttgaaaaaaaaaatagcatgagtgaaaatatcgtaaataataagtttcctctcttatttttctatataaacacagtttgtcatttttctataattacatcggcattgtacattggcgtaaggcaatactttaacactttaattttcttttctttttatagaaatgttaaaagttatttagcaacaagaaaacacaattgttaaccaaagatgatatacaaatggaatttggttaacaccaaagtaaaaataaagaggcttttcgcanaggaaaaaaaaaacananaaacatatagcctagtatccaaaaaagatagatgaaactcccccgggtatgttctcttctagttaat

SEQ ID NO: 64105 - DNA, 546 bp, Arabidopsis thaliana landsberg
  unsure (1)..(546): unsure at all n locations
caggtcccaggatgcatattagttgcatcaagtccagagatattgttacgttttaaaaatgtaagtgttacctactctctcctgttaatctttggttcccttaatctatgaacttcgtttcatgaatggctcaatgtgtgtttctttctactacagaggaaaattaccaatcgcccccttgctggaactgtcagaagagggaagacacccaaagaagatctaatgctggaaaaagagctcttaagcgatgaaaaacaatgcgcagaacatattatgcttgttgatttgggaaggaacgatgttggcaaggttcatcactttaccactgctttcactttcagtctcttaccctcttcttttagaagctaagatgcagttcttactcggtagtctaacttgttggatattcttgtaaactcaggtttcaaagcctggttctnnnnnnnnnnnnnnnnnnnnnnnnnnnnnnnnnnnnnnnnnnnnnnnnnnnnnnnnnnnnnnnntatgctcctattgccatttaccaacaaaagcaactttaaattc

SEQ ID NO: 64106 - DNA, 505 bp, Arabidopsis thaliana landsberg
cctggaaccggcacgagccgacgtaataggtggatgacgcgaccgtacattcctcgctatccgtatgcgcgcaggcggcgtagacattgtccgcgtttcttacgtcgaacgacaaccggccgtacgcgtaccggcgtgcgttccgggacttcagcgccatgtcggcataatggccgtccatctcgccacccgattgctgggagcctgtacggccgagcaagccgtgctgatatgcgcgtggggacccgtcggggttgaatgccgtgaatttcagcgcatccggtccggtgatgatgccaccgggattttcctcggtgcgattcagccacggcacggtgatgcgctgcggctcgccgttggtcggtgtccatgccgggttctgcaaatcgccccaggcgcggtaccagggacgctccctcatcgatccgatgccgtcgtttttcgcgtattccgcatcaaacaggaagtgtgcgcgatcatcagcgaacggaagacccagcgtcac

SEQ ID NO: 64107 - DNA, 2178 bp, Arabidopsis thaliana landsberg
  unsure (1)..(2178): unsure at all n locations
ccttgagaacttaaaagttaaatttttaagtggtgcaataggtcgttaatccgattaagagtgtaacacgcaaagttatggtatccttgtatattgcttgtataataatttagatcctttacaagatctccagttgcagaagatgccataaaggaagtccgacaggtcgaatgtacttgacaagaagacgctccttgctaggttcaatgtcagcgaggtaggacaaagttatattgaaccggtaagatttggtctagagctcctgagccagtgtttgaatttaaccatcgatttatctagaagtttgtttctttatgtttggtttgttaccagtggcgaaggaaaaatgcagagacagtttagaatgaactgtatcggttgtgagctttttgtttgttatcgtgctaaaaagaatctggaaacagcgtctttcatttacattgttgatggagcacttagtgctgttgctgcagtaaccaacccccaggcacaattggattcttataatcttttcaattccaagatcaaaaactagatcactaatctgttgtggcggcacacaggatgcaccagtacctccctgcatttcacaactcgacggtggacttgttcaggttgcaatagaagtggaagaccgtgcacaacgttcagcaatcacaagtaaaacatagtattatggcacaaaatctattttcttactcacttgacatggatcttcgattaaacaattgccatactcttttttctctctgcaggggtaaatgctgatgatgttcgtgtgactgttgctgcaccagcagcccgtggggaagctaacaacgagcttctggaattcatgggaagggtaccaaatcaatccgttattaatcactttttaagatttattctctagtcacggcgtttcatattttgtatgtgaaaatgaggttttttgaccaacgcgacacgacctctgtgtttttactctttcaggttcttggtttaaggttgagccagatgactctccaaagaggttggaatagcaaatcaaaactcctcgtggtacgttgatccttcctttgagtctcttgagaagactttgtgaagattcatctctaaaaactcttattgtttttcttagctctagatgataaggttttggcttttatactaatggcacaaggacctctaatagtggtgatcaaaaataggttgtcgcattgaatgaataacccattctgatttttgttcccctgaaccaggtcgaggatttatcagctagacaagtgtatgagaagcttctcgaggccgttgtaccgtaaaaactgcggtttgtggttggtgaacgacattagctgaaatctctgcaactccttagttaacaccctttattggtatgaagaacgagttttcgtattttacttgagaaagatagctataaacaaattgctttcttctttgttttcatgcttatgcgacaactaactctttttatacaatcccctattgttaaaagttataataatcgtctatactctttagattccttcaaaactgatttatctatttcggaccattcgaaattgaagtcatatgaaaaaaagtttgaaaatcttaatatataaatatatatatatatatatatatatatatatatatgtctgcactaatttcaaaaacctgttattaaaaacaaattttcagtgtataatctgcagaataaaacgatcactattgcactaattaagcttaagaataagatatatttgtgtagtccaaaggtgactgtactgtgacatgtttcacatgtttcagttctatttcatcgctgtatcggaccaatcgtcacagacacagttagctagtttgtaattatatatatctgccccaatctctatttattaatattagagacatacatatacttccagaaagtgtttaatgcgtgacctatgtctctcaaactgattaatatattgcatccacttcgataagacgacatactgatttatatttaatttttctattcacaagtaaactgtgaatcccacacatatataatatatttatttgatttaatttataaaccacacattttacatattagttggatattctacaaggacatgactngattaatcaattaattaaatatacatcgaatcaccattgctctctccttttgatcttcacccttag

SEQ ID NO: 64108 - DNA, 513 bp, Arabidopsis thaliana landsberg
tcaaaaaacaaacaaacaactacacagaaaaagtacacttattgattcatccaaaaagttacattaaatcctcttataaagacatatatatggggctccttcaaagaacatgacatacaaaagataacaaagaaaaaactctttaagttccatgaaagtaaaagaagccaagctttggaacagagagacatcaaaagctatatcaactatgttctgctccgattctattgactttggcatgacaattttcacaaaattcccaatttcaagagagattatgattcaaagtaaagatttagattccatgaatgatggacaatcaaaccatcaaaatctaattccaaatgaatcataaagcatgaaactttctcagataacattatccaacaaaaaaaaaaagacaaaattaaataaacgtgacaaagattaatccattttattaatcttaattcagattaaatcccacaaaattctcaaattttatccaattctcttgagtgacaatcaaacaag

SEQ ID NO: 64109 - DNA, 656 bp, Arabidopsis thaliana landsberg
cccaccgccactgcgtccagcaacgcggacgataagtccggcgatactcgtaataacccggctgggcataatagccgtcatcgtaatagccgcggtcgtaatagcgatcacggttgctcgacgcgatcgccgcgccgacacccagcccgacgatgccgccgagcaaagcggcgctggtgcggccgccgtgatgataatgatgatagccccgatgccagcgctgcgcctgggcgggcgccgcgcccaggccgatcgcggtcgcaccgagcgcgaggccaaggccagccttcttcataaacgtcttcatgtcgaacctccaatcacgcgcgagtccgaatcgacacaccttaacgctcgaagccggctcactgtttcctttctggacgagtcgtgctgaactcgcgcggaatggcgcgttaaccgcgcgtttagccttaaggaagctccccgacatggcctattggctgctgcgatccgaacccgagacctatggctgggacgatctcgtccgcgattcggcaaccgaatgggacggcgttcgcaactataccgcgcgcaatttcctcaaggagatgaagcccggcgacaaggctttgttctaccattcgggcaagcagaaggccgcagtcggcgtgatggaggtgacccgcgcctgg

SEQ ID NO: 64110 - DNA, 296 bp, Arabidopsis thaliana landsberg
  unsure (1)..(296): unsure at all n locations
cccgcccaagacaagagcngggcagcctgaaaggcaaatccccacaaacccagggcaaaagaggggngacnagcnaacaaaagagaacaaaaacccacccngagagcngaccggacagagggacaaagaagcaacanccngggggcaacccgcgacgcgaacgacgaagggaacacagagagggaaccgaccccgaacacagnancaagcgnnncaggaacaacgaacccaagacaacaggcagcacaacaggaaagaaaacaaacaccacagacggagggagaaagagcacgaga

SEQ ID NO: 64111 - DNA, 496 bp, Arabidopsis thaliana landsberg
cctgcgcgacccaccatcactcctgccaattgactacttcgaacacttgattgggcgcacaagtagagagagtagaggcatgcgaaaaatcctgaatgaagaaattcatccaggagcaatagaggaactaataattagatatagagatctattaatgtttttagggaaaaacaaacataaagccgaacagccaacagcattagtagaagaactttacattcttctactaaagatggacgatccattaagacatataagcaatagactaggaatgcgcctacccaaagaggttcttgacgacttcctgagagtctaaaatctagctacagaacaactaacccttgaccaaattatagatacctacttagtatttcagcccccgtaaaatagcggggccgggtttagcagcccgaatgaccaaaggacggaaacccctcggggaatcaccgcgaaggaactcgcgctggaattgccccaaaggcgggccgtatgggga

SEQ ID NO: 64112 - DNA, 665 bp, Arabidopsis thaliana landsberg
  unsure (1)..(665): unsure at all n locations
ttctttatgtaattgtggctctatgcatatcatatatttctgaaattccaaacggctatgtgttctcttttgtggtcagtctcagtcacatgtgttggtcttacaataatttattatttaaatgtgttcctctaataagcagttaaaggaggcaaatgagttttcaaaactgcaaaatgagatttcaaaacatatttttgaagaaaagttaactagattttaatccaaccaatggtccactagatttcaaagttccaacatggaactcattattatgctttggtcggaaaagtgttaaagttttatttttgaatctcactttctcgttgcggccttgtttaaactacttgctgatctaaaacttaaacggttccttctaattccttaaacgacggagaatttaaattagttaatgagtagtctttatgaaaaaatcaaaataaaagagagtgaataattcgaaaacaaaagtaacaaacaaataattcgtatgtttacggtgttagggtccacaaaagcagtccagcctcatgcatatgattatgcataatngtatgtctggtatttgtaagcttttccagctattttattttggtatcttcttcttcggctggttgatttcttctttggatatgatttaaaaagcatgctactgatatactaat

SEQ ID NO: 64113 - DNA, 162 bp, Arabidopsis thaliana landsberg
  unsure (1)..(162): unsure at all n locations
caaactgagaacaaactacataacctatccgcaaaggcttcgcaaccttatatgggaagcgaaacaaacggggacnataggaaggaactagcagggcctccaccccgagcggaaacgcagagccacgagccagcgaacaccaccaagcactgcccgaaaaaa

SEQ ID NO: 64114 - DNA, 1242 bp, Arabidopsis thaliana landsberg
atccaagttagccatctatttctcctaaacacattggtgattagtttgattattagtgacgaaatcaagacgccgtaaccgataattctaacataatcccttttataataagaaggatacaatttcaaagaacatactaatatttacaatattatttaagattgtattattgaacaagttgtcattcctgtgtttggtcaaccatggcctttgggatactcagaaggattccatacccaattatttaattcgatacccttcttctacatgattcaatcaatccttttaaaaaattgaatctgtattttttttcttccttcgtcacctgctggaatattaatatcatataattagtaataaatcattaagttttgtcaatgttacacatttagaccctacaactttatttaattttatctatcaagctaacaaaataaggtactaaccagttaatgaaattaaaattgaggatatacatatagtttagtaaaaaactttgatcgataccttatctgaattgaaactattctgatctatcctaacaatattaaaaatggtttacatgcgctatcatcattttttctactaaaggatttaacgcttattgtaaaggccttttttttttttttactctgatggtttgtcaaaagattattcgttaatgaattatacgtttgttataaactgtaaatcttcattttgaatgtaaaactcaaaaattaaaattgaagcaaaaggtagtttccttgttcgtgctaactgctaatgtcgattaagattcatcctcttgaaatgaccgagtcaacgctgagggagaatcttacgtggtcctaccaactatcacgtgccaaaaatctgggccctgagatatacctataagcaaaagccagctccgcccaaaacatttgatccatccattttcatttttattttccaattttgaagttagggtttatttttataagtttccattaatttattttcttattccttttcggaggatgtgtttattaatttaatttcaatagaagataatatatttgggtttaccactcgttctctttttctttttggatgggactcttcattgtgacttttttgttctcgctcttccacaatctttggatgtgtacaaaataatcgattgttggggatattatagtaaatttagcaatatgaaacttgcaacgaagaaagggtttattgatggggtcaaaatttcattcgtcctgcatatccata

SEQ ID NO: 64115 - DNA, 1366 bp, Arabidopsis thaliana landsberg
  unsure (1)..(1366): unsure at all n locations
attttattaataaaaagatgaaatatttataccgctgataaaaattaaataaagagatgaaattatattatatgttagtaataactcttttgagatgtaattaattttgttgaaaaaaaatcataagtactaaaaaggatcgcatctaaacactattgaacaaaagttagagagattttcataaaggttcccctatagaatatctaaatgtcggaaccaacaataaatccgaatagaccaggcaccaaagataagcaaataacaaaccaatatggatgaaaataaaaatccaacacgaccataggactcaaatagaactactaacacacttcaccaacaaaccacagaaagcaagaaacactagaattaagacaaaaactttaaattgactgcagataaatcacgtaagatcaataattcttatatgcagatattagtcgaagtagcgtagccatctataaacttagagctgattagggttctatctaattatctataaattgtttaattacattagtttttattggaatgagtatattataaaaccaaaaaccatcacagctatcagatttataaccctctaacccgttaattaacaaagcctaaaagtcaatcccatctttatatcagaaactttaatacacatttttattataacaatcaattatataaggaaagatccaaacaaattctatatcatgcattggataagtcgccgaagtgggtgtgggactcaaattaaggtccggtaagcagatatatgtgtggctcctacaattagtcggcagattctgcggagcgttcattctaactattttctcacgcacttcattatcgcgtgtcactcaccgacaaaacatagaccacgtgatctcaccgcctcgcgcttaagttcatacaattttggccattgcctgaaacagcagctccaaccatgtctcaccgcgtgttggtctgctcacgagccttgcgtgcgtcgttgtcttaatgctttgattttagtattttattaagtaactatcaagtcaaggcattaagtcattttcgtaattcactgacggttacaaacttacgacatttaacaacaatcttgagcattcacacttgacctttttttgacactactcaaccattgactttttcgtagtttcgacaatgcatgcatggacatacaaaagccttgaatgcgaagaaggatcatctgtacttacttttacattcaaacaaaaattaaaaaatgatctgatatcgaaccactttttgttttataaaaaaaatatattttgtcttnttctctcataggtttaccttcctgccaacaaagaaccggttcattcctttacccaaaataatgggccagaattgg

SEQ ID NO: 64116 - DNA, 1016 bp, Arabidopsis thaliana landsberg
tgtcaattgccaagttctttatctccgtgatgatttctttagtaaatccactagcagacacttctttatctgtttttcgtttgggtttactcacttgggcagcttcagtttcaacgggcgagctacttgaagtaaggaaagggacatagaagtcttcccccctataatttagccaagtattttcatttaacttaagaacaaagcataacccttcaagctttccatccagagagaataatccaaacgatccatttccatcgtcttttcgctgcagaatgttcatatgcataaacacttaggtaatgtcactgatagacacagaaaatattctaataggtaagctagacaaaatatttaggtgccaacatgaaaatgatctctaggtgcccaaaagatatatggaagcagcagcaaagacatagtgacggcatcatgtggtaaaagtatgaaggaaatgtctatcagggtgcgcaaaaaacagaagaaccgaatgcattgggttgctaaccattctaatgcttaattaaaaaccaggcctgcacaacctacaaattgcttggacaattgcgaatacgccaggtgctaaccaaaaactgattttgaatctcacagactaaaattacagagacacaacacaagtgattcttgccaaattttcaaatctgaacatgtgactcttgcctacttctacatgtacctgtaaacgagtgcgtaatgccttgttcttaaacaaagatgtctcttcagggtaaggttcagatggaatttcccatttcttagtgccgtttttgcaaactccccagtggacagtaacgtcacccggtaaatcggtttcaattgatacaatgttcttagatgtttcagggcatttccttgcagtgacactgactgagttatcatcggcaacacgtttacttattggcatctcctcgtaaaactcttgaagaccttttctttcttcaatagaatcagtctctgcactggacttatcttgttgagagggatgttgaaagctg

SEQ ID NO: 64117 - DNA, 2641 bp, Arabidopsis thaliana landsberg
atacatgaaaaaatgaaaactatgtgttgtgaccgtggtgatgactagcaaatgtttaagttcataccgttaaagaaagcaaaattatcaacttcttgtggattcgtatacatagttagccattatttggaacgaaaaaaatcatttatgtataggtatgtcactattatttttgattttcattgataaatttttaacgaaaatatcaactatgtttacttttctaatctcgcctacttttgacttgagattctagtatagcaataaaaatcattcataactaatgattactacttagtgagacttctttgaagtaacccatgtcttcatcatttatgtttagaacctccatccatcacataagagtgtgggaccaaatgttatttttcttacttttctcttttttaccttttcttgtccatagtttttttttcacttatctctaaatattttgtttttgttttttttacttatctctaaacattataaatcactaaattacattatgtaaaatacaattgaatgattgatgttgataggttttgtagtgcaagcttgataatagtatagaaaagtcaagtaaagtagattacaaaccattttaaactcatacatgcatattactgatctcaaagataaaaacataaaatcatgacacgattgtcgtgttttacctaaaaatatgttgatattatactcagcctagtttcaatatttttttgtaaatcctggaatactattatgaaacaaattatttctcacttttagtgctggaaaaaggtcgagatctaactttaaagtggaaaagaaaaaagaaaatacgtgcatgggatatgtagatatacgattcagagcaaccaattatcatttaacaagtaaattaatccaagcaaaagtttgagactctctttggtactaacaacgaatggtattttcatgaacgatgcaatttgtagtctacttcattcagcgtcaatcaatgctctattttttatttttcgaggcttgcaaataattactccattaattaaaataaaaataaaaataaaaattgaattaaaatatttaatgtcggctgaggaataaagagcaccgacagaagaatgcatctacctttatccttttgctttggaattttaaaaacaaaactttgtgatctctccttttctaaaaataattagggcccttgacctctcatctccttcacagattcatttattgcttataattatgagtatttgcagtaataatataaccctttgaaaaataatcagaagtactaagatttagtggaccgtatccgtatgtgactttgttgaatcattagaaatttagtccaaacgtagatatcaaaataataacgttgtagacaaaatatgggtcctgtagctaaaaagattagctaaaaagtttgatgcggacatttattatacactcaagcatctacaatgacatacacacatggatgactgatattaatggtgattacttgtttttataaatattaataatgacttacaaaaatgtgttcgatataaatattcgtatttaaattttaaaataatactagccagattaaaaattgtcaatataataacatggtataattgtgtgtattaaatgtatctcataaatagataattatacaataattcttaattcaatcgcaaaatacaaacaaaataaatcatttttgtcatttgcaaataatgtaaaaaatacaaatgttttctttagttacctaacgctaacagcctaacactgtatacgaggcccaaaccgacatgacttaactccgccccggttcacaattgaggattgaaactacataatttcaactacttatttgctatttgcatcaagaggcggagcaatgaaaacccggtctcaatcggttgagtaaaaccgggccaacagatctggcacatagatggtcaattgccattggtttcgttaaataaaccgggcgaggagttctggtacggtcgttatcaatcaattgtagtaacatgacaatgtgcttaaagtttcaaactttccatatgggtgtgttaggattttcaccatttgacttttgtacatagattagtagttactggccaaactcttttatgtctgactaaaagctcgaatcaacattatttattagtaattgcttctccttagacttcacatggacaacaacatcgtacgttgattcctctgtaaacaagatatgtatttaaagaactcacaagtgactcactgatgtatctcgaaaaactcatgtgactgttttgtttgagctgagagacaagaggcatgcaccttgatgattgatgataggaaactcctgaaaaaacaccaatccatatgatcatattcatcaaccatttgctctaaattccttaaaattccttaatcaggcatcggtttatcgtgtacccagacccctttgctcatcaaccactttgggggattatattctgaaagggctcgttgaagcaaatcatctggtttgactccgtttcttaacatatgttcatacaacaatgcagcttcaacgagtcttccaaccttgcaataaccacggataagaattgcgtaggcaacaacataaggcaataactttgcatctatggcctgatggaagatatttgta

SEQ ID NO: 64118 - DNA, 525 bp, Arabidopsis thaliana landsberg
cggtattttgctgaaaaaaactgtgagcattttatgtaactttagttatcagattctgtaattaagtgtcaatacgttgacttagaaaatattaacaaaataaaatagggtggtaaacgtaaaattggaaaacaaggaaatgacatacaagaaaaatgaacagagacaagtggagctaggggagtcaaatgtaatgtcataccgacatcaaatcgtctaaagtaatcctgtatacctatgcatctacgtatgtatacatttatacggctaaaatacatttatttatacggtagagggtaagtcaaataggaccatttatgctccctaaactctagtagtcccaaatgtcttggtccgcaattttttttcgttttctcttcctctatcattgacaacaacttatttatttggtgggatcggatacatacaaatatgttttttactgactaggatgttttcagtcttgtaatcatcgacaggttaaccggagttgtaattagttttttttttattttggttaaaggg

SEQ ID NO: 64119 - DNA, 585 bp, Arabidopsis thaliana landsberg
actgagcttacgtatttgatgatgatttgtagattgaaggaggttggaatgaatgtaaaatgggaccaagtatatgggataagttcacgcatatcgaaggtttgttgtttcttctcagcttatcccgtaccaatcgatgacgactaggtagagatttaactgtttgttttcctcttatttagggaagattcttgatggaagtaacggcgatgttgctgtggatcattaccatagatacaaggtgatctttgtgaggatctttctatggtctgtataactctttgcttataatatttttttgtttcaataatgtttcaggaagatgttgatcttataggacaattaggtttcaatgcttacagattttctatatcctggtctcgcattttccctggtatgtttaattgtatagtggctgttaaagttgctactttgttactacttatccattttagttgaaatttggataaactataatgtgtggtgtctggcagttactataagagatccctcttaagccgtgggattccttttaaaacatgaatcttgagttccttagcattgatgctgggctgtaaaaagact

SEQ ID NO: 64120 - DNA, 201 bp, Arabidopsis thaliana landsberg
  unsure (1)..(201): unsure at all n locations
actcaaaaaagaaacaggccgncaggaagaancaggaagaagccgaagcggaccaaccttttttatcatgtacttggcagatacagagatgtgtatgagaagaaacaacaccaatttaacaacagtcatagattctaacgaagccattgcaatgaacatgaatacaattctgctagacatcaatattcttcagtgctcact

SEQ ID NO: 64121 - DNA, 415 bp, Arabidopsis thaliana landsberg
cggaaagtgaacactatctcgtcttctttcgttttcgagcacttgactcgcggctgtctaccaacgactcctttctatgtctaaaacagattactgagccttaactgttcgaggaattctacctcacggggtgcgaatgaccggttatactcaatcttttgcaccttggttccgtacgaacacgtccgctcgatggacacacggacctcatccagttgccgcgtcactcaatcgccatgagatgatcaccttagggatgagccaattgcaccacccgatgcttctatgacccatcgcagtctgtgaaggatgataaccaactatgttgcatctccgttgggaattcaagactgtattgtttacctccttcaccctctcctaagcaggaactacccgcagtaacacacttgctagc

SEQ ID NO: 64122 - DNA, 191 bp, Arabidopsis thaliana landsberg
cagagagacaaatggtctctgagtggttaatgtgcaacatcagctatctttgtgtgtgatggataatattttaactttataagaaaaaaacaaatttattattattactaatttgacaaaagatttttaggtgtgagttttaggattcctcacttttttcctttttccccctaattatgatcgaatttggg

SEQ ID NO: 64123 - DNA, 210 bp, Arabidopsis thaliana landsberg
aaaaccatagaaggaccactcacagaaaggcatctggactctagaaaacatctccaaggatgactctcgaaacacgctataaacccaactgagaaacagaaacaatgccaggaaactcaggaaacaaaaacaccactagagctcatgaccatcaacacacccaaattagaaactgacactagaagaaacacaagactacaaactctaacc

SEQ ID NO: 64124 - DNA, 1892 bp, Arabidopsis thaliana landsberg
cttggattctttgagggtttctctcctgcgaaacagagctcataccttttggcatacccagattagattcagcgtcttatgtcattaatgtcagaaaaagaaacatgtgatgtgcatacctgcagaataggtttctaagtgcaaaacttcccctttcttcaagcgggcagaggtgaaaagaggcttcttgagacctttatcagcaccaatgcttatgctatatttaatcctgcagacaagtagatcgatgcgtaagtaaaactgacccttgcgtctgataacttttaggtgacaaagatttctgataaatttaggaaattctgtgaacaatttttgaagtatttggagattattgacagagagttaccaaggttcattgcagagattgtattgtattgtgacttctcgtacaaacctttgttgccgcagagcattctacagaacagtaaataagtcgtcagtgttcgaaagatatgaaatatgagaaaactatgcaagccgccatgtgtaataatccaagagttgtaagaagattaagagagcagatatttccaaagtggaaggaaaataccgaagctgcagctctggtggtcatagatctttcaacagccattggtgcaagagttggctccacagttgaggagtgtgtaagggaaggttccagttcaatagtcccacctcctttctggaatcatatcatcagaatttccataaggagttttacacaaattcacttaaaactagatattacgcacatagtgggagaagataatcaaggaaattagaaagacacataatggcacatgtcaaatcaccttcagtatatagcaccgctcaactctataactgcatccgattccagctccccatgctcgagaacggacattgttccttagcttggaggtgtagtctaacaaatatatcagttaagttggaagtttgataaagattcttccttgatataaagcagagaagagctcaacatagtatgaagttcacatgcaacagtcagttaaaggaatcaaaagcaagacagaggtaagctaacttacaatcttgtgacggcaagactctaatagtagtgcgcagctcttgcattgtcggtggaggaggagaagctgtgggacgacagtaacctgtatgcatgagaactagatgacaggtagaccagaatcaatgtcatgttcgggccaaacaaagataataattgcataagattcattagggtacataccagcaacaagatcggaatcgtctgtgtatatatctgttccccatagttggccacctcttacctgcacacgagccaaatgtctcagcaagtaacaaacaagggagctgtgtttctcaaattaataggcgaagtgaattaaacagatcaaaagactggaactaaaactatatgcaccaagtcatctagaagaaaaacaatgaaaatgattatgagaaaaatttggatatatattcgacttacttggcgatttgtagcagtaacatgctcagctggaatcctaacttcaagagtggggccattattagcgaaatcaccgcttttatcaggatgagacaaatcatattctttccacaacttaatcagttcttgcatacattcgccaactttgtaaacaacaatcgacacctctgacttgcctgaatcatcagtacaataaaattcaacaagatcaaattatgaagtgcaaagggattcaaattgtgtagaaaataaaagaaacagaaaaatgataaaagttaaaaaaaaagccagggcagtaagtaacttttagcagccaaaatctcaagtagcattaaggatcacatcgactattaggtccatataattagatcttgaggttctttatatatttgacattctactgtagagtaaagacagt

SEQ ID NO: 64125 - DNA, 542 bp, Arabidopsis thaliana landsberg
actaatgtcactaaactatgagctctaatcatttggtattgtatattcgaccgaaatacgcacttttttttctctcacaggagtaagatacttttatagtcaagttcacttcgttatggcgacaatagatatgattatgtcgatccaaatctagagaacattagctaagttgaaaaacaaaaacttaatgttggtcatgagagtttgtttaaaaaacttttttttttcttgggcaagtttgttgtttgaaaactttatttgctgctggtaaggctttgatttcgatttgtttaagtttttctttctctcaagtgtattttaagtgcgtcaattgcggcttgacgtaagaatggtccatgtaggacataaccaagcatattgtatatataactcacatgaattagacacaagtcatatcgaatttgagttatttactattacaaactccaagattacaagcttgatgatatatatgatatatgtagaactataacctttttccgatttggaatgcaatatgtttctatggttataaataattt

SEQ ID NO: 64126 - DNA, 1385 bp, Arabidopsis thaliana landsberg
  unsure (1)..(1385): unsure at all n locations
taagtagagtcgcgtgtctctctatcttcagcaatggttagaagagcaaggactgcatccttctcttcttggtggatttgaagtcatcttgtaaactctgcataggaatacattacatgttaataagctactttggtataataattattcttcttttacgctccttcaatgtgaatcgaaaagtgcctaagagcctaggagagaatctcagtttcccattgatagtttaagatcctnnnnnnnnnnnnnnnnnntaagatttccagaccactatattctcgacctgcacctgctaatgcaaactcaaagtctggatcctgtgagtcttctccatcctcttccaagtctttgatcatagggtcagtagcttcaccatctaaccccggccaatattttaaccgcacaatattgatgaatttgccgcttttatcaaaaacaataagtaaaggcgagcaaaacccatctttggcctagtacttcactagaaaagcgtcacaaacctgaagtctgtatgtcaccgtcatgggagggcaatccctgctgggagctgcatttgaagctaacagtgcggagttggtcagtgaagtagaagactgatttgatttcttccaaactagctcataaacttgagctatgctcaggtctagtgaaatgatgtttcctgctacaagcaactccatgccatagtcatcttccagtagacctagcaggtccaactgctgacaaatcttgtttttcacatcccgcatcagtgggccaatctcagcactcgaatatggattttttgtcattgatccccggataaactcctcttgcgtgtgtgatttgttcaagatcagcatatacacagcctcaggttttgacgggcagatcagatttcatagttgctcaagaataaactgcatatgcaattgaaatgatcaaaacacaagtcaaggatatatgtcaactggaatctaggatataaagttaggaaggatatcagctatatatagactgttcaaaatactcctaatactcaaactaagtgtatataatattttcatccagaagtctaaaaagaagaatagaagatccccagagactgtaaagtaataaagaatcatatattttgaagatgatacagtggtcagtatgataattcttcttaccaaacaggtacgtcctttgttctcctctgcatgggtttgcagtccagaaacacaggcacggataaattgacgtttattttcactgctttcaagcagaggtccgtcaagaagatcttttaggagtctgttgcaatcatttataagctttgtcttttgcactatcaagccacgaattacaatgagggcctccagaacatgagacagtaaattgtctctcatgaaatctgcccacac

SEQ ID NO: 64127 - DNA, 386 bp, Arabidopsis thaliana landsberg
gacggagaaagaagaagaagccgaggcccgggaacaaaaaataacaacgcttatacgccgaacccgagagcgggacgaagagacggaaaaacaagagcacaacccgcaggaccagccagtcaaaaggcccaaaaacacaaaaacgaggggaacactgaagaacagcacgcgcacacacaaaccgcaagaaccccacgccaacctcgagagaccggaggggaacaccaaggacacagcaagagaagggctcgccaaaacgagggcaacacgaaagaaggagccggctcgggcacgcaggaaggcacgaactgcgccaacagaaaaaaccaacaagacacggaggcaaccaaagcaagaaccgcacaggaaacatgaaccaccaaaga

SEQ ID NO: 64128 - DNA, 257 bp, Arabidopsis thaliana landsberg
ctgcttagtgaatgaaaggggacgtactaattagcaagggcgggctgtagtgaaaaattgttagccacaacaagactattaactaaacgcacactagtatataaggaaataactttcttggcccagatgcacatgataatacgctgaacctagtgggacgtgcaacagccgggcctcttgcagtgcttatgccttcacacggactagaaggcggctcatttgagtgtccttatgactctgacccccttccaatatgg

SEQ ID NO: 64129 - DNA, 399 bp, Arabidopsis thaliana landsberg
tgtaaattttataactatgtatgtaatattacatatttttggaacgaacgatgtaaaaaaacggctcaactaacaacgctattcatcgcttcacggggtcggatgtgtaacgtaaaccaagcaaggaccactttacacataaactaattctctcatacgaatctacaaaaatacatataaagataatatataattttggggtaagagaggagcattgtcccgtgattctcgtcgaacaaaaaacagacaaagaaagaaagaaagaggtatgtgtgatgatgtggtctacatcaaagacagctgagcagacacacgccttgtaatcgtaatatattcgtctatctaccactctcgctctaccattgattgcctttagcattcaattccacgcaaaaccct

SEQ ID NO: 64130 - DNA, 535 bp, Arabidopsis thaliana landsberg
aaaggcgatgccaccggcgatcgaattcagcacggtttcggatgcggcgcttccgagttctacgcccaccgacgcgagggcgaagagcgaggccgggccgccctgggcataaccgatattcttgagcgtgatgccggtatccttgaagtagccgagcgcgtaggggagttcgtgggcggagagaccgccctggctcgagagatagcggatctcgacctgctccggttcggcggagaaggctggggctgcgatgagcaggccggcggcgaccgcggtgcggccgagattacgacgggaaatcagcattttaagctccgctggttgaatggattgcattgtgaggcaggcggtcgctgctcaatccctgaccttcgaccagcggcaaagccgggcctgcagggtttcgaggacgacgttggcggccaggccgagaaatgccagcagcaggattgccgcgaacatcaccgggatctggaaattgtattgcgcgttcatcacctggaagccgacaccggaattggcaccgatcatctcg

SEQ ID NO: 64131 - DNA, 408 bp, Arabidopsis thaliana landsberg
aggaaatgacaacatacaaagagtaaggaaaacaatttttgtttttcctatcataaatggaaacaccttttgactaatagtcgtattcttagttgctacgaccacagaaacgcttatgaatcggtagcgattgtattggggatgaagatgtatgagtctacctgtcacctatgatgagaaagacacaatcttcagactacgaaccttggaagagcgggcataggctggctatgacaagtttttcgcttactatattagcctttattctaaagtcaacaaacggggcgccacttttcttcatataagaaatcaggatccagaaggactcccctcctgctacacttgactctcaacttacatacaattctgcgcaataactcagctctagctagcaaaacatatcatagt

SEQ ID NO: 64132 - DNA, 513 bp, Arabidopsis thaliana landsberg
  unsure (1)..(513): unsure at all n locations
caggacgatcatcccattcacgtagctccaaagcctttacgcccctcaccgggcaaccgaactttacttatatcgcttatcggtttgatcagcctggactcgtcgcgactgtcaacatctgcgacagtcgcgggttcgctgtccgcaaactcgccaacaacgtgttgctgggaacggaaggcgtccttcgatgggagggagatcgcgatgatggaacgaagactcaatcgggctactacatggtgtacttccaggtattcggtgctgatggctggacccatctctacagagaggccgtcgccgtgtctgcgaggtactagcggtcaagaaaattatgtgttgcaaccatcgtatgcccctgttgcgaagcaagttgcgccgaaaagagaactatttgactcatttaagcccgacgggaattaattgattaatattttttgttttcgtgactgaccgcataattttgcgcatcttntaccaaacggagaatttcttatggctaagaacaagaag

SEQ ID NO: 64133 - DNA, 136 bp, Arabidopsis thaliana landsberg
ctagtggatcccccgggctgcagggggggggaaagccacttttttttttaaaatctatgatgtaacattgcacaaaataaaaaaatcttatcataaacaataaaaatcttctatcttcatccctaataattcaatc

SEQ ID NO: 64134 - DNA, 174 bp, Arabidopsis thaliana landsberg
accattgcccatcatcagccagaaagagagcaaggaagctgtcccactgtgctttaagatgatagtcctgcaacattacagagctacgagcctaacacatcacaacatcaacacggggatgaccaattcacaggccaagaattcgtctcctctgttcccggacccgcacccttg

SEQ ID NO: 64135 - DNA, 479 bp, Arabidopsis thaliana landsberg
  unsure (1)..(479): unsure at all n locations
caggacctgaagtatttctcggctcagggtaccggcttcttcgttggcctgacgccgttgtccttcagcctgtccgaaccatgggtggtcgngggcctgctgttcggcgggttnnnnnnnnnnnnnnnnnnnnnnnnnnnnnnnnnnnnnnnnnnnnnnnnnnnnnnnnnnnnnnnnnnnnnnnnnnnnnnnnnnnnnnnnnnnnnnnnnnnnnncatgcagggcaccgccaagcccaactatgcccgcgccgttgaccttctgaccaaggccgcgatccgcgagaaggtggtgccgtcgatgctgccggtgttctcgcctgtcgggtatttctgctggggggactgatccggggccaaaaccaaggcttcaacgcggtggggcgccatgctgatgggcgtgatcgtgacgggcctgttcgtggcgatcagcatgacctcgggcggcggcgcctgggacaatgccaagaagtttatcga

SEQ ID NO: 64136 - DNA, 492 bp, Arabidopsis thaliana landsberg
tgcccgcgtgctaatagtaggccactattggaagtggagcatggctgctggttgttactaaatccgtttttgtttcttcgcgataaaagtcgcatgggaagcgacccggaaagcgggggcaatccctccgctttccgttcatgtgatgaagtaggctcatcaggcgtgatgtctgtcaccgctgatttcattgggaatttcaaatgttacggagagaaccaatctgatgaatgagagctgggtgcccatactcacagacggcaggtatcaggtcggcacagatctcattgccgacatcgatcattgcgttgcgtccttcgccgaaactaatgacttgcaaaaagatatcgatcaactcgaattccaacgtgggggaccctcggtcgccagtggtctggctgcacgcactgttccatgctattgcgtaccgatttaccggcaaggatgtaacgaggcaacgctgcaataccgtactgtggcgtgcagcgcaat

SEQ ID NO: 64137 - DNA, 1136 bp, Arabidopsis thaliana landsberg
atctgtagctggtgagttatttatatatgtactcttagctggtggactcatctgcgactagggtttccgtgtgtaccggcgtaaggagtattgttagatggtccaggtgggaatggagcgccgtaaggtcctgttggtaaccttgttgttgggtcatatgaaccaggagggcctcttggaaagttgtaaccgggtctttgagggaagtatcctggctgagttactccttgataagggtattgagctgcgccaacaactgaatttggtccagttgcgttaccagctactggttgaggaatatatccctgcaaaagtaacaaaacgtaatatagctcaagcacatttaaatcactaaatgtggaaaactataatgggtctcaaaaagacgagctagcaaagagaaactcacgaacctgaggaccaaaagcatcttcataataaccgtttccactctgatgtccagaagcgtcaatttcagcatttatgttgttaccataagggccaccttcatttgattgacagatacaactcttaaattactgaaaaaagttcgtggaacaatgaagctaaatagagcagaaactaactaaataattcaatatacctgctcttctatctgaatttgcattgttcatcaactgtgcttgaagtttttcaacttccctagccatagtcatgtagttcttctccattgcctgaagtgactcgagatggtcattataaaacttcttctcatagtcatatgttgccctgccagaatcagataaaatcaaattcatcccaaccttcataagaggatgatacaaaagctgacaaactcaataactataagaagagtgtcgggagccagtgatatcagaaacttccattctacaaccattacctgcactgctggtactcctgtcttagattctcaagttcagacatcagagcaggtatttgctgcacatcagaacgagatttttgaagttcctgagtcaactgatgcactttagacataagctcctccctagccacaacaagactccgtgcctcaaaacgtgctttgttggatttccaacttaacagcctcagatttttgagcttagtctccattttagaacctttttaagaagacccataatccgggggttttt

SEQ ID NO: 64138 - DNA, 451 bp, Arabidopsis thaliana landsberg
  unsure (1)..(451): unsure at all n locations
acgagtgatgctggctccgctttcccggttagataaccacgagcgcccgtgcgggttgataccgtttggtttctattctttatgccccgacgcttcgaagacttcccgattcttgttcacagaaggtgacgagaaggctgtgctgaagtttacgcacaggtgtggatnnnnnnnnnnnnnnnnnnnnnnnnnnnnnnnnnnnnnnnnnnnnnnnnnnnnnnnnnnnnnnnnnnnnnnnnnnnnnnnnnnnnnnnnnnnnnnnnnnnnnnnnnnncgcgaaaataaccacgctcaggaacgagacatccacagcgatgcttgtggatatccacagaagaaactcgtgaggaaacgcaagaccttaagtggttactgtacggaacgtcagctcgtgcgcggatttcatatacgcgatcgtgccagacgatgcggggtcatacctgatgaccga

SEQ ID NO: 64139 - DNA, 552 bp, Arabidopsis thaliana landsberg
  unsure (1)..(552): unsure at all n locations
cctacttataaatcaaggaatcgaaagaataacttaattgctgtcacaaacgacaaaacagtcacattgacgacgattgtgaggaagaggagtgcatttgcaattcttaggcatagcacttgcactcttagatcccaacaaatctagaaaacatgtgtagcttggacttcctctgtctgtgcacgatccgttgaacacgtcctttgatggacaccactttaactctgcgtacatattcaaacaatatacgtagacgtgttaatgagattgtattgtatgtgttttacattttgaaccgggattttattggttaacgcactggtattgataaaccggttacatatgaaaatatgagaatgatacctttggctaggttggttgagagaaaggagaaaagaagacatgaaaccaataacatcgcaatgcctttcatctttgctctcttcttcttctgtttttctcctttttttggtgtgtgtaatntgaccaatgcatgtttcgtaggcctttgatttatttatacagaggaatatttaatgcataaataataat

SEQ ID NO: 64140 - DNA, 1838 bp, Arabidopsis thaliana landsberg
aaaaagaaggtcctatatgactcttgtctctgtccaacatttactatattattcatataaaccggggaaatatgaaaccgaatatctaagatcctatctcgccgatataccgtgtaaaagacacgcgcccagattcttcattaccaaaaatcccaatcatttaacaaccgttcgatcagcgcgtaactacaacacttccgttgcggcgcgtgagataaaactgacgaaaaatttaacaaatgtaaaaaaaaagtcagtattcaacaatcaagacgacgaaaattctctcgagtgatgatgctctctcttcttcttcttctactcacactaataagagtctaaaacccttaattctcagagaaagtttcacctacaatggcagagattttgtttctgcttttaagaactctcgtcgtgttttcatgtgctctttcgatctgtaattgtcttcaagatgctgcgttggacaataatggaaactttttcacggtctcgagcttcaggtaccctgaatccgaagtcagaccctacgatacacgttacatcagaggtctgttttaatctgagattcaagctttttcagctgctgaatgatgatttgaaattcagcaaatggaattggatttgttatatctgatcagttgcttctggattatgatcattttggactatcttcttttggttgatgctatctgattctctgtttgattccgtacagttgatttgcctccatggttctcatcattgaatgttgctatcgaatctgatgtagacatcgtgagtattacagatctttctcctccaaattttgtttttggtattcaaataaatatgtaagtaattgctatttattgtatgtagactgcaaagagcatttcgaagatttccaaaagtcttcttcctgttatatgctttcgagatggtagtcctcctctgcctgatgcctcaaccaacgctcttcaaggattaggtacgatttaggtaacaacatgctagttagcttcttttgtctggtcaaagagatcatataccttcttactattttagggaattgagaaagtttttttttatttttttgatgttttgtagagctaggacggttctttaatggatcttttgaaagagctcaagatagtgagattgcacaacagtgttaccctatgcagaagaatataaccttgagattgaccaatgaacaggttttaaattacttcttgtgtgttaggacttttttagatgatgagtttcttttctttttttaacgttattgtttccagatatctcctggagcttggtatgttggtctctttaacggaattggggcgactaggactcaggggaaaatggtaacactccctttataaaacttctgcctttagtgtttgtttgttctgattttgatttcttataatttggatactgcacagattgttcgctcctctgcgttttcatttagtgccaacattagtgttgaaggttgtaaaaccgctacaatgtgggggcctttctgcaaccagactatttatccgctttcatgttctcggttcgataaccagacagcaagtgttatttcttgcgctgattcttttcctagttcttgtctgactggtgctgaaacgaagacatatgctttagatgtagatggaatagctgaacagttagttattatggcatccaatgtcaaagtagattccaatgaaagttatctcatgtgttacgcccgttttgaagcctgtgctttagagactctgcatgattacgctgctgatatacataaagttgccttaattgttaacaaaccgaaagctggtcgatggtatataagtattaagttatct

SEQ ID NO: 64141 - DNA, 1721 bp, Arabidopsis thaliana landsberg
agaccagccgcgacgttaattactctccaaatctcaaagcattgattaataaattaaatgttgactaataaaatctccggttaaacctggtttacttaccggtttagtttcggttttcatttctactccatgttaaagcaagctatggaaatggcgaatataaccatcgtgaaagctttctctctcttcttcttcttccttcttctctgcatttaattttggtttgaatacgacgcttcgtcttcttctttctccaagctacgttccgaggaaaactttatacgtatatgtatataaaagatttgactttgtaatctgaaaacgacgtttttgttgaaagagagagcttttttttttccttctttacctaaatctggaaaatttaaagaaagatttctgattttgatactccgcgatttcgtgagatcgcttgttaggtaagaaaagaattcgaagacgaaaaatgtcgaattttgagaaaatcatttctgggtttttgtttttttggatctttgaatttggagcaataaaggatcagtttttatttgatgattcttgtctcttgatcttgggtttgatttaaaattacgatttgatttgatgattcgatttcatataaatctgagttaaatctacatttttgcagatacataggttttacattattatcatctgtttctttgataaaaacaaatgccaggtaaattttcagatattggttttgaaaaatctgattgcttttatgtgatttttgaagtatttgattatgtttgcttttattgttgtagcattaggtgagatacttttggttccagaaactgataaaggaaagagtaaagattacattgaggtttcagaggatgagaagattacaagaactcgttctagatctttaaagaagaaagctattaaagcttcgaataaattgacacatagtttaaggaaaagagggaagcgtgtcgctgatcaatatgcaccaattgtgattgaggatgtgagagatgaagaagaggagaaagcagtgaatgtatttagaaaagctttggtttctttagatttgcttccaccacggcacgatgattatcataccatgttgaggtaatgtgatactactgcaggatcatgtcagtgagtattttggattgtgtcatgatcagtttcaggtttgttgttgcagattcttgaaggcgaggaggtttgatcttgagaaaacagttcagatgtgggaagaaatgttaaagtggaggaaagagaatggagttgatactataatacaggtgaaggataagaaccttccttgagttagtaaagatattgttgttttatgagtgtgctacaaagacctttaaagtttagaattttgctaagaatctttccacatgggttttgttttgctgttttcctaactggcaatgatgacatattccttcaggattttgtttatgatgaatatgaagaagtacaacaatactatccacatggttatcatggtgtagatagagagggacggcctgtttacattgaacggcttggtaaaattgaccccggcaagctaatgaaggttaccacattggagcggttcttgagatatcatgtacagggttttgaaaagactttttctgacaagttcccagcttgttcgatcgcagcaaagaggaacataaattcttcgacaaccataatagatgtgcatggagtggttggtccgtctacatgccttt

SEQ ID NO: 64142 - DNA, 965 bp, Arabidopsis thaliana landsberg
acagctaaattctttgtacctcaaatttttaaagtcaaactttttttttccaaaaataacggtcagcgccaatctgttaaaaaaatttaccttctgaattagcataaactgatttcggtataccatgtttcaatttcttctgactgaaaatagaagagatgatattgttattacacatttcacgctgaagagatactaaaaacagttagaaaggcaaaaagagttatgttcgatcgactaattttaaattatgcaagattgggcccaatacaggctataatttcggtccataattttccaagacatcaagaaactggttcacaagatttgttggcccattttaattatctactatctttagcctctattatccttgactgaggtttgaagttgcaacataacgatttcgaaacttctttaaacttttctcataacgcaagctagaaaaggtttttaaaaaagtcccccatgtttttagttccatgcattacatcacatattcacatgtatgtggagagatagataaccaaattgttagataactgcatgttatttaaaattttatgtgttcttttagaaaaagagcaccattttatattttttgcaaattaatcaaaaactttacaacttcttagctattttcataaatttgcatggtcattcaatggtatttactaataataattaaatatgtctgaacgaacatattttttttttgacagttactacagctatttcatattttatcctttttatacaaaaatcacttcactttctaatttaccttgcagaaaatttactacagtacatactaataattttaacaaattttcttaaataaaacatcactacacttacactgattcttgtttttctaatctcattagtaattactcctcattagtctgaatacggttatatatttttgagcacaaatacttttgcccaataaaataaaataaaat

SEQ ID NO: 64143 - DNA, 567 bp, Arabidopsis thaliana landsberg
ctcgtccgggttctgcgaatagctgatctccggtttgtcgccgagcaccgtcagcgccgcgctgtcgtcccagttctgcgccttctgggtgaggaagaggcgcgcggcggcgtgccggttctcggacagggccgacgcgctcatgaagcctcggacgagctcgaccggatcactcgtctgaccgggtcccggagtcgtcgccgcgtcgtcgcccggggtgatctgctgcagcggctgggccggtgacgagtcggggaccgaggcgcaccccgcgaggacggtgagtgccagcagcgcgacgaccacacgggcaggcaccgaacgcctactcaccactgctccccgaccgggaggaccaggccgcgagcgtgcggtccgagtcatcggccgcggtcgtcgtgtcctccggctcctcgacggcctcgtccggcccggacgacggctgctccaccgaggcgggttcctcgtcgtggccccccggctcggcggcgtcgtccggctcgctcacgtcgtcggcgtccaccgaactcaccggaagcacgtcaaactcggccgtggaccggtcgt

SEQ ID NO: 64144 - DNA, 299 bp, Arabidopsis thaliana landsberg
tttcttcatagatcctttcactctcccttcaacaccatacacattataagaagccactctcttcttcctctgaatctctgcctcacacaaacccttaaatcctttcttcttcaccttattgcttctcttcgatttattgttggagtcgtctctcacaattgttggattctggtatgcattataagttgatgtactgtaagatctcatcatcactggtggctgctggtttgttggttctgattctgatttttctccatgactgaagcaatggtacttgttggtgatgctgctacttctgg

SEQ ID NO: 64145 - DNA, 602 bp, Arabidopsis thaliana landsberg
aaagaagccgaataatgaattgttaaagttataattcgtattaaaataatgtcactaattaatatatgattgcatgcgtgattaatgacaaacgatgtagctatctcgaaagtagaaagtggtaagtaccatcggtgaacgcctcgttagtcccaatcccaatgccccatttttcccttttgtacgtctctttgtttcttccgtgcttgactacatcttcccaaggctgtatccaaatatgttttgcaatgttattggcatttgggtcttagtctgcattttctagctcatttggtatttcgagttccattagtatatgaacacgttttataaaattaacatcatttctgtaaggaaatgtttaggaagaaggtttctttaactggttttaattagaaatatagtgtcctatttttggaaaacaataataaaatgtggttcttttgaatgcgttaaagttacggagaaaataaaaactagctacaatgaggtttgcaagggagcacttacaacagtaggttcaatgttattggcatatgggtcatagtcgccgacttttttttggtgtttaattttcttattttgcgcatccaacacaataa

SEQ ID NO: 64146 - DNA, 605 bp, Arabidopsis thaliana landsberg
ggaaacacgagagttggtaattgcctcgcatcattttattcatataacaaatctctcaactgcaaactgataagacattagatcatatctgcttctaaaccatttacacacaaaactatagaactcaaaaaggaaaattcatataatcacacatgtctgaacacaagcaaaaactttgaacaaagtacatagatgagatctagacgtataatccaacactaaacacatgtacttgttaatccaacacatttgattttgaccctaaatctccacttggattgtgcataggatttgccaatttctgaaacttcatatccagaaatttgacagctgagttcatctgtaagaaggtcaaaagctgattaaaaaagtcgaaactttccatggaattgggaagaagaaagcttactgattgtgaagctgtctgaaacagagttttcgtcaagggaactacacaaaacctgttccaccagatacttcagtttcaaagaacaaacctttccaatggaaacagaaaggttttgacttacattcctctgccgccggcgagagcttcctccgatgggtccttccattcgtcaaccctgttaagccaacacagaatc

SEQ ID NO: 64147 - DNA, 563 bp, Arabidopsis thaliana landsberg
tttcgaggaccagctcacccctctgggctttaccaatgtaacctcggaagttttcattatcgccacgctgaaatccagttatattgatgtgaatgcaggcctgctgtacaatggcagcaccaatgaccgtaacaatttttatttcggcatcagcatgtatcatatcaacaggccgaaacaatcctttacgggtgcggattatatactcaacccgcgcacaaccgtacatgcggggggatacttccctatcagtcccaacagcacactgcacctgagcgcgctgcattccatgcagggaggtaccaccgaaacattactcggcggagccatacaactgatcgccaaccccgatgtggaaaagcccgccagcttttatataggcagctgggtacgtatgaaagatgcgctgataccctatctcggcctcgagttcaatgatttccgtttcggtgctacttacgactacaatactttctctcttaaaacggcctctatgaaccgcggaggcattgagctctccctgatatatactttgcggccatcacaggaaaagccgatcaact

SEQ ID NO: 64148 - DNA, 570 bp, Arabidopsis thaliana landsberg
  unsure (1)..(570): unsure at all n locations
cgcgtgccgctgcccgaaaccggaagcgttgcgccctcgtttacattttaagaagaatgttcatagcgcaggatattggtttcttttttccaccagtcggaagcgccgccgccgccgccgccggaagtgccgattgtttcccagttgttcgttacgctggagcagacgagcagttcgtcgcccgatgaataggtgactgcgccgggaatggcgccgcaagccgtgcccgcaacctggcctgacccgcgcaggcgcatgaagccgccgatatcgagatcggcggtcgggccgctcgtgagaccgatgccgatatcgccgctggtatcgatttccatcgcggtcgcgccgctggttttgaacgagaggccgctcgcgccgttcgagtacatgccctcgccgctgtcgatcgcgccgatctcgaacgatgcgcctgcggccttgccgttgaccagcagctggccgtccatattagtgtcgcnnnnnnnnnnnnnnnnnnnnnnnacattaagatcgccgctgagcgtggtcaggctcgcgccgctgacagtgaaagcgtctgcaacggtgacg

SEQ ID NO: 64149 - DNA, 493 bp, Arabidopsis thaliana landsberg
  unsure (1)..(493): unsure at all n locations
ttcaataatgagtgagatagttaatcacatgatttcttagggtcaacatctagttaatcacatgttttccttgggtcaacatctagttaatcacatgacatgtgatatattttgtgtgcgatttcgtcatgtacacatatatatttacccctttttatacattttaaaacatattttaaaaattcacaactaacggtataataaccgttaaaaaaaggcttatagatatggcaaattaattacattggccgtgacgtgtatataatcgaacgattgcaaagattgctcaagtccagaattgtatatcttggattttacttagagaatcttgattgtaaaagtgttcctaatattttcaaaacagaaataaggaaatgctgtaatgatgcattccatgatcattctatagtaccttcgtgtagaaaaaaagatgtacactaggataaatatttattaatttaactttgtacttcttacattntaaagaatttct

SEQ ID NO: 64150 - DNA, 1789 bp, Arabidopsis thaliana landsberg
gtgtattacatattataacattaacttcaacttacagtctcttaaggactctcattatgtaattcataggttttgtagctttttcaatttatttaaatcggatatacaaagccagcttggaatgtaatgtaatccaaaacgtctaagatgtgtcttatgtaacctaaagcagaacactcagtgattgctttatcaaaagtcattagttcgaagtttagtacagaatactataacgaatattaaagcaacaaaaaaaagtaaaaaattgctataaaaaaaaagtattattgtatctagaaaagttaatacaaccaccaatgttgatccataaataaaggaaagcatgaccaaatagttatttttctttttatgcaattttatttttactttagttggtgcttctatctgaaagcttttattattgaactcttttagaccatgaccgacgaaaagagtaaaaacgacagcattttaatcatatgaaaaaaatataaatgtatagtaaagaaatactacaaccagcttctctgtattttactaatatcagattatctacactaaaagaggacttgattcgtatctttaatacctcaaagaagatactacttagttctcttagtagactttgatttcttcattttactactattacctgacttactattactactactcatgcttgtccatttatacccaattggtatagcgaatgggtccggcgtttgttgctcctcctcttctacccttcgatgtgagccttttccggtggctagtctcagccacgtcgatggccgtgaaatcgaatttcgagcatcgggtttctcgccgtcggattggtcttcttcacccgcggtggttgtgaggaggaatcttgggcttgagagcggcgtgtagaatgtctccgccggcggaagctcgacaaacttggtgaatgtgatgactactttgaccgtagggaccaccggaatagacagctggatcccacaagaaagattttgtttagcataaagaaagcaacaaatttcataatcatctaaagaatttgacttgggtatttaaaaagcacaattccccaaaattagagatctatagaagtgaaaaaaaaaagcatgggtccctaaaaaagctaaagctttggttcctccgtgacccgtccgtgatcttgtcacgtcagcgttccattgacgagactagccaatgagaacgtgactcgtaagttggtttgacccattaggtataacggtcgtaatgttttaggcttaggaagaacccaaaaagagtaacaaacggaaaaagtgatttactggttttaataacaatctgggacaattaaaaataatgctaacaaaatctatcttaaattagcctaactctttcaaaatgaagtaaatacactattattgactctagattttaactttaaaggtttagaattcattttttttagtttaaggtttgattttttgggtttaagattcagggtttagaattaaggtttaatttttaaaaatatttagttatttttttttgcttttaaactatagattattttgctaattttggtataagatatgatagttttttgaaaagtccttttgaaaaactgtaaatagagaaattaaagatatttacgagattgccacttttgttaccttgactggaaaagttcccgacgggaacttagtggtgagaagatcacgcattctggcgacggctttcactttattagctaaaatgtcaagtaacgcccccagctcctccgtttttaccccaaattgttccgtaaacc

SEQ ID NO: 64151 - DNA, 290 bp, Arabidopsis thaliana landsberg
ggctgacatatgggtccacattgtttcttataccggatgttgtttgagtgatcacaagctaagaggaagactgcttcaatgtgctggaaacaaaatgctcgcaaaagctagattggagttcactcccgttagttcagagaactgacaatttactgggcctactgtactggaaacttgtaaacctccagaatgtggaagcactggaatataccaatccatgaccatagggtgttagcaacagccttcaagatattggacccataggaccacagaacaacagcactggatgc

SEQ ID NO: 64152 - DNA, 270 bp, Arabidopsis thaliana landsberg
ccctattttggatggttcaggctaagactgggccgacgcgataccaggagtaggcataagcgcggatctaaaccaggatggggagagtgtacagaagatggatggacatgtgaaccagcctgtgtctgtgagctagacccttacttttgatgttgcattgacggttttagtgactagaatcacttgtggcataagagaacaacaggttcagggtcatggcttggggactgattctgtgctcgagcgtgaattgttagcgacttggtcatg

SEQ ID NO: 64153 - DNA, 557 bp, Arabidopsis thaliana landsberg
aaggacctcgctctcggagacgatacgcttgcattccttgagcacggcgggggtgagaaatacctccttgcggataatagtatcgttcttgtagttagaggtattggcgtaacggagcttaccgtcctctctaaactcgaactccaggaactcgtgtccaaatttccctttgtgaccgacatagtatctcaggtagaactccgtcgcttcttccgcggccatgccttctctttttttctttctttctcgagatcgagattacctctccgtgtcctttgcccttctttaagtccgtccccgcaaaagaaaaaaggtaatgggcttacatattgggccagaacccatttgtaacccgaaaagttaaggcccagttttagtttttctgtttccatcgaaattgtgtgtgtatccgggctgcctgatttccgattccccgatacagagacgatgccgacggattcgaaaatggccaagtttcttcaatcctatggtaatttcttcgtttcgtcttcttaggcggccagatgatctctttttcttttttatataactgaaac

SEQ ID NO: 64154 - DNA, 714 bp, Arabidopsis thaliana landsberg
tttacgagtctgtatcgttggagtcttattgacattgttttggaattgtttctttttctttagaaagtgcaatcaatggtaaaactaggaaattgctataatgagattaatgcgaaagaaacacttttggtttactctttaatagaagcaaaatgttagtttgatccttgttcttatggaaacctgaaaaatgttggcattagtgtttttttaccatggttgtttcagtgtgttcttcggccttttgactgtaacatttaggatgcttagatccttgtcaggtctctaactaactttttcttttggttgctcaggctaacagtctattgcaagtaaagtatgcagatggcgaattagaaaggctaggtaacgcgattccgtgctctatttcacccattttcattgttttatcatcaactgatggatgttgtattaatgtattctgcaatccagagcataagctatttgttggtatgcttccaaagaatgtctctgaagctgaagttcaatctttattctccaagtacgggaccataaaggatctacagattctaagaggtgctcaacaaacgagcaaaggttgaatctatctttgggtcgctattgtgatctttggtttcactagtatgctttacctagttttgaccttttgtttgttgacgatgattaagctgtgcttttcttaagtatgagacaaaagaaccggctgtttct

SEQ ID NO: 64155 - DNA, 548 bp, Arabidopsis thaliana landsberg
tacgatcgagtttttattgtggggacaggacctcagctcttcatcagccggcacacgttcgtacctcttatattttccgggtggaggaactgctgcaaatgaaaacaggaggatcacctacctgaccacctgcgccaatcttttgacaggtatgctgcagcaagtgaaaaatgaatgggacccctcggtgagcggaaattaccgtgccactttcctggccatggacaataaaaccgccctcaccaaaatgttcaaccaaatggctgtactggcccacaacgaactggccggggaacgtatttttgtcgcttataccagcatgaaccaggaagacgagcattcgtgcttcagcgacaatacacaccgcgacattattttgaacgccaaaggaattcaaaacctttacaccggtacttatatccgtaccgacctcagcgtggtgaacggtgatgccatcgaggacctgatcgcgatcgtgaatccagcaaagaataccgagatcctgaccatgctcaacgacagccagaccgcaacaaccagtctttacg

SEQ ID NO: 64156 - DNA, 613 bp, Arabidopsis thaliana landsberg
acgactttagcttagaactaaaatcacttgatgcgtgctgctatctctagagggagcggaaatcgtgaatatatcgattcacctccgtttggctcgttctacgaaaccgtcggatggtgataacaccttctcattgaatcgaatatatcatcggctaacatatcttttctatacacgtatcaaagttaatacattttctaacgaaagaaaaggactctttaatcacaaagtatgcatcctgcttggatcatctcatgcaactatcaatataaagagcttattgctctaaccttatgaatattaacacttaatcttatatgactgcaaatacaaattcaaaagctatatattaaagctttgagaagcagtctttagcgttcgcccgaaattaatcagacgttagattgaactcgtctgcaaccctgtcgatatcatgtaacaggttagctgcattcaagaaaaagactttcctatagaaagttcattagtggaacatgcttagaacattaacatccattgtcttatagatatagaaagcgtgtttaaagcgagaaatcacacctgtgaatctgcactctattggtattatatataaattaccacacttaccatt

SEQ ID NO: 64157 - DNA, 1388 bp, Arabidopsis thaliana landsberg
acaacgctggatctctcccttttgagattactccaaacactccaacaatgtattgttaatttaataaaagtttttcatagtcataattttgattctgaacggttctgcatcaatgtgaaacgtcgtcgtttgtgtgacccagaggtttagagggtccactcgatctcttcacctttcctttgtgaggaaaaaaactctgaactgttgatattttcttcgtcgacactaaaaccctaaaaaccccatctctttgtctctctttcttctctgaaagcagaggaagtaaacaatggcgataattccgttagcacagcttaatgagctaacgatttcttcatcttcttcttcgtttcttaccaaatcgatatcttctcattcgttgcatagtagctgcatttgcgcaagttctagaatcagtcaattccgtggcggcttctctaaacgaagaagcgattcaacaaggtctaagtcgatgcgattgaggtgttccttctctccgatggaatctgcgagaattaaggtgattggtgtcggtggtggtggtaacaatgccgttaaccggatgatttcaagcggtttacaggtcacatttctcaatctctttctctctacgaagaagaaaacctggaacttttctcattttgggttttgattgattaatggtttgaattctcctgtgttccagagtgttgatttctatgcgataaacacggattcgcaagctctgttacagtcttctgctgagaacccacttcaaattggagaacttttaactcgtgggcttggttagtagagttatactattatttggtatagatgttgtgtgagttttggcacttaaagtaacaaacttgcgtctctgttacttgttttaataggcactggtggaaacccgcttcttggagaacaagctgcagaagaatcaaaagatgcaattgctaatgctcttaaaggatcagaccttgttttcataactgctggtatgggtggtggaacagggtctggtgctgcacctgtggtagctcagatttcgaaggatgctggttatttgactgttggtgttgttacctatccgtttagctttgaaggacgtaaaagatctttgcaggtaatgtgtgttgacaccgtttcttgttgaatgggtttaagtttaaagtcttgttatggatctatgcctgatttggttatttcctctaggcactggaagctattgaaaagctccaaaagaatgttgatacccttatcgtgattccaaatgatcgtctgctagatattgctgatgaacagacgccacttcaggacgcgtttcttcttgcagatgatgttttacgccaaggagtacaaggaatctcagatattattactgtgagtctatgtattgtataaag

SEQ ID NO: 64158 - DNA, 1003 bp, Arabidopsis thaliana landsberg
atctatctaaactctgttctttaatttgagttttagtattttcaaactttatctattataatgttggtatgcaggtgacctctaaaaaggatcaagctcaatactgggcacatccttcgaagccatatcagttcattcctgtctcagacatagcggctgcattccgtaactcgaaatacgggcatgctgcggattccaagctggctgcaccatttgacaagaaatctgcggatccttcagctttatgcagaacaaaatttgccatttcaggatgggaaaaccttaaagtttgctttgtacgagaattattattgatcaaacggcacaaatttctttacacttttaggacatgccaggtaaatatctacatctttatgctgcatttgtaaatttggcatcatctagagtattgacacttaggtttgtttccatgacattggttttgtgtggcttttgaatcaagtaaccaataaattttgtctataccataagcctaggtcttcatttgcgcttgcttcaattctgcttttctaaaattagtcttattcttatatatatgcaccattatgtgatacaatttgcatcactatagtgacatcttgacgtagatattattcaaatgtccttagataaaattctaagattctgatccaaaacattttgtgttccataaaggttggatttgtgggacttgtcacagcgacagtgttcttgaaaactagattacacccaacaagcgaacaatttggcaacgagtatctatcttgccttttcttcgggctagtccacatgatgttcaacggtttctctgaactacctctcatgatatcgcgtctcccggtgttttacaagcaaagggataactcctttcatcctgcttggtcatggtctattgctagctggctcttgcgtgtgccttactctgtccttgaagctgttgtctggagtggtgtagtatacttcactgtgggacttgctccctcagcaggcaggttggtcattt

SEQ ID NO: 64159 - DNA, 723 bp, Arabidopsis thaliana landsberg
gggcaaccatagactttagagctgctgcagatgaaaactccattgtggatctcagcagtcaagttcaccagctcccttgctgcattagatttgatggtcctgttgaagtttcccactatttcaagcctaaatctagcggtaacaaacaacacttgtatgtttatgtatttctggttttcacttatgtgttgtattctatagtgagattaatgtggaaagctgttgaatttgtagatgttgaaatcgatggagtaaaaacggaagaagctcatttcagaggaaggaagttgcagggagcaactatctcactccctagtggctattctggtaccttttttttcttactgagaaaaagttgcaaacttttgatttcttacggatgtttatcaaagtatgattggatgaatgttacacattcctgttgatggagattttagttagagagttttgacatgtcctgaagaatctgctactattggtatcattatggtgttgaagaattttatgttttggttattgacaattcgtttgtgtttgacatgttcaggctttgtgcttagacaagcgagtaacttgaatgctaatggaaagagaaaagcttctatgcccacagaagataaccagtgttgggaagtgaatgcgaaattcaataacctgacatactggaatcacgatagtcttccttcaaaggacgaatctttctttcgctcttttcattggttt

SEQ ID NO: 64160 - DNA, 505 bp, Arabidopsis thaliana landsberg
  unsure (1)..(505): unsure at all n locations
agcctctcggacgggatccacgtgtttccggtgggaagctattcacttcagagcacgccggcttaactcgggctgggggtgaatctcttgacatgggtctagctccaacgccggctcgcttcatgagcacgtgactctctccattccaattcgacgctttaatgatggccacatactccatagcttacaggctgtgtgactagtgtgatgtcctctcatggtnnnnnnnnnnnnnnnnnnnnnnnnnnnnnnnnnnnnnnnnnnnnnnnnnnaatgagccccctgggctgtaccaaaagatcttgttgcaagaaggtcggctggggagaatcttgtcaaaacattatccccgctatggtccatactgacatcacatgtctacnnnnnnnnnnnnnnnnnnnnnnnnnnnnnnnnnnnnnnnnnnnnnnnnnnnnnnnnnnnnnnnnnnnnnnnnnnnnnnnnnnnnnnnnnnnnnnnnnnnnnnnnnnnnnnnnnnnnnnnnnnn

SEQ ID NO: 64161 - DNA, 475 bp, Arabidopsis thaliana landsberg
cccgagcatggccaagagggtgcgcatgttgtcagtgggaatccttgaattatgattgccgttctttctttcacccagtgcccgtaggctgactttattctgcctgccgaaacagccgatatgcaattccaccgacggtaccgaggataagtcgcaggtggaacgcgacatccaagcatccggttcatcttttcacaccgcgaaaatacggccattttggcccatcgaaagcatcggctacctggcatccgagaggcgaccccgcctccctcctctgccggagcagcctgacacggagacgaccatgcttaagatcacgcccatcggcgccacgctcggcgcccgcatcgaagacatcgacctttcgaagccaatgtcccgcagcgacaaggcccagatcctgaaggctttcggggattatgccgtcctctgcttcccgaagcagaccatcgatcccgcccagcacaaggccttt

SEQ ID NO: 64162 - DNA, 776 bp, Arabidopsis thaliana landsberg
cgttttggctgtttactcaaggaggtacttggtactgatgatcctggcgacacgttattccagttctgtccaattgacatcaatgaacacattacttgcctggaaaggtgaaattttgaaagctgtggagatgactgaatcagaaattgatctccttgaaaacaaacataggacactaaagcttgaaggtagaagacactctcgtgttgttggacccagttcatactgttgtgatggagatgcaaatgtgcccaaggagcaggcttcttgtagtttggatcctaaggcaacagcttcttctgtagctaaaacactggtgagagctcctgtgcatcaggctggtttagccaaggttcctgctgatgtttttgaagatagtcctggggaagttaaacctctatcccaatcttttgccactgttgaaagagaggaagatatactgcccataccatctatgaaggcagctgtttcttcgaaagagattaacacacctgcttttgccaatcaggaaactattgaggtttcttctgctgatgacagcatggcctccaaagaagacttgttctgggctaagttattatctgccaataagaaatatgcttgtgaatcatctggagtattcaatcaattgcttccaagagattttaattcgtctgacaactcaagattccctggcatatgtcaaacgcagtttgattctcatgtcccagaaaaaattgcagatagggtaggcctattgagagctagggagaaaaatttactcttcagtttaaagc

SEQ ID NO: 64163 - DNA, 1029 bp, Arabidopsis thaliana landsberg
aaatgagcataaattttcagatcaaaggttatcacttccttcagatcctcattctgaatgtattagcttgtttgaacggccttcttctgagaacaattatggcaataaggtttgttcaccagcaaagcaatgcaatgatttgatgtatggtcgaaggttagttagtgataattcattagatgctccaatccccaatgcagagctggaggggacttgggaacaacttcgcctgaaagacccgcaagataacaatagtttacatggtatcaatgatatagacggtgataggaaatgtgcaaaggagagttctctgggagcaactgggaaacttccactgtggaatagttctgggagttttgcatctcagagttcaggttttagtcattcaagtagcttgaaaagcttgggggctgttgattccagcgatcggaagattgaggttcttcctaaaattgttactgtgactcaatcttcttcaggagacgctactgcctgtgccacaactactcatctttctgaggagatgagttctagaaagaaacaacgtctcgggtggggtgagggacttgcgaaatatgagaaaaagaaagttgatgttaacccaaatgaagatggaacaacattgatggaaaacggtttagaggaactacattcgttaaacaaaaatattgctgataaaagtcccacagcagccattgttccagattatggttcccctacaacaccatcctctgtagcttgcagttcatcaccaggtacagtacaatttgttaatacttctctctgcgtgctcttctcattcctgatctatttggagttatctgcattattttcatattacttgaattcttccatcatgtatctgttcttgtaaacactgattttgtttttctctttttatcatgtcttccatttgtttttgttatcttctgctggggacagtgtaactcactcgtaattttattcttttgtgtacattcagggtttgctgataaatcatctccgaaggctgctatagctgctagtcat

SEQ ID NO: 64164 - DNA, 142 bp, Arabidopsis thaliana landsberg
aggcccacgagagcccaaaaggaaaacaaaaaccaagggcagacccaccgtttatagaagccgcgaacgagaagcacccagggggggggaagaggaaaaaagccaaaaaccccaaacccccaaaaacggcccagagaagaca

SEQ ID NO: 64165 - DNA, 555 bp, Arabidopsis thaliana landsberg
gcctgacctgctccaatccgctgctggcgatgaagcacaggtccatttgcgctgggtaccggcaggtgcgccttgggttcgaactcccggccgcgctcatgcacgttgatcttctggttgccaaaacgaaaggccaggcgccctgaaccaaaggtctccgcctgcatacccaacacccgcacataaaagtctttgcaggcttgtacatcgacggtggtcagtaccaggtggtcaagatgatcgatcatcgagtcgtctccgtaggggcagtttgaagggtctgcaattgtgccagcaacgtcgcctcccgtgcctgaccagctgcatgtgcggcacgcaggtcagcgacctgggcgccaagcatctcgagctgctcctgcaacaaccccttggccccttctgcacgggcggtggccgcgttggcgagcccgacatcgccgcgcaggcgctctgccgcttcacgttgcagggctgcctcccgggtcttgtggcggtgctcgacgagcaagcgttcgttgtcgcgaatcagccgggtgatttcgtcctgttttacca

SEQ ID NO: 64166 - DNA, 2469 bp, Arabidopsis thaliana landsberg
taatactaggacccaccttccggatttctttgttgcttctcctttggcctttgggggtaatatttccggtacgattcgctggttcggtattgagcaatttgatatcaattcagattgatcggttaattgtcacagcagagtgttttgcgcagaacaaacacaattcagattctgttttgcactgtgagatggattcaaatcgatcggttgataaatcattaagacattaaccggttctgttacattcagttcagataccggttcactgtgatccttgttgaccagaaagacaatgtatgaaaagttgaaaaaaccgaagaaacattaaggaactgtttatttttaattgtgatctttctttctccactgtctctggtcatatatcaagcaagtaaggggtgttgtcttggtaaatgctcgagccgtggaggcagcttcagtgttttcttcttgcaaacagattcaaccttgtcatagagaatagtgtagttgcaactactgatgtttctgaagtaacattggtcacttccaacatagttatacacttgttgtgtgcttccatatccactgaccactaagttattcttcaccaccattactccttgcccttcttgcttgttttcaagcttgctcttaaacgttctcatcaaccctttgtcgctctctgatctctcctcgctgaatgccatcgagacattcgctaccgccagatatgtgttattctgctgctccaaagtgtcagagtcgaggtaaaaaggaaaactcttgatagatttcgctgcgtagatctctctggaggctctcttggcatgaatacgatcatcagcttggatcaattgatctatgatctgcaagttcccatctttacctaaaaccatcttgttctcgtagctaaattcttgattagcattagttataatgtccccatgagaagatttaaccaacccaaccgaagttatcgacctctttgctttcgtggtgaagtttccattcaagcctttaaaatccgagacagagctaatctccagagagcttctactgaaatccaacaccttcccttcaacaatctccttctcttgatccaaccaaagatgcaaattcgcatcaatataccaaacattcaaagcatttgtaacactaaaccccaccttatgagtcttcccatccaacaaacttcccaagaacggcgtgatctcgatatcgtaactcggcaaatcaaaagagccaatagcagtaattggtctccaaagcaaaggattaatcccaccggtgaaaacaacagggaaaggccaaacagcaccagcaatatcaccgtcaagactaaccacaacttctctaaaaggtccattaccagcaacactaagattattagcagttacatagtcattaggaagatttccataccaaaactcatcattctcatgaaaagaaacataaacctcaagcacagctctataaacattcctaggaatctcaaagtccttatacttggtatcattcgaattcacaatttcaaaccacaatccatcgttcaacggaagatttctcgaaatcggcaggatcatatcagctttagaagagctataaccagaaacatcttgaagattactttcggattgatagaaatggaagatgacatcaacatggtaaacaccagtataggttttatcgataagattaccaagataaacagagagaatctgagtctcgtttttgacgagcaaagagtgatacttggtcacatctttctcgacagaccaaacaattccgtttggtctaggctcggcggtgcagctccggagaatctcaacgccgtcaagccaaacaccgaagatacgatcgaattgtcttccttggctggtggatttgaattcgaggacgattttggagaattctcgagaggagcagtgagaggggagtgtgtaattggagagaaccggtggtttagcgtaggtgtagccaaagtcatggtggaggatttgatacgaacacggttgttgagctgtcgggagatttggaacgggaggtttttgaacctcgaagtagcgagtaggggattttgtgacgttttggggaagagaggagaagaagagaggagagaactgaggaggtttgaaacgtgatctggtttcgtgaagatcggagacggcggagagagagtggacgaagaagacggtgaagaagaagatgagtggaggaagagaggaagtcatgacgtttttgcttttggtctctgtctggtaatcaaactgattttaaagaaagagcctctcttaatgattatcattatactaatcttttttttaatttacttaagatgcttccaagaaaacaaaaccttacattatagtcagtgattaacatgctgatttgattatttcttgagatcattatttacattccttgtgatattaaaagagcttccattatgtgatatacttacatgaccaaattacccttctacacact

SEQ ID NO: 64167 - DNA, 946 bp, Arabidopsis thaliana landsberg
gtggaaagttattgttgatgaagaataatatgcgagattactcatcttgcaatctacaacaactcttcaagacctaaagatgatggtcttagaagactccaacacagaatttcctatggttgatgttgaattcacttacttacctacagatctcggggttgattctcctcctattcttatgacgaatgagcgacaattgaaattttttgtcgagtattataaaaggaacagtttaatgcggttgtgtgtgacctttaaagttaaaggcgatgatcaaaggagtagagtggatatcgaattggatgagtagccacgtgattaaatcgaacgagatgatgaccgtaacgtgcgtaaaaaatctgcagtattggttgataaggatacaccaaatgttggtagagtttgtgatgatgttgaatctacgttggcagattcaattgtaaagaaaggaaaatattttagaagcaaggaagttgtaccggcaactctagaaatatgtgcgatgaagtataacttcgactaaagagttactaaatctgatacgacattttggggtattcgatgtgtagacaacggttgcaaatggaggcttcgggcagaatatttgaaggggtctacatatttcaaaatcaataagtatgttgctaaacatgattgtgcgccttcaaagaaaaaaaaagtctctagaacaccttcaggaagaacaattggacatctcattatgcatagatacgagggtgtaaagaagggcctaaacccaatgatatcatcaatattttgcgtacagaatatggatgtgagctatcttattcccaagcttgggagtctcgggagtatgcaattaacgaggttagagggatacctgagaaaagttatggtaaaataccaaaatacttgtatatgctagaagaagctaatccctgtacgtatacaaatttagaaactg

SEQ ID NO: 64168 - DNA, 1521 bp, Arabidopsis thaliana landsberg
tcgttttggctatagtagtatatataatcttcgttttgtcatttttccctaatctttgcccatattacaaaccggggctctaatacggccattcgttgccatcaccaaatattgtttaccaacttaaaggggaaaattcataatgccaaattggggttcgaccttcgcagccgaaacgggaatttcttgcattgaatcaaacgcgtatacttataagcacatatgatatatttatcatgtattaaaacgacctaaagactaacggtaatataataaaaaatatcaccacttaactggtttttaattggaaatttatctgcaaattgtgattattaataatattatatatccctttatagctttgaactttgatacgccaattatctttacctaagcgtactttattgtccgtctcacgtatatataagatataattgtatatttctagctctatgcgatgttactgtttacgtagtaattatactttttcttaaagtaagtgtagttaattatataatcaagtatcacagaataataaaagatcagaaaatttaatattaaaagtgagttttgctctagtgtttgtttcattttgctcacaaatcagtattatagttcttcttaaggatagacattcgtaatgacaatctgctgctgaagcagatataactcgtcttttcatttcctaaataaaggttatggttctggtattatgattttaaaacatatacaagattaaaaaaaatgaaaatataaagaaggagagattctgattttggtcgagaattctgtgtaatgccaacttgatgctgcccaagttcccaaccatgcatgtgcacttatacccataggatatatgctgtttcgacatttttattttaaaatataatactgtataatacagtacatgataaactttttatattaatcggaaagctggagtaaccggaaatttaatattgtttgacgatcatttccgtgaaattggaaattccagtcagttatatcatccggttatatgtcccatttttttttgttttatttttgttgaatttgtgatgcactttgggttaaagaacttgtatgtgcaaatgtaatttcacaaatatttgttatcaagaaggcgatttccaaaattaaatttgaaatcgtagtcaagtaatctattcttttgaagttgcaaaacttaagcatctaattaaggaaaaatcatgaaataatagtaattttgtttgtgtacaattagcaagcaaattataaaaactaaaatctcccataacggaacgttgtagggctctccacaaagaaacaagcttggcttttgtcatggtcaccaagagggacccaagattcacccatcagccaaatttgactcccacgtaagcaccactaacctttccatatgcattgtagttatatagtaatctctataggagcaggcgctccgctaatccctgtaggtcagtgatccaccggctcaaccaccacagctcggcctggtatgcagtcttctaggaccat

SEQ ID NO: 64169 - DNA, 2181 bp, Arabidopsis thaliana landsberg
  unsure (1)..(2181): unsure at all n locations
attttcttatccatggactctggaatagatagccaagttgctacttgcaagagttatctaattataggagtattattaaacaatcataaacataaactactacaatataattgcttggttaagagttaagactgaaaaccattagttccaataaacaatcaaaagcactactatctttattgtttaaaccgccaccgagaaatccaatatcaattttatatagaactttcctaattataaattggattaattaatgggattaactagacttaattcagggacgtgggtcaaatgctaaccacatattacgtatgatataataatataaatagtttgaataaaacaacatttatagaatcaaagcatggtccttaatcctcgagagccttggagatagtgacctcctcgtataggcgagagtacagttctccacttttcatttttttaattgttgtctcctcttttttttttttagtataatttcccttttcaatcgaatcttaattacaactttatttgaacaatatatattactctgatcgccaaatgggattagctaatccacaagctatagcttttgtttaatttcaaaacctaaggacaatttttatttgtatgagatacttgaaattattacttaagattgataggttaattacttattacgaccaaaattttccaaacgaatatatatttttattaaattagcgctttgtcaacctacagttaaatttatctatttcgattattatcagttacataaattgagaggatgataaaaaaagtattttgagacacctcttccccaccttataatttttgttgtccataatgaaataaaggagagcaagagatagtgtaacagtgagacggtgacgtggtatgcttttgtaataacgtggcaaattcgtgtttgcttttacccatgcaggtgccacaaagccttaggtcaattagcttttcttaggtggcaagttattagtcccgagccgttgtgtatttgtgtgagatgttttcaagagacgactagcgtgtgggtgcttagatactgacatggtccgcactggttagggacagaggaaacgttgcgtagaatcttttttgttggcgatgcacgctcgcactactcgagtgtttttgtattttttgaaaagtttattcatacgttggcttaattcaggtatacgaacatgattttatattttatcaggaatgtgatgtcgtacggataaaatagtttagtagacgattaaacgtcatttcatacgtcacaaggacaaaagcgcaccctatagagaagcacgatttattaatttatagatttgtctccaaacttgttattcgttaattgttgagaataagatacaattatttaagtttcatatctctaaacattgctcatcgttaatcttggttcaatatagaaggtgaaccaagattcagaatgtcgtttgattgagtttatagtacttcatagagaatggacttttgaaaaaaggagatgattccaaagaacgatnnnnnnnnnnnnnnnnnnnnnnnngtgttatagatcgaatattattaatagtataaactttgttcagaattgcaatatcaactaatttattgaatctacttgtaaactttttaataaatacttgttcatcatataatgctttttttctttctgtagttgttgtatttgttcaacacaaatgtttcttaagaaactatcacatgtatacacagacttgggccagattggttttgggcccaataagtcgataaaaagtgaaaattaaaccttattagatccaaaatatcttccccgccagtgccaattactgcaaaatcccttttgcccccaaaattgttcaggaagctttgaaaacgaagaagtttctgaatcaatggctcaagcagcgagattaagcctgagaatgcagaaagaactaaagcttctcctctccgatccacctcacggcgcttcgtttccacatctctcttccgccgccaatggctccggcgatttctccactttctccaccatcgatgctcgttagcttttcttcagatcctcttaattttcaaattcaaatctgttttgatttttattacttttttatttttgtccagaaatcgaaggtcctgaagatactgtatatgctaatggaatcttcaatgtgaaaattcaaatcc

SEQ ID NO: 64170 - DNA, 474 bp, Arabidopsis thaliana landsberg
  unsure (1)..(474): unsure at all n locations
ctgttttggagattcanaagtatcaattaaaagtttcagttttgttggggtatatgtctgagaatgggggtcggggtcttggtacactaaaccaacttctcattgatgcgtaatgaaatctcaacttacaatactttcctgatctatgcatctaagataaaagagtgttaccacgtagactaagattcgtatttggaagaaattgaagtatcttctgaaccaattctcaacacttgctttagaatccagccatatgttgagtgtcagccataggctcggtatgcttcccctgcctttaagctcaattcgtgtcttctagtatctgattggcccatcgaggctgcctgtctcaaactgagagatgcaaaacataaaaaagaatgactcaaacgaaaaactgcattacaagtacttctatgttgaaattagatgtgagtaagcgaaaaagggacctgttgaactattggatttgtt

SEQ ID NO: 64171 - DNA, 1773 bp, Arabidopsis thaliana landsberg
atcatttattatgatttggtctatttgtttcaaaatacaatgtactttcataatatagaggtgttaataaaaaaagaaaaagaaatgaaaatttaatgacgtgggattttgtaaacaactttttctgtaaggtaattaaattccttttgaccactgaaatttaacagctgaagtactctgaaacatctgtgcattcaactctgaaaagtagattgtttctttttcctgatttcctcacgctcaaaaaataaaaaaatactatatatatctagttaattttccataaaatatcaattatccagaatataaaatatccttatcagtagcaaaaattggaaaaatatttatattgttttagaaaattggaccaaaacatctctaaaggagattaggcctttctactagctaaacaatggtttaggtctccagatttatttagaaagacattaaatgtgaattaaaaaccaaatctaactctttttttggttctttaaccaaaaaataaaaactctttttttttgacagctaaccaaagcaaatctaatttattggaaaaatacccaaaattaatatactttttttttttgcgttagttgatatagttttggttctctaattagtaattcttaattttcaactttataattggtgaatgaaaaaaagaaattaaatattattattattatttttaatattattatttagtcaaattgattttccgtttaaatttttttatttgactgcattaaaatttgcatattaaaattaaaaaattaacaaaagaggaataaacaagagagagagagagaaaaaaagaattgttcctctcaaaagattttaactttgagctctctgagaaaccaaagcttcactctgattcgctctcgaatcaaaagagacgacagagaaagaagaagaagaaacgcgaagaacagaaacagctctcttaagcttttcttaattattattataattttctcttcttaatccccaaatctcgtaagtctctcttctccaatctctgattcgtttctctgcttattataataatctgttaattatcaatcaaacaaaccaaaccccttttgattttatctctaaagtatcaatttttaatttctgttcagctgatggattcatgaaccacatcggctgatttgagtttccgggtttgatttttttccctttttgtgaaattgggttggaatctggagatctggatcttataaagctggaaactttacgtgtgcttgatgaaccgattttgattaggtgattggttagattcggaaatttgaagacttgttaatttgggtttgggattgggattgatctgaaaatttgtagtttttggaagatatgttggaagatcgatcaccagattcgtgtttgagtacaagggttttctcaagctctcgtctttctgaatcaaactggtctaactcttacatgtatccagaggatgatgataagctcctcggtaatggtaaaagagctttggaggttgttggtgaggttagacagaccaaatcacttaaattaatgggtttttcgattatctatgatagcgattcttctgactattcattgagtggtggggaggagcaagctgatgctgctattggtgatggctcatcatcaaggcaggagcaagaacagcaatctgattttaatgacaatggtggtgattcttcggattctcactctcttaacaatgagattgggagggacaattcgatcgactgttgatccgttgccgaggtctaataggtt

SEQ ID NO: 64172 - DNA, 528 bp, Arabidopsis thaliana landsberg
  unsure (1)..(528): unsure at all n locations
catgtaccgcctctatcttacatgatagtttgatgccgtcaatttgatttatgtgttgttcctggacctgggccaattcttgattaggcctgcattaaaatattctgccaacggctagaaactttttctcttcttctataaatttactttttttggcctaatcccggaggttcttcattatttcgtcagaacaacattgaaaagttaccgttaaacactctaagcgctcttcttcatcttcttatacacttctcttccaacaagaatctcaccaagaaacttcttcacttttacaaaggtaatctctttcttccttctgatttaggttcacattatagactgttcttcttgcgattgcttgttcttcttttcgtatgtcgctacttgattcgttctgggcttctggggtctgctggtgttaaattcgcttgaggatcgaattgggttttgtgaaaaaaacgatctttgnttcgatttcgagttgggtttctgctaccttttttagggttctattgcttaaatcgcagt

SEQ ID NO: 64173 - DNA, 472 bp, Arabidopsis thaliana landsberg
ccctacgatccgcctggcccatgccacctgtgctcgcctttcggttcgtaggcttcctggccgagcgcgggatgctatgcctgagtgacacggttatgatggagaagccccgagcgggtcaacagccaaatggggcgcttccggataccccaaacccaggcccagcgtctggtccatgttcgtcatggtagccaggccctcatcgagccgccgcattgcggcgttgtagtacggactaacctgtcgattaagaatgcggcccgcaaaataattgtacaccacggacaccaatcccgccgctataaaggctttgcgagcggtctgcacggtcgataaatcggtgtggggattgttcacgagttcgacgagcgccgttggcggctcgttcaccaggcggaaacaggagaatccgaccacgtctgtcagaccctgatcttcatccgtatggacccccatgcactccatgtcgagc

SEQ ID NO: 64174 - DNA, 1875 bp, Arabidopsis thaliana landsberg
cggatacaaggggtggtgaaggaaactttgaagttggtaactcaaccggttaaatctattgtgggaggtacgccaagttaagtcttaaaccaaccaattgaaaaagagaacaaaattacaagctttgatctccagtccaaagacatttttatcagtaagattcggaatctcttggctactaaaatataaagaaaaacacgcgagaaaaagatagtgtttgatattttgtgtagaggttgcgtgcgaagaagcaaaaccccttgtgagggagtgacttgaggatcagcttcagctttctgagacataatgacaaataacaaatgggtttgatataggagcagttttacttacatcacatgtttagctttcctcttgtggtcctctttttttctccaatctctaagcaaaatcctacacatctcttgaaaattttgtaaaaccatggaccccattaaagattcagttgtatcttccttaattgactattttttgaggcatgattagacatttatagcaaagaactaatcacaaaacttcatcaaagccttaaaattcttgctatagatagacatctaaaaaactggtcccaaagaacctaacaaagccacttcacacgctgaagaggcaactctcactgttaccagattccaacaaaacagaagaggcttttgtgattagaagctattgaacatttaaaccagcagacaaggcatatgcttggtgacaactacagttgcacacctgtactgcactaaaaatcatctgcctttttacctttgcacgcaactccctattcatcagtctatcaaactccaaaaaagaaaaaatcaaacttcttcaagttgctgagggattatttccatgaattgatgttactttaatgaaagactcatactagaagtgttatacttttctaagaccctgcaggcagaacagaagagtcaaatttatgattcttcaaaatttagcaacaaaaaattctttgttgctagaaaaaaatctaagaaaagagtaaataaatatggtttaattagtagatatttttgaatttataaactccaaatactaacacctacaaatttcatactgattttaatatctttgcacatatagtagaaaccaagattgaagttgtccacaaaatttagtatgtcagaggcccaatgagatgagagagaatgcgatgatcttatagtgctagtttcacaaagagccatggcaaaggagggcttagggacttatgaattgagacagttctaacttgtaaggctactatatctgcctaaactgattataggttttaggtatgcatgatcaacctgtaggctgtagcctgtggaccagccccgtcctatcccgcctgctgatcagtttttccattttgcaacttcaaaaaccagtctggccctttgtacccaaaccccaccacatctggtctagtaaactgtaaacccaatgaatccgtcattttcctatgtagtttctagattaaccaagcactgtccccatcgttcatataccaaaaaccaggatagatcttgaacactcaaaccagagagccgggttcaaactgggcagcttgttcgtcactggcccatcacacgattcacaccatccctgtctgtgaaatttcaaagacgaataatctctctacgtgaagataagagccttgttgagtcatagccaagaaggcacaagagactagacaatagacggttcattcatgaatcagtgaaacgatacagaagaataaatatttcatttctcacacattctatagggttattctggatcttagtttttttccagtacatgcaacagaacgactcaacttcacaagcaatattaatcacaagagaaaagaatgcatcttat

SEQ ID NO: 64175 - DNA, 2254 bp, Arabidopsis thaliana landsberg
attcggcttaaagagattaagatacctttaagtagctgtatagacagcaaccccctaattagaaagcagctactcttttttttttttatatagtagtaccaagataaacgacaaaagcaattaacaaatgttcgcaatgtcgacctcatcaaaaacaaaattaagaaaccgacaacgtttcttgtatttttactcagcatataacaacaagagaaacgacgacatagtggagaatacgaagcatatagtttcttaggattcttctatcacaggtcactgccttttttgtctacgtatcttgtcctaatttgcatgtgaagatttgatgggctttttgtgcatcgctttcagcattcggaacccgatcatattcgttttatccgactccgacccgagggttatatgcaagcaattaatatttcgttgttcttgttcgttcctgagtaccatcgattagaaagctaacaaaagtatatggtaacgtcatgtgtaattaaatgcatgattagtttttgacttttaaatatcatatagtttttgtttttgtatgttatatagaattctttcattatgttctacctaacagaaaagagatataaatttagtgtaatcttataaaataagcatggctgcggttgccatattacaactctgtctaatcaccacaatcattttagttaagggttttggtaacatataattatcatggaaattaaagacggtgatagcgtaaactaattaagaaaatcacatcacatacttgatactcctaaaagaaaacattaaagtagaaagaaagaaactaaaagccaaaaatgcgtgtgtaatcgtatgagtgatatttggtgtactacaaagcctgcaatttgaaaatgttgacacgtacgtccttaaaacatttgagactattggattcagacttttgaaaagcaaaactttggattcggaaaccaggcaggcttatatggataccattaaggcccgtgaatcatatattgcccatttaaggaggtatttatttttgatatattttatttttaatttattataagttcatcattatcccggttatcgtgaagactagtcatatccaattaacgttattgctctaacggaaacgtgcacaaacaaattcaaattgcagtttacggtgaagcttttgacgaatgaataaagagatgctacatccccaaatcgtatatcctaagttgaaatattccatgataattaaactcagttatatatataacttggttagttaacaaactggtgtggatgtgcttagcctgtcttcatatcctgagacaactttttctttatttttaaaacctgtcaattacaaaattaacgtaatattcaataacaaataaaattctatttcgaccccggaaacatatatatatatatatatatataattcaaatgaaaatgacaagggaataagcatttcggagaatatgcctattaatttacattatataacatagtacaaccacacacgccacattaacaattcaactagtttttaatttatcagaaaatgaacttgaaaatatgttataatctacactaaatgttaatagaagactttttctcatctattttcaggaaaaaaaataacaaatttcttgaaccaactaacaaaattagcaaattaacgtacaatgatccattttttaacaatcattagagtgatatagtagtaatccgataccagatcctcaaaatatatggagacatagtcattcaactgctggtttttgcataatccatgtgtattagcctaatactattaggtttgatgcatccagtctttctaaaacacgtcattataactcacgcgtttagtttgatagacatataatgatgcacttaatactttcatattcgttgtcatctatgtgtagcagcatagtgcacttgttcgtctcagactttatagaattttagattcgggagtagaaaatggcttttcgcttaacttttcataaatctcatgtcacacttaattaaaaagtgactagcaccttaaaattaacatatatgtgtaacatgaagaatattgatatcttgcatgatactaactcttatggaggcttctgaaaaatagattgcatgcatatctgaacaaaatgcaaatagattatgttataaaaaaaaaagcatttattctactgattggaatggaaaaaagttttcaccggcgggaacaaaaaaggggaacacgtcggcagaaatagagaattaagaaaga

SEQ ID NO: 64176 - DNA, 1358 bp, Arabidopsis thaliana landsberg
tctgaacattaaaaatgttagggtgttttgagaaatggtcaaatgcaaaactaaggatttcatacaaaagaagcctaacaaatccgatgaaattaacgtctcaaataaaaaatgaagacattaatctcaattcttagagatttttggctagtgagtagtgtcataggtccaaattttggaattctaaaagagtaatttacatgcatgcccatccaaagatagcacaactcgtgtaattgtcgagctagctcctatgaaagtaaaagaatcattttagattagatcaacttaatatgtgcttagaaaaatgttgtatgttttatcacgatttacctatcaacccaatatcaagctgtaatcgtttttttttttgacaccacttaaattgttaaactattatgcaaaagtgaaggagggagctgctggacggtccggtgagcacgagggccgaggacataattagttggccttgggactttcaattgctaaagacctaaataaatattttaagaatattcaacccacaccttttacttttatcatttcttcctagatttttgtgtgtgattttaggtcgtgtgattctcaaaactggtgagttgtggtgcccgtcctgaagacaagcccacctaaacagtggttttggatgtgtttttttttctcccatacctttgtttttttttttataacattttctagttaaacaaaaattatagatctattgtcttgtatggaaactaagctatgataaatttataatgtttttcagtcatattttggcgttggtgttcgaattcgtgactttgaaaatattttaatatccatttaaggatgatcaacttagaataccaatttgagaaccatccatgccggatcaaaaatgttaattgcatgcccctagactaagtctatacatatattaaaatatataattaggaaattttcgctttatattcttgttgaaatgaatcaatcaatcctcgtattgacctttacaatacatgtactaattaagatagaaactaagatatactaaagctttcaagtttcagtttccatataaatttcggccatatataacaatttaaactagttttattacagtgcggtattcaaatccattataccgctaactttaaatgttcttagatataaacggttgagctactgactcttgaaacttccatatgatctttactacaacgtttggtcaatatatttacccgatcgtctaaaaaatattgaatttattcaacagttataaatggaagacaaaacattggtcttttcaaaggaaaaacaacattctaaagcaaaaagccaaagcgaaaatgcccatagatatttaagtacacaca

SEQ ID NO: 64177 - DNA, 347 bp, Arabidopsis thaliana landsberg
caactttccatccactcgtgggatccgggcggtccgaaggcgaccttttttttttcagagtactggagaatacatacatcgcggatgagtgtatggacagctatgtctcgcgcgcaagtaaaggaacggcctgaatgggaaaataaaaagcagcacctagcagcctgtcctacccccggaaaaagatcccgagagagcctttcacagtgcgtgccccgggcgacacacggggacccgctctcgccgcggaagcatctcgagcagaccgctgacagccgacgggttcagaactgggacccccgagcccaggcctaagagccaaggctttttcaaaagctacggattca

SEQ ID NO: 64178 - DNA, 593 bp, Arabidopsis thaliana landsberg
gagccaagctcacgagtccgcgagcctccttggccatgaagttgatggcgtccggagtgactttgtcttaagctagaatcagatcgccttcattttcgcgatcttcgtcatcaatcaagatcaccatcttgccattgcggatgtcgtcgatgatctcagtaacaggattcattttaatgttcattttcataagcgatcctcagctggctgattttctttgagcctctgctcctggtaattaacgaaagctttggcccaaagatcgtactccacgttgacgccatcaccgggttttaaaaactgcaggttggtgcgtttgagagtttcaggaatcaatcccacgctcacgcgagagccttcaacgttattcaccgtgagactcacgccattgaaggtcacgctgcctttgggccacatgaattgacgagcataatttttgatttacaaaatcacaagccagctttcgcccttttccagggacaccactttcgcgcgcccatcgacgtgcccagagaccaggtggtcatgaatgcggtcgcccaaacgcaaagagcgctccaggttcaccggacgattcataagagactcggccg

SEQ ID NO: 64179 - DNA, 507 bp, Arabidopsis thaliana landsberg
aaacataaacaaaacataccaataatatattactataatcttcttaacaaaaaaaatactagtactataatcttaatcaatttgtaaatgtcaaatgaaaaaaaacttggcctcacgtcgagggaataacacacgcatgtacgtagatgtgaaagcacacacacacgtgacttaattttacttggtgcctcaaattttagtttttggattatagtttttgtttttgggtttttcgtttccctattagatttgccctagttaaatagaaaatttgaatgctgttaagttttaaaaaaaaaatataatgttaactttgattgatattgtcttttgacatttgtttttatgtgtgaataactaaataaagcgaatatgattgaggttgattcagtgtttatttacatgttcaatattgattcactcatgaccataaacgtaattgcatgagttgtcatagagaaacctttgatcagcgcagtctttaatttcacattatgagccctagat

SEQ ID NO: 64180 - DNA, 1168 bp, Arabidopsis thaliana landsberg
ccaaatgaaataaactctcttttgttaatatgctattgcacagatcctgtatatttttgtctacaatattgaagggagctccttttattatacctgggagtggtacgaccaagatctccatgaacaaactctttgatgtatgttccagcctgcattattgaaaatttaaaacttgcccatctttcaagaatgataatgaggtgagttagaagttgtagcaacctgggtgcacagatgcaatagaaagtagtgagagtgtccttttatcttttcaactttcatcctgaatattggaaccacaaacactgactcttactaaacagaagaaagcttcaaggtaagtaaaatgtgaaactcacgatagattatcactaaccaatgtataatcttttcacggtccagtggacttcgtcggtgaagcactcttactggtgtcttctgcaagattttctgcagtgaaatagtatagaacaagaacgttactttgcattaaaattaaaaccaagtttcaggacagacaatggattgtccctattcttaaaaaatcataaaagaaagaaacgactcaccaattctttcaggcaagaaattgagttgaagtctttctcttcaagtggacgagaaatccatacaagtgcaacatactgcttctgcagtacataaaaaaagcattgcactggttggttcaatcaatttttattacatttctaacgtaagtctttgttggttcaatattccaataggatttaacaatgctgacctgcttctccgcttctccctcgcgcatcattgcccaacactgacttccgatacatttaaggtcttttactccgacctgtagccaaaatactgcttgtaagattgcaacaaggcacacataatcaattgatacaacatttgtgttcaattaatgatgccttactagttttttctctgacttgtttatcttttcttcaacttccttcaatgattgttcagacggtaactggcgagaattctgaacctcgatcaagaaaggtctacctgaacccaacattcgtacctgaatacagctcttttatattataagcataaacttatcgaatatgaatataacgtccgaaaagggtaatttctcacatcaatatcttctctgccagcagcatggaacttgtaggaatccccaagg

SEQ ID NO: 64181 - DNA, 99 bp, Arabidopsis thaliana landsberg
gattacggaagagatttttaaactaaaagcacgacaaggacagacatacactgtgaggttatcgcaggggaaggtccaaggacgcatataccgtgtata

SEQ ID NO: 64182 - DNA, 451 bp, Arabidopsis thaliana landsberg
  unsure (1)..(451): unsure at all n locations
gtgtaggagattgcttcatagtaaatcatgactttatttacatctgatcaggccacagaaaggaccctgagtgggacatgccagagagccactgtagcaaatgatggctgggagaagcagggcagcatttgacagagattgaggctaggggaggcaggtaccccaagatagaaaacatgaaggaataaactcnagaccaacatctcggttttgtgctcctctttgtcctaggaggccagtcagagttttaagcaaggctcagggaggggcactcttctctacacaggctcatgcctaatccatccttaaagtagaacaaaatgttgttggttgtatcttctccttctggctgcttcactacatccctgaaacatgtttctgtgcctgggcgtctcgtgagtgcagatatggctaagtccatttgcatggttactatggccctatacatgga

SEQ ID NO: 64183 - DNA, 1180 bp, Arabidopsis thaliana landsberg
gatttttttttggcttcttttcttggaatcggctttgcatgactaagagtatttctttgctctggctctcaaatccaaaacaagccttcttggttctgcatcgatctgagtcctttggcttagggtttagggaagtttttgctttagagataagcaataagaaagaatgatatattaaatatataaaagtactaaacttcatgtgctctgtctttttcttttacctcggggttctgtttctagcttcagattaattaattacagtcattaacttttctttgaaatatgtttgccaagagcccgagacactatccatagatgacaaaagtcaatagttatatatacataaaatatcacaaaacaaaaggcattggttatatatatacagaatcatttcacttagtagtgttttttcttataagattatgatagaaatatggaagcatgcatgtggttttgcattgttttcctcaattaagtcaggattgtgagttggtttgttttcgagacctgaaccgagcgtttaagattcttcctcgtttgaagtaaactccataattgtccacacctaagctaaaagaaagtaataacaagtttaaatattcatgacaaggaaaatattgcattcagaaaattgttaacaacgaagtaaacatttttttcaatccgatgccaatagtctctagcggcatcaaaagtccacaaactcgatacctctgggtaaatgagcgaatgggccggtccgttgtagcccagaagagaaattgtcctctaaattccatacttccatgaattttctctgtatatcctcgtttgatgtatggtatatttgttccgctctaaatcatgaccaacccaaggtactaaattgtcatttaagctttgattggtatttggtagcatgggttaccattgaccaacccacggtactagttgcttttcttttagttttgcttttgctttattttcttagagagtgggaggacaaaaggtttggatcattaagccaatgaatgcttcaaagaaattgaatttttattagatcctcaaaccaagttggatcatcaaataatggctaagaaataattttagaacagaaagcaaagaaaagctatccgcaacaacaaccattagttaataaattaaaatgaaatgtgaaatttatgactaagtgaggtat

SEQ ID NO: 64184 - DNA, 379 bp, Arabidopsis thaliana landsberg
  unsure (1)..(379): unsure at all n locations
catcgcgacgattatacggaaagatgccgcccttgtcgcgcgtttacgcaaagacctgctcgactggtacttcgcgctcggccgcnnnnnnnnnnnnnnnnnnnnnnnnnnnnnnnnnnnnnnnnnnnnnnnnnnnnnnnnnnnnnnnnnnnnnnncaccgtgccgcatgcgacgccctattacgaaaaattcctgagcctgtggccgacggtgcgcgatctggcggcggcggacgatgcgcgcgtcatggcggcgtgggcggggcttggctattatgcgcgggcgcggcggttgctggaatgcgcgcgcgttcgcgtccgcgatcatggcggcgacttcccccgcaacgaagcggagcttctggccctggcgggcttt

SEQ ID NO: 64185 - DNA, 1773 bp, Arabidopsis thaliana landsberg
aatgaagtgattaataacaattatgaactgacataatcaggattccctggtaaataaattctgaatgaaaatgtgtctataattatttaccttttggcaaagattacgaagagcagatacttttttagcggtagttcttgatagctcgggcaactcaaactgaaaataggctctcattagctttaggtgcttatagtaataaacatttaactggcttagaaataaatatgcttagcttaataatgactacagtttacctcatatttcgctttggcaaattcctgaatgtcagaccatagaatgttggagtcaaccatcatatacgatgaaaaacttttctttgaagaagcttttcccttccctcttccttgacccttcttggtgatgggttgatcctatccaaattaaaggtttagtttcacaccttaaactaataaaagaaaaagcatgacttgtttcatcagaaacttttctagacggctccaaagaactgtaatatcctaattaaagattatcaaacatggaattataataaacaaactctgatagtacacgacaaccttcttttgatttttggcagtagagctgttggcgctagcttttcccccagcagtttgatagtttccaaagaaacaattgaggaaatgtgagactgctgatccaatatcgtgatcctctatatctcttagaatgtcctgcacaacgacgtaagaacatagaaataacattataacctactacaagcgtgtccacagataccctaactcttgttgtggcatgcttttacaacagtcaaaattaccttcaaaatgtgctttgcggatcttacagtaatctcattcagacaaaggtcccacaaatgaggcaaatgcttcaccccattagcaacctggtcgagcaaatctactgttaataaactcaaacatagagatagctaacaaaatgataacgacagctgacaaacttactcttccaatgtaacgaacattaacaccatgagcatggagtgcttctgtcaaagtctgaccatccattggagaaacttcgagagtgcaaagatcttctataaactttggaaggaccacatccacaaggtatgagctaactttcttcacattttcttcatcagcagctatctcctgtttaacccaaaaaggattcatccaatcagttaaataaattttaagagatgatcttaaaacatataacctataagcaacataacctacctcttgattgccacctaatgtgaagtcagtgaagacattggggttaaatgctatttgatcacatgatttggaactttcagaagacccggctgcataatcttcggcagtggtattttgcttgtctgaaatagatttctgtaaagaaaacgcagatatcagcagttacagtttttttcagatacaactgttatcagacatttctatccattcagtcgaaagcaatgatgggaaaaagaatctcaaagcaaaaacaatagaggaatgaacaagcaagacccagtccaattgattaatttagtagagatctactaatgtacaagtaaaattgttatttccatcattgttacagggtccatatcctatttggtttttgtcagtctgccttttcatttgacaaacattctacgtctataaaatctgatagtgagacacagcatccacataaactaatagcagccattgaacacaaaaagcagggtatatcaagcagatgtaaattcctaaatattcatacaaatcccagttaaataaacgtcagtcagtc

SEQ ID NO: 64186 - DNA, 209 bp, Arabidopsis thaliana landsberg
gtggtggtggagctggaggaggcagttggtggtggtgtaggagccggaggaggagctggacgaactttttgatccgcaggaggaattggtagtggtcgtggtgtcctttgccattccaaactaagaaaccttttcctcccttacaatgaatcacagttaacttccttataataaaccttactcctttttttaacccaccccttattgat

SEQ ID NO: 64187 - DNA, 1263 bp, Arabidopsis thaliana landsberg
ggaccaataaatgatatgatcatgaaattttttttttttcattgtacaaaataggtctttggcgtggtgggtagtatttgatcaccgccatagtatcaagtcttgagtttgatgaccattccttgcaacaattatgtctctttgcctttgaaaataatttcctttcaaaatatcattataacactttccttttcatttagtttatgcttcatttctcttagatacgttctctttgaagtattaacttccattacaaacactttatgagtttttcctatgaattaagaattgacaaaaattgttaagtcaacaccaaatactttcagcacacacatacctaaccatgtttatgacgtcattatgtgagatttaaaatacttaacatgtttcaatgtggttgaattaagcatattgccgaatgattcaacttaagattgttgatacaattttctaatatgttctcaccgtaaaaaatattataatcgtttatagatatattgtatgaaaaaaacattaaatgtatttataatttacattttaaatgatttaaatgtatatctaaacaaaaatatattagatttatttaaccccggtaaaagaacttctcgctgttttgtgactacaaagtctaaaacttttgacttgtgacattattttgtcgagaggtgcaaccattatccatggatcatatcatctattggtccatctgattttatgtcactttcctccaaaatttttttaatgaaaagcaatctcttacattcaaagagacgtgtgacagttaaccatatcatcattattaactttccaattcttgcaacaaatctatcaaaccttaggaagagccatgggtgaagaagctatagttctgtatcctgcaccaccaataggtcacttagtgtccatggttgagttaggtaaaaccatcctctccaaaaacccatctctctccatccacattatcttagttccaccgccttatcagccggaatcaacagccacttacatctcctccgtttcctcctccttcccctcaataaccttccaccatcttcccgctgtcacaccgtactcctcctccttcacctctcgccaccaccacgaatctctcctcctagagatcctctgttttagcaacccaagtgtccaccgaacacttttctcactctctcgaaacttcaacgtccgagcaatgatcatcgatttcttctgcaccgccgctttagacatcaccgctgacttcaccttcccttgttactactt

SEQ ID NO: 64188 - DNA, 2218 bp, Arabidopsis thaliana landsberg
ttataccaggtttggtttcgagattgaaccggcttaagtccatcttgtttgtcactaaacttaattgatgctttattaggcttgattagattgcaaatactttgtacattgttgaatcaagactgttaattcttttggtaggtagcagccatggctgtgttgtgcgtgcagccagaaccaagttaccggccgttgataaccgatgttcttcactcacttgttccactggttccggtagagctaggagggactctccggttaacaagatgattcacagaaacacgccaaaagaaatccaaagccatttagatgattttcttttatcctttgcctttatattttttgtatagggttatgatccactcatctgaaagtttgggggtaagaatgtgagaatataagttttcagggttgttgagttctatataattatatttgtttctttttattgtcaaatataattatatttttgtatttgtaaattgcttatatatattcccacatcacagtttgcggctatggaaaaggcaaaaacttgaaattcaacatggtatcataattcaaacgcattgctccactccaaagcgagtcattatagcctgaaaatagtttaatatactatccaattaacttgtctcatatatataaccatatataattgttagatccaaggttttgaagctaaccatgatgcatttgagaattgtagaaacggtctttgtagaccatgtagaggatctcaactttataaaatagtctagctagtttggctgtgatgtgaatttttgttttcgttgcgggttctatcattttgttggcttataatactttctttcaagtgttttcttctccatgctctaattgtgtcgcatgttaatcgtgcgaaaccaaaatattgtttgatcccacacgtaaactgcgtctctattgaactcctttttcggaatgataaagtttaaacgatcttttaagaactctagtatataaaatgttgacgttattatagacaaagtttgagtagtcggatcaaaaagtcaaaaatgattagatatttcgtatagtatgactcaagagtcaagacggtggcgtagtcggatcaaaatgtcacagatacaactatgaattatgtttgagcaaagataaagaaaataacaaatgagatttgatcattgtcaacgacgaaataagcatgatcatgggcaaagaacgtaagtttgggaagagtaaacttctggatgagaaagatggtttagtctattgtggcatagtgacggttctgatggaggaaccgggcctcgctgaagctggttatgtaaaccatgcaatcgtcctaaatccttctgccatattggcggcctccccgaggttcctctttcgaccagagctagaagacacatcaccaaaatgaatctccacattctttagttgaaaaaggattagtggttatatgttaaactataacacaaaggctagataacaaaagaatattttgagtaagaagtgaaaatatgaaaatgaaagaagaaaacgttgatggaactctctatatgtgtgtaacatatatagaggaatagagagtgggttgatttgaatgctaaattggtatttttgtcaacttctaatgataacttttagaaaattgacttgttctttgttataacattcattaaaatgttcaactttcgcgtgtagatttcaagatgcgtttattcaacgttgttatggtttttgggtgggttgatcatattttcaactattattatgtaagcaaccaaacattacaagaaactaggatatgtcatctctttttttaatcagtaagagaatgttgtaacttgtaagatttaagcatcaaaatcgcagagccaacagtcaataacgacggttggaacataatcgaaatggaagcaaaaaacacagccgacaaaaaaaaacaaatgaccacacttcaattaacaaatataggtgacacctaaaaacattacctctctaatacatcattgctttttgtgttgaccattacgttttgtatgttttttcaacaaaatccatttatcaattgagatgtataccttaaacaaactgctgctcaaagggagaaggtagaatttgagtataattttagacacatttgttttttaccaattattggataaaattcaaagaatataaactaaacaaataaatttagatagataatagatttttgccaaactca

SEQ ID NO: 64189 - DNA, 510 bp, Arabidopsis thaliana landsberg
atgacacaatgttcttcctgcctttgcctttattatggcatggatctttatgtattaaaaacttataatttaatttggtccagttttggtttttggtctaaagagatcattatttttgttgcgtagacttgagaaggttaacgtcaagaaaatatacagccaagccaagattctaggaacaattgtgacagttggtggagcaatgcttatgactgttgtgaaaggacctttaattcctttgccttgggctaatcctcacgacattcatcaagactcatccaataccggagtcaaacaagacctaaccaaaggcgcaagcctcatcgctatcggttgtatctgctgggccggttttatcaatctccaagtaatttaaagaccaatatttatatattgttcaatacattagaaacggttatatatagtactaaaccactaaaatgattgtttatgcaggcgatcacgcttaagtcgtacccggtagagctatccttgacagcttacatatgc

SEQ ID NO: 64190 - DNA, 170 bp, Arabidopsis thaliana landsberg
gcatagatcattctgtcttgtgaggggaaggggcctgcaagaccatctcaaatgaacacttatatctctctattagaggtgactctattcaaggcattggctccaagacactccaaaaaagctctaaaatatggaaaaaaaagagaatgcaagacttattatagaacaaa

SEQ ID NO: 64191 - DNA, 181 bp, Arabidopsis thaliana landsberg
tctataacaaaccaaaaccccaaatcacacagaaacaacaccaaaccaacccaaacaacttgaataaacacaacacacccaactataccgacaaccaagaacaccacaaaaaaaacaccaccccaacaagaacaaaaactaaacaccccacattccaaaaacaccaacaacattaaaaaaa

SEQ ID NO: 64192 - DNA, 2304 bp, Arabidopsis thaliana landsberg
accaaggacaaacgaacagataaagaaacgaagaaaagattctcttgtacctgctctttcttgacccctgctgggaagggggcttctttcacatactcttccattgcttgtagaaaagaagtgggaggcttcatacaaaacaagatatggtgaggaaaaagctcagacaaataaccgaataaatattcacatttgtaagaaaatccaacctgctcaatctttataaatctctctccacgtccaacattaacacttttgcaaacttcgaaaaattcagaaagcctccctgcctgaacgaccaatgaaaccaaacttaagggggttcttatgccacacaaacgtgaaagaagaaaccaacataccagtcagaggttgtatgtacctgttttaccgctcgtctgtacatatccaaagccttcacagcatcattccgttgcatatcaaagaactgtcatcaagaaaaaaattgtgtttgaataagtcaggaaaggtagaaaatatatccagaaaaagagcttttgcgtaccttatcaaccaaattgtctatgccatctgtcagtgcttgatatattttagtgctctcagatataacctaatcggtgagaagtagattgaaaatcataaatgctgttaaccatatttaatcgaggagctattaactccagttaattgtatatagcataccattgagagtgctaattggataatgtggttttgaacagctgccccttcaggctgcaaagatgcaccaatgttgaatgagtgtaaaagagatacaaatcttatccattgctaagaaaatcaacatcaaacacaacagaagaagtagatgctgagttggattatcacctgacagtcaagaacacggaaaagaagttcttgcagagcaggaagttgctcgagcaaatcaggagtgtccaaatctttggttctctgtatttatagcacgttcttgtgatttcaagagtgaaagaaaactctgagagctcataacaaaagagatgtaaccagacacttactggggggtcaacctcaacatcgtacttcaaaacacggaaacactctaatcgctcctctaagaatagagcatagaaacggacccaagcagaataagcccaagctgaaaataggggtgaaagaaagataagtgaaccaaagagcttcttgtataaaaaagattcaacgaaagtaaaaagcagtctactaccatttggaccagaatcatctttaaaatgagacatattcagcatatgacttctgcttctgctataattaataacttcttcatgaaatgtctggtccacttctctcaaggcacggtgaataacaataagagttttcagtgcaacctgtaaaactaaggagaatcagtggcaagtactaaatagaaaacagccaccttttctttacaacgatagataatcaaccgaaaatgaagctgtagacagatcatacacacctaacaaactaagaattcccaactactggtacatatctagcaattccagttgtttccagagttctaataagtaaacctataggaaggccatagaaaaagccattaccgcccagttatgtgttcttgataaccgcctagcaagagcatggatacaataagccacatctgcacgaggccttgttgctgaaatagccataaaaatagctgcaaagagacacacacaacttgtaatacgccatttggtatatcgaaatcaatggcgcaaaagaacatttgcaaccaaggcactaaccatctatgatctatgatacccacctctgatgtatctttctttagaaggacgttccacatgattagtagccttcacaatagcaatatccaattcctgcaaaacaaaccgttgttagcttaagcaaaaacagaattcacttgggaacaaagttagttttttaccttgtaatcactattgaccttagctaatgaaactgtggtggtatctttaatagctccaagatacctccttaaactactctgtgatccaccaccacctgacatttcgtttctccctccttaaacaatagaaaccctgaaaatatttaaccttgtaaacagtcttcgactttcacaaactcatcaacaaaacctaaagatgaaaacttttctcttgaatcacaaaacccttatgtcagctaagaacataaacatcaaaatctacccaaaaacacaaactttttattgtttgatcaatacccataaaccctagattcatcaataaccaaatcagtccgagaaacatgagaaaacaacgaatcgagatccgtaaggagaagacttaaatacctgat

SEQ ID NO: 64193 - DNA, 2062 bp, Arabidopsis thaliana landsberg
ttttccatttaatccgactaagtcgtaatatttggaagatatacctatcatgagtaaccagttttatttatttctgatccatttccaaggttacttaccgccttatatttagcccaattataagatataaagaagcaagaatcaaccttagtcattgtaagtgcaaaggctgcctccaaaacttaaccaagaaaacttaaatatgaactccttttcccccatcactaagacactaatcattctttttgtttctttaattattatatttcttgttttatgtttgtttattattttaaggcttatctagattgaacccatcttaatattacattatgacttattattattgaatttcaactcactttctaagccaataaaggtgatcgatggacatatgcttttggccttatgccagagagttattgatttataccagttgcagtctcaaagcacataatatgaccttacacatagacaacagtcacaacttttcatatctttgtgtctttaaattagaactaagaagatttatttatatatgtacaactagtctgttttgaataaactaaaacaaaagctttaatttggcctaaagaaaacacaatcatttggaagatgtggtaattatataatacatttattcgaaatctccttctcagccttcttacttcgaataacatatctactatatttttggcatatcaatagtttttatggagttttaaaagtatgtgtataaaagaagtttaagaataacaattcaaaaatatatgtcatccataaacatatttcttctactaccatagatcatattaaattcatttactacacaagtttatgtttcaaatactatattttaaaacatgttacataaaccaatcatgcgggtttttgagtttgttctcgtcacactttacacaaaacaatagaaaatgtctttttgaggaaaaagaattaacataatttgatgtcatagtaacatttattccgatttgtatccctcatgaaattcaaaatctccctcaatctcaaaatcttccttctagccgtgctttaccaaggcattccaaatcaaactatttaaaccgcgaaaatcctcatgaaaccaatggcttcaatatcacttgaactccatacttaggttttaaagtaagcacaacgattggggcatgcctataattctttgatattgtgaagttaaactttgaaattaacgtggctaatattattttagcttccatcaacgcaaactgttgtccgatgcagttccgtggaccggctgcaaatgggatgaaatggcgaccagacgcgaatggtctgcctccaaaacgttcgggattgaattggttcgcgtctttaccccataattcttcactgtgatggatagcaagaaccggtatccatattgataaacctttaggaatggttagatcacctagttttagatcttcaaatgccatccttggtagaagagtagctggagggtaaagtcttagtgactcgttaatcactttgcttaactgttccaaagacaaagaaaaagaagttagaagactattctattaattcattttggaatcatatctttgtgatcatgcgaagtgcttcttgactctttctcaaacatcttttagtttgggaattgacttttccttttgaaaaaaatatcaatgaagctgtcaagatctaatcattagttaatacatgtttagatttcttagataatattttatgcaaagcatgccttagtgctaatcactaaacaaatggaagatgtcttatttaaccatttatttatgcctgaaagatctatttaccaatatctatatcgtatcaaatttcaaacctggcttaaccaatgctaatcatatctaaatagtatcactataaaactaatcagaaagtatgattctatggtaaatcggttataataaacatgtaaccgatttaacccaatatgaatatatctttaaagctcaataaacatacccattgttaaaaaaccatttttggggttctaactaggattgaagataaagggaataagaccaaattaaatgat

SEQ ID NO: 64194 - DNA, 1202 bp, Arabidopsis thaliana landsberg
aacaatctaagtgaagtcgacaaaggtaacacaagtctctgcgttgatgatagaatctgtttcccagctttacgcgaaaagctacatttgatggaacaatcactcttctttacagtaaaagaagctccaggaatgagccaggcattgctaatagaagaaggtgtaatcgtagccatagctaagaactgtcacctacacatagaaaaccattacacactgtcaaaattacaagctttcctcagacaacaacacagactaatctgaaagcatatgaagaaaaggaccactctttttctcaatttcgaattgaaatttcattgtagtctaactagaaaaactcaaaattttccattaagaaagctagtaaatttcgaaccatcttatcacggaaacataagaagagtaactaagaaacccatttgagcaaagctaagaaaaggagctacctttaagctcgcctatgctctgaaaaattgctcccagaaagagtaaagcgagaaaagtcgctaagtttcggtgaaatgttcgcgtttgacaaataagcacgaagcgaaaacgaggagagtggtgagaggcttcaaatccttatctcattttgtctctcccctgtgctatttttatttcgttttccctctcttggtggatagaggagataagagtcttcaaagattactacaggtgattgtctttttctctctctcctgcgccatcaagactcgagcttcaatatgggcttacgggcttcatactaaggcccatcaagagcctatatcgatgtgaaactcccccccagacattacatagtagcaatgcctccttttcatgctggttcatttcttaataaatcaataagaggcgtcgaacaagacttattcaacattttattactaagagtctaaaagactttagtttttgaccctccaagtcatacagataaagcctatttagatctttttcatattataatcatatggttttgaccaaaaaaagaaaaactgatggtaagatcattcatgagaggaaaaaagaattgcaaaacgatgattttttttgtactagtgcttcttctggtgctgcaattcttctccaacaaagcactttctcagagtgaagaaggagagtttggttttaatggtaacttgtacgacaactctggaattgcaattactaactccaaaggcttatgaagctcacaaattcgt

SEQ ID NO: 64195 - DNA, 742 bp, Arabidopsis thaliana landsberg
  unsure (1)..(742): unsure at all n locations
ctcttctctgtttgggttttcttttcatattccaaagaagatcatttacttttaattgtgacaatggatatatttattataagaagataaatgtggttgaaaatattatgataaaatagtgcaatagtagaataaaataaaaatactaatgactgaaattttaacctattctaactaaaaacactttcttttgcaacatctatattgaaaataaaatgtaagtattatgttacttacctatgtacaacttattctattggtcaatctcatttatctgttttacattaggtaaatgactaaatgtactttatttttaatgtttactgtatcacaaggatttttgtattaaaattttatttaaagtgttaaaccaagaaataaatatttgaaaaaggccaaaattagtttttgtccactttttaaagttccaagtttaaatatttgatgtagtgaataattgattgtcttttgataaaaagataagactaggttaataagattagccgattaggtttaacttattctaaagtatgacgtaaaaaaaagtatgacgttggtaaattaatataaatttttgtatatgaaagaaacaatacaaaatgaaatggtttatgaagtcaccggccgtaatgacgacaacnatcatggacacaactcttttgatttggttaaagtatttgtcgtgatgggcccccacctttgtggtttgtgaatgtgattagtgaactaattttttgtacat

SEQ ID NO: 64196 - DNA, 1288 bp, Arabidopsis thaliana landsberg
agatgagtagagattctgaactctgtaggacctgtggaacaaaggtggatagtgccggaaagtatataacatgtgatcaccctttttgcccacacaagtattcccacatcaggtgcttgacttcaaggcaaataaaactacacggtgtccgttggtattgctcgtcatgcttatgcagaaattgcctaactgacaaggatgatgataaaatcgtcttgtgtgatgggtgtgatgatgcatatcacatctattgcatgcgacctccatgtgaatcggttccaaatggagaatggttttgcacagcatgtaaagctgcaattcttaaagtccaaaaagcacgaaaggcttttgagaagaagatggagacggtgcagaaacagaaaggaataaaacccaagaatctccaaggcaaaccgcaaagtaaagacaatggagaattggatcaaagcgtaggaggaatggacatgcttctaaacgcagctgacacactgaaagatgaagaacagatgacattccaatccatcaaatgaaggattggattgataagcaaacaagcaaaatacagcttcttgtctcatctacctaactttcaacactttaatatttgattcttctccacaaatttgttttcgtttggttgctaacttttgaaagcaagacaaaggattctgaagggtaaaccttcttctaagagtaaattcttttcatcaacagtgcccttttgatctgctgattttgcactttgtttaacattataatgaactgattcttgaccaaagagatgatgcttcatcggataattttcttataaatttaatctattctacaatatcttacgagtaaaaactcaaacaacaacaaaaaaaagcttaatgagtattattgttacgaggccgaccaaccatagaccgtaagggtatatataacatgtgattaattcatcgaacaagataagattttaactaaaatatttacagtagttaaataacataagatttcacttattactattagatgttcaaatcaatcaaaataaatctatcaatctttcttgttttgggggcaaacaatcgatcaatctttttctataatcggtattagccacttcaatagatggttcaatacttagataattgaaaaaaatgaccgttgagcccaaaaaaagaaaaaagtattagccaagaagcctaagctaattagttgttgagcccaaaaaaagagaaatgtattacccaagcagcctaagttcaaaataaaatatttcaagataatgatttctgttctacct

SEQ ID NO: 64197 - DNA, 742 bp, Arabidopsis thaliana landsberg
  unsure (1)..(742): unsure at all n locations
gtcgttgctggtgaacagggagcatccggccaggccggccacgcccagcgccagcagcgtctggcgcaaaatgcgatacacaatagagatgcgcatggtcacgccccgttcaaagcgtcgatcttcagttgcacgatctgggcggccggatcgtggccaagttctttgatcgcctgcgtccaggcctttttggcttcgtccttcttgccctgggcggccaggatgtcgccgcggcgatcggcgtacagcgccgcgaacgccgagggcggcgtctgtatctgggccagcgcctggtcatactgcttctgttgcagcaggacccccgccaggcgcagccgggccagcgcggccagcgccggatccttgtcgttcttgatcagccattgaagctggtctttcgcgccgtcgaggtcattgcggctttccagagcctgggctgccaccagcacaccgcgcgacgcatagcccgtggacgcgtaatcggtgcgcagcgtctggctggccgccttgacccgcgcgacggcgtcttcgcccggctgtcccgccgcgcgttccagcgcttcgaaataccccatggcctggctggcctcgtgcccctggtaccactgccagccgcgccatcccacgaccgcgatcaccgncgccaataggatgaccgagcacagcgtaccgtacttgtcccaccacgcacgcagcgcgtccagcttttcctgttcttccaagtcgtatgccatgcgtcaaa

SEQ ID NO: 64198 - DNA, 549 bp, Arabidopsis thaliana landsberg
catgctggggcagccatatggggcaaactatctttatattatccatattgtaaattttaatcaggttctaaaataaaatatacagaagtttatcaactaaaatgatccaaaatacttaaatatacagacatttagctccaccatacattcaacactcatgaatgctaatcatgattagcatatcaacaccattaattcgttttgctaattgcttttgccccatcaagatacgtcctcatttgtttacacacaatgggaaacgcaacaacgaacatatgtgaacaataacaattatatttcgatacatacgttttcgacgattgatgattttacacttaaaatacaaaataatgtgtgtgtagtcattgtttgagtattcttaaacacgtttaagaaaacatcaaaggggtcatgttattcgattagtactttcttgatgtttaattatcaacacatgcgatatatattgacatttgacaaacacaattatttgcgtcaagactggtgatgatcaagaagcgactagctagtaaacagaggaagaaacga

SEQ ID NO: 64199 - DNA, 1407 bp, Arabidopsis thaliana landsberg
acattcatataatctgaaaacggacctatttccctctctcaatagcttgatctgtgtcatcgatcattgagtttcctttatccattaactcttgattggacatgtctgagagttattaagtttccagtaaatactctagttaggttgtatgtaatcatataacaacaaagtgcaataaatatctatctcattgttagttggtcgcaaaatacgagatttaaagacttacttgaagctaataagacattttcttccatgtgttcttctccaggtccatcgaaaagatctactcgcttgttattgcttgctaggtttgatgagtatctgtataaccatcctcattatcatcaatcaccataaatatgagcatcagttaagcaattagcaaaagtgtgacctacttcttcttaagagcaacatatgagttgagttccttaaccatagattgtcgtctatcgttcaacatccggttagtgctggcatcattaccgctttccaagcttttgatttccctatcgaaatctttaataaggctgcaaagaagaagaacaaggcatcatcatcatcatcattggataatcaaacaccagattcaatgaatgtatacctcttacagtcacgcattttgtcagtgagttcttccagctgcctactctgcctattagcatctttgatcttctccagcttctggaatccatttctgtagaaaacaaaaacatcaaaacattattatatagacacaaataccaaatcacaaatggagagaaaacgctagagagagattcattctcacgataaagcacggaagatgtcattgatttgtccttcgatctcagccagctcttcgctaaccgctgatattggatccatctttacacagattcccagaaaaattcagtgccgatatacaaaagacaacaatgtctcttcttcagatccacgcgagcagtttttgaaaaatgtcgaccacgaatcgactcgccgagattagatccgatggatctgaaatcgaatcacctccaacgaaaagaattgaaagcctggtgtcaaaatcgccgagcaaatcgtaataacagaacccgtgttttttttcttcagatctaagaacaatgtggatgttcaaaatcgataacgaagagatagatatcaaaatcacgagcacgagctctctctcccctacacccagattttatttgttttgtttttccctaatttctctcggacattttttgtttttgttcttggggaattctaaaagctaattttttgccattgatttggctcgaagggacgaaaatgagagattttgaaaaactgcccccccgaaacccagtgggacccgccacgacatcgtttgtcagtgttggaactcatataacctgggacgtacgattgggacctctccgg

SEQ ID NO: 64200 - DNA, 775 bp, Arabidopsis thaliana landsberg
actaatacaatagcatgtttaccagttcaattagtcggacaaataccggtaatgaaacaccaatagagtacggatgtgtcgtgtgtgaaatatttcaggttgtagtttttgttagtttgtcaagttgatttatggatatattaattcacgtggtcaattatttacgtcgaagatgtgatagatatttagtaagccggactataggaacaggagtgtggaagcctcacgtggaatagcggcggagaataatctggatggatggcggtttatgccgaaccggggaaggttttgtttcttagacatcgtgagaagtcatacgttatgtccttaagattttaaaagctacaagagccactagctatttttcaattccaatatgataaattaattctttgtaagctaaattttattttaatttctaaataaatgctaaattttggataattaaccctaaagccataaacaattcagaaaaagataacaaaattataacaagcctattcattgaaattcatatatgtacaaaaaagctataaatgttcatagtataaatgttttatgtactataatatgtatggatatgcatgttcatataaacataaaataatagcagtgattaatatgagatatttagttcataatttgaatgtttatagtataaattttgctaactttttatatatttaaaaatgacaatatatgaatgttaataaccaaacataatgttggcacctcgatgtatactaaattgcaggaagatgatacatataagttg

SEQ ID NO: 64201 - DNA, 1523 bp, Arabidopsis thaliana landsberg
aatcgaatacttaccagccgtggatctgcaaaacgagattttctgaataggaaatggctgcgcagctggggatgccacattagatgtgcttgataaagaaggagctctgttcagtgctggcgatgagacaggactgatgcttgtagaattctttgtctccattgctttagcagcaatacgaaggatttcttgaacctataggcatagatcacagtgagaacaaaattctgaagtttttctgacaacaacaaagctctaatggaccaaccttttctgatggaagtccatcaaacacagtaacacttccaccaaagaaaatagtaagttgatttggaggaaccgttggctcagcggtttgaatctccgtggaccttcaatagcagaagatctattaaacttgtgaccgacactataaagatggacttattgatgcaacattaagaaaactctccacatatgaatccagtctctccaatttcacatgttaacggtgaagttctattaatcaaattcacatgaaaacttatgtatgcattaaaggactttgaagaacacaagtttgttaagaatccaattgttccagccaaaaaacaaattggttccattgagaaatatgactttccctaaatagaaactaaagtaaccagatcgaaatgctgatcttccttatcagaaacaagatacaattttaagtactaaactcaaagcaaagagagaaacagataaaaacatgtgaaatcaacagtaaacacagctcatacctaacttcgttaatcgatttctcaacagatccggtaccgccgatctcagccgcgccgccgtcaccgtcggcaacaccacatccaccttcaacggaagcgcgtggctcatctttcaccttagtcatggcttgtctctcaaaatttgtagatctgtctttttccgatgagaattttgatacttctctcccttatagtacttttgtttcgcttcgtctctacgtcgttcagaccgggaacctccgagatttatccttctcagaagctcctgtaatttgacacctggcgatagatattgatttttattgtttgacttttggtgctacgacagtaaaagacaacaagagggtaattagaaacgtgctcgaatatgatacggtgtcgttggccttctatgtgggacatgctttctcatttcggttatccggaactccaaacgtgtataatttataagtggctgagacgttaaactaattgagtttgctggaccttgattcattgggctcttaaagtacgggggggcttagtcgtcttaaaatgacttctaaaatggaccttgactgcttacatttataatgttactctttctattccataagcctctgtacatttaatagtctttttcagtaatcatttttgcctacccattacgcaaaaaaaccattttttggtattggattcgaccgtaacttataacttcttggataaaggttaacctaaactttttagttcttaccgaagggcgccctaaaaaactgggaaaaa

SEQ ID NO: 64202 - DNA, 1709 bp, Arabidopsis thaliana landsberg
  unsure (1)..(1709): unsure at all n locations
gtgcaaagtatagaccgggaaactgaaatgaaagaacaaagttgagatagaagaagaagatgaagtgaaacttttggtctctgcttgggataatttattactaaatgaagaagacttcttgaagaaggtaggtattaacaaatccgatgtaccaaatggtccacatttggagaattgtgaggagaaggctcgagttagggagcgtttggatacacggttggcgaactggacacttcctccttgggtatgcttcttctttttcttgttctttgtcatcaagcaactattatggtgaatgaacaatcaaaagcttgtgttttagatcagtggaggagatgaagagaattatccgttaacgaggagagtgcaaagagatatatggattcatcagcatcctttggactgtgaaaacaagagtctcaagttccttgtagctgattgggaaacacttcctggttttggaataggagctcagattgctggaatgaccggtctactcgcgatagctataaatgaaaaccgagtgcttgttgtaaattactacaaccgagcagatcatgatggttgcaaaggtacataaaggctttaatcctttgagtcttcactctaacatatagcagcaactatcacaaattacatcttcttggttaatcttcttatcaagatgttttagacgctgaaaagtgtatataagaaccaaactttggatttgatttggtgtttctcttttgttttgatgcaggttcttttcgtggaaactggtcttgctattttctacaggaaacgtcagaagagtgtcgaaaacgagcctttgcgattgtgaagaagagagaagcgtgggagagtgggattgttacagggaaacaaaactatagcacaaaggagatttgggctggggctataccaaagcaatggggtaagccttggagttatatgaagccaactacagaaatcaacggaagtttaatctccaatcatcggnaaatggatcggagatggtggagagcacaagcagtgagatacttgatgagatatcaaacagaatacacttgcggtttgatgaacgttgctcgaaattccgcgtttggaaaagaagctgccaagattgttctttcagctggagattggagaaagaagaataagaagatgaggacagagattgaggaacaggtgtggtcggatcacaagccgtggcttccaaggccaatgctgagtgttcacgtacggatgggagacaaagcatgcgagatgagagtcgcagctttagaagagtacatgcatttagctgatcggatcagagatcggtttccagagctcaacaggatctggctctctacagagatgaaggaagtggtggacagaagtaaagattatgctcactggagattctattacacggaagtggcaagacaagtcggtaataagtcgatggctgagtatgaagcgagcctcgggagagagatgagcacaaactatcctctggttaacttcttaatggcgtcagaagctgatttcttcgtcggagcattgggttccacttggtgtttcctcatcgatggtatgaggaatacgggtgggaaagtcatgtctggttatctcagtgtcaataaagatcggttctggtaactttgcgagttccacactatgtacataataagactcctctccttttttcttcatctgttgcacaaagagttttcagtataata

SEQ ID NO: 64203 - DNA, 189 bp, Arabidopsis thaliana landsberg
  unsure (1)..(189): unsure at all n locations
aacagaccaccacttcctgtataaggaaaccatnatgcagcgtattcaaatgcgagtaaggaaggcaaacgctgggcggtgcaactgggtttgcgcggtgagtatacggcgtctgacggacggcatgctgggtaacgcattaacaacctgatatatcattcaaaagaacctactgctgtattttacaca

SEQ ID NO: 64204 - DNA, 242 bp, Arabidopsis thaliana landsberg
  unsure (1)..(242): unsure at all n locations
caaagaagngaggagaggaaaaggacaaaacaaaagggaggccaagaccaaagaaaagaaaccccncnaacccggccccccgagaagggcacacgagncnaaggagccccnnaggaaaccgcaaanggggagcccnncanccacacaacanagaaaaacaagnnaancaaagaaaaacacaaacggaaaccaagncngaancgaaaaangccaaagcaaaccnccaaccaagagcccgacgc

SEQ ID NO: 64205 - DNA, 532 bp, Arabidopsis thaliana landsberg
ttccttgggcagcaactttatcttgctggaaatcagataacttcacttgctagtctgcctcaacttccaaacttagaggggagcatcagaaattacaaagcctcttgttccaattttgtgccaaataattgctatcaagtcttcatacttacatacttgtggattgccccttactttttccaactatcacctttcttgttcccatggtagtttctctcggttgctcaaaataaattaaagtcacttgcaatggcaagccagccccggcttcaggtagattttctgtttcagaattgaggttgttttcagtaccttgttacaagtcatagttttttagagatcttataattttttttttctcaggtactagcagcaagtaagaacaagataacaactctgaaggactttccgtatctaccagttcttgaggtttcaatctttatgttcccaatttttatttttttcacacatttcttatttggctgattggttgtcgcatgcactgctttaataaaacatcttatgggacatg

SEQ ID NO: 64206 - DNA, 1244 bp, Arabidopsis thaliana landsberg
ctttcccttctggcaattaagcggggtggcaattatgtttacagtaaaggtcttaagcttgacacatacttagatgccgggatagttactatcatgctctgatataataaaacattttatgggacatgagattacctagtataaacgattgaaaaaccaccacttatgggaaattctctcctctgaaccaatggtccaatttgagtacttaattttttggtaatggcatttggccctgttataacagaaacaatgttccattaattcaatacatatatactaatacgtagtttgtaatttcatattgtgtttttccttttacagcatctgcgggttgaggaaaatccattgctgaagatttctcacttggaagcggcatccatactactcgtaggtcctaccttgaagaaattcaatgacagaggtactcttttgtagaacgaagtgctgtagtttgcttaagactgatcgtttcatgagaaagatgactagcatgtctaagttttcattcatcatatggccttccaagtaagaatttttctgatggtgaaatctgagcaatagcatgttagaagaggtaggagattttgcgatgttagatcaatggagataaacacaaatgattttatctttatcaattgtttttgataatctggatggaaactacttctgaacggttggatttcttggaattgtgggaataacacaactaacatactggctgtattttaaaaaataataaccgcaatgattaaatataaaagatttaggaatgaagtgttttactgatacattagaaagtattcagaagttgtttcttgggatgtagcttggcatttatctaggtctatgtggtccatgataaccttaaaatttttctttagatctctctcgtgaggaagtggcaattgccaagcgttatcctccacaaacagctctctgcctcagagaaggttgggagttttgcaagtctgatcttgcagcaggtatgtatccgcctctcagagttgtataatctttcattgtagcttgatggtagtgcaatcttcatatgaaaactaaaacctttcactctcccttgatttttacttgttaccaatggtcacacttagaaagttgactgtttaatcaaattagcattttcatccctttcgtactagttgctaagtgaacttttatgtgaatagataagtccgtctgttcaactccagttccgtatttgcatctaataactttaaatattc

SEQ ID NO: 64207 - DNA, 964 bp, Arabidopsis thaliana landsberg
gatcttgtcaatttttgaaaaaaaaaaatctgaactttgagaaaagttattgagtttcgatatctgtcggtcatggtttgattgtggctgttgggtaagacaacaaattaggtagggttttgtgatattgatgtccgtagtccttaattatggccaaattgttgtcttttaggttttgacagtagcaaagaaaagctgaatctagttagaaattgcttttgcagggtttttgaatagtttgtgtattgaagattgtctgaaatggaagcagctattactcagaggattcagtacccatcatgggttgattgtagaaaagttgagagtaagccgcagcgtggttcattgcggtattctcagcaggttaaggtagatagaaggtttagaggtctttctttggctcgcttgcaacctgaaagaagaaatgatcaacgaagagcagtttctccagcggtttcctgttctgataacaattcctcaggtggttgtgaaatcatatggatgcttacaacataactcaatttgagtgccatatcttcgagtgtctcattcgatctttgatttttgcagcgttgttgtagactggaagtgtttatccatttgatgaagatattctcaaggcaagtaatatacccttttatagcatctagtgaaatgtttttcttcaataacaatcttactgagcaatggatacatgaactttgcagagaaaagcaaaaaagtttaaccgtatttgaatggaccatctatgtaccttgtcgggcagattctttgtctgctctatgtttgcatatgggctacttcttgatacttatatgtaatctgatgattccgtggtgaacacaggaatgatgggttctgggaaaacaactgtgggaaagttaaatgtccaaagtgctcggttatacgttctttgactggtatgtatatgctactgaagcaaagcctttatatgttttatatg

SEQ ID NO: 64208 - DNA, 476 bp, Arabidopsis thaliana landsberg
gaggttgttctgatcaaacctgattaaaatgctgttgaagtggttcattggtcaaagtgaagctaaatttttcaaaactgcattaaagcttgctattgggagtactaggccagagcataatcagaaacagtacagaatatttatgtaacagtacacaatggagatatgtggtacggaaatattcattagttgcactatatgtgttgaatcaaacaggactgttcttacaaaacaaggttagtcagataacctcacatgttcacaatttgatgggcagtaagaaaactcaactgtccatgtgttgaaagaagcactagcttgactattagacttggcagacccatctattatggtgaaatgatagactacgaaccagtttattaaagaaacccatctaaccatgtatgaaaacaacaagcgtaccactatagccctgtttgtcttgaaactctaaaatcctaaatatcaagaacacc

SEQ ID NO: 64209 - DNA, 758 bp, Arabidopsis thaliana landsberg
  unsure (1)..(758): unsure at all n locations
gncggtctactgtgagagatatgtataatagcttgggggatcttggtaaaggcaattctgtgccatcacagttaacttttacccttttaggtgttattccttactgtacaccctgctgaaacgggcttcaaatatcaaaattctcaggggatgttgctcagctatgtcgacaaacgcaaaagctactggttcctccacctccacttctagttagagatgtgttttcaactctacgaaagataaggtaaagagcttaactggtaataaattaaatgattgtctatggtctccagatagctattcggggtcttgaaagtaagtggggctatctttaaatggtaaatgttatagatagactttctacttgagcagactcgtatgtgatttctgtctggtaattcgttaaagctttctttcaacgaaagcacactttcattgttagtggatcattataatgatctttgttctctacctctcatgtttttactaacatgaggtcattccagaaagctcctaacagtttttctcagtgtgcagacaggtactggaagtactaggctaaagaaaaatctcatcgtgaagctaatgcgctcttgtagagagaaagagatcaaatttcttgttagaacattggtaagagtttctcacaaatattttttcatcatattgttcacaagttccgtgttgtaagcagtgatgtccctgttcaggcccgtaatttaaggattggcgctatgttgagaactgttctacctgca

SEQ ID NO: 64210 - DNA, 557 bp, Arabidopsis thaliana landsberg
ccgtggttacggcccggtcttcgacgccgacaggcaaggtcgcaccacgtggttgaatgtcgggtcgatgcgatcgggtatgggttaagaccgcgccacgtggtcgaatttcatgctgcgtgaagtgcaggaacccctcgccgagtgggtcctaaatcgcctcggtcagagcccggtggcgtcctggatgttctggatcgcggtccgggtctgactgcgcaactgcttggcggcaacggcgtactcccgggaggagttgctggacagcatcatcagggcagcgatctgcaggccgagggcggcgacattggtgccgagggggtcgggcaagacaccgaagtgatcgatcaggccgacggcgatggtgaccaggagtacgaacatcagcaccagccgcggcagttgtcggcccctgatggtgagcacgatcaacacgagttgggctgccaggacggcgacaccggtcacggtcgctacgccggagatcgggttccccggcaccacagagaattgtccggtccgcaggaaatcggcaatcccgatcgcgatcagggttg

SEQ ID NO: 64211 - DNA, 518 bp, Arabidopsis thaliana landsberg
  unsure (1)..(518): unsure at all n locations
tgtaggagtaagattctgctacggatatgagacctgtcgtctttagttatatgggccgaagtcagaggttgataacgagcatagaaatatcgtgatactgaaaggccaaaatggcccacattaatccattgttcatcgtatggtcgaagcctaaaaatttcagctaggaaaattgaagtaatatatcaaagaggcaatttcatcattccatctgaatatctgatcttgtcttgtaattagaaaaataacatgtttagagtgtgttttttttctcgggtaaaagaatggacacagtttaataagtcaaaagctagaaattatgttttgtcatctgatacgaatgagcgttaataatttcaaacgttctaaatatggagaaagaaatctcaaaactgttatcgattttttgtctgaaattagacggttagataagataagtttctatatatgaattannnnnnnnnnnnnnnnnnnnnnnnnnnnnatacctggatcaaataggataaaacatgaaagat

SEQ ID NO: 64212 - DNA, 1169 bp, Arabidopsis thaliana landsberg
tatttctttcgatatcttgcttttctcatctaatccaaatgatagagtccttgtggatactctagagcatgagtattggaattagtataggctgcttgtagtggattatatagctctgctgacaggtcagtaacacctggttcttaggtagagagctaacaggttaaaagaaaattggggcagaaagagttgggatgttctggatttgtctaggggttaggatttgcagttgggtcgagagtagagttgtgcaagtctctatatgatgagtattttgattctatcaccgaacaacttaatatctcgatctaatactcttcttttatacaggttcttgaggtcgggtgtgtatcttgtcttggaaaagctagagctccaagtctaccagagactcatgaagaaaatgtaagcaaagacaagctatgataccatccaagattcttgagtttataactcttattattatcaatgtttcagttatataaaccagaagctgagtgatccagcgagagctcaccagctgaagcttgaagggattgccaaagcactaagatggctagatatggacatggatctggacgaggtttgttctacaatcccatcccattcattgcttttgacttcttctaaaattgaaatcttctataaactcacagttgtcaaaataatactgtatttgcaggtggaatgtataatgacgatattgatatacaaaaaccttgtgaaaggttatttagctcacaagagcaaagtggtagttctaagcaagcaagatcctttccctaaactaaacgggaagcctgttagctcataagtcttcacgtgttattttttttgttgtatcaacaaacactttttattttctaattgtgtgtaaaattcattcaaacaaaaaacaaaaactgtttttacaatagaaatgtgactttaaaactgtggagttttcaccatggttgaggagtctacgtacgagtaaggtccaaatttccactgaatatcgacatgagaagaataagtaattacgagttttagtttagcaaaaaaaagaaaaagtgattacgagtctcattcgtatctccacagaaaaatgcaatttgatctttgaaaagagttccagttaaggattaaactattattaggcttgtggcttctgtactggagaggaggat

SEQ ID NO: 64213 - DNA, 1317 bp, Arabidopsis thaliana landsberg
gggtctttttggaagtgtctgtaataaggcgcttgataagcagcaagtcaactgacgatggatggtgctttgtctcgataggaatagggggcatcacatccgttcttcgagtaaacttaatagtgacatttttcctacatgaaaagaagatttaaaaacccgataatgctgcacataaagagctatgtgacagagcagcaaaaaaacagaaagatagtgatcttactctggtgtctctgatataaatctaaacagaaactgcgcataaggagtaatgacagccatttggcgcatatagtgcaagatctttgactggatacaacaaaaaaataaaatgtgttaaacaagtttgcgtgcatatatgtctaatgaacacttaagaaataatatacagcagaaggacgagctagaccacgtactctgtatgttgtccagtttccttcgataaccacctgtatttcagccccatgccatttctctttgttgcccttcttttcgtgcagatgaatatgaggaatgttcctgaaaattttaaccatttgaagacaattatacggcgtggaaaatccgaaggattcatagctattatgtcaaatgcccaaacataaaaaattagattgatatccgctttcgagaagctgctcatgtattcagatgggtacctgtgaatatcaatatccagtctgcagaaagtaacatagttttggctcttcatagatgacgagatctctatggggagacctgtactcattttggaccagattaaggcctgcacgccaggaaaatttagagaaactagaagggttaaacaagttctctggaaaaaatatcgatatgaagggaaacatagatatgttatgaatatgaatacaaaaacaaaagaccagctgcaaatcaaagccaatgattaaatcctcctaaagcaacatatacaacatatattccttttgtaaacctaggaacgagccatctaaaggctgcaaatttgaaactgataaaccacttcagcatttcatgcagttttacaggctaatctcagatatcaaacttgataagaatagattattaccatctttgcacccagaccaaactttccacgtgtttgcttcagtccatacttcgtcccggataaaactgtaagaagaacaatttgtaaacttagcctcaatataaaggtttattataaggttgatatgccaggctaaatcaatagaggaagtgagggtggtcattagctattttacctctcccaaacatatttggaatgtcatcatgtggcatccccttaccattatcatacattatgagcgactcggt

SEQ ID NO: 64214 - DNA, 1900 bp, Arabidopsis thaliana landsberg
tggttactcacacgtgatatgtcctccggttaaatatgttttcattatcattgttaattattattttcttattatcacattcccatatattaaaagattttagtgttatctaaaataatttcagattataatttcagtttcataattccaatcttgaaaattttggttcttatacttgtgtatataattggatattggatttttgtttacgtatggcctagatcaaactcttggtattattaattggaaagctaactcttacgacaaaaaaatacaatgacacatgcggaaatttattgagccttgctacgatcatgtaggattgacatatgtatgtcgtatctctatcttatttggatatatagggtatagtcatatcagagaaattttctaaaatgttttcttaggatccttaaattatattttaaaaggattatttaagtctcctgatttcctatgaattggttcgcaacctacgaaaaaactatgggatcaaaagcaaaaaattctaagtttttttttcaactttggtaaattttaacataaatagttagatgtttatctcccttcattcctttttgaaaccaataattttaatcttcctttcacttaccatttagaaaaacacacgaaactatgttttttgtttttaaaaatatgtgtacctcatatatatgctgcatgtacagcctttatacgtctatatgcagttgggtatttcatataattatactatacaaatagaacataaaatagaactatagttatttacaacacaatatatatatatatatatacagctgtataatgtattttagaatactagtctgggccaatcaaacgggaatataaaaacccgaggtagaattttatttttacatcgtttaaacacaaagaaagatggttagcaacagcaaattgcttacatggttatcaacaaaatatcgtgtttcgtaaacaataagttaaaaataattcaatgaactattgggattatcaaatcaaactgtaaaaattagtttattcaaagaacaattaatggctgagttaattagcttgccttgaattgttaaataattagatgcttctaatcagatttcaaggagatatgtcggaagcaccgacgacacgtgcggatccgtcacgtgcgcgattcaactctttaactcgtatgtcgatatttctttttttaattctcttcttttttcacactccatattgtcgatttttatgcccggaatcaagggtttgacttaccaaattgttaccttcttttaggcttaaaatttattacacttaaaataatccggattaatattttctaaaaaattcactaactagagaagaaataataataaaaaagacatgtgaaagagttaatgaaagttgagaaaaaagagataatattatttttattttatttttagttttgtttttctggagaagagccaaagctctttccttcatatatacgaacccctttttccattttctttgtgcaaaaagtgtaaccttccttatccgattctgaagcagaaattagctgcagaatcttcagattctctctatacctagattggtttttcacagaatcttcgctattttgttcagatctgccactgtttcaggtttgaactaattttacataaattttctctcctaatctttctctgtttcatctttggttttctcaatcgattcgatatgaatttgatttggtttagcttgattcgatttgatcatcatgtctaactagttctatctaactttgttagtttactgttcttttgtgtggttcttgttcttacttcagaccgatctatgttttttttgctttgtctgcttcacacaacacaatcgttagcttgctcttatgagttgatcctctagagtcgacctg

SEQ ID NO: 64215 - DNA, 1927 bp, Arabidopsis thaliana landsberg
atctgtcggagaggacgtgtcggcatctattaaaatcctagctggacttccacatcactttactcaatttgaatttggtctgttttctctgtttttattctaactttttctctcgattaattggtcatatgcaaacaaacacctttgcatgtaactgattctgttgtacttgaattgaattctttaatcaattatgcaaacagagcttgttttggagatgatgattcacaagtatgagattgtctttctgcttaagaattcgttgagtgttggtttctgaagtttgaattgtgtgtgtgtgtgtgatttaaaatactgatgcatggttcgaagcttagagattttagattgctataaatgaaagcaaaagaacagtgcccttactcttgttctgttttaaagtcattgattgttataattgaaagcaaaagattttagttttgatgttttatgattactatttatcgataagatttttgattgttgtttatagttttgagtaacacaagtaagtagtaagcttataaaacaatgggaacgagcgaagacaagatgccatttaagactaccaaaccaacatcttcggctcaggttaatccttctcttctcctttcttttcaacatctttgttctgttttatattttaaggtgtttgatgtatctacctctctctttttcaggaagttcctcccacaccgtatccagattggcaaaattcaatgcaggttcgtgttacatgtacaactttggtcactattagtttttatagtgtaagtgaatactttctcgaaaacaccgggactgctgaacataatagtatatgcttatttctttaggcttattatggcggaggaggtactccaaatccttttttcccatccccagttggatctcctagtcctcacccctatatgtggggtgctcaagtaagttttgtatcgtatagttgttgatatgattctatgaaaaagaagtttgcatcttattctttggataacactaaatgagtttctctgttttgcattactttcagcaccatatgatgccgccttatggcaccccagttccgtacccagcaatgtatcccccgggggcagtctatgctcatcctagcatgcccatggtaatctccataccattaatacaacattagctatcgttgaaagctttttgctctgttacatggcaatgcatagataaatgagaaagtaaaaaacttgctcgacatttcttttgttgtagcctcctaattctggtcctaccaacaaggagcctgcgaaggaccaagcttctggcaagaagtcaaaggggaactcgaaaaaaaaggctgaaggaggtgataaagcgctctctggttcagggaacgatggtgcctctcataggtgatttttataacactctactcaacgtggtgcttgttcagtttgattgcagtgtcatatgtaattatgatttttccgttgtgcagtgatgaaagtgtcacagcgggttcatctgatgaaaatgatgagaatgccaatcaacaggtactgttatgtgtttgaagtgttctctgttgctacaatactttgtgatgtgcttcattgagattcatgttaatgtaggaacagggttcaattcgaaagccaagctttggacagatgcttgctgacggtatgcttttgaccgctgcagttttcatggtttttctttgcatgtattttccatgtttcttgacttggtaaagtttccttgaacagcaagttctcaaagtacgactggtgaaatccaaggttcggtgcccatgaagccggtagccccggggactaatctgaatatcgggatggacttatggtcttcccaagctggtgtaccagtgaaggtgtgaccaactcctcatttcaccctgcaaggttgcttttccgaattcgttacattcttccttaca

SEQ ID NO: 64216 - DNA, 711 bp, Arabidopsis thaliana landsberg
aaactttccaattttgagaatccattcaatggcaagttgaacagagaacattttttttttttgggtaaaagtgaacagagaacatatcacatcaagaggatacatttctagaatttacatatttctctgaacagaaattttagtattagtaccttattaatttggttaaaaaccattagaaaatttggatataggaaaatataatgaaacatatataatcctaggctagaaaaattattaaccaacgatcaataacgttcttcaacaactaattaaaaagtatctgaaacataccaacagatcttcaaatatattttttctccgatcatgttaatttcaaagaatcaagaaccccataattccaaacgcgattagaccggagagcttcaccaccatacaactttttccggcggccgctccgaattgctcatcaacggggtagagatttcccggcggacccgtgatgtacaagaaattagccggcggaggcggtgggcactaagaactgactttcttaggcggaggcggtgggagagctggcggaggaggacacgcacgcggtggcggaaatggtggtggaggagactgccgatgagggttttggatgcaacttggagagcacttaatgggatcgacctcatcgagctttcttgcttctaaagaagcatctgatgatgatgaaccgttgatgagtgttggacacgtcagcaa

SEQ ID NO: 64217 - DNA, 274 bp, Arabidopsis thaliana landsberg
ataatcttgtcaatgggaggatacgaatctgatcaacaaaatttcagtcgaaccacgcagaactcaagggtttacctcgctaaagaaacaatttcatagccaagatcagcttcttgttgcaacgggtcaatccatgagctgactagtgttcctactatctgctcataatcatggctcttggaggactcgggtggttatctatgcgcattgcctctgacgcatcaattagctcaacaactcttcctggaagaaaggaagagggtcccgcctaaag

SEQ ID NO: 64218 - DNA, 266 bp, Arabidopsis thaliana landsberg
aagcatttacccgattattgaaataagagtatttggctgttttaaaagaacaaatattaataaattatgttcgggtcgccatatatggaaccaagggtatcgtagaagtgtaattacgaaactatatatgtcaaccagaatttcacaaaaataacgagtaaatctttaattcagtccgaacatacacgcacatatccatatatgtattatactataatagctaatgctaagcatacctatgtgtatccgagtgttagtgaaccaca

SEQ ID NO: 64219 - DNA, 707 bp, Arabidopsis thaliana landsberg
ccgcaagaaaaaagaacactacttagtacaaatttatgtggctatgtgatggatcagtcaaacttcatcaacttcgggagattgaaatagaaaaacgaaaaccaatataaaagtccatgttggccactaagcttaactatgattatgaattccaccttttactactgcaaatcactcacagcgtttattacgataatgccccttatctctctctaaacgtaataagcattttggtaatttcatgatttcacatttgttcctcctctctctctacccattgacttgtgtggacatggtttcaaaattcatcaaaagctaaattattctttagagatgtgtgaacattaagttttaatatatgaaaataaagtacgcactaacttattatgtttcaagctgttttctaaaattttgttttttcttttctttccattttcatattgctttttattagaatacgacttcagacttcccactaattctatgattaagttaaaattattcatcagtcgaacatatttgtatttggggcgatgaaatattttatttaacttctactattgaagaaaagcatatagatcacactattgatatattagaaaaattatacttgtaaacatcatttatgaaattttggttaattttttttttaaaaaaaaacttaccaattaatttttttttttaacccacttaatttttttttttta

SEQ ID NO: 64220 - DNA, 584 bp, Arabidopsis thaliana landsberg
cgctccccacctgccctcccggaccgccgccgccggacccggcggcgctgttccggcgggccaccgaaaaccaccgtaaccaacgccatgccgaggcggcggcgcagttccggcggctctcgctgctgcaaccggacccgtccggcgcgctgatcaacgccgccgcggcgctgctcgcgctggccctgccggaggaggcgctggcgagcctggaggcggtgccggagaccggacatcccgccgcctggcgccaccgcgccggcgcccacagccagctcggcgacgccgaagcgaccctggccgcctgccgacgctgcctggcgctggacccggacaatgccgaggcgcaattccgcgaagccggcacgctgctgatgctgggcgactatgcggccggctgggccggctacgaggcgcgctggcggctgtccgaccccccgccgtcacaggccgcgccgctctggctgggccaacagccgatcgccgggcgcacgctgatgctgcgcgccgagcaaggcttcggcgatatcctgcaattcgaccgctacgccccgctgctgcgcccgggcgcggcgcccggcgtg

SEQ ID NO: 64221 - DNA, 238 bp, Arabidopsis thaliana landsberg
ttttacatgtaaatagactgtcttcttttagtgacgtgtgttatactatactgaatttgttggtgggatatgttatatatttaagatatttttggtgaaatgatatattgccattcaacccaagttaaagtttaaccaaccaatatataatttcaatgaattttaagtattaaaaataattggtactgtggtgtaaccttgaatttgctttaagaagaaaccaaggggggggttaaaa

SEQ ID NO: 64222 - DNA, 471 bp, Arabidopsis thaliana landsberg
catttacaaaaccatactctttctatcttaaacgaattccattatacagagccatgtaaacgacttccattagatatattgaatattataatatggaaaacaaaaagatttaacaaaaaacgttacacatgtgaaagtctattatttgaaaagtatttttaatactgaaaagagaagaagagagaaagaggctggcggggaaacgaaagagaggtgttgaggattggatagtgccacgcaaaagagtatcttctttcttcttcttcaccactaagaaagtaagaagaagattcttatccacttcttcttcgctttttttctttctatgatactcctatattgttatatctaattaaaattcattcccaaattgtatatacaattaagggaagataaaaacagcactactttatacttcactttcccctctcaaatagtggtggagagtacaaggctttcgtggaggacgca

SEQ ID NO: 64223 - DNA, 1768 bp, Arabidopsis thaliana landsberg
  unsure (1)..(1768): unsure at all n locations
tggaagcttgaacaaaatctaatcgaagagaaataaacatttgacactatatagtaaaagacttaacaaaaataccaatattgatgcaaactatgtatagtatgtaaatcagtaaatgtcaatagtttacatatttataatctcaaaaattctattaatgctgtagcattttttctatactccgtatatatatttttttctttctcgatggtatatttatttatatatgcatgtgaattaggcgatgattccctacaagttggtcagattggttaaacaaattcaccaatattaatgaatgttttagacccatccaacatattattccgtcactttaaagcttttaatgcgtacccatatggccatattcagtaacaaagtgaatgaaattttgggaaagcgctcattctatgatccggaaggccctcaacattaccaacggacgtaatatccttcactttccaacaaaaatatatcgatttattcattttcagtgtttaggaatcatttattgtctgtatggttaatcatcccacaatttttgaattaacgattcaaaactcgacagtttcagggaaatgtaatatctaagacttctatatttgaatcactagttttttgaccagatttaatgatttataatttggacaggggtttttgttaagtaatggtgaatatggttttgacaggatttatatttgaatcactactctatatgtgaattatgatagtgcgaggggtcttttgttaaactcatagaaatatgggtatggttgcgagatttttataaatttggtttcctattagttcttaattttataataaaatttgtgaagcatatcaaatttgattttttttactgtattgatcattttcaattataagtgatagtccattaacacaaatcaacatttacttcacattataattatcaaaatcaaatttcacatatagattgaaaaaaaactaagatacttatgaataaagtttgtaggaaaaataatcaacactcccagaaaatgtattattgatagaatttaatagcatagagcaaccttacaagaaataaaataaaaaagcaccacaaaatgtaataatcataagaataattattagttggtttagtttttgggattctccaagtaaaagttgcgtttctcttcctcgtccatgaatccggtaacggggaaagacctgccgattcccataggagtcttgaagtaaatcttcttgctttttggctcctccatactcatctccacgatcggtacccacaaaaacatctgcttactcttcactcctatataaacgtacacacaaaaacaataacatgacttacataaataaaattatatctctaattatcttcatatatttcatagatcgtacctgtcatcttcttcatacaacacttgtcgacataggcggtgacttcgagaccgtaggagacacgagtgttggtggcttcgaagaaatgctcgtaaggagtgtcttgcttcatccaaacgtaaccagtggctctaactcttccacactcaacaagattcttcaaaggcatgactccttttggaaaccctagctcctctagaagctccaatgattgcttgtaacattcctccgccccgtacacgatctcagccccttctctctcccctccgacaactacaactccctcgctcgccatttagttaccagaaatatagaattctacacacanaaaaagattaaagttttcttgaaatatgaagaggaaattatataatgtttt

SEQ ID NO: 64224 - DNA, 343 bp, Arabidopsis thaliana landsberg
gggagctggatcctgcaccacgtatgggaaggcacaaagcatactcaaaggaaaacagcaccgccttgtttacaggagaaaaatagaaaaaaatacgaaaggcaatacgaaagcacgagaatgagagggaggggaatgacgcgaaagcggcgactaacggggtacatgaaggcgataagacggcagacaaaaaagggagatggcttggaaaaaaatctcacagaagaactaagaaaaggaatatcgcatgagaacccggcaaaggcaagaaacagagatgaagctggctataaaggaacagtgacacgaaaaatgacacaaagagagtgcgacaaagcagagg

SEQ ID NO: 64225 - DNA, 1439 bp, Arabidopsis thaliana landsberg
agattaaaaaggaggttgatgcagatagtaatgatgctgcttcttttggggttcagttatgtagagtagaaggtgggcctgggtatactttgaagtcctttaaaaactttgcagatacatacaagaagagtcattttggcatgaaggatgaggtattgggttcagagaactcatctccatcacttaaaccaaatgagctaattgtggcagacattgaaaaagagtacagacaaattgttgagagtccacttattgaaattggggtaatgttaaaaacagttgttctgcttttatatatgaaacggaatatatcactaacttgtcgtgtaaatttaggtgctttatggcaatgatttagacactgcaacgtttggaagtggatttcccttatctgcaccatctgaatctagcaaatattcatcaggttggaatctgaacagtacggctaagcttcctggttctcttctatcattagaagactgcgaatcagtttgtgttcctcgtctaagtgtaggaatgtgcttgtcttcccagttctgggtaagttttaaggttgatgtcaagctatggtcgtcaatttctgaaagcataagtataactggtcaacgcagaaatagcatttgttttgcatactaccactagaataaattttgcagcattgtaagtttattaatctaatttgcttgtgtagtctcatatttgtctcttggaatatctgttactgaacagaaatctgagaaggagagactctactctctctgctatttgcatgtgggcgctcctagagtgtggtattccgtagcaggatgtcatcgatcaaagtttaaggctgccatgaaaagcttcatccttgagatgtcaggagaacagccaaagaagagtcataatcctgtaagtatttgaacacattaagcatcaatacaagttactcttttcaaaattccgaaagaaaatagacagaagagtgaccaacaacgattccacttgcgatttagttcttgttcagcatacacgaccatgacatgacatagagagatcacacagtatttggatttatctgttcaaagcaaatcctatcattactttgttaaatttttgtgagctattatatactagtattggttcatttacaagggaagcaattcatttggcaggtgatgatgatgtctccatatcaattgagcgtggagggtataccagtgacccgctgtgtccagcaccctggccagtatgttattatatttccagggtcgtattactctgcctttgactgtggcttcaactgtttggagaaagcaaactttgctccccttgattggttgccccatggggatattgctgttcaggtgaatcaagagatgagtaaaacgtcgctgatatcgtatgataagctattatttagtgctgcaagggaagctgtaaaatgtcttaaggaatat

SEQ ID NO: 64226 - DNA, 560 bp, Arabidopsis thaliana landsberg
  unsure (1)..(560): unsure at all n locations
cactacgccccagcgttccaccacggtgtcgatgttggtggtgactgttcaactgttcgagcgaagggatggccaagctggagcccgtggcatagtaggcatccgtcgtgctctgacggttcgcgtccggagcacggcgcgcgacgaagtgctgcgtttggccatcagtcagacgcagaccgtaccagaccacatggccgcgtatgacgccgtgcggcacttggtaggaaccgctgccaaggcagtagtcgacgatggagataagggccgatttccccgtcttggaatcgcccgtgatgatgttgagtcgtccgggttgaagcgacagcacgcgcggatgtcggtcttcggcgtagaggacgatatcgagaatctgaatactcaagggcgcactccccatagtgccatgatggtttggtaatcgcccgagccggcaaaccacttgccgacgaattgcgctttcttcangcagtcgctgacttcgggcgacttcaccgcattggcaaaacgggcgatggtgctcatctttgcgcgggcgcaaagccgagatccctcgatcg

SEQ ID NO: 64227 - DNA, 599 bp, Arabidopsis thaliana landsberg
gggtaacaaaaaggttcttgttctccataaaagagagtgtgtgttcctttaacttatataactcaattccattttatataaataagtttcgtatcttatacaattaacatacattaagcagacgaggttgatcgatcttgatggggaaaaccgacggaagctcatggttcacggccgttaagaatgttttccgatcgccggagaagttaatccctagaagaataaatcgtcgacaagacaacgacctcgtcgaagaagtagaggacgaactacaccaacgaccggtatacttaacactcaattaccttttttttttaatcttcattaattcatactatataaaatacatcagcatttacatgtaagattccttcaatatatccccaagaaaacactttttttttttcttactttagaaaaaatatttatcagcatgaaaacctgatttttgataaagtcttaaaacttggaaattttgggatttacattttttattaatgaaatctataaattttgttaaagaataataataattttgttggtgcagaatagaagaaaaagaagatggctatttaagaaagtttcttctgatccttgtg

SEQ ID NO: 64228 - DNA, 599 bp, Arabidopsis thaliana landsberg
  unsure (1)..(599): unsure at all n locations
acccgagccgngtttcatcaaacattggctttgtgtgcttttctttaagcatcttacaacccagctttaattgtatcctaaaatcctatattacaaactcctattaatataaaagctgtctttcatcaaacaaaaaaatcaaagctcttctttttgcatcgtatttatgatttatagtttttgtttatatgagtgatttggtcttttcttttatgcatcgtcatctatgtttttcctctccttgtgttttggaatgtaagatctgatagatctttgctttttgcctattatagtcaaatttggtgaatcaacaccaacattttgttttctatatcatgctttcttagaaagcaagattcatagatctttgtttgtggttgattaactcttaaacgaggtatatcggcttttgtttagatactttgattctttaattggtggttgtctgattaatttaaactgttatgctctatgttgatgcataaacgattatgaatgggaatccgtagaggtatctcgaatgatatcagagatttctataactttattgccccacttgaaaataatgattggctaacatcggctttttttttttccta

SEQ ID NO: 64229 - DNA, 510 bp, Arabidopsis thaliana landsberg
actatatacatacctatcactttgcaaccgagatattacaaatgtgaatgaactcattaaatacaactttaagaatcttttcgaaatacaatttcatgtaattgtcaaaaaaaatttgaagcaaatcctaagagattgaaattaaaccaaaagaaaaaaaaaacagttagtgtttgagattattcaccacagaattatgtctcatggaaggtcccgaaggtggtacaagtacccttttagaaaatgaatggaacacacgacctttgaatgtaaaacccccaatgatctcttgtcttgatcttgtttgaactatttccgtttcagaaagcttaatcggtccgatccttgccgtggcgttgtatgaaccaaaaatcaagaggaaaacaatataaagagtcataaacatggttttatgagaaagattcatataatgttcggagaaagaagaagaataaggaggaggagacactaatttagctattagcttgggtattataaattttggatttt

SEQ ID NO: 64230 - DNA, 524 bp, Arabidopsis thaliana landsberg
aacctttgtattcaatatgtattgattcatgaagtttttggtttcatgtgttatttgattgagtattggtttatagagatagtcaatcttcttagttaagtgttggtattcaatttcttaatttccaagttccattatatgttagtgtcatctaatcttccaatagtttttatggtatttggtcatctggaaaagttttaatcaaatttcaaattaaagaactaaatttaaccttttagctgtcactttaatagaatttcaatgtaaataactaaatagaaaccctttttcttacaatacttttacacttttagttcaaccacatttggatttatttacactcttttaaatataagatagataggaaattttacctaactaaataaagggaatcatatttttaacttttaatcgtaacaaaagccacttttatggagtatatcatccatagtttagagtctaaatttcacactattttgtttatatttaaataaactttttacattagtgtgtgatgtaatttt

SEQ ID NO: 64231 - DNA, 589 bp, Arabidopsis thaliana landsberg
ccaaggcggcgataaccatattgatgtggtgtcatatatataaggacagccattctagcccaaaaactttgtcttaaacttagtgcttagtatattatgatttaggggacaattccgttattatttctgcataggtaaagtaatcatatatttgtttaaactaccggtacaatttaaactttaaaataatgtaaaatatgtagtttttttcaaggccaaaacaaacgtttctttttgtaattgttcaacacaagttgatttacaatcgaaataatttatgtgcgaaaactcagttaatagttgtgaaatattacttcaaaaaacactggtaaattggtaatgcgtgtcttttgaaattattatgatgccacttgattaatattagattattcctaagtgagacatttctctttgatattggtgacataattttatctaggcttcaatatatatatatatatggtcaaattcattcaatatatttctttcaatgaaaggtgtccgttctatgtttataaatttatttgatggatatatggaaattctttacttataggttaattaacgttcaaccttactctttttatat

SEQ ID NO: 64232 - DNA, 537 bp, Arabidopsis thaliana landsberg
  unsure (1)..(537): unsure at all n locations
ctgaccggagaagaagtccggcaataccgacaccgctatcgtccgggtcgagcggctctacccgatcccgaccgaggaactgcgcgcggagctgtcccgctaccccgcggacgcggagctggtctgggtgcaggaggagccgtccaaccagggtgcctggccgcggatggccctgcgcctgccggaactgctcggcaagccgctgtcggtcgtcgcgctgcccgccagctcggcgcccgcgtacggctcggccaaggtgcacgcggccacgcatcgcgagatcgtcgagacggccatcccggctccagcggaggggtaacggcgatgtacttcacggacgcgggaattgaggaactcgatgaccggcgcggcgacgaggaggtctccctggcctggctcgccgagcgactgcgggacttcgtggacctcaatcccgagttcgagaggcggtagaccgtctcgccagtggctcgcccgctcgactccgacccgacgccgtcgacgaggattaanacccgatcatatccgaacgccatg

SEQ ID NO: 64233 - DNA, 472 bp, Arabidopsis thaliana landsberg
cttcgaatcgttgagaagagaatatatatcacgatcctcagagaaaaaggttgctttggaggtattttgcgattgtgatgtatttctacttgaataattccatgtgtttggacattgttaaagacactattcattatgtatattgcgtgtgttgtatataaagtcttcatatgttttacctgccaattttataatacatattttagtgtttgattttttttgaatatgtagttattaatagacataattatggttgaatagtaaacctttaatttcttgcaatgttaaataatataaaatgaaatgagaagctgcatgtaatcttacctagagaaaattgtttgtcagtttactattgcatgaaagttgtgaatcaataactttaagagagtttgatattattctcctgatgatccctcctaatttactattctcagaggttttagtactaagaattttaaattgatccggg

SEQ ID NO: 64234 - DNA, 433 bp, Arabidopsis thaliana landsberg
ccgcgacgaactattacgtgctgcgcagtgcgccggccgcgcgcgaacgcatcaagcttcgcgtctcatcacgatactgtccgggcaggagcccgaggcggtgatcaagggttacaccttcagctggttgcgcctccactattttggcgacatgaccagcaagatctgggtgctggttctggtgcgactgatcatgttgaaccatgaccgtcgtctgcgttagagcgttggagcttgaccattgggggtaagattgctagctctcattttagattcttttcttatacctgtgcaattgggtttattttcctttatgacgctattgcttttgtcataacaccattcaactaggacatcacaattctattgaaggcttttttaattggttaggttcaaaagctcttttatcttaccagattaaatttcccgcccc

SEQ ID NO: 64235 - DNA, 623 bp, Arabidopsis thaliana landsberg
atttcagctatatgtttggaggaggagatggggctatgattcttgaagaacttcttttgcttgagaagcaggttgagtattggatttctcagattcgctctgctaaggtatgtatacatgttttcatgcatatatttagtgcaaatgttagggagagtgaatataaaatgattgactagaaaagcttttatgtaaaatttgcagatggatgttatgcttcaagaaattcagtcattgaggaacaaggtaagcaaaaaaaacaaatgtttttcaaaaaaaaaaacacattgtatattcagctttatagcaattatattaaattaatgtaaatttttaacagttggtttttttttttttttttttgggatttaaaggaaggagtcctcaaaaacaccaacaagtatctcctcgacaaggtaacaaaatcagttgtatgatctcatcatagcacaacttatgaaacttttatcagcagaattatctagtcgcactattcagatgagcgttagagtgttttgcttagctattgtctaatgatttattttgttggtgaattaaatgcagatagaggaaaacaacaatagcatattagatgctaacttcgcagtcatggagacaaacta

SEQ ID NO: 64236 - DNA, 403 bp, Arabidopsis thaliana landsberg
taaaatcacacttgaatcctaaactccaagttgtaaggataattaagtttaataattcaaggcacgtgccagtcaaatgacggttataaccctatcacgtggtagtcaactcgctttacagatattccgagagtgaggtcccacaaagtcacttgccattaccctctctgtattagttagccgcagtagtctagtagtagctggtagcgcgtgaactccactttctaactgtaagcgcgtgaagaacaaaaacctcttccccaccaccaccacctctgtatactacttcttcttcttcttcttcttcttctaacttgctacaaatacatgacagcctctttccctcgaattctagcattttgctgttatcatgtattcacccctgagactgggtccctgagat

SEQ ID NO: 64237 - DNA, 570 bp, Arabidopsis thaliana landsberg
atgattgttagttcatcgaaggggtttggtgagtttgggttgatgctgagctcttgtttagtggtccaaagttacaaaggagaatgattattggattggacgatgatggagaaagtgacaactttagggctagggctcttttgtgctgtgagatttagggttgaatttggaaaatcagaagttgaagggcaaatgcaaaagggaagagaagttgtgcgccatttggtgatctgtgggatgctttgtatccaagtgaatacatcagggaacttctcggacatcattttttttgttatgtggttgtgtttgaggtttgattgcatatatatacacgtataaatagatgcacgttatattgtatttgtacgtcaaatggggtcaagaacattgaatcatgtgcaggatttagcaaaaagaaaaatgaagtgataagctttaaattagttaaaagtggaataataaacttggccatttcgtaggaatacatatttcatatatcaagggtttggatatactcgtattgaatgattatcgaaacttaaatgttgcatgattacaatatattttttg

SEQ ID NO: 64238 - DNA, 498 bp, Arabidopsis thaliana landsberg
aatcgatatcttgaagaatctaaaactaagaatcatagtggcgaccttatatgctttcttgggtggactctctcgtctctcctcctgattggtcagctttacttgcaaatcatatcttattaattagtcaatttattaatttaaagatgtctgcttttgttacgattaataaattaatgggtccaacatagtgtcaaaacctgtttaagtatatttgtttggtcggtccaaagaacacgattggctgattcgctctcgcctctgttcggttcaatgccactttgaattgtctttttctttttataattaggttaattatactggccaattaactttcgtctatttggatgataacttgagtggttctttttcattagtaaatagttctaattttgattgatagattaattaattaattaatcgctaggatatttcgtataattaatttatatccgaggggtgagtcatcagctaaatgctaatggcacgattgtgatt

SEQ ID NO: 64239 - DNA, 601 bp, Arabidopsis thaliana landsberg
  unsure (1)..(601): unsure at all n locations
ggaaaacattgaggaagacattaccctcctcttagcactatagcacgcttgggaaattcttccgagctcaaagcttcatcagatgtaatagccagctcctataaaagacagtttatgtataactcagtggactttccataaatagcagttaatagtttttctcacagactaatttagagaaatcatattgcaaacatacagatgtgtctgttatttctattaaaatctttccggacttactctgaagataatgatttcataaataccaagcacatcacactatagtagataaaaaaaataacatgaacacagaaacttacatgtccaggaatattaggcttttgcgcccgactgccagtggcaatcaatatgtgctttgcggtataacttatttttgtgccatctatttgtctcacctgcacttcgttgggaccaactactcttgcttcaccttcatacaatttcaccgcagcatttgccaataaccgcttgtagatattattcagtcttagtatctcatcagtctgcacagaaggaattaaagacagtaattgattatttatgaccnaattagttacatcggcaaaatatgccatctact

SEQ ID NO: 64240 - DNA, 412 bp, Arabidopsis thaliana landsberg
ggaccaacgagaaagaagaagaagatatcccaaagcattcgcagtattcatcaatttttctcgataatattttgttcacgggcatagtttaatccttcacgtcaacgacaagactaccatgcacatgctttttcctcctttttttcttcttctttttctctcttatttgatatttttaatagtttgaacgtatctttatcattcatatgtatataagttatgttttatgtttgtatgtcgaatatgtataaattatatattatttgatcacttgtgcatcatttttttttggtaagatcacatgtttgatgattaactaaacattgagatggtttacataaaatagggaagaaaaactatctttttagcgtcgttagggtcaataatatatatatagaagggctcatgaacc

SEQ ID NO: 64241 - DNA, 602 bp, Arabidopsis thaliana landsberg
cgtacattaaagctacaaagaagtgaaccaaccaacaaagcgattgtgtaagaaagaaaactaaaactagcaacaaagctcaaatagagacttagggataaggctgaactcacgagttctgccttagcagaatcttaacgaaggccatcgataacgtagtcatcatgaaatttgtagtctatagatagtatataaaagaaagacggtattattttcttcttaattgtccatgtttaattagaacacaaaagaacgatcacaatatcactcaacgacggtaagaagttagaagttagaagcgtcgctggtgtataagaagctccagaattattgctcacccagccacagattagaccacctaaaggatgattgttccctagtgacaagacgttctcaagaagacatgatgtcccccgccgttctagccctagagataagagagatggtggctctgattatggaacctctaaagggttttcccactcgaggggatgggaccataccccctcaagatcccatcacagaagatcaggttaccaaacagaaagatctagaatgtttaaggagctggcgccgatctttagaaaagagaggaaagagct

SEQ ID NO: 64242 - DNA, 140 bp, Arabidopsis thaliana landsberg
  unsure (1)..(140): unsure at all n locations
tgtatgcactggtccataannnngnctctcaagaaccggtcaagatgtgcatttcttggcttaatggcaagaaaaatggatctgtgggttcaatgaaaaaccggatagattcatggccttacaagacaagtggatgcttc

SEQ ID NO: 64243 - DNA, 299 bp, Arabidopsis thaliana landsberg
aatctggtgaagcgtcgtctaacaaagaagatgatgaagagagttacaaatctcaatctagagaagcatctgaagaaaaggatgagggtattagtgatgatggtaaccacgaatccttatcaagaaagcgtaagaggataacctctgctcccatagctgtcgctttctcgtttgtggtggttgatgctactcctccaccgacttatggtttccatatgcggatagatgaggatgaaccgagtaatggattccatttgcagatagattaataagacgatgattgttttggctactagaca

SEQ ID NO: 64244 - DNA, 1406 bp, Arabidopsis thaliana landsberg
aaatctaagaaaatttggaattttacatcaccggaaagtaaaattttaccttttaatggctggtcctaaatgccaatcctgatatgacagaggaagattcgagtaaaaattgaatgtggaaataaatactaactgtagaaaacaaacaaagggtaaattcttcatatagatggaaagcgaagaacagtaaatgtgaattcgctacggtccggctcacactgcccaaaaaattcctcgaaagctcttgaaaacagtagtaaatttgaccctatatttttagaatacattaaaaagtaaaaaaggcctctttgttaaattgcaaatagaaacaaatagtaaattccaaaatttccatgaagggttgttttccttccatggggaaaagagttctttttcattgtttatttcataataaataacttttactgtcaaaaggaatataaaaatttaaaacataggtatgggagagagaccgaagtctgataaaatgtcttgactcggaccaaatctcaaacgagaaagacaacaattaaaaaaattccaagagcatgcttaacggattataatatttttttcaacatcatttgttctattatctgtttttttttaatgttttattttatggcaataagtgtttgacacttagttattcaaccgcatttcaatctgtaggaaaagtttacataatgtatgattccttgcacaaacagaagatccaaaatttacatctgtagctcctccaagtcaaccaaaatccttaggtttgtgatccaatttcaaaaccccataatttttcaagaaaatttgtaaacccataattaataagtttgatgcattgactactgaccaggacattgtacataaatgaacaataacattatggttgcaattattaatgatctctaagcaccacaaaatattttttccaggacaccatcatcattcctcaccaacttactttaatgttcttacttcaaaaaacaaaatagagaatcaaaataaaaaaatgaaaaaccaaaactatggtgaccactttaaccactgtctctttctgcataattttttacccaaaataccaattctctgcatgagaataacagaaccaaccacattccacattatttccattttatgtgaaagattattttctaattagttgaatcataccaagaggccacagagcagcatgtaaacccattaaagaaagtttctattatttgggaaggataatttagtcatattcaaatttatagtttctttctttatgagttggccaatcatttattcattttcccacttactataccaacacatattaaaaataaaagccacgtgtcagccaagtcggattcgtcaaacccaacaaaataaatacacgtgtcaattaaagagttttaatgagtcca

SEQ ID NO: 64245 - DNA, 564 bp, Arabidopsis thaliana landsberg
ttgtgttgtaaaggaactggagaaactcaaattgggtttcgtgttcgtgtgactaatcttcctaagaagaagaatgttcatagagatcttaaggttgcgtttaaagaagtaagtggcgttttgagtataacaccagctgtgtctgggaataagaagactaaggatcctgtgtgtaaaggatttgctcatgttgatttcaaaactgagattgatgcaaacaggtatgagacttgtggtgtttatagttaagtggtaatgaggcaaagttttgattttttttctcttaggtttgtgaaacagttcacgggacagagcttatcatttgggaaggttataaagcaaatcaaatgtcaggttgtggagcttacttctgatgattctgtatcgaaggaagtgtacttagataacggtttcaaggtgcagaagcttccgtattctggtcttgaaggagattctaatgctgatgttgttgaagaagaaggttttgtgggctcaggggaaagaatcgatgattcataagagaggtttatgaaagaggagtggtagacgatgagcggaatcata

SEQ ID NO: 64246 - DNA, 1442 bp, Arabidopsis thaliana landsberg
ttacataacaaataattaatcgatatattttgtaaataatatttgttttgaacatttttcaagttaaaacgcactaaacttcatacgtcttaataattaggttgtaaatacataaataacgtaaaaaagtttagatgcttattctcaatgaaaccaaaacataattgtatacaccaatatattttgaacattattataaaaaattaatccaaaattgaattaaatttatctatttaaggtttagttttactcatatgtgtatataaacctttttctttttttgaatataaaccaatttactctagagcacactaccttaaaaagtattaatacctgagggctgaggtttagagaattgaaagacaaactaactatcttagagattctagagctcctgcagtccttacttggatattctaatttaaagagatatgtttaaagctttcgacaaaaccttttgggccttcccctttttgcttatattaatatatatagcggttcggtgaaacatcaaaggagatagaagaggataatttttagggataggtgcatgactagatgttgaattaagggagataaattctgatgtgaactgaaaaaacttagcaaccgttgataatgttagtttctaataagtatttagtcttgggcgataaattcttattctagtcaatacgacaaaactctatatactcacattttggataattttgcaaataaatgatttaaccctatctaaaaacatgcatctacactatgaagataagaatgaaaaaaataaccaaaattaaatttatgcattatcttcttttctaaattacttgaaaaatgtgttactttaagaatgttgtgaatttagattttttttgtaataaaaagaatatataaatatctttatgattttcaaggccagaaatactctgagatccttggtcttaggtcaaacataactgtcaactacttaatctgatatgttctgttccatgaccttccagaatcagacaatcaaaagaagttcgttatgatgtgttttcctgaattaaaagaaagaaaagaaaaaacaacacattgaacaataaaaatgaaacaaataaataaaaatcttttattagctgtgtgtatcgtagaattagatacaggctataattatcacacagtttcacctatttatttccgaccattattacttaacggttactacaattctttgcatcatcatcattcatcatggattcttcttaccttagaatctctctttcttttctcttctgggctttactactctcaccggctgtgtcacagtcatcttcttgttcgtcacagacattttccggcgtcaaatcttaccctcactgtctcgacctccctgatcttaaagccattctccattactcttatgacgcatctaacacaactctcgccgttgttttctctgctccacc

SEQ ID NO: 64247 - DNA, 329 bp, Arabidopsis thaliana landsberg
  unsure (1)..(329): unsure at all n locations
accaccaaacaagaccgcacgccgaataaaaataagaacacaggacccggcggcgggggcacgaaccaggacgaacacgggcactcaaccaaacaggaaacaacaaggaaaccaaaaaccggagaaaagaagaaaaagcggaagagcgaacgaagaggaaanagaaccgccacggcnacaacagggggaacaaaccggaagcncgccagacacgagaagaagacgagcaccgcagaacgcaagcgaacacgccgcaaccagcggacgcacaccaacaccgagcgcgaggcacagcnaaaagacgacaaccgcgagacccagaagcagcc

SEQ ID NO: 64248 - DNA, 225 bp, Arabidopsis thaliana landsberg
tacaaatattcttataaatcttgttttaccctgaataaaaagctaagaaaacaaattttttattcaatcccaacaatcctcttaataatcagaaaatatctcatacattaacctccaaaagtcaactaattctcttacaacaaaactccttataaattccaaatttcaacaaatcgaatcttacaaccaatctttccaaatttccaaggttcacacaaacctgaa

SEQ ID NO: 64249 - DNA, 492 bp, Arabidopsis thaliana landsberg
ataacgccaagaagtgggagaagaggtcttctggagagagaccgccacccattcctccaggtccgtcgcctgagagttcagcttcaccgaattggtcataggtctgacgcttctgggggtcggaaaggatatcatatgcatggctaatctcttggaacttttcagaggtagcgcctccagtctaagaagaataggtaaaaaggagaaggtcaaccataatgaacaaatgtgtagagtgagagtgatttgtaagaatccacccaacaagaatgatgagttcacagtctaaaaaagtgctagctctaatcaattcgtcatgaatcagaagcatcaagattgtaatttgtatttacctctgcgggatggtacttcaatgccaacttgcggtatgccttcttgagttcagcatcagagcagttaggatcgacctcgagggcttacgagaacttggtttccttgacccttgtgaatagtatttactagacgtaccta

SEQ ID NO: 64250 - DNA, 549 bp, Arabidopsis thaliana landsberg
  unsure (1)..(549): unsure at all n locations
taaacaaagcaatttaacaaaactcataacacctacacatacaaaacttgaggacttttcaaccaaacactctctccctttgacaacaaaaaatgtcgttttcaattttgtttttgttttacagagtattattttgtactttgaatgcaatttttaaagcaaatctgagttttaaccttattcattagataaagaaactgttttagtgtattaactaagggtataacataaatttacatattttgcttactttgaccactctttacaagagagagtagcatttaactttttattttgtatcccaatgaaaacaactctagtagtattttataatggtaataattttatatttcgtaaaatagttaagacgtgacgtcgtcgctaatcacaaaccggaagatgtgaagacgacgaacgtgggatcaaggaagcttccaccatgatgataattaagtaattatttgctttaatttactttaacaaacaaaaaattatttgtttgattccttactcaatatnngagttaatttaagaagaaaaaaacaagcg

SEQ ID NO: 64251 - DNA, 1299 bp, Arabidopsis thaliana landsberg
aagatcttccaaaacagagggctcgttctctgcctctttcgcttgttttttaggctcagcatccccttgcttcttgtaatcatttggacgaagttcaggacctatatctcttacccagcttgcagcataaagccttgaagcttccttcaacacctaatcacaaccatgaatatttcacccagtgattagcactaaatttactatcaagtagagaagaaaacaccaattactctgaaaatagtgagacgtggaattacagacttcttctagaaaggacgaacctttttgctcaaactagagaattgtcacatttgtgtttcagatattccacaatatacataaatgaaatcacacacttccagattctgtatcatctcaaacatctgctgattaaagacctaatcgagaacacattcactctaaattggacaaaaaaactaaatagagcacaagaaaatcagagcacgaaaaaatgcgaactttgtttgtccttgaaagaaaattttgattccccagatcctctcaatagaaaactaccggaaaattcaaataaaaaagaggaagagagagtgaaggaaagctcacgaggaatcgctcgtgccaagtcaatttgcggcgtttaacgacgtgaggaggatcgggaagtgatgaaggtaagacgatttctttcagatcgtaacagatgtaatcggagaccttacgatacacaaccttcagcttcatctttcactatcccggacaagagacagtcgccgatcgcagctcagtgtactcagcctctcttgagcttaccgtcgcaggtttaatctattcgagacgtcttataaggttcggtttaggatttggttcacagtgataattatttaattgctcggtttatccgattgtaactaaaaaagctcttgttctccggtttagtcgatgtgtacttgagcaaaccttatatttttctccacaaaaccgacaatttaccaaatttacgtcaaacaatcttttttaggaaacatcagccagcaaattaattacaaagtaaaccaacagattggccggttcaaattcttttacaaaccacagaagtttggaacactagagatcgtaacatcgaaataagtaacccaaaaagttccaatcgatcaaaatggaaattttgttaaaaattattctctacttatatgatcagattcaaattctttagaacatgatatatatttcttcaaatcattgtctctaccaaataaatgagtaacaaactagatgtatatttgtacatattccattatgactctataatgaaatgta

SEQ ID NO: 64252 - DNA, 1113 bp, Arabidopsis thaliana landsberg
tcaagtgttgttagtacctgtcatggaggttgtaccaccacaaagtacagtgttctccaagagctgcctatggttctcagatgacactgtggagataatccggacaagctgctcaacgattccatgctcctccagtcccagtattgatggctgaaacagagcttctccaaccgagtatctctctcgcccgatgcttatcacctataaggccattggttttgttatctatatgtataaggtaacaacacaaaatgtagaatcttgatttcacacaaacctgtccatcaggaagagtatgctgctcgatttcacagttttgggtttttttgtaagcaatttcgtcctcggcacagtttgcatactgctccttgagtttttcaacatcagacatgctgagattcatcgacgggttggtttttccaagctcttgggcaaataatttagttagctcggttccacctagctcaaaccgtttcgaggcaatgtgctgtactgcaccttcaagaactggggcaatatctgaaaagagttggatcaaccacaaagttaaaacatcagacataacaacatcctgatcatatccagctataaacacaagaagaatccaaaaaaaattggtttaacaaaacgtttaagatcatggaaaaaggttagtatagggaatcagcatctcatgtaacatcatatctcacataaaacatggaattatgagtttatgacaaagtgaaagacacaaagagtaacaaaggccaagcaagttataatacctatcttcccatgaccaatatcaacagtgcaaccggagatgcgtccaacagcataaagggacaacactgcttgctcagatgcataaaatccagagacattgaatgtttcaaacatcaactgcaccaattgctccctaatagcctgtccacaaacaaacatttgcagagccaaatcaggtcgaaacattaaaaataactacgtcttactatctaaaatgaggtactaaaagaacaaaattgttccttttcataatccaacagaacaggattatgggaattgaaaagagactcaaagttgtaatcttttaaactaagaacaaaggaggaaatttggagataagaacct

SEQ ID NO: 64253 - DNA, 1153 bp, Arabidopsis thaliana landsberg
gttgaaagggtttgtgtgattttctttggtgggcttgatgtctcgtgagtctatagagctcggcgggagaatggctgagcatccggccgttaaagttaccgttattaggtttttggtaagagaaacgttgaggagtaccgccgtcactttacgaccggcaccgtctaaaggcaaggagaagaactatgcctttttaacaaccaacgtggatccagaaaaagaaaaggtaaatctcttttgatcccctatgtttacataccagttatgacaaatataactatagctttctttcttggaaaattaattataggaattagacgaaggggcattggaagacttcaagagcaaatggaaagaaatggtggagtacaaagaaaaggaaccaaacaacatcattgaagaaatactgtcaataggacagagtaaagactttgatctaatagtggttggaagagggaggataccgtcggccgaggtggcggcattagctgagcgtcaagctgaacatcctgagttaggtcctatcggagacgtgctcgcctcttcgatcaaccacatcattccatcaatccttgtggttcaacaacacaacaaagctcatgtagaggatattacggtttccaaaattgttagtgagtcttctctaagtattaacggagacacaaatgtatgataacaataaataaattgatctagtacttaaacttcggcttaatgcatggttaaagtggttagttgaagatgtagtttatctacaatatatagatagctcttgagtaagaattgtaagatcgtctacatataaataaccatgattgggcatcttgggcatcgtctacatataatttcatatttggactaaatagtaaatacaattatcatttgggccatttgagaaactaccggaaacctctcacgtgccagagacacgtaccaaaaaaaacccgaacgtttattaggaagaagagaaaaaacggaaaagaaaaaaaaacgcatcaatctgagcagcacaagtctgcgagatttggattagatctgattcaggttggattgatcatcgttcggagctccgggaaacatggcggcgacgagacaattacgaactctccaatctcagcctgaaaacaaggtatgtgtcgattgcgctcagaag

SEQ ID NO: 64254 - DNA, 543 bp, Arabidopsis thaliana landsberg
  unsure (1)..(543): unsure at all n locations
taccacttgtttcaacactacaacagtacacacgaaacgaaaagatcataattttttggagtgagttccgagaagctactggtgaaagtacctaaaaccatttatggaggactattgggctcagtctatatgaaccaaaagagcaaactttatacaaattctcaatcgaaatctctattactcaagtcaaactaacaaaagattccaatttgatgatcttttgaaacaatcaaaatcgactaatcattatcactggtcctaacaaagccacgaatgtactgggaatcgagagaatatgaaccctaattagaggagcaaggaaagaaaaacacacgatgtgcaatgcgaagactacggagaaagagaaagagggcttacgttttcttnnnnnnnnnnnnnnnnnnnnnnnnnnnnnnnnnnnnnnnnnnnnnnnnnnnnnnnnnnttctacaacattctctttgcttatcttcctcgccatccccatcatctctcactcttccttccttcctctggattttctatttctttccttttatttttt

SEQ ID NO: 64255 - DNA, 121 bp, Arabidopsis thaliana landsberg
aaaaacaggggggaggagggaactagcaaaaagccaaaagaggacaattatagaaaaggagagcaaacgaagcatgacggggcggaaacaaagcagatgggcagaaacgaaaaacacgaag

SEQ ID NO: 64256 - DNA, 440 bp, Arabidopsis thaliana landsberg
  unsure (1)..(440): unsure at all n locations
nnnnnnnnnnnnnnnnnnnnnnnnnnnnnnnnnnnnnnnnnnnnnnnnnnnnnnnnnnnnnnnnnnnnnnnnnnnnnnnnnnnnnnnnnnnnnnnnnnnnnnnnnnnnnnnnnnnnnnnnnnnnnnnnnnnnnnnnnnnnnnnnnnnnnnnnnnnnnnnnnnnnnnnnnnnnnnnnnnnnnnnnnnnnnnnnnnnnnnnnnnnnnnnnnnnnnnnnnnnnnnnnnnnnnnnnnnnnnnnnnnnnnnnnnnnnnnnnnnnnnnnnnnnnnnnnnnnnnnnnnnngctttaaggatatacgaagggcgggctgtcttcctagaatggctctgcggtgactcgggaaactatatgcagctgagctgtaagctcgctgtatgcaggcaccaccattccacgctttggtgtgctgtcatgagagggagtcctatcgaaatgattc

SEQ ID NO: 64257 - DNA, 581 bp, Arabidopsis thaliana landsberg
ctatactatacaatattcaacaagttctgctataactaacacaataaatatagttgtgaatttaatttttaataaacaatctttcgttttccaaactcgaaggcaacttgtaatctttcccattatagaaaacgaaagaaaccaaaaaaaaaaaaacataaccaaagaaaaatgcatcacacaaatcaaaacgtatttattagcaacaaccaaatatcttaatattttttataagttaccaataaataccagctttcccataatacttaaaaaccctaaccttaaaaactcatttattagagcatttttgattttgtgctattacctactacccttggcttactactaacaacatcacacacaactcaaactcacagaagctcatctataaacgatttccctttaaatttctccattttgaatcccattttctccatccttaaccgttctgcttcgatctcaaccattttgagcccggcgtttccttaatccggcgcttcacttccaccacttccttttccatcctaaccaaatccgtttcttgagcctcaagctcttctctcttagccttcactaaacca

SEQ ID NO: 64258 - DNA, 122 bp, Arabidopsis thaliana landsberg
gttacccatgcaatcaaaaaactccaaccttttcaaactaccgttgactacaaatgggaggatcgagacgaccctgcgagatattgctaggcggcaaaccatgagccattacgctccaatta

SEQ ID NO: 64259 - DNA, 504 bp, Arabidopsis thaliana landsberg
ttcaataggaccaaattaatatctttaagcgaacatatatactaaacgtcattaagaaaaattaaacatgatttaacgtaaattagaatttacattgatagagacgttatcacgttacaatcagattcaggaataacaaagggggttgtattaaaacaatgattttagatgtcggatagatgagttgtgtctttagagatcttaggagttaggatagtttagttgtgaattcttagctacacatacatacatatttagggttacatattgagttgagatttttccaaagtagtggggttgtcttttcgtcttgccgccgtgaccgaagaagcagacgacgtcaagtttcattgaggattattcaataatcttaatcgacttttcatcttgttaattgggaacattgttgtttctttttttatgggacataatgagattacattggtgcagcaatagaaggctttctttgttcatcgtttcgctagtcttcttttcttgagggga

SEQ ID NO: 64260 - DNA, 264 bp, Arabidopsis thaliana landsberg
taaagaaggggaactctgcctgaacggtgaacaggcacatgaaactccggtggaagcgcccagccatactgacgggcagagggttcgctggactggagactggggcagagggactaatcgaaccacatacatgctcgttacttacgaaatgaccatgaagatagctgccgcacgaacgcgagagctactgcggacagccaccgactctaggcagagggggcgcactgcgacattcctagcactgagcttaaaacacattggacg

SEQ ID NO: 64261 - DNA, 1330 bp, Arabidopsis thaliana landsberg
ttgatttcctcctatatcaagatttaagatcgaattccctgcttttagaaagaaaaactcgatgtctataatttgtgtatcttgtttttttcgtcttttgcaggctcaaatctattgaatcatgttcttgacatgtgctccaagcaaaacatgtgtgagatatacttgcatgtgcagacaaacaacgaagacgcaatcaagttctacaagaagttcggctttgagatcacagataccatacaaaactattacatcaacattgagccaagagattgctacgttgtcagcaagtcctttgctcaatctgaagccaacaaatgatgaaaaataccaaacttggggaagccattcctccccagtttctttgttgcattcagttcaagatctattaatgttatgatgatccttcggtttccgagttttgcttgttttgttgaccttaatttttcttactgattctaaatttataaattcctggttatatacttgcatgatttctctaatgtcctcttggctttggacattttcgtttggaaaagtttttaactttgcaactcaaagctttactaccaagtatcatcgtgtttgtaaatgttggtctatgaatttgagtaaagagagacaatgattcttgttatgagctgtagaataaagtaaagaaaaaaatgaagaatttatgacttgcgttttggcttgcgtgccatttattcacagtgaagactggaagatgtgttcttcttgaatcaaaaaacggcacgtcttatgagtctccgttcatcggtgtctgcaattaagcaccggttcctcgagcttcctcactcaattcgattgaccaatgcggcgttctcgttttgttgctcaagttttctccgacgttaccttcgctgacgcctccactatctctgctccaatcttcaccatgtctactcgtgctccggtaaattttctcagctattctcttgttctatcactcccgctgcgttgcttcggttactggaatataatttgtttcttacgaagcagtacagaggtgcccgaggacgaggacgaggccgaggtgggagaagtttctccgatcgtccgtacaatgatgacgcgggaagagatcagttcgttactggagattctcattttcaatcagttcatgacgccaatttccgattccggcatggtgaaccttatcgacaacatcagcctccgcttgatcagcggcagcaacctcggtgctaacctgtttttttctttaaacaaacaccgcagacgttgtgactcagataacaattcttgtcaacctaatcagtgtccgtctaatcaaaactacgggctggct

SEQ ID NO: 64262 - DNA, 791 bp, Arabidopsis thaliana landsberg
acgcttcggttggtatttgtctttatcaaatattgaaaacgtttaagtgtatttatgagtcaaccgttacaaactttggtccaaatcaatacattattttaaaactcatatcacaccaatatctgaagtaaataagtcactttaaacatcaacaacttattggtaaaaatgccagaattcgaagtttttttgtgtgtgtatgtaagaaagtgttcctcaaagggccatcggtattcctaaagagatttgccatatggtaaaagataaaatggattggggttgaagtctttgttttgttaactaaacaaaaaaaaaagagaaagagagcagagaaagtcatgctagtgaaaacaaagtcagttaattggatagcgacctctactaataaataccaattaatgctcttaaaacaattttgagttattattttttagctttaaggaaaagtctaaaatcttcgagtcagcatctacattaaattatgctggcacttagtattgcttcaaaggcaatcccgaaaaggaagaaatacaatttctgattgtaaataatattccacgccattatatcgcacgtcactattcatttgcagatacaaaaatcgtaattaagtaaagggacgtgaatctgtctttaaaacaacgaaaatttaactttccgaaccctacttttatacagtacctttttcttttattttaaaaaaaacctcctcaattattttcccaaaaaaaatcattggaccccggaaaccattacattgtttaataccggtaaagaccattttttttttt

SEQ ID NO: 64263 - DNA, 1109 bp, Arabidopsis thaliana landsberg
aatttttgaccttaaaggttatgttcatatatatgaattggaatgatcatgtatagatgtcaaaatacaaataaaagaaggttatgtatcatcgaattacgcctaattagtaattaccatgtaaataataaagaatatgcctgttagcatttacatgcatattagaggatgataacataagataaaataatcattgtgcaatattgcatttatggctttaattctcttctgattctaaatcatatcttcttctgattcaagatccacattgccttcaaatattagcaatgtagtatttcctctgtacacaaactcaaatgcatattttcattatatcaaatttttatatcatttttgaaaatctgaacaaatagttgtagagtatacactggttaatgcggactatgcataaaacatacggttccacatgctaaattgttaaataatttttattctgttaatagctcccccctagttaactgattcaaattacatacaagaccaaaatttctttttcttatgtgttttgaagccgaaataatgacaattcactttcaccgcatatggcgcgacacgattctatgtgggtgaagcaacaaacaccacagctaaatataagcccaaccatttacatatactagttttgatagtgttgtgaacaagcctcgtgaatagtcctatattggctatatagatacaaactcgtgaatagtacacctataatatatactcaacatatatgccaataaataagaaaggtccactcacagctggccaacctgcacattgtgtagtatctcagcaaaacacacattaaataagaacctccaaaaccccatccatcaatctatacttctcttcacattcacacacacacatatatatatacatatatacaaacataaatacagatacatctccatatactatatgacctaattacacacacacacacacaaaaacccattgaagaaaaaaaaaagcgttgagagtgtgtgagaggacacgaaatggcaagaacccatttcatcttccttcttcttgtagctcttttatcgacaacatttccatcatcatcatcttcaagagagcaagagaaggacagaatc

SEQ ID NO: 64264 - DNA, 631 bp, Arabidopsis thaliana landsberg
agcgccttttccagcgcctcgagatcgttgaacgggatcaccgagcaatcgggcagcagcggtccgaagccgccgcggaaattcgcatcatcggtcagcgacagcgagccgtaggtcaggccgtgatagccgtggtcgcaatagacgatgcccgtgcgcccggtcgcaccgcgcgcaaatttgatcgcagcttcgacacattccgtccctgaattcgcgaaaaacaccttatcaagataaggcacgtgcgcgatcagacgctcggccagaacaccggcgagcgtggaaatatcgagctggacgagattggcgaactcgctgtcgagcacgcttttcagggcatcgcgaatcacgggatggttactgccgagcgcgaacaccccgaagccgctgagcagatcgaggtaacgcacattgtcgcgatcgaagagatattgtccctgcccgcgctggaacccgacgtggtaaccaatggttttgagaacccggacgagctgctcgttcagatacctcgtatggagcgcgccgcgctgaaactggcggtcggcgactatctcggaaatgtctagatttgctttcaccatgcagtacatacgtcgtttggtgggccgttcgtcaaccgaaaaaagca

SEQ ID NO: 64265 - DNA, 871 bp, Arabidopsis thaliana landsberg
ctaatatctccttctatattttatcttccatataaattttggggaaaaaatcgctctccatctagttttagaacatgcgggtcagccagggttatggcatttttatatatttcaccgatcggcccgagctggctctggttgactcgtatgccaccctgcattgaacaaaccagtaggagacaagcaagcaaaacgttttaagataaggtctatggtaaaatgacaaggtaactgataaatgtgtcgtctatttgcaggtacgagctcccagattcacatcgtctccttgatggtgtaagtcaatttttaactctctctatactcgagttgtttcacttgagcaacactgtttaaaagtcctcatttgataaaataacagatggataaaagagaaccagatgatccaagtccttatctcttagctatatggacaccaggtgagaataaaactgcaatgtttcattcatgtgtctacagtatcaaagaaagtacagctagagctaaaaagcatttgaaatagaaagtttgaatctgtaaatgaaagccggaacgtagcattggtggatgttatatgtaaattagtttttgagattggtctaatgtagttgtttgactgccaggtgaaacagcgaattcggcacaaccgcctgaacagaagtgtggagggaaagcgtctggcaaaatgtgctttgacgagacttgttctgagtgtaacagtctgagggaagcaaactcacagacagttcgaggaactcttctggtgagattatcttgatcttttgtgttgctcatgaaaaggagaagtgagaatacaagtttgctaatatcattttttcgtcattcacagataccttgtcggactgccatgaga

SEQ ID NO: 64266 - DNA, 370 bp, Arabidopsis thaliana landsberg
ttcttctctggaaaccatgatatgtcacaagtatctaggtaacaccgaatgaaaaaaagagttaaaaaacgcaataatgtaaattaaaccaaaaaaaacatgttaataattacctccagcccggttaactgttctctgagtcttttcactatgctccggtttggttttgtaagttgaaacatactccggtttatcatcaaccagtacgcgagggtctttattaaccgaatcgcgtttccgattcctgttaatgctctggccacaatcacaatctctgcatacaatccggtttagtgaaaatatcattcggtatttcctcaacaaaagcagccctacatctatacctggtttatgtcgacacctacatttt

SEQ ID NO: 64267 - DNA, 503 bp, Arabidopsis thaliana landsberg
aatactgcggcggtgtttgttggcgagctccaccaagctccggtggagattcctgcgatctcaaactcttccggcatgttcttaattggggtagtttactttggaatttaatgtccaagtttcctgaaaacatgatggttattacatagaggatttatatgtaggcatgagtccatcaaaattattatttaaacggaaaactacaattactaaataatatatctagctaccctcttaaccataatacgtctctatacctattgatgattatgaaaataacgcatctcattggacacactcttgtgttccgtgtttacgttaaattatagagtaatctatttattaaaaatcatttgcaaatactaaatacaggaacaggaagttgacaggatataaataaaattaaaaataatcaaaaagtattttacgttaatatgcttttgtaaaacatgttttggaccaaaaattaaaagaaaaaaaaaaatttctggaatttgatttta

SEQ ID NO: 64268 - DNA, 162 bp, Arabidopsis thaliana landsberg
aatgtgttattccataaaatgaaggacaatggtcatgaaccatataactataacatacaatacactaatcattttgtgttttaaagttggagaaatagatatgtctattgatactatctcatagatgctaaataactattttaatgtacatgcttatactat

SEQ ID NO: 64269 - DNA, 1435 bp, Arabidopsis thaliana landsberg
ccatcccttttttttcctcttctttctaataaattagatcttctcttaaaggtttttgctctgaatttgagttttgtgaatatgcagtaaacaatatataagagtatgacactctcttagggcctggcttattttaacatgaaaaccaaaaattacataaaggctatatatataaaagctatgattgttaatacagtttccactgtaattagtaatttgtctgatacatacgtgaaaatatatatggttggtgtaaccaacttgatgtttgtttttttctaaacatgtaaatattattaataatgaaaatatgctttacaaaaagtaatacatacacaagtgtagcgaagtaaaaaaaaaaaacaaggctactatataagaaaaagatttaggaagattggaatccaaagaagcatgaatgtacgccaactaacgtgatgttacgacaatgacatcaaacagtcattagctactagtctctatattttcaatattatggtatattaactagtaattgtgaacaaatgtagtcagtagtttttatatactctgtttttttattaaaaaaaaagtagagagattttttttgttatatatataatctgtttgctatattaataaatagtctttgaatctgcacctaactaaaccaatagtacctgtttacatttctcatacagtgtgctctcgtgtcaaaatgcatgcatgcgttattgcgttgtgtcaaattcaaaatttcggtttcgtccattaaaactgaatgtcttttttctttttggtttaattaaaacgtaatgttactcttatataacaccactttaacttcttttcttttgaattttatgttaaattaaattcaaaaagaagtgatcaaagttgttacaagtgctaacgagagtttaggatcgttcatctaaatcatctattacaaaaaaaacattttcagcttaattggttcttcgagcttagagccatacctgaaaacctttgtcaaatcttcaatctctactctgttttacaaaaaaaacagttaactcacaatgacatgcaatttacaaaaaaaaataagataaaaaaaatatgagtatataaaaaatgtttatagaaatattgcgtgtagttaaaactaacaaactaatgtaatgtgattatataattttcttctattaaacagcagagctcgaaaggtacgtttataatcattaatgtaatgtgattgaggctatataatcattcatatgcaagtatttaaattactcctacagttacgagaacgcaaataattcattgcaaagttgattgtgaagttgtcactctggtcaagtgctgatcacgctttgcacgtgttgctgaccacacattactccctattttaattcggcacattaaactaaattaattttcgctgaacggtcctggagatataatgttataa

SEQ ID NO: 64270 - DNA, 506 bp, Arabidopsis thaliana landsberg
  unsure (1)..(506): unsure at all n locations
aggggtgggggacaangcacgcgtcgcggcgatcaagctggtagcgatacgtttcatgacgatggttttccgggcgcgctgcgccgatgcgcctttttagcaaaatccgtacaggtatgccagcgaatccggtcacgaaaaaggccgcattaggcggcctgatccagtgcaactttcaaaacggctgtggtgagaagccaagccatcgatggccgttcaggcggccccggacttgtgattcacgtttgccgaatccccgaacgcggcagcgaccagggaaggtcgcgcattatctttggcgagccttgaagcgcggattgctcttgcagatcacgaacactttgccgcgacggcgcacgactttgcagtcgcggtggcgctgtttggcggacttgaaggaggaaagcaccttcacggcaggctcctgagggtcaatacggtcaaaacaaagcgggaaagtgtagcgtgagcagctacttgccgcaagcctcgggacaagctggaac

SEQ ID NO: 64271 - DNA, 513 bp, Arabidopsis thaliana landsberg
atcgccggagcgggagccctcttggatgtgttgatagtgaggacacagctcgtttacgttcgacccatatgcgaatcccatttactgaaatccagtgtatctgccctgaagtatcgttcttctccggcgctcctgctcccagtaccgcctattttgggatccgcggtcccggacccgatttcaagtgatttatccgcctctccgccgccagaggccattgatttctctctccggccttactcttttggagagccaccagccactaatacaacaatactcttcgatccaaaaccacccagatgatcaatcgaaaatcaagccgttcaatcagtgagttgaggggacaaagctaggtttttttttttttatgtggtggagagagaaagaaccagaaaaaattggtggagagacaaaagacaagagagttgtgaaagaagaagaagaaccaattttttgaaatcgatcgaaggtggtggtggtggtctccacaaaaaaaaaaaactctttttcttt

SEQ ID NO: 64272 - DNA, 927 bp, Arabidopsis thaliana landsberg
  unsure (1)..(927): unsure at all n locations
caccccgagaaacagtctactttcttgacaccaacgcatatcttaagacttttccttactccatatactctctctctccctccctgtggcaatagctgtttcgatggcaacctcatttcctattcattaatgcctcacaaatcccctaagaaaacatcctcattgcgtagggtctaagaaaccgaaatcccacaaaaaaactcatgggtctctgtttctcctccgccgccaaatcctccggccacaaccgcagtagccggaatccccacccacatcctcctctcacggttgttaaatccagaccaccgcgatctccatgttccttcatggccgttacgatccaaaaggatcatagaacgcaaccgcgacgcaatgcaacggctaagaaaacgccgacgcggcatacgccaccgcacgggaaagtgagagagaaagttataagcaataacggtaggagacatggagaaacgatcccctacggtaagcgtgtagattttgggtacgctaaagattttgatcaccgttacaccattggaaaattgcttggacatggtcaatttggttatacatatgtcgctaccgataaaaaaaccggtgatcgtgtcgccgtcaagaagatcgataaggccaaggtatgatgatgaatcaatcatttttgctgtctttttctaatcattgagttttattttatttaagattcttcagattttggagcacaaagattattttatatatttaaaatatattcggattcttgcgtttcttgatttgatttttgttgggtagatgacaattccgatagctgtggaagatgtaaagagagaggtgaagatattacaagctttaactggtcatgaaaatgtggttcggttttataatgccttcgaggacaagaactctgtntatatagttatggagtaagtaaaa

SEQ ID NO: 64273 - DNA, 601 bp, Arabidopsis thaliana landsberg
cagataatgttcatcgtttgctccttgattttttcgagctcatccttcatttgtactaccaaatgctggatcgtagcatcgttggctttcgagccgatggtgttaatctcccggccgatttcctgcgctatgaaattgagctttttaccgttgctttccgaagctttcatcgtttcgatgaaataggtaaggtggtttgccagacggattttctcttccgaaatatcgaatttctcgacataataaatcagttcctgctcgaaacggttcggatcgaaattgtcgtcggtcagcaggtcccttacttgcttttccaggcgctcacgaacggcgggaatgcgggttttgtcctgttcggccacctggtcgaggaggttctgaatggtgccgatgtattcggcgaatttgtcggcagtcatgcggccttcctgctcacggaacacagaacatttacggagcgcttccatcaccgccaccttgatctgcgcccagtcgtcctctttgctggtttcgtcgaccgtttcgttgttgtacgcattgggcatttgcaaatgcatgcggaggagctctgtgaaatccgcatgaagcccaggtcggtcgc

SEQ ID NO: 64274 - DNA, 615 bp, Arabidopsis thaliana landsberg
tttgcgtttgcaacggcgtttatacttctgatgatggaaacactaagtgcatttctccatgctctgcgtcttcactgggtagaattcatggggaagttcttcaatggagatggttacaagttcaagcctttctctttcgctttaatctcagatgacgatgaataaacaccgtaaaatcttcagccatttgcacatcccaactctcccaaaatcttccccaaaaatatatatagaagaaaattggcttttcccaaaactcattatacggtaactcctctgctttgtctttttttttttgaatctttataaccgaatctttcaaattgatatttgttatgccgtagtagtaaatgtcagaagtggacaatttagatctctttttggagggtttcagttttttttttttatataaaaatatacatccttgtcatggatttttggaggtttgagatataaatggaaccttatgttggctatacccattttataaacaatacataatcttttaacattagagttgtaatggtggtgatgaaatgtatttgtctcggattccagatcgtaagattttgatggtgagggtgtgttatgtatcagacacttccgcctaaaaaa

SEQ ID NO: 64275 - DNA, 1427 bp, Arabidopsis thaliana landsberg
agtcttgaataagaaagaagagagggaagaatacctgagactgcaatctgaatctaagttccagatagagaaatctagagtccacgaggagtttctttctaaggaagtggaaaatctgaagcaagagaaagagagatttgaaaaggagtgggaaatattggatgagaagcaagcagaatacaataaagagcggataagaatatctgaagaaaaagaaaagttcgagaggtttcaactactggaaggagaaagattgaagaaagaagagagtgctttgagggtgcagataatgcaggaactggatgacattagactgcagagagaatcatttgaagccaatatggaacatgaacgatcagcgttacaggaaaaagtcaaacttgagcaatctaaggtgattgacgatcttgaaatgatgagaaggaatcttgaaattgaacttcaggaaagaaaagaacaagacgagaaagatctactagacagaatggctcagttcgaggacaaaagaatggcagagcttagtgatatcaatcaccagaagcaggctttgaacagggagatggaagaaatgatgtccaaaaggagtgctctccaaaaggaaagtgaagaaattgcaaagcacaaggacaaactaaaagagcagcaagtagagatgcataatgacatcagtgaacttagtacactcagcatcaacctcaagaaacgtagggaagtgtttggccgtgaaagatctcgttttctagcatttgttcaaaagctcaaggattgtgggagttgtgggcagctggtaaatgactttgtactctctgatctccagctaccatctaatgatgaagtagctattctaccacctattggagttttgaatgaccttccaggaagctctaatgcatctgactcttgtaatatcaagaaatctctagacggagatgcctctggaagtgggggatctagaaggcccagcatgtcgatactgcagaagtgcacttcaataattttctcaccaagtaaaagagttgaacatgggattgacactggcaagcctgagcagcgtctatcctcctcagtggcagttggtatggaaacaaaaggtgaaaagcctctgccagttgatctacgtctgcgaccatctagtagctccattccggaggaggatgaggaatatacagacagtagagtacaagaaacatctgagggttctcagctatctgagtttcaaagttccaggcgtggacgtggcagacctagaaaagccaagcctgctttgaatcctacaagttcggtgaagcataccagccttgaagaatcatcaaaagatgaattgagtggtcacgtttctgttactagtaagaagacaacaggcggaggtggaaggaaaagacaacatattgatgatactgctactggtggaaagccgtagagacaac

SEQ ID NO: 64276 - DNA, 529 bp, Arabidopsis thaliana landsberg
aacgtttgaaagattgaatacatgtttaaatagagttagacaccttgcctttgtcatacagagatgaagagcgtggttcatcatgttgtacgatatttgcaagaagaactagtataagatcttagtgattttaatttgttgtggcaaccaaaacgtgaccttgctttgtcataccaagatatagagcattttacgagcaatggctcaaagattggatgtaatattaggaagttctttgactagagtgtgaaatgcaaacgattatgaatcaaatttaaacgttgatatatgaacacggtattgagcaccgttcaggaatcaaattcatatttatttgctttctgccaaggtattttgatgccttagttgatggtcttcaaccttgcattcactgtaatatgtaaggaagattaaaggtttcggttcctataaaaaaaaaagattaaaaggttttggcctaagctagtttggtctttgtcttgagcgtgaccctgatatcatatcttattttaattttgatataattctc

SEQ ID NO: 64277 - DNA, 566 bp, Arabidopsis thaliana landsberg
cccgctgaatcgccgctggagtaaatttctcccacatagggagaaactagggaaatcgaatcctgctggctttgcccctgaaaaatgcgagagaaaaaatctttgtttaaaaagaaaacgtaaaagctcatttgagcgttgttgagagaaggaatcacataagccactcccgatcccatggtgcgcgtctggtacaaatgccaagacttgcgcgacgtcgaaagcgaatcaaaaggaatttgttgcgtggcattctgagccgactgacgcgctccgggagaaccttcaaaccactgcgctttccattttccctcttccttaatcacgtgagccaagagctgaacacccaaccctttgagctgaggctcaagctcttttccatcgctcaccgcgatctgaaagccttggaaccgttgcgccaccgtatgggcctgaacttccaatttttggtattccgttggggcatagccatgtgtacttttgcgaaaaaatattgaaggatttccaggtgatgatgagaaatgcacccagaaggaaaacccccaaaacgtcagaaacttaaaacg

SEQ ID NO: 64278 - DNA, 398 bp, Arabidopsis thaliana landsberg
aaaagtacgagcccatctaccttcatttaccttgttattttttcattttcactcattaaaataggtctaaattttgttctttgctggcagtctattaaatactagagacggctctgtgttcgattaatgacaccacgatgggacttataatacaaatcagtatactcatatattacaagatcatgttaactttcttactatttatattttggttagcaacatgcaatatgcgggtatgaataaggccatatgggtgatgacacactgacaacactaacacataccattggattacatttttttgctcgcgtagaagttaatcaggcggctagttgacttgacttggcctgaaaaatgcaaaaacctcacatatttaagcacatcgcgacatggaccga

SEQ ID NO: 64279 - DNA, 419 bp, Arabidopsis thaliana landsberg
  unsure (1)..(419): unsure at all n locations
attcttgaatgaccgcngcatgaaaaatggcgtgtacgtaacatgtgaacatatacagggttacaaacttgtatcagtactctttaaaaatatcaacatgtcatatcataagatgacaaaagagaaacggtgtaacaaacaatattgtttttggttatcgagtggagatgattatactaatatattctgcagaatcactctatttttggacaccttttagccaattttagaacaatatctattggaacccaccctacgacacttttttacgaatttttaaaaagaaaaaagaatacttattccaaaagctaattttggtgagtgtgatttttaaaaagaaaaaggttgagaattcaagacacttttttttatgagttattaaatgcatatgcaagctttatgtgattttagtcccgttg

SEQ ID NO: 64280 - DNA, 650 bp, Arabidopsis thaliana landsberg
tcataattatgaaccatttttagacgagagttttcaaacccatatttactgctgacaacataactagcctttattgttattgtaaaataggaacatcagaaaaaggacaattctttatttttagtatttgtcccatgcaatatgttcatactactgcattctagagatgaacctatttatcagtaggtttccactttgcgctcatgcatataacttgttgaacgtgtacgaatgtgtaactgtgtatctatgtaatatagaagacacatattaaatatttggagttttggaccaaacaaaagggacccaagaggcccctataagttatgtgacatgataattttatattagttctctagctagtttattaatgactaattatataggtataataaaacactcatatgagagataatgttaagtagggtggtattatagaagactagttgctaattactacaaagctaaataagtaatcatgagggtcaacggggtacatgttgttccatgcattgctggctttgcctgttgctcgatgatttcgagtaatgctcttttcatgcaatcttgataatcatatttttaaatcaactaacacttgatgattgtacttttccttgttcttttttttttcaaatattattcctata

SEQ ID NO: 64281 - DNA, 868 bp, Arabidopsis thaliana landsberg
catccaaatgtctcggcacgggcacaataaccatgtcaaagctcgcaccgctgtggaaaatggaccgagcttgttgtcttgagtcacttctttcaatcttctttgggttttttcagcaacacgaatcccaaacccccacaaggtcaaaatgttcatatcatgtctaccacattgctcgccacaggaagaagaccaagaggaaatacatttgtaaatggtcttgggttcttttaattatccagttcatagaataggattcgatttttcttgttcagtttttatgaaattagtcctttggtacttttgtctggtgggagtttagaggataactagaacataaaaattacgtttcaatatattacacatgttagttgaaaacaaccgaatgtggagttgttatactcaatggatacatctcctagaagctagaaccaaatcaattgatcacaaaacaggactttgtcctcaagaagcatgcttctgatgtggttcttgaatctcgctaacaagctcgccttcagcttcagcttcaacttccataaaactctaactctacaccaagtatattaaaaataactacatagaactttcttcaagatcttcgagaaagccttgaatatatggaaatgaacaaagggaaccagaataaagatgtttggggatgacaaaaatgtagcagaaaatcatataagagagctccaagtcatgtgtcttatacaataactttgtcccatgtttctgcacgttttctactctcatttctttctcccatttttgtagtgaaccgaattaaaccggttctgatttctttttcttccaaatctgagtcaaagcctgtaaagggtgtcttcttagctgtctcttctat

SEQ ID NO: 64282 - DNA, 789 bp, Arabidopsis thaliana landsberg
  unsure (1)..(789): unsure at all n locations
taagccatcgccaaagccaaaaatcaagtcagatgcatcgtctgctattccgtgacttacagacaaccagtttcctccaccagccattttgccacctatgacaccatcacaatagaaaaggtaagttataggttgcaaaaaacaaaagaaaaggtgtacgcaaaagctagccaatggtaacataatttactcatacagaacataaagttttaagatttggatggtagccatcatcatgtcaactaacctgatgaatttatttcttgtccaataggaacatctagataagagcctaataggaaagcattatcagtattaatcagcttctcgtccaatatgtctcgctcgtgtttttcttcccaagtaaagttcattagtttatcctctgacttgatttttacatgtggcagtctaggtaaatcttccctcggagcatcatgagccagcgaaaatgctaagctgcttggaatcttatgttcataaccagactgtgacttcccaaggtatagcgctgttgccacatcatcttcctgctccttgataagannnnnnnnnnnnnnnnnnnnnnnnnnnnnctttccttgccatttatctaaaatggctacaccattatcttttgttgacgtgcttcctttggacaacggaaaaacagttgtaacagaacaatccttccaatggtctggtgaagcaccaatgttctcttcgcttcttgaccatgacgtggtgatgaatccttcttgtattgcagagttcccaacctttatatcaacttccagagattgacatgct

SEQ ID NO: 64283 - DNA, 617 bp, Arabidopsis thaliana landsberg
aatagtacgaaaatcagccgtttctagcgaaatatctgaattatttatcaaacgtacacaatcgtagagtcgaccagcctccttacaggtgtatttttgtttacgtcttttgtaaacgaaaaaaataatcaatcattgatatatacgaaaagaggaccaatccaaaagtgtacggcctttgacggtttgacggatttggcgcgtggccattattcctttctaatatttagttattagtattattatttattgtttcatttatttaattcaaaattcaaagagaaatccgttgttaaaacaaaataaaggatgaaagacaaaagtataatactttttttttttccttttgataaacgaagagaaaaaaaatactttaccggcctaagatcattcttttttcatcagaccataataaccctcatcacacagtcacaaaaaaaaaagagagcatacttaatcttttattattatcaaataaacacagaacactatatatactccaaatatcacacatctatgtttgtctttagaaaaagtatcactttaaatttcatgcatgtgaactgagagaactaagaaaaggttcattatcacattgtttttttaaatttaattta

SEQ ID NO: 64284 - DNA, 1600 bp, Arabidopsis thaliana landsberg
tgcctcccatatttgtttctccttgagaagacatggaggtttccatgaaggtggaggaaccacaaacagattccatacgggtcaggtctgtcacgcaagcttgatatatatgagagtgtgtccctgaattcctgataattcagtaacactgggtaagaggaaaaggaatatattcctctgtaagagtacatgattctttaccaaagataatttagtttaataccctaatttttctttcataaaaagaaaacaaaactgacctcttcggttgggttgaacacaggagcttcctcaaggactttggtctcagacactttgaggggccgtcttctccgtacctatgaaaagcattttttcatactttagtaatgaatgtgaaaggatgaacacacaatcatgatacctatactctcatacgtcttaaaggcatagtagacctacccgaatcagcacatcaagctctaaagaattcatactaaatcacttatgcaatccacaacatgaaatttccggcttaactaacaacttaaacatcaatcaagtataatgtctattagtagtaatgactatgcatatttcccagaaatatctcctctttgaactcaaagaatgtttataatagactaaagaactaaaaaataataggaaaacataactattttgataaaaagaaaaggaaaagcattcctccacaacaaattggctcttgctctaataaggatactcaaaagaccctcctccaacaaggtgtcgaaccattgtcctcacggctaagctcaaaattctcaaataactatattccctttactgctcttctcaacagcatacaaagctaaaaactactctatatgaagatagagaggaaagaggtagacatagtatgagacctcagtttttttcggccttaaggcctctgagctgggaattgtgtgaccatgcactatccacggtcggcttttaagaaacatattgcaactatctttatcatctgtgccgaatccagttgtctgctcttgtctcgacacggacctgggactttctttgtctcggggtacattcctcagcacaaacgatgtttgagatacaaaacctggcggagcagaaattgtgtccatatttccagatttcaaatacgttgatacaccttcaatgcccattaaaccttacagccaccaaaaggattgatttcccgaagacgaaataaattgaacttcagatgaggtcaataaagatgcaacttcctgcagaagatggaaaaaaatctaatgtcaagtataaaccaagtgattaaacacagtaactacgatacgctattcgactaaaaaatgataggtgtgaagaaaaagactgctacttagaagattcaatcatcatcacaaagatcacagaaacggtcttcttgattagtctaggaacttaactcatacaccaaatatcattagacagcatctaaactttcaagaactgagagacaaactgtaaattatggtactttcaatacatatatcacagattccaggtcaattacgaaggagagccttctactttattggttattgctttctcaaaagaagcagtaaagaatacacctatttcaacc

SEQ ID NO: 64285 - DNA, 1182 bp, Arabidopsis thaliana landsberg
ataaaaacttctcacgggcctaaagcacaataagaagttaattagttaatcgtccagataagtgggagccgtggacccaatatgcctctctatttctatcagttattttccaagctacaaatgtagcatgaacaaaaaaactagctaggtttctgcaaatttatacactgcctgcgcggaaactgcaacacatatcataactttgaaaaagaggaaccctagcgttcctccattaacgaggaatgattctaaaatatttgagctcgacccattttgtctggttgaaacttttcatacagatttacatctagtaaagaaaagagtcaggatgagaacttttaatctttccaaaatatcttttgtagtgcaaaccaagtcagcggagtggggaaaacaaaaatccttgacaaaagggatacctgatcgtaggtaaggctagccttgtcaaagcgcttccgagcttcctgtggcaaaaatgatctctcagggttccatatccaaatataaccttgtcatgctagcctactatatatatggaaaaagatatatctggacaagctgactagccacaatgtaaaggcaggctcaagaaatttaaccatattttccgcaatcatcagaccttatctacattaatgacctcagaaaatattcacaattatattttgtttggggaaggttgaccacatgagtgataattagttcttttttttagatttctagtgctgcaagtcaaaccagaagaacaagacctaatgtccatattaaattaaatgcctcttggcaggtcttcatattttctctattcacacatgcagaatatttgtcctccattgtttaatagatattctagtcaatactaatacctcaatgatgcaaagttaactcaaaacatgtatatcaagccaataataaaggaagcagcttgtaccttaacttcatgcaagtccatattggcaaactgaagtaatctgtcattcagtatatgttccacctgacaatggaactcatcaaaatcaaaacctggattgaaatgacttgatctgctctaaatctatatgatgtcttaaggtaaagcaaactataaagaggccatttttgctgaaggaaaacaaagctatcctacgttgataccacaggagttatcagagagaaggctgggaatagggagagacagagagt

SEQ ID NO: 64286 - DNA, 510 bp, Arabidopsis thaliana landsberg
aggccagcccagtcgtcccacagcgcgtcattcgtgatgctgtagtgtttcgctttgatgcatcgcagctatggtagtcatggtccggtacaaatcatccgctacagtaaccgccttgagatacgcaacccgggtttttcgctcaaatctcccgagcatcttggcgaacccggctctttgccgcgcaaccccagactagctgctgccctatatgacacccgttttgcggaaaccaagggcagtggagtgcgcgtcatgcgcgaaatttgtgagcaaaccgggcttgcaccaccacttttcgagtctgatcgcagcaacgatgtattcgtgatacggcttttctttcaccattttctggggccggacgatctggcttggctaggccgattcaagaagctgcaattgagcgaagcggaggcccgagcattggggtggtacccgtgaagcgggggctatggataatgcaacatggcgggagctcaataaagtggatactctcgctgcgagcca

SEQ ID NO: 64287 - DNA, 159 bp, Arabidopsis thaliana landsberg
agaactagtggatcccccgggctgcagggggggggaacgtttttacttttatagaggccactgataaaacggataagccgtgcaccacgaggatcatgatctgacttgagacaagctcggtttaccaagattcaagaaggggccaacacacgccgagaa

SEQ ID NO: 64288 - DNA, 6815 bp, Arabidopsis thaliana landsberg
gggcgtgaccagtatataacacgtgtgtgtgtgtgtgtctttcagttttcgtatattcatttcacatcaacgatatcaaattatagcattcatgagtttttaacttaagaatatcctaccagatattctctgaagagttcgtcttgaagagtccattttataacgaagggaaccaaacctgaaaacgcgctcccctgaaaaccagaaatcaattataaaaaacttgaggtttgctggaaacagagtcatccggccatctcaaaaatggcaagaaaataaattcaaaagaagggaaccaaataggtcatggatatcgtgaaccaacttacgtgccagatggtttctgctcgccgtactagtattattttgtccagattgcttttcactttctttctttgagtatgcagccacagccaatgtggcctcctgtacaaatatgaaaaagatacatttattgtcgacaccacattcaatagtcctaaaggagcaattatttatagacttaggccaaagacactgaggaaactaacctcattagcttttctcgagtctctctcaatggacttggaccattttttatgcgacccaccaacacttaataccttagattttctgagggaatacccattagttgatcttgtgtaaattgtgtgtctcttcctcatcattgacaactttcggctgaagatagaatggccctgttatcatgtttgcaaacacaaaaaaaaaggttgcagcccaaggaaaatgagcacctttagatgctaacatacctaatgttgggagaagaaccatttcggaaagcagacactgagttcattaatcttctccagtacgtcactcttttccagggaacaagttgcggcacaatattctgatttcgcatgtgagctatgggcattcttggctgcggatcattttgcgtccaaaccagagaaaactttgattgcttaaatggtcgcatgacagctgccaatcaaaaagaaggcgagtaacttcatatcttgcttttgttatggtaaaaaaaatgcaagaaaaaaaacaagtatacatagaaagggattctgatatgcatgttactgtaggaaaacactagatagtttattctcaaaaaaaaaaaaaggactaagccaaagcaaacaaattattccttttccttttcagcgaataaaccatccactgtttatccaaatgaacagtcctgataagatgctcaacaagcgctaacagatatttactttgctttacataccagagtcagagaatgctgagctagatggtctttccgaaaccatgtttgcagctgatcgtgtatctaatgcatcatcaggcaaggaaattgactgattgcaacggctctctgaattccttactagctgatttttacttcgcttaaagtacccatcagaggaaggaatctggttctgacttacatcatgaatatctgaagctgcaaccaactgatttgcctttctcttgacatataccattctcttcaaatttgaagaatccaagtcagacggatttctcttctgctggcaatctgaagcataacccgtctgaatcagtgtatcagatgtcttcaatgtgtccccaccagaatgtggaaaattagcttctccagatgtagcagaatccatgatagactcaggtaaaccagtggtgagatgatccgtgctgtaagataaagcacattttcctgatgaagtagcgatggcatttgatagtttggaagtgctgctgtctgagggaggctttgactgcctctcaagagtagctatttcccctgttttaacaagtgaagaagcattatctacatcaaccatattggaagatcccgtgcttttgtcttccacagtgaaatggttcaactggatagcagatggaggtattccaagggcagcaccaggagaaccatgtgagggttttcgaagaagactattccctttacgtacgtaaactattattaagattgggcagtcactttgggaaacttctgttgtgtagacaacgtagacgacaaaggcttggcagctacaaaagaagagggagaagcatcggactttcgatgccaagtgtgacgctttgtgatatgaattggagggttagcatctttcttagtgtcagacacataaggcagggaactgggataacttttctgagtagagtaattgggtttctttttcctcttttctatttcatacttagaattcatagatgtcttactttggggatcccggtgtggtacagagactacatgctctttaacatgggtcaaagcaaatttaacatctgcatgtgagtatgatctggacacacgaacacctgaaccaccaggaatttcagttccagaaacttgtccatcagatgacactgcttcgccatcaaatgtatcagtcttagcaatgttccgtaagtctttttcttgagagcccacatcagaagttatatcagtcagtttcgctattggatcacccattggcttcataactaaatcacaatgcgccgaagaacctggctgggttaactcatgggaggtcataatttgctcttgtaaagtatctaaaagactatctccattttgactctctttaactctgttggtttcatcaaccatattagcaacatgaatttcactccgtaactgcctgaagctcagcctttgtgagtttgataaagaattacatggaaacactgaatccctactaccagcaacaatatcagtttccggagttctgtgctcagaagttccaccagaagactctattttctctatagatttgctagtttcatcaaccatagaagcaacatgaatttcactccgtaacggtctggacagcctaggcgagctggatagagaatcacatggaaacactgaatccctcctaacagcaacaataccaccagaaggcttggatttctcttcacctttgctagtttcatcaaccacagccgaaacatgaacttcactccgtatccgccttcgtgagctggataaagaatcacataaaaacagagagtcccccccactaccagcagtaatattagttaccggagttctgtacttagaagttcctccaggaagctttgctttctcttcatgagtttctacctcaacgctttcagtacaattatcttccttatgcttgatgccatcttgagaattactgtagttagctttaacagatattttgttttgtatctcctcattcactgccaccaatggcgaaatatgacaaggactaacagaattatcagatactaagcaagaactgacctttgaagaatccttttcaagatttttatctatagagagactccggacagaaccaatggcaccagatgatccatatccaaaacgatcttcaggagacaacttacatactgttgtacatggttgaatttcgtggagaccagattcagtatcagtaactgtttcattaccagacatgccattaattccaattgcaagagttgtttcagttacgaacgcagacaagctaggtaatttatcacaaaatatggcagatctttggctaacatcttgctcaacaagactctctctcgcacaatcagtaagatctttgctaagagaaacatttggctccaataaacaagttttcaaacctctactatcagaaccactatctacacaaggaatttctgcaggatgataagatttcaaaatcagctcctcatcagggacaagtctctcggtgcttacattttccatacacccctcagatggcactgccatagctaaatcagattcatcactatgcgaacagccaccagtcctctccacagacagcacatttgatgatccctttactccaacctttgtcagagatgaagaagtgtcgtttacacaagtctgtttaccttcttcactgtccatattgtcagccgtttctgcagcaacattaagaggcgtagtttccatgtatccttttccgctaacattctcaaccggtgcattgactgtgtttttgcagtgaggaagatttttactttccatctggaaaactacactcttatcaggtgacgtgaccataggattcatatatgtcccaacggtaaaactgttagcattagcaagatcccctgacgcactattatttgaattagcaagatccaatgaaacattagcaatgtccagagaggcaggggaatccagacccatggggcgacccctagaggagtcattttcaggagacaaggaatctacattcttatcaatcctcttgttgtcatcttcaataccaccgatatctgacttcgccaacaccttatcaccagggtcttctctattaaaatagatggaagcatctagatatggcttctgaaaatcctttcctccataacccaaagatccatcagatgaattaatggattttctttcttcaaacccagtatttacttccatcattggtatattccttgatggtatacaatccatgtcctcatcacaatccatatcctcatcacaatccatgtcctcagaacacccagaaagatcagcgacggttggccatgatacaggtaacttaccaggagacgtattgattgttgtctttgtcttcaggatttcatccatctccatgaccttcggcaaaagcgcttcgcctgcattacaatcagtgctcgttctgtccaacacatcttcatgagacttcagtgtactttgatttccatcaataacaccttcctcagtggagcaagcctccgtattgataccatgtttgacattaatgtcatccttggcctctatcaaagtctcacaaaaactagagatcttttctgtatcatgagttgaagcttcaggacctgaatcggtaagtttgactttgctgtcctgaacgacaccattaacaaatcgtaccttgtttagcttaccaccagaatcactggaagacggggttgagtgactgtcaggttctttttcatttttagatgcagtagtttgccttgtagaccgtctgaagccctcagaaaccgaaatctcatctgacaaatgggttcccagctttccatttctttcagttactgaaactttctcatttttatcagaaagcaaagctcttctagctttaatagacctaggtgtcacagacgcacccgaacggatgcctgcacttgtaggtgatgctacgggcttagctaccagaacattcgatttaaatgatatatcaagatccactggacttctccccctttgcttctccaccagtccacgatcagaatgacccaagtgttccttacccctatatgagttagagttaaaccttttcccattaccattatgatgattatgttgccgagaccattcattctctctactgtttttataggatcttggagtttcaagccttagcagagcactcttcttctgaacttgtttcctaggtgttcgattcaactcattgctcgcctctctccttccacgatcaaaatattgttcaatctcagaatgatagtaatcatcctttttctcgggatagagagtcctcccttcattacgtgtttctctagccccttcacggcttgctgatgacctagtcacatctcgacttactgtaagaccatatctgtcactgccataaccaacactagaggataaaaccctatttccatcacctaaacccctaacatatctatcggattctgattttaactgaccacgggcttgataattcccctctgttctagtgactccagattcttttctagcatatccaagactacgaaactcatctctagacctagaactaccatctaaaccacgattaacacccgacgagttacggctgtagtcatactgatagttacggcttggaccatcatccactcggcttcgacccggacctgaatccactgtccatgaatcaagccgcttttcattgaacccaacccaatcagactgagattccgtacattgaatactcgatgtcaacggctgtgatattctttgaggctcataactaacctgctgaggaatgtattgaggatgctgctgctgctgctgaagcgatagtggctgatgctgttgctggagcggtggcggatgctggtagtagtttgaagtcggctgattaaccaccgtattgggcggaagatcttggcgatgatgagagtattgatggaggtaatcttgacgttgaccattgctctgagttgatcgaccatataaattagggctttcgggatgagattgacgaggaggaggaggaggcggtaacggcggtggcggcggaagaggagcagagggaggatgaagatgaggagagtaaggagaattccatggatcgtaggtaggattgtaatgagaagaatccatggctgatttggattttagccttgagaaattttagatcttttgaaccacagcgtcgtcttcttcttattcttcgtcttctgatgaaaacgcacgcaacacgaaaacggcgataaaaatagtataatacacacgaatcaatttagttctcgaatcgttccgattttcggtaaccggtttttatatcttcttcgtaactctctcttttccctaatcttattgggccactgcatttattatgggccgtattgtataagtttccgttcttcagctaaaatctgtgtcaattgtctagattcaaatctaccaaatacacatgttgctgacacaaaaaaaaaatgtgggtacattatcaaagaattagttatcagaaaaattattacatccggtcatgtttctttcaaactcaaaaaaagtttgaataggacaagaaaaaaatacttatgtcatctcttaccacatattatagattaccagtcct

SEQ ID NO: 64289 - DNA, 537 bp, Arabidopsis thaliana landsberg
tatactttgtgtttgtgttgaggtaataaaaaagaccctctgtggaattgaaatgataataataaaaaatggaagtgtggaaaaaggtggaggagatagaggaatccatgtgtatccaagcacttgcagacaaaatgagcttcagagaagagaaaagcaacctttagcttttttaagaccaccagactcagaaaaggagatttcaaacacactctctcctcttttagggttcttatatatttctctctcctcttctttaattatgtcctgagaaaatatccttctccttctcacttaatgatacccaccaccaatccatgatgcatcatctgatctcatcatgcatgtgtgatgatagatggatgatgatgtgtatggatgtctatatttaatgggtgtgtgtgaggatgagaagcaaaaggcaccccacgagcaatccctgtttcactctcaaaagactaaacaaattaaccaaaaatatatatatgtatatgccctaactttagcctttgcctttctcttctcacttgccctttc

SEQ ID NO: 64290 - DNA, 1856 bp, Arabidopsis thaliana landsberg
  unsure (1)..(1856): unsure at all n locations
ctatatcacaaatcatttgtcataaccgaaaaaaataaaaaaaaaacaaaggagtttgttaactaacaatcgtcaactttaagtaatgatggtaataatgaacggtgagtgctctcattttttcgcagaacttatttgagagtaataaatctgcctaaatgtgtttttattcaactgtatatttaatttagccgaaagaaaagaactaagtaagtgctccactataaacagtggacaaacaagaatttgccacatttacttccactcagttatattttgatctctaataattaagcattttaccaaacaactccttgtttttaatatttcatgaaacatatgttaacttcatttcaccaatatatacctaatccttgggtatttaaataaccataagcaaaagttcgattttcttgactcgagtttttcgggatcaaaatctacattgtttataattgccatgtgaattctagagtggtcaaacttgtagatataatcttaaacatcaaatagaaacaaaaattactgggagtactataatgtaagcgacacaatgatcatataattattttgaacataactgaaaatttatgaaagttaatgttattgaaagaaaaagaatttgcgtacccaggaaccaaagggtaaatagaggaatgccattcgttcttgagacaatggagatcactatgacatattccacaatataacaccttcactctcacttcctcttctcctgttttcctgcacattgcacatatcgtgatcatcataatggctataataatcatcgatccatcatgtaacaccatcctcatcatcactcagtcaccgttaccttctagaaaagacaaagggagagagatggcctgaggagtctctcgcggcccatccaaacgcctctacgctctgctctttctctcctgataatctctccatctctcactccctttgtttcgaacaattaagcgagctagagtacctttctttttatatagaaaagagtgagaacagaaatggggctaaacgctgacgtttcgtttgagaaatatcgttttgactttaggtctctcataccaatcagaagttgacttacatatatgtattttttcttaacatatttaacataaacatattacttataatgttcatatactaacaaatatatcatgcatcgtgattattgtactatttgatatactatatgctttataaatcagttttggccacttttttgtttttaattaggaatactctagagtatgaagaacttgatgaacttatggaatgattagttttacattaataacaaaagaaaaactaaaataggccaattaattaacaaatttaattgtcaaacaatttttttctatatatattttagacgtgggactactaattaaaatatataatccctcctattacttacacattaatatatgtatttagtttatcaaactccggaaggaccttccaaacgaagataatcatacattacacctgaaaaagaatcagagttccgaccatgagtaagaaaaatagtattattaccaaccctaagtaactttccatgaacatcgatattgtacaatttgtacaacccatgaatcccatgcctcgcgatcgcgttatcccgaccgattagcccagttatgaatagaggtttggaatcaacttcgttgacccaaaccagtagatcaattgttgaggctgcagccaaagctattcgaagtgtgtatattctagtttgaatcactgctttcaaattaaacttaatttgccatgtcgntgctttatatgtcccatttccagctttcctatatattataaaatatatagtttttgtatcgagagag

SEQ ID NO: 64291 - DNA, 206 bp, Arabidopsis thaliana landsberg
ttttgactatttcttacaaggaccagcttcagttatttagtcaacgagaccgagtatcatttgggttactttcttactgacggaataaatcctaactcacgcgggcatttattcaatctattgcacttgcacaacagtctcaaggcatacttatttgcaaccaccctaacaccctctccgtaatcgattgtggatcgtgctctagc

SEQ ID NO: 64292 - DNA, 1675 bp, Arabidopsis thaliana landsberg
ggagagactaaccatgagagaatggaaagagcatcgatttggtgaaattggtggttgcagccatcgacgccattgttgttcgtgtagagagatattagagaagggctttttttctgaaattcgagaagataaaaccggaagctaattttttccgggcaacttgttcgtagcttctgtgtttgttgaagcttttaaccaatgattttgcgccacgtcactttaactctttttttgagcttagattgtttttgtaccattcttttctagtgaagaagtcgcaactttaaagtttatacactttcagtacgaaattgagtgatcaaacgtaaaatgttcttacatcagatattgattcgattttcgaaaaattcaatttctagtatagatgaaactttatcagagattgtaacatgcttcattaaaccaaaaaaaaaaaaaacatgctacaatagaaccatctttcgtggttctatgtatgggacatggtcatatgtgttgtggtcttgtggagctgtattgcgagaagaactattgattgattgtggagttgcctatataccctttatgtatagagagactcaccccaaacatttgaaatacctctaggcaaaccattttgggctctttcctgaaagaagacatttatcatcgtatcatgtccaaacaaacatactctgcttgtacagttgtaagtttgtaaaacacatgataaaagcataagacaacacacactccaaaatgcaatcatgatctatacacttattctggtctctctaatggcattggttattattctcatgattctcaatctcacaacaaaaaaaacatcatgcaaatctcctactgtcacattgcataagaaaaaataaaaataaattcatgaattcaatctctgattcctcatggtatattgtcatgacctaacaaaggtttttttggtaaaaaaagttgatataaaataatctaacaaagttacaaagaatcttctatgacttctccaagcaatgaaccttaccttgtgtatcatccattgctagagatactgattctttctgtcctggatcagcattcagagatctcactgggactgtaatgagtttattctgctgtttctcaagcaaagccatatgttttttcccaagcgtatgattcctcatcgtctgctcagaattcgtctgaatattacaagttttgcaccaaaccgtttccttctttttcttctcaccttttgtcttctttcccgttgtttctttcgccgcaatttcatctactttttgaccctgcggattagcattttcacatactctaatggcttctggttgcggtgctgtaacggaagcaggggataaggaggttgaagcagcttcaggtgtctcattctgttgtgtaacagcagccttatgctttttacctaactcatgatccctcatgactatttgacaataggtcccaactttacaaatctcacaccaaaacttctggttagttcttagcttaccttctgctttctttccactgccaagtttccctgaacatggaaccttcgaagagactatttctccggtttccaaagacatcgcctttgcttctgattcttttgctttctgccctttcacttgaagaatcttgttcaaaccagtttgaatattctctgctttacgcttttttcctacag

SEQ ID NO: 64293 - DNA, 415 bp, Arabidopsis thaliana landsberg
ggccgcttgaaggtgagccgtacgtcggccgacggccgcgagtcgatcgtccgggtcgccggccccggcgaggcgatttgcgaggagtccttcctcaccggggcgcctcccgacgccgacacggtcgcgctcgaggcgtcgcggctgtgcgcgttcgaccatgccgacctggcggtgctgctgcagcggctgccgggcatcggggtcggcatgctgcgggccctggccgagaagctaacgtcggccgagcggatggtggcggggctgacgtcgtccgacgtctgggcccgggtcgcggcgtacctgctcgacctgcccgcgacctgggacggcgggcgcgcgcgggtgcgcctgccgatgccgaagaaccaggtcgtcgcctaccttgggacgacgccggagacgctcagacgcc

SEQ ID NO: 64294 - DNA, 572 bp, Arabidopsis thaliana landsberg
caactctatcagatctgtgagcgtctgctttttatcttgttcttgcttgttctcgatttcttgtaggttcaagattgttcttggcacggcaagagcaacaacaacaggagccggtgtaactatcgctaaggcatagcacccttgtgattgttgtagtcggataacacaatgtcgacctccaccccaaatcgtagttattaagagacggtgtacctgtcgctcaaggcgccacaccatcttggttgtggtagtcggtagcgaacgtcggcttccaaccaaatttccacctccaccatctctcatcgaaagatcaggctcccttctacccgttgggtttatcaaaaaaacccaactctatcagatctgtgagtgtctgcttgttatcttgttcttgcttgttctcgattgcttgcaggttcaaggcttttcttggaacggcaagagcagcaacaacaggagtcggtgtaactatcgctaaggcgtagaccacttgtgattgttgtagtcggatagcacaacgtcgacctccaccccaaatcgtagttatcagaagacggtgtacctgcgctcaa

SEQ ID NO: 64295 - DNA, 1540 bp, Arabidopsis thaliana landsberg
gaagcctatgaactgtgatcttctgcagtccgttttcacgctcgaagactgcaagatgatctcggaaaagctgaatttcctgaatctttacactgtccatgcaaatataattgtttagctaggcatacaaggtgaccttgatgttaaatgcattataaaactaatctagcaactggaaaacaacccagcatgcatgtcgtctaagccgaaggatatacatgatattaaaattagttatacttcatttggattttggataggccacaatggcaaccagattctaacaaaaaaagtttacctttctctatgtggaagcagaacagttgtctttgatgtgtcatcaactggacaggcgatcagttctgagttgtaaaattcagtgctccttctctggatgaaaaagtggttcccacgatgactgacagatgaatcaattccatctacacgaggtgtcaacaccctgagtccatcctgagtcttggacacatcaagcgagaagacaaatcttgtagttttgctttcagatgcaacaaataaatacttatggctctcagaagcgtggagttcaagagaaaacatatcatccttctcatggtaaaggcatacatcactgctctgctctgtccctaatttatgtaaccaaacctgttacaaagaatatatgaagatcagaacatgaaagccaaaaatattgacgtatctcataataagtacagtcaaatttggtaagaaaatatggcatctatgaggtgtataatgtcaacaattgatcgaatcggtaaaatctatattcatgcaaaagttaatcccttcctccagtactatacactaagacagtagggtgggaaaagattgaaggtaaaccttatcaggtcgcaggatttcgtccattgttatgtagagcaaagcatcattaccagcccattcaagataagaagtaagtcctttaagctgttgccccactggttttagggcttcagagtcgatgacattcactgtatatatctcatcaccttttgtgtcctctgcatatgccaccaatttatgatcgggactcgcctataaaaagaatcaagaaaatgaaacatcaagttagtaaagagcaagtttgaaaaggatatctcttaggacgatttttaaagtctattttctagtcaaaccttgaaggccccaattctgtagtagtcatgctcttgagccttggtattctcatccaatatcacatgctcaggaggagcatctggaccagttggcatagtatcatagacagaaggctcagctttgttgtcagtgatcaaacgtctacagtgctgaatatattcctttccttgaagatttttctcataataatagtaaggacccttgcgtagaggtgcagatatatcatcttctttgatcctccctcttatttcagcaaacagctgattctcaaattgcttggtccctgaatttttattttccagtctaatttatcacaagcttgcataatcaacaagtcactaatactccaaattgaataacaggaaagctaataacccta

SEQ ID NO: 64296 - DNA, 294 bp, Arabidopsis thaliana landsberg
tttttttacttctcttgtgtttctctcaatgatctatagagctcgcgttccgactgctgcctaatacattatccagatgccttcgtaactctacgaaaccctaatctccaaaatcagcccatagtttcaatcatggatgagaagatgtgagtacgtcgacggagtatgtagctagatctcaaggaaaatacgaatggttcgatctagtgggtagacaacaaaaaatggatcgcttgataatacatgtgacgagaatcgagaagggcccggcgatgcgaacaaaatgcaatatgt

SEQ ID NO: 64297 - DNA, 874 bp, Arabidopsis thaliana landsberg
tatccaacggaagctggatctgttcttctctgcaggaattacaatgttaggcggagatagtaagtaaaaggcggaaatcgagaaaggacgagtcgagtttacagtttgcgaagaggggaactagggctagggtttaaagtatcagaaatggttgcagcaaatccatcggaatcattccagaggaaaacaatcttctccgctactttcatcgttttgagaactgagcgaatctgtttaatcctgtttttggcttattgcacaagaagcgattattgtttaatccttccaaaattctgatttcttgttatttgtcatctagtccctatttttcccaatgttttaaaatctgaaccaaaagaaaattggatgatatatgattttttttttttttttttttttgtgaacaggaaaacagattatatctcgtttattaactcaaagatataccactaacaatagtcaatcaaaattttgaaacgtcatacaaaaagaaatttctaaaaaagacacaggataagtatctatgtatggatgaaacacaaaaaacactagttctttggtatttgtcattgatatctgacttagtgactacattcttactaaaaacaaagatgatcttttttggaaaactaaacagaatttgtaacaagagcggaatgtcttgtaaggtggtgactcctctcagacctcacctcagggatatagctccttataccaggattatgatatcatcaagcggatctctgtcacaaactattcaaatatttcacctcacttgatataattttactaactcagatccgaaatgcaaaccaatgaactatttaccaagaagatgtttgaaatgtttagagcattgtagtgtccactgggt

SEQ ID NO: 64298 - DNA, 184 bp, Arabidopsis thaliana landsberg
tgcccaaccaaatcaaaatccacaaagcgcatccatacaaagggtccctaacgcggcaaccaactgacactatggaacacaagaaaagacaacaaagagaacccctcgcagcgcacccactggcaagacagaccagaaggagcgcggaaagcaagaacaaagcaaacaaccgcagagaaaacca

SEQ ID NO: 64299 - DNA, 2070 bp, Arabidopsis thaliana landsberg
agccgctgcaaaagtcagcgtcgatgtcacctgaaataatgttgaagaatgcttatttgtacacatctcttttcttatacgattttattaaattgagaggctaaatggtaaatctcttaccccatcaccaattgcaaacaagctcacaagtcgacggttctgtagagagcgtttgaccataatggcatagacgtcaaccatggctagtgcaagactccacaagctctgcagaccagtagctgcaactaggtagctgatgaatcaaatacagtaaaccatcttagcagattctaacagtcaccaaacatggtttaatcacataaaagcataaaggtttaacccaatatactacccatcccgtacaatcggttcaactatcacattatgtccacagcttaacactgctactacaaagattcattcatctggactctagaaaatttgcaacaggagacctacatacaaagtacaccagtgcctgtcacgaaggcaaacttacctaagtaaccactaccagacaccatgatgcaaagcatgattaataaccaaattaaacaacagtgaccaaatgaaaaacatgatatgatagccattttatcaacagtaacttctcgaagaaagctcatctagttaaaatgatctttatgaccatgatatatcccggattagcagctacatcatattactgggcaccagtaataaaatcccctatacacagctgttaactagcttctaataagccttaaagatactaatagactagcaagcctcataacttatcatattaagccacaaacccgatgcttattttgtattgcactttcggaaatggaaacaacaaaaagcagattccagttcatagtgtatagcatattggaagaaagatagggtgctatcacatccgattctgataaatacagattctcacagaagtttatagtaaagcatatattcgatttctaatagaccaaagtcttaccagaaggcggtaacggaaggaaaatcactagtagaagccatgacacaaagagcagcagcagcaaacaagaactgaaaaaaacgcaatgcaagaccaagcaatgttccaggcattccttccatatcatccatcctcacccgaggcggattctctacttccgtcgcagctgcaggaggatcttccactggatgtaccgatgcatggctcacattcatttcttcttcttctttcctccaccaaactcaaccaattcaacacatctctctctcccttcctcttcaccaatagctgaattacaaatctaacaatctactactactcaaatctcccctacctgtattcaccaaattaaaccacaatttatacaatgtaatgataactcagtacaaagttcaaggaggactaaatcaaacatagaatcaaatctccgcgatagctaaactaaatccaaggttacgaaattgaactagatttggctccggagaagtaaagagaaaacgagatccaatcaattagcacgtagatcgagtaagggattggtgtttacctgagagaattaagaagagaggaagaaattgaaagcagccatggagcttgggtagaggaaattaagaaaatcctaagctatatttgagggaagaagaagaagaagttcgtggaaatggtttctaaggtttatgcgaagaagaagaagaggtgtgggtgttttgatcaaaagaaagaatatagcttgtttgccaatagattaaccattaaaccaaatttagaggtcaattaaacttcttaaggggaaatataaccaccaatctatattttcttttgttcacattttttttggtttcctaaattatactttaaaatatatctttttttaagaaacaataccacatatattttttattttttccctttttacattaatatgggtactaattttatttcaaatattatcagtttatcactaactatgatttgtattgtagcaatttagcatgctttttttttgttaaactccaaaatgtaatataatttgtgatgaaaaaatttctgtaccaaccaaacgacaatagtgcattttttaaatacaaatc

SEQ ID NO: 64300 - DNA, 488 bp, Arabidopsis thaliana landsberg
ccatctcaacggttcttcaggctttcgactatatataaactgaatgtggaataatttaaagacatttttctcaacaatgttaaaattgatttcatctttttcacgcacacgtaccattgattgcttttacgacatgcatgagaaatgctagatatatgtaattatacatatagatgtgatggtgtgtgtaaaagatgaaaacataaactatctacgagtaaatcgatcactcatacatactttataagtatcatagttcgactttggcgcatgcgtttttttcttatcaacccatctctataataatgcattctgtatcactttatgtcattcttaatactgacattcacatgcaacccactttcgtgaattctaaattttatgctttatactggacgtaaatacactactcagtattatattgtataacatcattatggatgatagagattgtcaaacctataacccataataacgcaattactaaa

SEQ ID NO: 64301 - DNA, 345 bp, Arabidopsis thaliana landsberg
ggagctgtggacgacacacattgccgtagtgagctcattgcaggagggaataccagccggacgtaaactactgaaataggcgtgcgaatgacccaaacacagaaagcctgtgtatcgaattggttggcctctctagacgaaccattacttctgacaacccattaggtacctctacagactacagctcagatcattatcgatttatggttaatattacattggaaacgttcacctgatcaggtggggtcattatgatgctcgggccctgtctccctgtggggcgcttaaataaagacgtattcttccacaatggccctttctctttgttcttgtgatccccagaag

SEQ ID NO: 64302 - DNA, 654 bp, Arabidopsis thaliana landsberg
gtaagcaaattattgtcaacttgggaacttctttacacttccgaccaataacgactttctaattaagactattttcttgatagggaaacaatgtcaaaattcgtttttggatactgtataaagcaaagtttaacaaatttatagatctaatgttatgtattagttgtaaaaagataaaaaaaatagtaacaaaaatattaaaatagtacatatcaaagaaaatatatacaaatttacatgggttttgtaaattgagttccatccagatgcagtgagtgaaaataaagcaaatatttgcaaatagcatactagtatgtcgtcactcgtacgtcagtcatcacataatgtttcaacccatatattattccaaaatatgaatcatcttacgtacttttttttctccgactcatgttatagtatatcaaaaaagtttaactcatctcacacgatatgtcgatacaaacccactttgggctaaccaaatacattccatttttagggatatgttgcgttcatatattatactgtatcacatcacatgtctttaagtaatatttcagaattgtgtaaataaatatttgtgtgcttccatgaagaattggtttttaagaagaccaatgcaaaaagaaggtggtgtttgagtttcggtggtaa

SEQ ID NO: 64303 - DNA, 958 bp, Arabidopsis thaliana landsberg
  unsure (1)..(958): unsure at all n locations
ctttctctctcttttacccttctttctttctcctttttcaattctgccactaaactattagaatatcaatatttgcccttttattttctttttcgatcaatttgccctctattaatcgaattatactgaagtataatgtatgttttaatcatataaataaggttcatgacactacatctgataagacaatataactaggaataagcatacatccttgatgcaaatatagcctatattgttttaatttacattttcaagaaacatctaacttacataatgtttcatgctatggtgaagaaaagacactctcgaggtgacaaagtggacacatgggcttcaaaggcagaagcttcacttcttgcatgcgataaaatatatggggttcttggccaaattcagtaaccttaatcatacaatgaatattggtcatgacacaaattgtataacttctttgttgggcatatgcgggagtccgatttagtcagtacactatgagttaaccgtggcaaaagatgcacgcttttactcggcctacgccaaccatgatatttttgtttgcttagatatggttgaggttttagtacaaaacttaaccgaaataggaaaaaagaaacatcatgaattaaaacatgttgccatcatgggtaatgacctatttggatttaatgtaagataggccaaacatatgactctcaaataaaagtaaagtaattaagaatattaattttttcttttgtaacaaacaagctttgagctttagaaccactttttgattgtattttcaaagcctaaacaatttaatttcttccacgtaaagactcaaatttggggaaaaatactcaacctttcttccaaggaaatctttgaaactaagtgaactatcaatacttggtatgntaagtaagaacatgattctagtaagagtaattattaaaataaatttgaaaactaaataatg

SEQ ID NO: 64304 - DNA, 1207 bp, Arabidopsis thaliana landsberg
gaacgactataattgtacatcattggcaatctcctggaaacttgcttttattaatttataaatcgcgacatttgggagtcaaaccccatatctcttgatgtaaaaacattaatgaatctttactcaaccaatgagctgagattttgaatgaatattggattattaatgttaattttactgagaattgaatttgtgtggtcaagtaaaaaagtaaaatagaaaaattattgaccagctatcattcatatccacttcatacgttcgaacgccgtgaattatggtagcaaatagatgatacaatcatgcacgagttgtttaaaagctgtggttaggttttgaaacaaaaaaaatcatgcattatataactttttatttttgaattcagactctttttcagagacagtttttttttccctttctatggatatgcccccaaaagttattaatttaagattttttttttgtctgcaatatgataatacaagaaatttaatttaaatttatttgttgaaatctaaaaatattcaagtttgagattcaatttttttgttttaatcgacttttgaggaatttgtgtatgttacaatttgtgatattttttatttgaatcgcaaactagaatcatttgattgtgaacaaaagttaatgaagtcaaaagttgttcatgaagccaaaacattttctgtatagtatatattatcaccttaaatgaataccacatgatttttttttaactagtatttaaaaatcaatgaatgaataaaatctgatgattgtttgaccaaaaaaaaaaagaataaaatctgatgacaaaaaaaagaaaaaataacaaatgattacaattttttaatattaaataatagatcgaataacataaattttactttggaatgttaaatcaattaaatccatgaaccaataaattattataaatggatttgaaagtgaaaaatagaaggatttaaatctatgagtaaaaaaacatgcatcatttgtagttattgtcattcttcagtttacagaatttatgtatgggctttaggcccaacgtgttataatccacaagggaatttgggctcaaagcaagggagcccaaatagctttcgacgagtcaaattattcaaacatttggcttcttcgtaagataatgcgagtggcattgattcatctgatcaatgacaaaggataagaaaaactaaaagagagc

SEQ ID NO: 64305 - DNA, 551 bp, Arabidopsis thaliana landsberg
acattttgctgtatattctaacagcaaattattaactcatatgtttagtatataaaaatcgaaacaaataaaaaggattagttatgcttatctcatccagttacgtacatgtcccgacggtttattacgatctcttctaaaccaaattccatcaggcttagcagtccatgagcgatactgattacatcgttcagttgcagctgctctgtatacttgaagattaaaatgaaactccattttatccccatggttcaacatacatgtccacactgtcctttctcttctgttggaaacatccgaaaacacaatggtaaaattttgattgacttttaaatattggacacctttatcttgctcgttaatactaccacgacaatgatgcttgaggaggttacccggagccgagttggttatgaatttctacaacatttggtgtgttgcaagcttcattgaacgaaaaatgaatggcaatactaacgtaaaatatgaggtggatcaattttttaaaacttagaatactgttttgagtaaggggccatgagtttgagata

SEQ ID NO: 64306 - DNA, 487 bp, Arabidopsis thaliana landsberg
  unsure (1)..(487): unsure at all n locations
cggcgcgcgttccgcctgggtttcaggcatggaatcacggatgatgaatttctcccggaggagtgtatcgttgaattcagacatgaccagtgcgttccgctatctgatcgcattctagcacagacagggttaacactaagaaaatagtggggcaaatagtgggagatttcagggttttacgcgcagcgccacggcatggctgccttggccgttggcggccacgagctggcggatttgcgcgtcgttatcgttttcaggggcgacctgannnnnnnnnnnnnnnnnnnnnnnnnnnnnnnnnnnnnnnnnnnnnnnnnnnnnnnnnnnnnnnnnnnnnnnnnnnnnnnnnnnnnnnnnnnnnnnnnnnnnnnnnnnnnnnnnnnnnnnnacggcatggcagatttccgcgggttccagcgaaagcggcatattggccgcgtggctgaaggcgtcgagcatcggcacgccaatgaggcactgcagcagc

SEQ ID NO: 64307 - DNA, 420 bp, Arabidopsis thaliana landsberg
  unsure (1)..(420): unsure at all n locations
acgcgtgtaaaactgcatgagccacacgtgggccaagctaaccggttacctgctgcgtcttaaacagttacacacataacaaacgaccgctacgaacataagtgacaactcatctccaggtaaccggtacaaatgggaaccacagaaaatccacgtggcataaatctataagctaccgtcaagtgaaaccggtcccctgattggttaacgtaatcattttctcaattctggaccctactgtagtannnnnnnnnnnnnnnnnnnnnnnnnnnnnnnnntttgtaattttaattatctaataaattacgtaattatcacatctcttaattaattatctcttagttaataaaataataagataagatttcgtcataccaaatagatttcaatacatccaaataaatcttaacttgagtaaga

SEQ ID NO: 64308 - DNA, 830 bp, Arabidopsis thaliana landsberg
ttatgtgaattgggggcgggactgaaaccgactaagcttcccttctcttctccaactcacgtgctttaatttctcttcttcactcacgtacttcttcctcttagtgtatacttgatacggtctaccattgtcatacaacgtatgcatgcttgtaggattgaaagaagacctctcttcacatttctcacattatatatgcatgaaacaaatgttattgatgtcttatgacagataatttcatgcatgcaagcctactacggaaaacaaataatgtatattcttagcaagtatcaaggttatatgagctaacaaacatcgatcccctaatttctcttacaacttatataatcgtataactgacttagcttacgccttgcaactaaattattcttgagttttacttttgtaatttgatatatctctttcagcatctgcttcatatctatcttctccgttgtaaggctcactggagattcatcatgatttccatcatatggcaattggaagaacagctctatacatttattaaactcggtctcccatggattatcatggtcgcagtctactctttgaatttgtttccctaattgctttgatgatattagcttcttccaaatatcattggcaactttttcaatcatgtctgcatccgatgccctaccaatgaaaacgatcttatggtctcataaatcatgcaaaatgtatataagattattcaagataaagcaactaataatgaattaccatttcaaagaacactcgccagtaatgcttgctgcatcattcaaagcacgactccatctttgtcgctcatcatttcttctcttctt

SEQ ID NO: 64309 - DNA, 582 bp, Arabidopsis thaliana landsberg
  unsure (1)..(582): unsure at all n locations
acaatnntttattatttatactctttttgggtgagttcttgatggatgtcttgaattacaaattttcactccctgaaaanacnaacccngagnngaggccggctatgctataacgaaaaataaataaaagcaactaacccgacagaaatgtcaaccaactatccaaaattaaaaacaaacgtggagagcgtcatattattagtaggccaatcacacaccaaatgtttgtttaacaaaaaaaataagaatgtcaaccaactatccaaaattaaaatcaagaatacatttcatatgtttccaatatgtttttcttgaacaaaattgggactaaagattggaccaaatacgtgtgcgggtggacccgatagaagccgagttgagtctaaagactaaaaagtaaacaaaaaatgataagaccatcacttaagttattgcatggaaatgaaaagcacatggctctctctctctcttctggccttttccatctaggtttcctttaaaactccattatatatagaaacaaaatcttttctctcttcaacatcccacaattaaaaaaagagaacccaagatcgactctta

SEQ ID NO: 64310 - DNA, 365 bp, Arabidopsis thaliana landsberg
  unsure (1)..(365): unsure at all n locations
aaacttcggcttccttttctttgtgagttgaaagcacctcttgcgctggtgcaacttaaaagtctggcctattgcctctctgaaatcatcatggacatgagaataatccctaatgatatcgcttgggctaaagatgagatggcctctctanaaaattaaagacccgcatcatatgaaggctcttcaactatatatggacataggaccgattgaagaaagcgatgcatccatgtgcgggaaggacaaaccgggttcatccctaccagacgctcacatgcgaactcgtccttcgttgttatcatctgacctactaactatagtatcatgagtgaaaaagatgatacgatgaccctgaagacgtggct

SEQ ID NO: 64311 - DNA, 490 bp, Arabidopsis thaliana landsberg
cgggggcctggatatctctcatcatcaaggcagctttgactttaaaccctggccacaaagaaacctgattttatggtattttaaggccacggagggaagtacacatggtgatgacaattatgaaaataacagaacccaggcgcgtaaatatggcatcgtaagcggtgcctatcattttttctgatttacctcccctggtatccgccaggcgctgcattttattcacacggccaaacttaaaaagggagatcttccacctgtattagatgtagaatggatcaaacccatgccttcagttagcgctgttgtaagagaggtcactacatttttgacgactgttgaaaaagagacaggtgtacgcccggttatctatacggactgtatgctttataaccaatacctgaaagtaagccttcggcgcaaaccgtcattgcttactttatttcccgccatacttctgcctcaaattaataacaatggcaaaatttac

SEQ ID NO: 64312 - DNA, 552 bp, Arabidopsis thaliana landsberg
  unsure (1)..(552): unsure at all n locations
ccaactcatttaaaacaatttttatagatttattgtcagttccggctgagatggtaaggcaggtgcgacaggcgtatagtactttactgacgagtaaaaattaaagtttgtaacccttccaaaaaggtattaagaaaattgtatgatcaattcgatctttaaaataacatgttttccatttcatgaatatcaagacttataaacttttgttgttttatataagttgaaacaattgttttaattttatgtaaaataataatgaattacttaaacgtgaaaaacaacttcatatgttttgttcgatgtatacagttacaaattacattgaatctcacaagaaaggaaagtcgtagtattatgagattacattacttgaaagattagatataaatagtaatagtaatgtgaaagaacaagaaaaaacttattaggtagtaaaaaagaagagaatgaagtggagatgactaactctaggggtaaacatcagagccaagtcagtgacagcttcatcacagtccccacatgagaactatntttgcagtattaactcaa

SEQ ID NO: 64313 - DNA, 567 bp, Arabidopsis thaliana landsberg
  unsure (1)..(567): unsure at all n locations
atattttatcggtttagctcttataatactactgatattgcaattaccaataaaaatttttattttttaccccaacnnnnaagnatatcaacatttggtttaatatggaatccattcgcaagctagtttccaatagtttattttttatttttggcctgtctttcacctatggaaccaaatgaacaatggtctgcacatccaatagcctctctacgctcgcagtcttcaagttcatcaatagtgaagtaaaaacaccactgctagaatagataggaaaatctttttgaaattttatgaccttgctgctgcgatgaaaattggaatccttgttttttctttttgccaaggatccaaaatgttgggctcgttactaactgtaagacctaattatcatgttaatgatatataccctttcgcaacaacttggtcggtctttcatggcatatttcaatattatcttagacaacaatttaaatagaaaaacaattatcagacatattaaatgaatgtcaaagtcagtcctagttaagttttggtgcacctattcccattgagtctcagactttg

SEQ ID NO: 64314 - DNA, 1862 bp, Arabidopsis thaliana landsberg
taactttctaagatcagtagaatgcaagagaaagattaaagaagtaaagacaaaagaattccaccttatcgttatcgtccttatccagtctagtattcatgatgatgaccattggaggccagacaatttcataatccttttcatcctcacccaaacccttccactgcccataaatctcaccacaaggaatgacagatgcgcctctcatctgtagatccttttctaaaacttcagccaattctctatggagcttaactcgcctagctccttttgtcctcgcatgagctagtagagggtgcaggttataccaatcgatggcaccaggtccgttctgacaagctggacaatgccactgcctctgtggttcatttatctgctcgatcgacaagctatccaagctgccaaagaactttttgaaccacttattctgctttcgtgatccatggctcttttgactcacatccgagtcataatcatcacttgcaaggtcgtcatcagaatcatccaaagcatcggaatcattctcttcctcagaagcattatccacatcatcctccacgtcaggaaactcctgcacagctgtgtgctgagcagaacctcctcttgcctgccaattccatcctccttccaaaggagggcgagatacaggtgggggtgccacaaagttgttatcatactttctgctcaacgctcgtccccgaccagatatgttagcttgaatgccccgaccattgccgttacctctcccggatacattgtttcctctcccagatacgttgctacctctcccttgctgctgaccaccccaagctctaggaggattcgaattctgagaaacccaagtttttccagaagtgtttcctggtttgttcttgttcttcttggaaatgacctcccactctcctccatcatcttgtgaagaagccagtctcgtccctgccaaaccttgaaccaactgttcaacctcaggcctagaaccaccctgaacgttcttttccttagacattggaccagccctagaactcatttttacaacctatagccaccaaagaaacccacagtcactaccaaaatctcaaaatccacacatgaacgtgaagttataacaagccaacaacgcataggctcaaaaaacaaacatcaaagcacaaaaggtagatcaatccgatgtatatgaaacaaaaaccaaaaaacgaaggatttttcacagtcaaatactccgatcagcgactaaacggtgaaagcacaacaaaatgaacaaaaacagtaagacgcaggtatcgttacctaagaactataaaatatagggaaaaaagtaacccatagcacaaaaaccttcgaaatcgagaacattagggcaatttttccagcgaagaaaaagagaaatcgagcacagaatgcatgcggtgaggcgatcggagactctaaggcagaaaacttacagagtaaacgacggagaacgtaagtttaaagcgccggagagtgagagtagagagtcaggactccggaggaagaaaataaactgacgaagaagagacaaatgaggaagcttattaagctctaaaacggcatcgttttcccgattctggactccaaattttcattcaatttgattttgttttcatttttgtacctttttttttcctttttcgcttaacttaattgttcccactattaatttattgctacgaacatgacttgcttaatttttgtttgtttgtcaacgtaaacatgtcttgctatttttgtatttaatataactttcaccttattaaaaatgcacaaaaagtagatatataatttttacttatattttgttaggtttacattttttgaaaatgtttacaatggaaccatactga

SEQ ID NO: 64315 - DNA, 294 bp, Arabidopsis thaliana landsberg
caaactcaatttctcatgtcctaatgggttagagacagtaggaggaagagcacatggagattgacacctagggtgatacaaatacatgtagggtgtataaatcctctatgatacccggtgactcaccttcggactgagactgaagagaagacgtgcagagcgagctttaaacgattgatacgaactatcggtgaaaagcgaacctaacaattgttgtgagctgcgaagtatgaatgtactcgaatgggcttgcattataccacccgagctatgataaatgtgggaaagacttct

SEQ ID NO: 64316 - DNA, 737 bp, Arabidopsis thaliana landsberg
cggaaccatatattcacatttaataatctaagggcctttataataacttaacttgtgacatgacaattatggcattttaacggcgttaaccaacacatcacgtcatcatccgtggttcgagcggtttcgtaaccggcgagtaaaaacagtgagtgagggaggagccaaaatgtggaacccacgcgtctcctcgacagctgagcttctctctctctggcgccatcttagaggtctctcaatcggacggctgtgatgcagacgttaaaactcacaataattcaatgatgatgacttggcactttcttattggatcatcaactgactagatcagctttggtttcattttctctgtttatcaaaattttgccactaacttaattaataagttaattgatgacaaaaaaggttgataagctaattatgcaaaactacctttttgtgacaaatttaagttattaaaaattctaacattttatgatattttgaaagttaaagttttttttttcctttgaacaacaaaaagttgaagttattataaattctaacattttgtgatattttgaaagttaagttaaagcaatatttgtttccgtaaaaatcccatgactaggtaagtgtaattaaagtttcttaaagatcgggttaactaaacattctttttgtaatatgtgaacactagaaattcacttttgttcgcttttggccataactaaataatgaaatgaaataatatgaag

SEQ ID NO: 64317 - DNA, 397 bp, Arabidopsis thaliana landsberg
ctcgaactcgagcccttggtatgttggtggcgggtcctctttctcttgcggtgctgcgcctgacactagatttacgctctgccgtggtatgcccatctctagcgggatctgtcacacgttgactgttggccactgggaagctagaccatcatctctcttattatgttgaaccaccactatgtgagaccataactctggtcccactatctacagatgggtccgatccaataatggccgtggacgagcccggactcgcactgggcctgggttttggaccccccagcttgggtccctgatgttcattgagcccagcgtgaacagttgctactacttgctccacgtacgccgtgtggtacagtgcccactgcactgttgcactaccaagcacttggctgct

SEQ ID NO: 64318 - DNA, 1049 bp, Arabidopsis thaliana landsberg
ctggcttgatatctgaggctcacggttctaaagatgcaactgactcctcaaggagtgaaaggctttcatatcttaaagtttcaattgctggaaatgctagggaaagggtatgttcttctgtcaaaaattatattgtagactatctttgcacttcattgcttgatgggatcattttgcagcaaccatggaagaagagaattgaggaagctggtgcagagtttcatgctaatgttaaaaaaggtatggataactcgagtgtctatttttgattattgtgacactagttttagcttttgaatatctctgtttcacaaatttgtaggtacaagctgtttggttgtttgtggactgacagatatcagagacgctgaaatgagaaaggcaaggtagaatattgccttcattgtgctgatactctttaactttgtcacactattttttctcactttgaacgctggagttgatacatgtgtggcaggaggatgaaagtggcaatcgtgagagaggattatttggttgattgttttaaaaaacagaggaaacttccatttgacaagtacaaaattgaagacactagtgagagccttgtcactgttaaagtaaaaggacgaagcgctgtgcatgaagcgtctgacctccaagagcactgtcacattcttgaagatgggaacagtatctataacacaactctgagcatgtctgatctctctaccggtatcaatagttattacatactccagataatccaagaagataaaggttcagattgttacgtatttcgtaaatggggccgagttggaaatgaaaagattggtggtaacaaagtggaggaaatgtcaaagtctgatgcggttcacgaattcaaacgtctatttcttgaaaaaaccggaaacacatgggaatcttgggaacaaaaaacgaatttccagaaacaacctggaaaatttctcccgttggacattgtaagcatccatatgactatatcttttgtctcttaagattctcttacgtatcgttcaataaactcttttgtatcgtttgttttagga

SEQ ID NO: 64319 - DNA, 194 bp, Arabidopsis thaliana landsberg
ggagcgccccaacaacacaagggtcatatttaaagtctaaacaacacacacacacccaacttggctaaacaaagcaggagaaccacccaatgtttaacaatctctgcaagggcacaatcacaagttaggagcgaaaacacgaaccttcggtctctgtaaaaaatccgaactatctaacccaaaatgccaaaaat

SEQ ID NO: 64320 - DNA, 278 bp, Arabidopsis thaliana landsberg
cgggttacatgctatgtcatgatatcacacatgtgctctcacaatcaatgcccaatatcgacccttcaaaacaatagatagagtattgataggtgaatgccttcatgaaccaatgatgactatctactaatatagctatctataaatgcgtattcttatagattattctactagggtcagccctacattacaagaaactattgaatagttatgcagtcttggacaataaacaacacaaatataacttaatttaaaatttaatttttaactaaaatcaa

SEQ ID NO: 64321 - DNA, 638 bp, Arabidopsis thaliana landsberg
gtttcgacaatctcccttagcttctcggccgcgacttgcggcgtcggggtggcctccttcaggagttccatgggcaaatacaggcctacgtccgagtcggcttgagcgaaatggatcgaggcgcggtcaggatcgttgagcgtcgcgtaagcacggctgccctgtcgccgaaacttcggcttcggcgcgggtgcacctgagggcagcaacgactggatgcgcttgggcagccactcgccgagataagcgcggaccgcattctccgcgccgtctatcgccgattccatatttggatcgggcttgaggctgaccagaaacgtcttggaggatcccgacttgtggaaggcggtagagagattattcaacgtgcgcatgctggctccgttcggctttctcgcgggcgactcgccccgacttgctgtccgatggttgacgggtgtcagtttacaaaccatactgtgaacagtcaatttgtaaacctaatgagtcggaggacacagtgatcggaaaccgactgaagcgtgcccgggaggcccttggcttgtccctgcgcgatctcgatgccgccatccaggggcaggtgtctgcgcaagctatcggcaagtacgaacgcgacgagatgatgccgagctcgccgg

SEQ ID NO: 64322 - DNA, 490 bp, Arabidopsis thaliana landsberg
ggcatcatccacatgtattggacacgctctgtatatctccctgtctttttcaagccgctggcatgatcaaacgcagctgctgtaatcgcttgaacaaactgtcgcacatcaatacatgcactgtcgcctggatcagcgttctttgatgatgtgggcccactcctccgacgtcaacgcgtgacctagcttagccatctaatgggctaactccgccgccgttatgtaaccgtttccatcgcggtcaaacattctaaagatggctttaagctgatcatccgtgtaaggacacttgaccagatctggctcgacgagggcgacgaactcggagaactggaccagtccgttgttattccgatctgctttctggatcaatgtgtcgagttggtcttgactcggctttagaccgagagatcttagaagtgagcctaactcgagctccgtcaaacttccatccttgttctggtcaaatgatcggaatatctcccggagc

SEQ ID NO: 64323 - DNA, 600 bp, Arabidopsis thaliana landsberg
  unsure (1)..(600): unsure at all n locations
cgcatggataattaattaggataagttttcttatcaggcgttttcgtgggacaagtacataattaggttaatttcttatgggattctactctcttttttacaaaaaaaaaatctagacatttccaaatgtcgaaaacattataaccgaccacctgtataactttccgtcgatgtcccccgtatgtacaaaacttaacaggtcaccttatccgtgtacgtggccggatctcattgcgtttgttagatttctgtgatgacgtggtgttttcctttacactaggaaacttcaatttggcattgaaatgtaacatatggctaaagtaactttatctgcttaacatatttttcaaatatctaaaactatttctagaccgaattttagatatgtgactaagaagatttcttgatttacatcaaccaaaacaagagcaccatgtgctgtttcttatatggatataacagttcgaaataagtttatcgtcttcatacatccctagaaaccgaacgactggactaaaataagactatagntttaggtaacccgtaattctttccgcaagtaaattcattcaaagttcaaatggtgagagtgagagaaag

SEQ ID NO: 64324 - DNA, 540 bp, Arabidopsis thaliana landsberg
  unsure (1)..(540): unsure at all n locations
ccccaacccccgaggacgtcctcaacatcttcgaacgtctcattggcggcttcnttttaactggcaacncgcaactggcaactggcaacttggtccaaggcgtcatcgtccaattcggcggccaaacccccctctccctcgcccgcggcctccaggacgccggcgtccccatcctcggcaccaccgtcgactccatcgacgccgccggcgaccgcgaacaattccgcgatctcgtccaacgcctcggcctcaagcaacccgccaacggcatcgcccgcaacgtcgacgacgcccgccgcgtcgccaaggaaatcggctaccccgtcctcgtccgcccctccttcgtcctcggcggccgcgccatggagatcgtctccgacgaatcccagctcaaccactacatgacccacgccctcgaggccgccgtcggccccgtcgccgactcccccatcctcatcgacaagttcctcgacaacgccaccgaagtcgacgttgactgcctcgccgactacgacccccacgccggggcagagcgcaacg

SEQ ID NO: 64325 - DNA, 1701 bp, Arabidopsis thaliana landsberg
gctcactactttgtaaagcggcaactaaatcagggaatagattcctgttttccttattcacaaacacaatggcagtgcccttctctcccatcctagaggccctgccaattacatgtatgtactccttgatggtactaggcatgtcaaacactatcacctgccttaccaccaataggtcaactcctcggcctagaactcccgttgatacaagaactggcacctctccacccaaaaacgatcccattacgtctctcctctccttcattggcttctccccatggatcgatagagcttttacccccgtgacaacagttatggcattagccaggagatctgctccaactctcgaactcacataaacaacagcggggggcttgaaatggttttgacttctgagtatatcaaacagcttctgtttcttttgctttgcatctacccagatggccaattggttgacagccttgttaggcttgttgggattacctatggataccaaaatgatttccttggctagagaccctcccaccttctccacctctcttgagatcgtcgcagagaacagcaagacctgtggttgtgacaaggcctgaaatatctgcatcacctgatctctgaagcctctctgaagcatgcagtcaacttcatccagcacaaacgtcatgatgttatctagttcaatggtgtgctttgatagaaggtccaccacccggcctggggtaccaatgatcaattcaacaccttgctgaatgcggtagagttgtccagacatgggatcaccacctacaacgagtgcagtcttaaatggcagtccctttccgagcatttttgcctgatcttcaacttggacacagagctctctcgttggagccaaaaccatagccaaggggttcctcctctggtctgagggatgctcagagtgatacgttgtgcaacgagaaataataggaacaagaaaagaagctgttttcccagagccggtgtcggctgaggcgagcagacttttgccggttaaagcagctggaattgcttgcatctggataggagtaggaaagtcatagccagccgtttctaagttgagaagaagcttaggaggaagtccacatgaagtgaaagtcaagacaggtggagggactgctgatccttgtccttggacatgaatatcaagctttcttctaagtagttgagcatcgtgggaagaagatcctgggtctctaacatagaagcactcatctgtggcaggaaaaactctagcgctgtcaactcttctcaggagtgcttgcttacactcgaggctgcagacgtcatcattggtctcgtcacatatgtactcaccataacgactgcagataacacatttaggttccccggaaagaggggctctttgatctatagacttttgtttaacaacatctacaacagagagaatacagaagcggcggatgagtaagctctgtggagggttacgaatgactattaggtccacagactaaccagagttgtgcgggacgcatccttcttcggtcattattcacaatcgacatgcacaagatgaattaggtcgacgaaaggaaagtgcctaacccatggaaccagaatactgctgcaacaagatatgaatctcaatgcagttgaatcaaatcagatcaggaaggagagatatatacccggtagattcgcagacagaaggattttccgatcgaa

SEQ ID NO: 64326 - DNA, 762 bp, Arabidopsis thaliana landsberg
caatattttcattttccattgggcagaataagaattcaaacaaaaggttaaaccctaatttgggagttgaagacttgtagtgatgagattgatgagattggtgatgaatagttaatgatttttaagaattttataatataaagtatgattttcaaatttgttaacacatgtatcaaatactttgagtgaaagagataatcgacgtgttaaatctaattttattaattttttttatttttttttaaaaagaaatttttgtatatagacgtgttaaatctaattttattaatattttttattttttttaaaaaagaaattcttgtatatagacgtgttaaatctagctcggcgataattaaatattcattctccagtttggtcttgtcgaagacaatttctgtatagacaattgacttagtacttagtagagaacaaataaggaccaataattttacaacgaatggtcctccaatggactcatgcccggtctagcacctgatatttcataaaatgaaatgtttttaacgtaagaaaatatatgcattgctttctctacttttctctttaatttgtcttaaattagaaaatgtaagaatattacatttgagattggacgtaacatttgagaacattataaaatttgtttatcttctgaagagaatatatgccatttgacaaataaagatcgacataaacttttgcttttagacctcactcttttgccatgcccttttactttgttgctttagtaatcttgttttt

SEQ ID NO: 64327 - DNA, 1498 bp, Arabidopsis thaliana landsberg
gaggaggaatgtgttctcttagttagattttcctttagtatacacagagatgcagctttgcttgtcaaaaactagagaaaggatatctctatttaaattaaaaagaaagattatgagttttgttgagaagaaaacacgtgcaataaagagctttttggtttcttcttgtgtgttcactctggaaaagatgtttcagaaacagaggaattgcagagtgtagcacacccactcttattagcatcgtgcaaaccgcaaaaaaaaaagatccttaatcttttgcgtcgtctaatccactttgtgtatggaaatattggaatggctaaagttgctaaaattaatcaattagctcttgaactatagagtttgataagacatgatcgtcatcgactaagttgatccatgacaactggccgaccaaataatattttagcattgaatgtttctactgtatatgtattttcaaaattacattccatgataggatagtgacacatttatctgaaaaaataacattgtctattgttttatttctaagttgaatgtaattttttaaatacatatacagtagaaaataatattttagccaataaaaactaaaaaatctctatatttattcttgttcttttttttcttcttcaccaatatatatgtttatcagtttatccattccataatatattattttgtttaaaaaaaaaaaaaaaatcaaatggggaccaccaaggacggtacattcatttgattttagagaatggttcaaatgacggatatattagcgtgacattttgataaactgaaaaaataataagtgaagcagaatcaaagttgccacttagtccgaaagactgattgtgattttgaatgaactcatggaacaagtttcctctgtaaatttttctcactactttgatttctcatttcttctctgattttgtctttttgtaatgttcttgttcttgttttgttttggtgaaacagagatcaagctctctcactgtcggagagcaattctgcgccgtctttatacctttctttgccattatcgatgtcctagtttcctccgtcggacaatgcttcgattgccgcagcacatcgcctcggacatgtcagcacgcggatctggaacgtcttgctcgtgaatctcaatgttggttttctttttgtttttgcctctctctctctctctctttcattccatgtccaatgtgttgtatacgttcttggatcaatgggtcttcgaaatgactctgtttggaagttgataagtttgaaaagtttgtttcttttttgcagtttcagtcaatgaagttgaagctttgtatgagctattcaagaaattgagctgttcaattattgatgacggcttgattcacaaggtctgttttttctctctcagatatgtctagttggtgaatttttcataggttgatgatcatcacttgactccttttcctttatgtgtgtgattcattgctttcaaggcattaagtttgctctt

SEQ ID NO: 64328 - DNA, 1806 bp, Arabidopsis thaliana landsberg
atcggcataaactctatcgttgcttctgatacttcatacttcatagtattcgatatcgaaaatgataagtttttcttttgctatccattttgcgttcatacaattcttattcctccgggttcatgttctattgtcatcaagccagtttccggattcacagattctatattaccttaacaatttgtcagtagtttagtgtaactattgtaagaaaagttggttcttttgctattacggaacttttagaatcacattacaaatttagtgaaggtatcaaccaaaaaatttcatttatttaattgctcctagaatcgaaacaaagatatagcagttgtatgaaagaaacaacacacacaaagattcaaggaagcatctgctgcttgagggatagatagcaactgaattcggatcattcgggttgttcttcagattcctcaatctccagcttctgcaaggaaaagaaacataaaatggatttagctttggataagacattaacaggggtaagatttgtagtccagaagggcataacacaatgtaagatttgtaagtaaaactatacaccaagagtaaaagaaaggtcaagggatacaaaaacaaattaaagcaaaccatggattattaccacatggcatctaccagttgagttctcttaaaatttgacaggaacattaaatttctcataaacagttgtaaaatcttgagaaaaccataaacaaccattgcattttcattttgatactgtaaattcactttctccatgaaactaaaaaaggtgaatgaatattagccaaggaacaattttagcaacctaatgcaaacaatagctctgaatccaagacacaggggagaagaggatgttgattggctggagtaatgttcagaggcttcactcttaggtataggtctactgtgtaccgagcctaagattgaagatatcatggtcggtgagtgagaactaaacttataagcagattggttagtgtgtggattttcccgggttatggttgagagtctctctcactaatgaagtctcaatgggttgttttaaatatgttcttatcaagttcctcacaacttcgcacataaaaggccttctctatcagtttaagatatattatggacttagaacacatatttaatatccaaactgggacaagatcttgctgctagaaagataaagacattactaacacagctgatccattgcgtagactaagtatctaaaccagtaatctctaacgatgccagagatatcaccatttccagagaaccaaagcatgtagtatatgattaaaattttccaaatcctaacagttactgcacaaaaatttgtttatcagataagaactagcaacaatatagaaactttcataaaccctaaatttggccctcaggtcaacagcaatcccaatgaaatcaaagaaactttctacaagtgatcattttcatacagccgaagaacctcaatcatctaacaagaaacgaaaataataatgtagaggaaacgtggatcccccaaattgacaagtgaagggagagaagaaacatacagattgagcgttgtgccaagagagaccacgatagacattaaaggagaaagtagcggtgaggtagatggtggcgagccctatccccgccgtgaaagccttgaacgaccaatctccggctctagtcactatccccatttctcttctcctcctttttcaacaaacaaacaccacaccggatatttattatggttcgatgcaaatgtgtaccgactggtttggttaacattcggtttattatgtttctagttaattc

SEQ ID NO: 64329 - DNA, 500 bp, Arabidopsis thaliana landsberg
gagtagattctgtgctgctgccgccattatgatccttccaatcttgggactccctacaagctttctacatcatcaatcacgcgtattccgctacaagcaagtcatcgcgagtgaatggattgataccggtgaagaagatcttgtcccattgatgctgcaagaggatagtagcgacatcaggtcctccttcgataactttgatggctttagtatcgagataagctggaattgtcttggcaaggaaggcagatgcgttagggcttagttcagatgacttgagaagcacggtatttcctgctgctattgccccaatcaatggatccagagacaaagctgacaacaaacattaaaataaaatctcaaaattgtaatcctttcttgtagaaaataaaaatagtcaactattttaagatccgaatcttacatataggaaaattccagctagacagaacaagaaccgtcccatagggttccgatatgactttccctttgctgggtag

SEQ ID NO: 64330 - DNA, 2161 bp, Arabidopsis thaliana landsberg
ttctcacttaatgatttttgaaattaacaatttattgataaaattttaaagttacgtcaatatttttgatacaaaaataaaacctgagaaaatcattctttagtattcaaattttggagagaaatgagttgaatgatattccactttagcttttctaatttagtttttacgatcattcatttagagacgaacatttacatctttaatatttgtgttacggttattaaaacttgtttgttgtgaaatagtttgaagatttatttaattatttattatgaatctaaaatcattatttataataacataaaaattgcattatttgagtaaatgataaaaatgaaattttatctagctgaattaattttttgtcaagttgctattagttaattcgttccaaaatatctaaatcatgaaaatgtctaaaacattctccatggtccttccatagaaaaaaaaaagacgtagaagtgacacgtgcgtcaatccaaccgttaaattgacgcataggagataatttaatgattcagcaaagtttttttgttgtcttgtctctatcgaacccaagcgcactttagcaaccaccggcatttttcacagatgcttctcattgacacagaagaactcagaagaagtagaagaagaagcttctccgatctctcttctctcatctcgatctgtatgtgttcttcttcctctcgtcttctttctctatccagattctcaacaattgttcgtgtttcttcgctgtatctaacgatttagctctcctctctctgtgttcgtcgaacgattcctaatctgaatcatactcagtgaaatcaagcgatctagaagaatctggcaaaatcttagctgacgaatgttgggattgcaacgagaaacatcctcgatgtataagagaacgtcatcgagagattattctccgatgatcgacgtcgaagacagctcaggtacgcacgaaacatgcatcattttgtagaaacgagtttcatttattttaatttatgaaatttcgaatttggcttcaggtcttttagagaatgatgtggacaatgaaatggaaactacaaatccttcatggaagtgttctcttccgcatgttctagtggctacaatttcgtcgcttctatttggttaccatttagggttggtgattgattttagcttttcttcttgaatattgttgtgattacttgtgttgagctattttttttggttgctacagagttgttaatgaacctcttgaaagcatttcgtctgatcttggttttagtggtgatacattagctgaaggtattttcattacttctcctgcttagtatttgtcatggcagtggtcatcacatgtactacttttataagttctgttttcttcttatgtgatttgtttggtggttagtgtatgtcttggtggtgcatttctcggatctttattcagtgggggagttgctgatgggtttggaagacggagagcttttcagatttgtgctttgcctatgattttgggtgcttttgtgaggtaatttgggaatttcctcctatctctggttctttgctagtgttcctttaagctagacttatgaattggtctagatagcactgatacctgcaaatatcaagtgactgttctactatataaatttaccagaagtctcagggttacaacatgttaggtccagattcgattctctgtttcatttctctaagaaagatgtacagtgctgaattatgataaatcttgcagaccaaatcaaataaccaattaagcttaccagtattccaatcccactcactaatgtatattttgatgtggctcatatcaaaatattatgatcctttagcaagagttggcctcgtttctactagtttggtttgttgcttatgctaatatgtgtttctttcagtggagttagcaacagcttagctgtaatgcttttgggaagattcttggttgggactggcatgggtcttggaccacctgtggcagcactctatgtgacagaggtatatcaatgcacaccgaatatagaacttactctacaagaagtttgaaaccgcttgacttcttatgcaaatttcccaattttgactaggtatcaccagcttttgttaggggaacatatggaagcttcatacagatagctacatgtctgggactgat

SEQ ID NO: 64331 - DNA, 412 bp, Arabidopsis thaliana landsberg
catgcgagtgatatattgctataatcttcttatcaaaaaagatactagttctataatcttgctcaattaggaactgtcaaatgagaaaaaactaggcctcacgtcttggtgataacacagctcggtacgtaatatgtgtgatgcaacactcgcatgacttaatcttactggatgcctcatatattagtttatggattatagggtacgaaggtggaagcttcgtttccaggttgtactcaccctagttgcactgagaatattactgctgttgattggtataaaaacaatgatttgtaagcttttgatgatattggctcttgacaggcgattacacgatggtacaactaaatagtgcggatttcactggggaaggttgattgtttatttacatgtcctggatttaaccagataa

SEQ ID NO: 64332 - DNA, 1376 bp, Arabidopsis thaliana landsberg
aaatcatgtatgcagtatgaaaaggataaataaaacgttcgtaatatctcttagaagctctctttcaagatatctccgaacatataaagcttgaacaatattctctataattatgttagggcctatctacaacctaactttgtttatcacttgccatttacccggaagcaatgtcaacaatttctacctcataagttttcggagagtatccagagtctgttagtatttgtttgttgttctattgtttcaaactggtggtgtagacgtgtagtgagtgataataaacacaagaagtttgttatcaaaattcaggaaccatatatttttctatttgtttttcaaaggcaaagaattgtattcaaaggccaagaattgaattgaaactcgaaacgtccacaaaaaaatggtttggataaactgctaaatgttttaaatgactgtttccctcttgaagagtcttttctttgctatccgtagaaaataatccatttgattcggggccaatgacgacacccccggactcctaaattcatttttttaatttttaatttttatttttttggaaggtaagaatgaaaaaacatatccccacgtcaaagctcatctatattctgaaactattagagaaatcatacttgttaaattaacagcgattttaaagaaaacattatttctgaatgaagacctgtgttcaatggatgaaatgcgattcagttcaaaataataacaatatatatatatatatatatttatttatagatattcatatatatataaaagaaaatatatagatatgatcatatggatatggttgtggacttgtgatgcgacaaaaaaaattgaacaaagtggatctggttaggtggccagcatcttttacggaagggaaaagttggatatattacaatatttttggtggaccatgagcaaccccaccacaaagtgcatgtgaagtgaccacttttctgcgagctgatccaactaatcaataatggtaacaaatacaaaaataaacggtctaatttatttcagtcaaatgtttttaataattttccatatccgaaaaacttaaaaatcctttattattactaagttaataaaattgctaatgtaagaattatttgtttctaaatagataatattaataccaaattgatattccaaaacatattattttcttgtttgatttgattgataatctattaactgataaacaacaatgatagaaatatgttctctaattcttcttctctagcattcaaaaattcacatccaacaaaaccataaattttgtaattttagatacaaatttacactaaaaattaataattggtaagcttggaattatattcccaaactttattctataattaaac

SEQ ID NO: 64333 - DNA, 2565 bp, Arabidopsis thaliana landsberg
aaaaaatcgaacataaagttttaactacaaagaaacaaaagattcgaagacgaaagtgaagaagaacattaccaaatccatgaaactctggaggaagcaattaaggcaaggacagttcctagttatggaagtgtttggattcacataactctcaaagagatcaacttgaaagcaacaacagaaagcacccatatcttcgaaatcaatactttcaaatttcacagagaatgagagaggaaagccaatttcacagaagattttcactagctcccgtaaaccagaatccttcctctctcttcttggtgcaaaactcttgttcctcctacacagtagaatcacctgtaagagaaacatataacatttctaaaaccaaatgaataactaaacttgaataagctaatacacatcacaaaactatacaattcgagcaaaaaaaaacagtttttttaaggattcattgtttaatgtacgagcaaaagcatcaacctttcagataaaaagcatcaatccgatgaaacccaaaaaccatcataagctcatcgatcaacatcagatgatcagtaatgaatggtatcaaaatccaatgatcatcaaagaaactttcaaaggaaaacaaaaaacagaggaatcgatgagcacctttgtgatagagacctgagaaaatccagaagcaagagaaaacccaggaatattccggtattgactaattctaaaattgaagatttttcaggttcgtcgaaaaagtgcaaaatgaagtttcctgaataatagagatcctttctctctcgtctttgtcttcttctaccttttgatccataagcctttttggtcgaaatttaaccagggaaaaacagaaagtttcgtaaatagtccctttaattttacatatatttagttatgaccccaaacgtttcgattataaagcttaaacttattctaattgtgacccatacatttttgtatacaaaaaccatttcttttctcggcagcaccaagggcatacagatttagatctcttaggaagtttgtttcttgattttctgctaagtttttatactaccaactcaccaagaaattgcgacaatcgaatgaatttttaagttgttccgacccaagcctagcatttccacattgttggagttatggatttatgttcaaattctaacaacaaaatgtctttcgagtttaagaagttgtaagtatcctaataataatagtatcctgactattgtcgaataaaggtcaagttggtctaaagttatctctacacttgataacaaacaacagaagagctcaaaattgtaataatctcaaatgtctgtcttgctgcagagaccacacctcattatgtgagagaagccaagtgttgtcttgaattcaattacccaccttggcaacttttctctgctcggtttggcccgacaaggggcactgcatctctgtccaacttatcggaaccattgtttcgcctgcacaatcaccagaccacataaacatttcgattactcaaacggaaattaacttcgtatagtattataaactgcccaaagaagcaaatgcatctacacattaacatactccaagtccaggacgaaaatatttgttactcataattccataatgagaactacaagttagaaatgtattacaatttgatatgtgatggattagctatataattagtaatctttgccctcattaccctttatttagtttctaagagtaggaaaaaaattacccgcggcacttaaagctgagaccacaccaagttcattcttagcagtagacaagtagtaagcccgtgcatcaccaagagacagctttaagagtccaagttaaggcaacttcagatattatcacccaaaacatcatctattattatagactacacctacgctacattcaaattaaactatacaaagagatatgtaagtaaaaagagaaaataaatggcataatgtaacaaatcttagaattgtctctcctctaataaacaatgttaaccactgtactactagacaataagtgtgaaacataagcgcaaggatacaaccatagctctaacaatgtcaccagcatggaaagactgatgcatgtcaactttgtcaatctctgttgctctaacatcttgttgcctatgaaagagcaaacacaagttagatcgacacataaaagaacaaaccttgaaaataaacaccaaaggaggatgagaaattcacctaattacaccagcaaaattttcacgaacggcttttgaaccaacacacaagatatcaacagcagccatcttagtcataactttagtcacctatcacgaataacagagaatagtgagtgatgaaattactctctttttttccaagtatgaacatcaatgaatccaatgaaataagtgcaggactcactcttgctatgacaacagaaccagtctctggaataggaccatgtgccttgtgacctgtaacttccacaatagctctctgcttaccatttttatcatccaataagtcatatatccataacaatcacaaaaacaagtataacaatccaacgatttcgacttta

SEQ ID NO: 64334 - DNA, 1245 bp, Arabidopsis thaliana landsberg
gaaacctattgttttcatcttgaaatggtatagacgattgtactagtacaagggcagcgaatgtatcttgaaataaatttctaaattttttgaatttgaatttgttcaatctgttagggtacttgcagtacagatttacaataatgcctgctccagaatccagaacccagctattacaggtgctctatgatctctacttatagtccataatcttacatttttgaaactttctgtcgaattttttatctcttttttccagatttccatagatcctgaacatgcaaaatgcagtatctgcttaaacatatggcatgatgttgtcacagctgcaccttgccttcataatttctggtctgtcatatgttgattttgttttagttctcattcattacatgcatatttcactctattggtagttgatggttgatgtgttctgctgtcagtaatggctgtttttcagaatggatgcggagatcggaggaaaaacataaacatgtgttatgtccacagtgcagaacaacagtacaatatgtgggaaaaaatcattttctgaagaacatacaagaggtataattatctgtttgcaagcattttcgtcatttacattttacatatgaatgttctttccatttgctactcttctcctagagaatctttctcattcttgtgcttcatttatgcttgagcttttgatgaataattcagctcttatgttaggaaatattaaaagtggatgctgcactgaggcgaccagttgaagatattgcagtgttggactcatctgcatcgatacaatcaaatcttgtaagtatttgctgcaatatcttctattaggtaactatttttggaaatatgtaatgccgttatttaacaagatgagtttgtcttgctccacattgacttcgtggtgtaatgactaataaatcattaccatatcttaaacacgctaatggtatttctggttcaactagtcttgagttatatgtacctgccatgctatcttaaatactacaattgacaacattttagatcattgggagcaagagaaaacgtcgattgaatatgcctgcgcccacacatgaagaaagagatagcttgcgtttgcaatgcccacaatgtggtaatagaaatttatctggttgcgtcttaatatctctttacagtaaagaaaaactctctatttagtggataggctacttatcaacattgattccctgggaaggaggtaaagtgggataattagga

SEQ ID NO: 64335 - DNA, 404 bp, Arabidopsis thaliana landsberg
ccgtcctgactatcttcacctagttacagaaaaccttacgaacattgacaaccatctcatgcctgaggtgacgggtacttcagatcaaagaccttctatctctcagccacggtatgatcaccactctacgcagcattaggttccacaattctaatacgaatcgaacacatgggtgcgcaaaagcgtactataattatacagctgaaccaatctttctgccgacttataaactaaatccgcacgcttatccaccgtgagtacccaaaatcggcgagattcgatttaccttttccgacgtaaaggacgcgaatgaagacgacaggggagaccatgaagagaagccacatgctcaccttcttacgaccagcgaatctgcagatccgatgtacagtaccttctgtatc

SEQ ID NO: 64336 - DNA, 491 bp, Arabidopsis thaliana landsberg
  unsure (1)..(491): unsure at all n locations
gcagcctggacggttgtccgaacaaaggtgacgcttcgccgttttcgtgccgcggcgggtatcgacgacatcaggggttgtggttgtcggtgtacggcagcagcgccaggaaacgcgcgcgcttgacggccgtggacagctggcgctggtagcgcgccttggtgccggtgatgcggatgggcacgatcttgccggtttcggtgatgtactggcgcagggtgttgagatccttgtaatcgatctccttgacgccctcggcggtgaaacggcaatacttgcnnnnnnnnnnnnnnnnnnnnnnnnnnnnnnnnnnnnnnnnnnnnnnnnnnnnnnnnngtcgtcatcgtcgacatcggacagttcgtgcgcatcgtcgcgacggcgcgaggacgccttggcgtcatacttttgcnnnnnnnnnnnnnnnnnnnnnnnnnnnntgtacgcacccgggcgcttgatggacagatgactcaccacggcctcggtga

SEQ ID NO: 64337 - DNA, 642 bp, Arabidopsis thaliana landsberg
  unsure (1)..(642): unsure at all n locations
atgtactcttcttattagacaccgtccaaatcattctctgcgtcttaaatnnnnnnnnnnnnnnnnnnnnnnnnnttagttgcggtgagagcaattgcagaaatccaacttgcacgttgaacaatttgaactgttgaactcgttagatgatactagtatggaaattacaaagcaggtggacgaggacaactattgcaatatggtaaaggattgcaggagttgggacagattttcatgtttgaaccccttttttgtgtgaacacgaatgtggaatgacgactggtcccaaattttattacaagcggttacttatgaaaacaaaggatataatgttagtgaatgatccaacaagtaaagcaaccatagcttggggacacaatacaaaacacgtttcgaaagaaaatcaaatggatggattcagtaattcccacgaacaaattctgaagccgcgttgaagaaaaacctttcctcattttggtttactgagatggtttctcctcttctttcttggaggataaatacctgtcatttaagcacatttgtggaatttcacgagtgagcaacgaaaacaggttaaagctagacttaagaagcaatngcataaatagtgtacataggattcagaaacctggtttatcttgt

SEQ ID NO: 64338 - DNA, 746 bp, Arabidopsis thaliana landsberg
ctagacagaacccaacaaaaaacaatctaaacaagcttaggctcttcaacacgaaacagtaccgccaaattatacacaaatttcatcaaaacaaacaaattaaacaagtcataatttatctatgtatggggaatatcattttgagatagatatagatagagctacaaaaacaagttaatatctagtactaaaagaagaagatacaaaaccgcctagtcttttgtggggtgagagttccatcctgtaatgcttcaatctcctctttttgagactttcgaaataaaccaaatgtttcacaaagtgggttaaagaagaaagatcagttagtcccttcggtgtatccaaacttacaaaatgccttagaaaactgaataagattataagaagaccttacgttttcaagaagaggcggccacatacttgcaaagtagtcagctgcctcatcggacatcacctttctttccttatacgctgaagcagttacatgaaacttattagaagtaaatcaaattcgcttgctagctgactagctcaagagcgtcatccagaaaacgtttctaagattttgcaacgatatcaagcgtctgaggtgaaagtaatgtgagcaaaaatctgatctcagttaacaaaaatctaaacaatcaatacttaaaagaaaaatctaaacaatcaatactgtttttaaatccaaaacagtaaaatcgaaaataatcaaaaggtgaattttggaaaataaaaataaaata

SEQ ID NO: 64339 - DNA, 1619 bp, Arabidopsis thaliana landsberg
ggaggcttatcatttattaaagttaaggttatggggaaaaaatataaactttctttagcagggttgattatcgcaaattcataaagaatgcacgtcgttgttagttattttctcccaaatgcgtgtggttttattacttttcaaacggcaagtaaaaaagtcttataaacgacgtcatttagtcgacttgatctcttttgtaagtcatcacatctttgggtcaatcacgaatttggaacatccggttccaaattacggattacacagaccctagcctcttccccaaatcccaattctccattgctttagaagaatcacccaatggatctagagattgttggtcgtcacgctctctttttcgacgatgattcgatggcaacgtttgtcaactctccgacggcgctcgttgactggaacagcctctttattgaccgctacgatgttcgtcatctccctctcttctcctcctcctccacgtatcaaacgccgtcgtccgaattcaaacgatgctgacttggaatcggagctcgatcacgagcgttatctagatttaccgtcggaatctccatctccgtcggatgatgatgaacacggtaaggatgatgaactccgtagaaatctccgttaatctatatggtagagagactcgaactagctatgttagagacataaaactgttctagagaatgattacgaaaaattcagatcgaaacttaatttgtttgccctttggatttgctttactctccagatatgaatgaggattcagcaaatacaaatgcggatggttatcgtgctgtctctttttcatatggaagctctagtgatgtcaatgaccagaaaaatgctgctgatatggaatctggatttcacccgcctttccccgtgcctgattacttacgtcaaaacctggtaagttattgctttagattgttccctttagcagtatgctagtttttgctaacttatttggtacttaaactgatattggccacgtaaacatctgaaaggtgcatttgttattctaaggactactatgtctaagtttcagatgctaggagaagagatggagttgtctaaggttgtcattcacatgcaccttgtttccttttgctgccatgacaaggggcagtgcaggtgggattaagatgataaaaattcatgacttaccaagaaccttaaaactgattgcacaccagatgatgcatttctatacagttctgaattttgcaatttatggttctcgatacttatgtgaggttttattatgtatatatacctgcgagttgccaaaggtgtcattcatcatatttcacattactaattttttcttggatattttttttctctcttctttcagcctccaactgagaaattacatcagattatcactaggacttcaagtctttgaagcaaacacggtgggcaattttgaaattgtcttgagagtcaaacaaggagacaaccctacatttgggttcctaatgccagaccatcatcttcacctttactttaggtttcttgttgaccatcaagagcttttgacaggaaagtcttctgtagaagagaaaaagaacgaaagtgagaaggatggtggagctttgtcattgcttgcgacg

SEQ ID NO: 64340 - DNA, 1580 bp, Arabidopsis thaliana landsberg
gatcgaaaaatattatactttttgcaactaacctcctccgactgtcagaactaaagctcgggatttggcacaacatccccttcgaataaaattatcgctaaaagcctaaaaccatttatgtaaattgaaggaaaaaaagctctggctgaaaacatctctacgcataagtcataagactcataactcatacttataaataaaaacgaaaacaaaagaaaaacttatgcaaacactttatatgatgacccgttacataatatagattctacacaggttttagattttttccgataatacgctattttacatgatatcacactattttattaagtaattatgatatatatgtcacatctaattattgatttcacaaacgttatcttcgttcaaaaccaaactattattaagttagaaataatacaatcatgcaagaatttgtcgacagtaaaaaccatgcatgatgcattgaataaaaaataatatcaagattatttccatccttgaaacatctcatatcaagagtttgctttttgacactagctgaaatcatgattacgtcaaaatttttttcacttttattcgaatttttcggcccgcacgaaatcacaaagttacaactttactttttagctaaaatctaacatatgcaatatacgttagagtttgtatgtgtttgctttgtttcttacaaaagaggttgacaatgttgggtttgtgtcctactcttgtcttgatgccagttgtctaaatggaaaaataacaaaagtaaaaaataaagaaatatgaaaaggacaaaaaatagagaagcaaccagtaagaaactaataattgcgaaaaagaaagaaaaataccaaagagaaactaataattgaagaagaaaaagagtaataattatggaaaaaattgaaagtaacccatgtggttttatgcacacgtgcaaccttcttactctcttgtgtttgtcttaatgagataaaattagttttaagtatgtacagtatataactaaatgactcactatttaaatacttatacatcaccaaacacagaattttaaagacttgaattcagatatatagatacacatcgacagtcattaatgcaaatcactataacacaacatatatggttcaacatttatttaatatattttcttataaaatgttttcttatacaatgtaagatactttttaaatatgcagtccaaaattatactgacaagaaatttgactttcttaaataaaaatacactcaaagccgacaaaaaaaattgtctaaattttggaaacaaaattaggtacttaattacatagtttaatatcactttagcatatttaattaaacatgatattttaaaatatagaatagttagtacatgttgtgggaaaaaaaaaacatagcatagtaaacaaaaatgatgtgattataaatctttttaagtttgaaagcttaatcagttttaaagtataataatcttaaaataatattcaaatcacaaaaaaatcattacacttttacaaaaaaatatgtatgactctattgaaacaagagtaacttattttttttttcggtacaataaa

SEQ ID NO: 64341 - DNA, 554 bp, Arabidopsis thaliana landsberg
gccgacaaggcgccatctgtgcgtgagcatcaccagccttaacagcttggccatgttggccggcccgaaggacttcgtggccagtcccgccgtgggcggcacggtcgagaggtaggtcaggcccatgaccgcggcgaacaccagcacgacggtgccggtcttgggtgcgaacaggaaggccagcaccgccagcccgcgcgccgcatagaccagcgacagcagggacttggaacgccagcggcccatcgcccagccgatcgccaggctgccggcgatgttgaacaggccgatcatggccagcgcccagccgtcccattgcggccccaggccgcaggcttcgatcacgccgggcaggtgcaccgccaggaaggcgacgtggaagccgcagacgaagaagccggacgccagcagcacgtagccggggttgcgcagcgcttcgcgcaccgtctggccggcgccgaccggtctggctccggccggctcgctgcgcacgccggtgccgagcagcacccaggccgtcggcaggcacacgagcaccatgaggccgagcacct

SEQ ID NO: 64342 - DNA, 474 bp, Arabidopsis thaliana landsberg
atgatagagaaggctcgttcgagctgtttcatgctcaaccatttttttttaacgaggaagcgtttacttttcatcatctggtattttcatcatctcttagcgtttcattgagaaaagcgtttctgcttctcttagtatctaagcttatctctctacaattgtggttgatgttaaaccttagtatatggcagatttcgtagtatagagttgtctataagctttgattctgtgtgggtttatacagttttatggattagagatttagactagtgtgcctatgcgtactattcctctgttgaaaccactgtagctccaataacactggagtttatttgttttgttatagctgaggctgtgcctggatcagcagcttggttaggccgaggtctttcttgtgtttgtgctcagagaagagatagtgacgcaaattctacgtttgatctaacacctgcgcaggtacttgactttccactg

SEQ ID NO: 64343 - DNA, 1657 bp, Arabidopsis thaliana landsberg
acgaattagccaccagttgatagtagtctcatttgtcatcttttgttctattagaagttaaaaaaagaaaaaggaaactatatgaaaggtaaaccattcccaatataacgtaataaacataaccatcgagtatcaaccaaaatcatgaccacaatatgtcaagatgaaagtctattagttatttgtatgttagcttaagtgaaaaaggtggatgtgggtgagtgagcggttacaatcgatgatgaatgagtaaccgtacgaattgatattgtcaactatcaaacgttaaattttcaactcaataattaatcaacatttgatattcgtgaagtaacttttcacaaaaagtactctttgataagatgatttatgtccataaaactaattgcttcaactacattattgtcaatatttgatatcaatcaattctctatgcttccatgtgcaagtcttatcgatgtgattgaaatttaacttatggtgtaatctttttgtaacaatcgtttctatttcatattttaaatgtgaaatttatcaaataggaatcatactagaaggtctcatatatattgaaccgaataaataatatttaatcatttttatgatatatatcaatcgcttaaatccgcaactaacaactttatttacaggtagatgtctatcatttacacaaatttttgtcttgtttgcggttcgatctcctgcctagcaaggattccgatgagataagaaggcaatctttatcgcataacgtttatggtaatttaatatgtcatcacaacattatctacgatctgaaatcgacatagtatctctgaacctctgtaaataccacgtatatattttttttaatattaaccttcgtagaaatcacgttgatcgtttataaaaatataaaagaacaaaaatttcttgacaaagatataattttaataaaatgtttgtacatatatataagtctgtataggaaacaacatatgaagacatgaagataataatgtagaggtagttataattttttgtgtcttaagtcttcaccaactcatggtgaaaggctcacaatataagttgatcgatcggagttcgagttattctactaaatatggcttaataaaaatttggttactctaaatagtttcaatgagaaaaatatgtaacaataattttcacaaacctcaagattgattttctaattattaaaataaagtacaccatcaaaaacaaaacagggacaagatccacgtcttgcaataaaacgtgccttgtcaaagatgttctctttgactctttagtgtagccatctctttctctatatataaaaatcaaccatggtgtgtgtcagtgtgtgcacatatttttataagatatcttcacatacacaaaaacatttagtgtacagtgcacaagtgatcgaatatttgattctttttcataatcagagatctgatctaaatggagtatgaccgtacgttgaacttgattccatacggactacaaggagtaagagaggaggaagaaatcgaagaagacgatgaagagagcatgaacgtgtcgtcagtaccagaaaacgaaacgtcggagtgttcttcggcttcggggacgtatccttcaatcccttcttggactaaacacccagagagccgatggagtttctatg

SEQ ID NO: 64344 - DNA, 2559 bp, Arabidopsis thaliana landsberg
catgagcagttcttccaccatcagttgccagggtaaaaatgttttttatttaaggttttagctgagcacaagttgggtagtataaaagtagtagcagtagatttataatttcccctatcaacaggtaacactggatcagcataagacgaaagcactcagttctgagattgtttggtcgtcgtcacccgatgttttgaagtacaaggcttacttcagcgtgccagagttgattgaatttccaacagaggttcctggtcagaacgcttatgcatacttttatcctccaaccaatccgctctacaatgctagcatggaagagaaacctccgttgttagtgaagagtcatggtatgttaaacttacgacatcccgatttttcaaaacttaatcaaaataattcctcagtttcagtcttgttcatcttaagatcatgttttcgtttcaagtatgtactttagctgtaacataaatattgcaatcagctatgcatggcacatcgatcatttttgttgacaatctgaatctacaggaggacctactgctgaatcacgtggatccttaaatctgaatatccaatactggacaagtcgaggttgggcatttgttgatgtcaattatggtggaagcacaggtttgttcttatggttccaagttgtttcttctactttacctacaagttcccataattcgctacagttgtacggttgcatcttttcatctttatagttagtcttgctaaagtatttcgtcttgagatttcttggttacgatgtcccattctcaccatgtgggcacacacgtgggtttattgtgacaaagtgtaacattattttgaaggttatggtcgagagtatcgagagcggttgttaaggcagtggggaatagtcgacgttgatgactgttgtggctgtgctaaatacttggtatgttctttcttcgcctattttatgtgaacgactttgaaagcatttcctaaacttttttggtttgggcaggtatcttctggcaaggcagatgttaagcggctctgtatatctggcggttctgcaggaggttacacaactcttgcatcattggcgttcagggatgttttcaaagctggagcgtccttatacggagtgagtacagaatcattgcatcagtgaaaaacatttagctaaatgaattctagccttatctttatatattgtgatactatttcacaatccaccgaattctcttcaaatgcatgatgcaggatgaataccttataaacaactgataattcatagaagtttggattggcttttcttaacgcaggtggctgatttaaaaatgttgaaagaagaaggtcataaatttgaatcccgttatatcgacaatcttgttggtgagtcaaatgcattgaagaaagcatttatctttgctttttgtttttgtaaatcggttaccaaaattcttgagtatgtaattgcaggagatgaaaaagatttctatgagagatcaccaatcaatttcgtcgataagttctcttgtcccatcatccttttccaaggactagaagacaaggttcttatattttccgctcttggtttattcttttgttttgttggcagttcttgaatgcatctagtaacagaagtcttaactagatttatcatattctggattcttgatagtttttaaattcgagatttggttatccatttgcgaagacaatgtctttcacttctatacgaaattcttaacgattggtttaaaatgctgaaaaaattgcaggttgtaactccagatcaatcacgtaaaatctatgaagcattaaagaaaaaaggtctgcctgttgctcttgtcgagtacgaaggagaacaacacggttttcgcaaggtaaggcttttgatcacttgcattaataataacaagtcataaggattaacagtggattactttacttatatacattgattaacaggcggaaaacatcaaatacacacttgagcaacagatggtgttctttgcccgagtggttggagggttcaaagttgctgatgacatcactcctttgaaaattgacaacttcgacacttagaaaacgatgcttaaatagatatgtttggaaaagatttgctttttttttattatttagagaaaatacatgcttggactaacgttttcggataatttgttcatcaaaagtccaaaaccttctatattcactagaatgggaatgcctaggaggtggctcggcaaataaccacagtgttaaggtcaatgttggtttgggccaatgttgcttaacgtatgtcttttcagctttagtcattatcatcgaaatggttgatgaagctgtcagtgatatgatatcggtagttggtattacaaacacgatatcagtatgggccttgtcttcttcgatgcaccattcaggacaaatcgttaagtctttgatccttgtttgctgctaattgctcttcaatacttcgccacaagtttactaccgttgaagcaacaaagtactccaaaattgtattcttgcatgtagttgaaagtgtgattggctactgactttcaagatttaaaagta

SEQ ID NO: 64345 - DNA, 713 bp, Arabidopsis thaliana landsberg
ttgccctcaacattctcatggtcaaaacgtcattaccaacgtcttttttagccgttaatatgtacatatcccgtcttaagaatccaaattaaggatccatatacactgtacttttgaactatttaaattgcataagattcaaacaagacttaatttaaaatgacatctattttgaagatttttttttctaaaatgataattattttataacgaaaagaatacaactttgtggtgagaagaacaagaaaaactaagaataggtgttttcatatttaggttaaataataaaacatttaaagttaagacattaattataacacacaaaaaattaaagttggaattaaatgaacacatgtgaacaccaacctcgctctctctagaaagccttcaaaaccctattataaatacacacctctcaaactctctccctttaactctaagtttttctttcttctttctctgctctcaaagctcaagagaactctatccttattaacttacaaggataactaaaaccggtgtaatcacgatcatagtagaagatgggcggtcccggatcatcaccatgtgcttcgtgtaagcttcttcgacgacgatgtgcaaaagattgcatcttcgcaccttattttcctcctgacgatcctcacaaattcgccattgttcataaggtctttggtgccagcaacgtcagcaaaatgttgcaggttccatct

SEQ ID NO: 64346 - DNA, 357 bp, Arabidopsis thaliana landsberg
aaataaaaaaaaaaaaaaaaaaaaaataatataaaataaataaataaaataaaataaaaaaaattaaaaataaaaataataattaaaaaaaaaaaaataaaaaaaaataataaaaataaaaaataaaataataaaaataataaaaatataaaaaaaaaaataaaataaaaataaatatataaatataaaaaaatatgaaaaaaataaaataaaaataaaataaataaaaaaatatattaaaaaaataaaaaaaataaaataaaaataaaattataataaaaaaaaaaaaattaatataaaaaataataaaaaaaaaaaaaaaataaaataaaaaataaaataataaaatttaaaaaa

SEQ ID NO: 64347 - DNA, 114 bp, Arabidopsis thaliana landsberg
cctgtgggaacggcaaacatacttcctgttttgatcactgcgaccccgactgtgaggaggcaccctgttctccccaactacagggctatgatgtctcgctacctataaagagag

SEQ ID NO: 64348 - DNA, 505 bp, Arabidopsis thaliana landsberg
caactatctaatgttaacatacatccttgactggccagccatcccctggcttgatttcccctggttctttcattctcgtggctggtcaccagtaaattgaatgcgatctcacgcggaagtacttcaaaccgatgttgtcctcctcacaagccggagggtatagagcggagttggtggtacagctcgagaatgctatatccaagatggttgcaaatggcgattgactgttggaactgacaagattctcggtaaaaaaaggttcaagactcgatggggacggctgtgtgtgaatcaatcagaactcgaaagttggcagcatgcagtgagtagtgtttcaagcaatgatgacaagcaggcggcgttgcatcactggcagccaagtcaggtggaagtcgtccccgtgaaggaaggctatcatttgagatggcaagacggcaagctgaaggatgctccgccattagaccgaaagtgtgaaggcagcggcgggtgagggcagaggcaggcg

SEQ ID NO: 64349 - DNA, 502 bp, Arabidopsis thaliana landsberg
gaccgactctatatacatctctagcttatatttttggtattttaaagttataatttaaacttgattatatcacttttaatatgtatttattatatgacataaaacaaagtgtgaagttctaaacaaaaagcgaatttatattagatatccagattttctttacagtataattaaataatatccaaataaagtttcgactttgtttcattaactacttgtatcctatgatccttataaccctagatattccaaatctaaaagtgaactgaatcccaaatggtctcggagatcatctatcaaataccttagtcatgaatgtatagtctagcgttttgaatacattaatggttcgtaagtatatcagacaagtaccatatggtataaatatgaggtacatatggtgagtatatatatatgtaagatttgaatcaaatggttaaagtaggggttggatttaaaggggaagcaaacataaatgagaaggtgagtgagaaggtgagtg

SEQ ID NO: 64350 - DNA, 1387 bp, Arabidopsis thaliana landsberg
tcttatacgtttttggtaccgacagatacttgtccatgagaagctccaaaactctttactctaaatccaacaattcataggatttttcagtatctccattgtcttctctttacataggtttagtgaaagagtatgatctcgctgagggtgtatagatcacaattacactgtcgtctaccatgtagggtacaatgctctgtacatgcatggtggagtgcattgtagtgtaccatgttgcgtacagaccctgtagagcacactattatgtatcatgtagagtagattgttgtgtactatgtggagtacatcgtcatgtactttgtggagtagactatcatgtattatgtggagtagatcgtcgactaatctacgaaatacaccgtcatgtactctgcagcgtatgtacctggaacacactcttttgtaccatggggtgtaaaccaacgaaaccaaggtcgaaagataaaattgtcgtgtgacatgagaagtagacagtcatgttccatgcatcgtatcccatcatcatataccttgcatagtacaccctcatgtaccatgcttactactatgtcatgtatcatgcgataatcctaccatgcgaaatacaccattttgtaccatgtggagtagaccgtcgtgtactatgcgatatacaccgccgtgtaacccgctaacataggtctgtactccaaagtgtacaagatcggtgtgaaatataagttgtacgatctttgtagcatattatatactaatatacagtgtacacataaaagaatacaccgcttcgtgtataagattagtgtggagtatatggtgtatgcatttttcttaatatacatcgttttctaagttttttcgtctttttaacttctcttaagttcttctaaccccatcacacccttcgtctacctttttttttatcactgggaccaatcataaagaaagaaaacaaccaaaaaagttgcttcctctagttaaattagattatccgaaatttagaaactaaagaaaacaattttctattcttagaactaaaatgtaaccgggttatgttcttcttcttcctcttccatgtgaaaaaacgattctattaatataaataacattaaaggcccgtgcgtagcgtgggtcaactactagttcattgtaaatagtagttatttgaacaagttcatttataatagcaaaattattataagcacgccacatcagattattagaatgatgattgaccatcttccctttaaaattcacagccaagagacacatgacgatacacccaaaatcaaatcactaatattcacaaaacacttcaacacagtgagagagattgagctcaaaaattatccaaaaatcctaaaatggaaatgatgatattaatctcact

SEQ ID NO: 64351 - DNA, 1448 bp, Arabidopsis thaliana landsberg
  unsure (1)..(1448): unsure at all n locations
taaaggaaattagaaaatccaaataacgaatagttaatcaatctcagcagataatgcatccaaaatattctcatcactgatacaaacaccaagaccaagcaacttttagttatagcctactagcaagataagaactttgcaatgagaatgatactacaaaacgtatctgaatcaatcaattccacattggattcgatagttgtttttccaaaatagatctnnnnnnnnnnnnnnnnnnnnnncaaattatcagattccgcattgatcctatcttaattccaaaagctagcttatgaacagatcagtttaccttcaatctgtgattaacggcaggatggatatcaatatgattatcgctctcactcgtttcccctgtctccttctctttctccctcctaacgtacttttcatgatccgataacgcaacattgaaatcaaacgcttcgttcctctcagcgaatcctagcccgataaacgcatacttccctctcccgtcatcgatcctgagaacgaaatacctagacgaatcgagagacggctctacagagttctctctacgtccaggatccacaaaacaagctgcgaaaagatcaccggaattcgaatcctcgaggcggatctcgcatcgatccttgcacgatacgacgcggagtctaccagaccagatcttatcggattgaagccattcgccgcacttgtatccgccggatgtggttcgcggcgggatcttgtaaacggagacctcacgcaccacgagaagtgtatgctcgaatgtttcctcctcttcttcttcctcgaacgacatcgaatctcagagcctctctcagacgagtttcggagaaagacgtgtgtgatcgttgcggacttttgaaagctttacgagaccgtaaccttcttcttcttttttttattagtgttatcattatcctttcaatgattttaatttaatatatacactaatcaacgtaatcaaatttaacaaaataaaatcaacgtaatcataaaagctaagatgtgtatgttagtaggaatttttaatctgaaattttgttattgaagctttgtgaaaagttggttattagtctcatctttatttatttcagtgactggaaaatctaaaaaaacattaaaggaagcaattaaagagcttaagaagaagagcttggtgtcatagacaacatggtctcttgctgactaaacttgatcctcttggcttcttcctcgttcactccatatgacgctttgatcacatccactggaactgctctcaagtacgatgtttggccgctcagtgtgttaatgtaagcgttatcgtttgtcttgaatgatatccactcgaaacccgtttcaccagccgtttttgaaactgcaaagccttgtggaatcacaatgatttggccttgtcccacttgctcattgaacaccgactgaccattgtcgtccaccac

SEQ ID NO: 64352 - DNA, 1754 bp, Arabidopsis thaliana landsberg
ccaacatagggcaatgggtttgcagacaagttgaattgatttagttaccatgagagcacatggaaggtttgggctggcaattttgatcattagtctttgtctctctttcatcactgttaacaagtctacatttaagtcttgagagctttagacaagacatgaaatcatcatattgcctatcgacaaaatcactatcagagatttgtctatcttaagggtcaattcacattcatccagcttctttgaaagattaggaaaaagtgttttgtgtattacatgagacaatactttaccacaaacaattgagactttacaatggaatgatttatgtttttcatcttttggcaaatgaaacaagattttattcagtaagataagtgttcacctgtagagttgggattgtagttattattaccagactcagcttcacacaagttgaagtcctgaagggttcttcgaaccggacttgagagaccatttggtggaatcaagagtttctcttggttacaatcataatgttgttgttgtgctatgtgacttgaaggaacatgagctactgatgtatttacgtttggtggagcgaattggtgctgataaaactcttgcatggggagtggtatcgacgtctcctcaggttcatattcaagcgcattctgcatatatggttttagaaggtaaacacgaataactttcagatcaaactaaagatcgttgggactttaatgcgtagctagtcaagagaggtataatcaatctgaattccaattacatagcaggagcgtaatcagaaacgagatactgttttcaaaggaaagtacctgtaagtaggtagtaatatcagctgtggatactctagttccttgttcttcttgtctcacaatccattggtaaagcttctcctgtaaaaagaaagaaaaaagtaaaactcaatggaccaatcaaacctcaaatctcatactacaatgtcatgaatcactattgaatgacgtcaagaacgtcaagctgccaccaaaagagaacagccatcctagttcatcaatctagtaaaaaacaaaagtaagcacttcaagatcaaaaggccacaacttttatcagtaagactgcttgcttagcctcatatctaaactagcttcatagatcataaccaatttcagagtgtgtctccaattaactcacgtacgacaatcaatcgaacataaacaagccaaagagatcaactttaccaaaacaacacataagaaacaacattgaatatccatgattcattctgtgactctaaaatctcgagagcaaacagaaacccaacaacacataagcactcaatttacgattcaagatagtcaaccaacatcaaaacaagcaacgagaagaaaacttttcaactatgtttctatctatcgaacccagaagccaaaaatcgaaactggatataaaacaaggtcaagagagagagagcagagaccattccgcgacgttcaccggcgaggaaagaaacgcgttggtgattcatggcatgtgtatagagctgcgagagcgaattagcagcgcgctcgaaacgcgccatacatggttcgatcaacctcatcgagccgcgtagcctcggattttcgtttcttccccattagagtccgaacgaatctcacaaaccctagaaatagaattgtccaagttctgaacaatttgtaatttagggattttagacagacgacgaaggattattgcctctattggtgaagggaagacgacgatgaaga

SEQ ID NO: 64353 - DNA, 716 bp, Arabidopsis thaliana landsberg
cagatattggggatttattcgggtcggatcctgtcttaactgtttaagaaataactggccgtttaacggcgtttagtgaagttttgttaccggcgacggcgagaattaaaaaaaaacggcgatttattttttgaatgaagatttgttaaatatattaaacttttttgtaacttaattaatggtgattttatttttaaataaaactaatggtaaatggtgaactttttggcgttagccgttaagtaacgtctgtatatgaacggcgtggaggcaaaacacgcacgagtttcttcacgctttactacttttctttcttcttttggtcttttgacgtatcacgtgttgtctcacgtgacgaggaatcaccgaatctgtgaaaagctttggttaatctttctttttattgggtttatttgacaaatagcaatattagcaaaccataattgttctacatttggagcaaatgttttagaattacacgtgggggagaatcgaatcctggcaagtgtctatgcaaaaaaatgaatttgattcataccaactcatattattttgaactttaagaaagctacatgtgtggaaaaacttctataatacagtagtactttaacttttgttcttttttaaactctatagtaaacctttttctattttccgtttttaaggtctctataccctgtgaccatgtccttataaatggggcagcttttttttat

SEQ ID NO: 64354 - DNA, 379 bp, Arabidopsis thaliana landsberg
tccctatgatattaaactggtttattgtgctgttcgacagaaacgtgtcaacaatggtaaatcagatccatgtggtcccgtacacattaccataggtgatggaggaaacagagaaggattggctcgcaagtaatttcctcaaactgattacttctagctttatcaaatcttcattctttctgtgttataagtaaactatgaacaagaattctctgatgtgtccatgccaaacctctgcatcttagtgtctgagattcttgagctaattcaacatattatctacatgaaactaatcacacttacggtgcagttgttatatgatgaaagtagttgatacttatcatgaagggatcgtgtttttttcactttcaggaccaaa

SEQ ID NO: 64355 - DNA, 1905 bp, Arabidopsis thaliana landsberg
tttgctgaagtttgacttttcttgtccaatgtttaagtactttgctgcagctggttggcagtctctggcaaagaagcagaaagaaatcctctccctctcgttatattatgctgcaaactggatacgagaactcgttagtaacattaccttgtatattctgcgaccttgttataccataatttcttttatttatgtttttgctttctgttgcagctgaacgccttcagttcccaaattgatgaaaaaattggttgcattagtcaggctactgtaaaggatgtaacagcaaaacttctaaaacgcctcagaaatttagtgtatgttcattctactctgattcaatctaagctttttaatgtgctgctgtgttttacgctcttgtttcagatgtttttggtcgtcataaagcgtattcgtgatgaaattctgataaaaataatacttggtaaaacagattcttggaaagcttattgagtaatttgattacactatctcctcagtctctaccggagctccacccttattctgaatctcatgtagaacatccgaggaagaagaacgagaagaggaagctggacgatgatgcctcccaacgcaaggtaagcatgaaaaataacttgaaaaaatcaaagcactcagatgtgaatgaaaagctgcgacagccaactattatggacgcattcaagaaagcaggagcagtgatgagtcatagtcaaacacagttacgtggaaccccttcccttccatctatggatggcagcacagcagcggggtcaatggacgaaaattgttctgataatgaatctctaattgtgaagattcctcaagtttcctcggcacttgaagctcaaagatttaagttcaggcctcttcttcctcaatgcctttccatcttaaattttccaaaggtcggccaattcaaacctctttatctggttgaatattagtatctactactcttttgaatgattgtcatagatactctatataaatatcacatgaattcacattgaattttagcctgagtttgtattacattattcttggaatgccatcaaaggcagcactacctgtcgtacatagcttaaatgtcatcacgaagcttataggaatgattaacatttttggctttcacatataggttctaagccaagacatgggcagccctgagtatagagctgaggtaccaagacaaataccaacatattctgttaaacttaattttgtagatatgagaagtgctacttaacgtcttattattttctttgctagctgcctttgtatttgtatctcttacatgatcttcacaccaagctggattgtcttgttcctcctggtaaacaacatccttttaaacgtggaagcgctccaggttatttcgggagattcaaattggttgaacttctcaaccaaattaaaagactttttccaagcctcaggatacatttgaatatagctatttccttgctaataagaggtaagataactggagatgatcaacctgttgcgagctaaagatattgatttagcttgttctaatgttgcctaaataatcataggtgatgaaacttctcaaactacttggagagatgagtttgctttgtccggaaatccgaacacatccagtattgtggtttctgaatctctggtttacacaatggtgtgcaaagaagtattatactgtttcagcaaggtaatttattcttatccgatgccaattttgtgatgttatatggtgaccacattcctaacttgaccagttgtatattggttgcatgtagttccttttagtcttaacttatatacaagtatatatatgctaatctcaattcccaaattcttaatataaatcaacctgggtcacagatattgaccctccccgagtttgaaacagacaagtcactg

SEQ ID NO: 64356 - DNA, 718 bp, Arabidopsis thaliana landsberg
aaaaaaaatctaaaacttctcatctgtccgtgaactaacacttggtccgaaaaccgaaattgatgattcttacaatattcaatcaaattctaatatattggatatttttcttaaattttaataaaataaaaccagtttaataaaatcagaaattataaaatataaaaatatattttttttaataactaaaagacttttctagaaaccatatatattgagaaattccctaaacatactaatactacaaaaaaaagttttagttcaaagtatataactttaaacagtggtctcatccaaccgctcatctcgttcgttccattaacaatgttaaccacaaccgcatcgtctctcttagctgccacaacgcaaaaacaattttagtgaagacacttaattcattttcgcactattttagactagtgttttctacccattctttttttttcttgtaaacaattctttttgttgacctaataagtttacatttcaacccaagtggtattttgaaatttcattaatggtagttttgaaagaaaaaaaatatatatagtgttttataatttttcctaaaatagattatgttaaaatggtcaggtatttatttatgtctaatgtattattaaaatatacaatcataaaagagaaattattgcgttggatagggatcaccaattattaccctctcgtgaaggaacataacacgatgatacagcgagca

SEQ ID NO: 64357 - DNA, 1353 bp, Arabidopsis thaliana landsberg
ttttatttatattagaaaaaaaaaacagaagaatttttcatttttgcgcaaataaggacattattgggatttcggggacttgcagcctataaaaagacccctagtaacggcctgatactgcatccgcttcttactcaaacactttatcctaaacctcaagtctctctttaaaacccaaaaatattccaatttcacgaacataaatcatcaactacgctaaatcaaccgagttagatcggaaaaattatctccgtcccgatataatctgcgttttcagatattaatccgtgagtatcgcctctttacctatcgaaatctcgtgtattgatctgatctgtttggtttcaaggaaaaaataacgtaatcaagaaaattattgactaatgactaatcataattttgtttttgttaaaggcatgatcatagttttactctgtaattaatgtatcatgataatgtttgataaatgaatcaaaagtcttaaatcgcttcacgtgctattttaacttaccacaatgacttattctctcatcatttgtcagatctttaaagcatgggaacaaacggtacaacatgtccaggaccaatgaaagcaacctctaatggagtctttcaaggagagaatcctctggaacacgcgttgcctcttctcatactccagatctgtatcgttcttcttctcactcgtcttcttgcttttctcctccgtcctctccggcagccacgtgtcatcgccgagattgtcgtacgtttctttacttctttatgatttatcttttttttttttgggtcaaagtttattattaaaaatcttatttatccatttttggggtctaattaaaagtcaaagatagtactagtttcatcaataattagataaggtgacgaattttttggaaatttacattacaagttaaaactagtagccccaatcatacatacacttgatgaattagtcttcgggcttatatatgacgtatatatcgtaggaactttcgtgggaatattctttttccttccacaaaattcgctgacacgttaagctttgagatatcttataatatccgtttatgcttccacgttcctatgaatcttgtgggaattgataaatttcaacattttgaacagataagatagtcagtcacggatcatgaattcataattactttccttgttaaatgtttagtcaaataatacactttaaaacacatatcattgattattacaattttttgtttttggaattataatgtcttaagtttgagttttattctgtggctttagggctggaatatctacttgcaccattaccacttgggaaaagctcaaaggttattaacacagttttccccc

SEQ ID NO: 64358 - DNA, 673 bp, Arabidopsis thaliana landsberg
cacacgggggtgcttacaatagatataagtccgtgtaatatttagattgcttatatagttttatccataatgagatgtcttttcctgatttgaagctatcaatatgattattagctactgataatgtactcgtacggcaaatggatgcaatggctgtacaatggtttatatattaaactttaagaagtcagcttgtatctattaacaaaattaaaattgaagtagatagagatatataatatttaatataaaccacaattgttaccaattgccttgtatatatttcgtaaagttttaactgattttatcatttctacggtaagatttcgaccacaaaatacatgtgttctttgatttttcattcgtagttcctctaaaaactagacattgcagataattaagtataatataaattgggagttatagttatggttggcataaaagaaaattaattaatctttcgaaacgtacgtgtactcattttagaattctgttaacatataaaccttagatttaattcatagaaattgaatttacgtattagccaaaatcacatgcttaagattattgtaagtttgagctgcatcacatttcttacatcaaaatataatatcatcaatactatatatgggtatatgcattgtactcaaatatactacattataccttttta

SEQ ID NO: 64359 - DNA, 576 bp, Arabidopsis thaliana landsberg
  unsure (1)..(576): unsure at all n locations
gtcggacgatgccagcactcttcccgaataccctcagaagggctgcgtcgaagctgtgactcccgtcatcaagacctttgtcgtcaagcgcatccacgatgttgccacttcggtgtaccagaagaccattgtcaagaagatcctgcagcggggccaactggccgnnnnnnnnnnnnnnnnnnnnnnnnnnnnnnnnnnnnagaatgacgagccattgattgatgttcggcgcggacatgcgtacatctccaacagcattcgcacttctcgctacacgctgtgggatttcctgcccnnnnnnnnnnnnnnnnnnttctctcgtgtcggcaacttttacttcctctgcgtcggaattcctcagatggtatgtgcagcctatgatgatgctctctttttcgcccattcagctactaaattgttgagcgcagattcctggtctttcgaccaccggctcctacacgacgcttctgcccctgctttatttcgtttgcataacaatgttcaaagaaggctacgacgactatcgacgacaccgacttgacnaggttgagaatgcctactttgcgacgatactcg

SEQ ID NO: 64360 - DNA, 713 bp, Arabidopsis thaliana landsberg
gtggcatgtaatagtcgcgcttctctattagctcattttggactgcttacggaagcgcttcgggcctatgatgaactagccgcttcgccttttgcaggtgcacacgtctatggtgggcgggcgtccgttttgtctgacttgggtcggtttgaggaggcgctctctgaccaagattgcgcaatttcgttcgccgagcgaaacgatgctgtgcctctttgcgcgaaggcagatattttgagaagttgtgggaaatttcaagatgcccttcatgttttggatgtgcctgatagcaatatcctaacgaggcttcagctggatactacgcgagcacgtgttcatcgcgatgcagggaatctaacaggtgccgagcgaattcttcgggacctccagctaatttatacttcggacgtaggcgtttatattgctataggtgaactgcacaggcggcgcggagatttatcttccgccttggatatttttttagatatcgagaagaagttttcctattccaaggcttcacgaaatagtatggcggctactttggcggcgcttggaaattacgatggtgcgatagcatatcttccggcgagatttgctgctacccggggagattgggtggggcaacatatccgagcaatgattgaaaattaagcgtggcgactattttaacggcttggtcaatacctaattgatggccttgatagctgcccgtg

SEQ ID NO: 64361 - DNA, 576 bp, Arabidopsis thaliana landsberg
ggaaacagaataaccggttctcactaagtggttctcacttattgttattatcctagtatcctagtagttctcacttattataacaataagtggttctcacttattgttattatcctagtatcctagtagttttcacttattatctaatcttttttttctcttatttttaaattttgataacaattaatctataactgtttcaaattttatttttgatttgaaatggtaaatcttcttttcgggatgcacactcaatttctctttgattttaatattctacaaaaagatttttaataagttatacagtaggaaaaaattgtctccttgtatatttgtgtttaagatatattcataaattctttttacacattcatattcgtgattttagttgtttatgtgcaagtatctactggttgtttgggtgtaagttccttgaaggagagttaattggacggaagcctaaggaccacttttgtaaaaccgtaatttggttctcatttagctatgctttcgttggtttcaaattgcgttatgaatgtatgaatatttgaaataataatagtttcaccattattg

SEQ ID NO: 64362 - DNA, 408 bp, Arabidopsis thaliana landsberg
aatcgaccgcaccctgggagggttatatgttaaagcgcaaacgttgtccaccccgcggcatgactgagcgccgcttattaagcgagtaacgactctaaataaatactttatggaactgcatctattcactgtattggatctatatttatgttaaaatggaactgaagttcagcttatcttttagttgatgcatgcattcttacatgattccaattatgaatttggaaaagactcgatattcttacatatatgttatgggtttgggacttatctagatcctgatctctatagtcaaattatctgcaggttaaatacatttctgtacatgacacaaatcagtgggtgtgatgctgccttattcccacttcatctattgttgcacgcagtaacctaatattgggggggttc

SEQ ID NO: 64363 - DNA, 471 bp, Arabidopsis thaliana landsberg
aattgggtgatataattgtagaaaattagtgcatgataaattgaatttcatgagtgaagttttgtaagtttgagactagtagagggagatgaaatgtaaataaggggatgaaaagggaaggtggcaaaaaggtgaaaaatgggggagaggaaccagtgtcatgagaagaggaaggaattaaagaagaggtggaaataggtgcagacaaacattaaagagtataaagagaacaatatagtttgaaaataatattatggggaaaaaataagtgtattaaatgatgtttgatttataaaaaagctgtactagtattgggaaacatcgaaaaagatagtaatgagtcatacgaaggggaaaaacgatggaaaggtgatgggaattttagcaaaggggaggaggaagaatgatcagaaagaatgcaatgaggaaaaagatgtcgatctgatactcgatctgagaaagaaaatttgg

SEQ ID NO: 64364 - DNA, 305 bp, Arabidopsis thaliana landsberg
tgccattaattaatgttttatgttttcgtttagagttttgtaaagacaaattagagagagagagagagagacagaggcatttttggtcataaaatccacacagaggtggttcgacatccaggtgaatccaagtaataaattgcaggattctctctctataatatatatagatatagcttgcaatcatttcctgcgtttggatcggtctgggttttgtcgagggttttttggggaagacgaaattatggtttaaatggggctgtggtagctttaccgaaaaacaaaatgcatcacactattgtttg

SEQ ID NO: 64365 - DNA, 221 bp, Arabidopsis thaliana landsberg
tgcgattataagggaatctcaactttcgctgagtgtcaccgctcttctctataatgctaattggtgattcaacacttttgagagatgcagactcgattgaacgcagatcatcgaatctacaacatgaccgatgtcttgggagagggaaatatgcgttgtgctttcaaggcttgaccgtgcattgaccctacggaggctgtagaagagctgggaaaaggatg

SEQ ID NO: 64366 - DNA, 511 bp, Arabidopsis thaliana landsberg
atattttttttgtttcatagaatttctttttttatattttatatccaaaggttgatgctttccattaactgtgaggttaaaaaagactttacatataattacattttccaagtaatcaaaaacatgcatgagcatacattttcaagatataaaaaggagacacaaatttaaggaaataaaaatctagactattacattaaaataaaccaaaataatacaacttcgtatacgttgttcaaacatttttcaacttaacattttgattgataatcatatagctttatcttagagataaaaatatactcagaaaagtttcgtgaaacatttcttgatatatggcagaagtatgtactgttcaaacttatctcaccttaattggtttggctccatttttataaaataatacactctaacttctttaattaaagattttcgtaagcaaaatatgttaatcatgcttaattgtgttattggtggctcagagggcaagcagaccttttaaaaaaaaaaa

SEQ ID NO: 64367 - DNA, 1720 bp, Arabidopsis thaliana landsberg
ccagatcagtgatatggaagaagttggtcttctcgattcgtatcacaacgaagcgaacgccgattatattttgactaaaatcgaagaaggaagagatgtttccggtttaaggaagattcaggtcggagtcaccggtatgacttgtgctgcttgttctaattccgttgaaggtgctttgatgaacgttaatggcgtcttcaaagcctctgttgctttgttacagaatcgagccgatgtcgtcttcgaccctaatttagtcaaggtttcatcattttggatttttaagatcttatatatatagatacagtagttgttgaaatttattcctgcaggaattgatttgatttggagcatttatgattgttgtatgtttttaggaagaggatattaaagaagctatagaggatgctggatttgaggctgagatattggctgaagaacagacacaagctactttggtgggtcaatttacaattggaggtatgacttgtgcagcttgtgttaactctgttgaaggtattctaagagatcttcctggagtgaaaagagcagtggtagctttgtctacatcattaggagaagttgagtatgatccaaatgttattaacaaggatgatattgttagtgctattgaagatgctgggtttgaaggttcgcttgtgcagagtaatcagcaggataagcttgttttaagggtggatgggattttgaatgagcttgatgctcaggttttagaagggatacttactagattgaatggggttagacagtttcgtcttgacaggatatctggagagcttgaggttgtgtttgatccggaagttgttagttcgagatctttggttgatgggattgaagaagatggatttgggaagtttaagttgcgtgttatgagcccttatgaaaggttgtcttcgaaagatactggagaggcctcaaatatgtttcggcgttttatctccagtcttgttcttagtgtgagtaacttaacttatttgaatgcactcaccatttatgatacaatcatttgtcttgaatctgttatctaatgtcatttaacagaaatgattttcttttccagattcctctcttcttcatccaagtaatctgcccccacattgctctttttgatgccttactggtatggagatgtggacccttcatgatgggtgattggttgaaatgggccttggtaagtgttattcagtttgttatcggcaagcgattctatgttgcagcatggagagctctacgaaatggttcaactaacatggatgtgctcgtcgctctgggcacgtctgcttcttacttctactctgttggggctcttttatatggagcagtcactggattttggtctccaacatactttgatgcaagcgccatgctgataacttttgtcttactgggaaaatatttagagtctcttgcaaaggggaaaacctcggatgctatgaagaaactagtacaacttacgccagcaacagcgattttactaactgaaggcaaaggtacttacttgtcttatccttgaatgatttttacatggaaatgctggttatacggaaatgcttccaatgaggatcgtttatcaataagcttgaaatctatcaaaaacgaaagctcaactattcaactttgtttaagttcagttccaattctttcttcctttttataggaggaaagcttgtaggggaaagggagatagatgcattattga

SEQ ID NO: 64368 - DNA, 627 bp, Arabidopsis thaliana landsberg
ggtaaaagactgtaaccggtctcgttgtgagtccagtcagagtcccaacgaggcctacatacacttacgtgatagtcattgaactttgcagccacgtaatagtcgtcttggacaggatcagacgaagagagacacacttccgtggcatgagttgcgggtttatagtcgagcttgagtgatggtaatgatatgactcttggagatgagacacaaggcttgtacagatccgtgagatgcacactaatgtctttctccttgaaaaaagcgacccaacctttcgatgctcccagaagcggagctccatgaagctctttgggatacttcttctcattgccgtacacttttttttccgtagccggttcgaataacttgtgatgcacgattaggccctcctctggagaccctcgcaacttcttagtggtcagcaccaagcatggggacggaggcaatgatgagaagaaacgagcattgttcctgcgtccctgtcaatttccatgaaccaaacatcggacttagtaaccaagaatcaaagaaagtactgtatgacataggaacaaagatagtatcttacagaaagctttgagattcggctgaagaacagagccatatttatttattttttttctc

SEQ ID NO: 64369 - DNA, 515 bp, Arabidopsis thaliana landsberg
aactgatttatttattctaatagatgtgtgattacatttttgagttattgcctaaaataccaaaaaaggaagatgtttgatttcgtattccaataggttccggtcaaatgaaaattttcttaaacgtccaaaagaatttttcggaggctcccagtaaattaaatagagactggaccacgaaaatttgcttcaaaaattaatgttctaatgttttggctgagatgatgcactagttataccacaattttcggtatctccatatatgtatatgtacattctatgagtctgttcgctcaaccttctgaaaatctcaacaatattttctgacaacgcacggttccagatgatgaaaaaatattatattttatctacaataataatttaaaaagttacacataataataatttaaaagagttttttttattctatcttatcaaataatatcataacaaattttttaaagattttattatgatatatatatatatatattaatggactaaaatatgagaat

SEQ ID NO: 64370 - DNA, 443 bp, Arabidopsis thaliana landsberg
  unsure (1)..(443): unsure at all n locations
tttttttcttttctcatgcacgccggacaaacaaatttatagttaacgcgatacaaggagaaacctctaaagctgtagggaaatacccgactccaccatcggagtctgcctgtgctaccatacacggcgacgtgggagaccgaggctggagggggctcacgatccttggtgatcacagcgactactaaaccgcaggcactgacgacgatctatgagcgactgacatcgacacacaccccatcgaatggataagcctggactacctcatagttgggctcaaagaaggtatcagtgaaagcgaacatactcaagactccatgtgccacagctaatgcatcagaatgattacaccggcgtttgactgtgcgagagtggtcttactatctactagtattcnnnnnnnnnnnnnnnnnnnnnnnntcggcggatacttgagttgacgg

SEQ ID NO: 64371 - DNA, 625 bp, Arabidopsis thaliana landsberg
accgcgcgtcacggggtgggcgcgccttgacaagatctggggcggttccgcggatggccggtctctgcggaacagccgttccgggcgcgtcgccctttgcgttccgtcctggtcgatcaccgacgacgacgggaggcccgtcaagatgatggagcttgtccgcccgacaggttcgaaccgcatccagcttgccgggctcgcgcacacgcactgggaggagatcgaccgcaagagcttccagagcttctgggaagccgaagtgaccgaggcgctcgacaaggtcgatatcgagacgatcagtgtcgcaacgggtctcctgctccccgtctggaacaaactgccgcaggacgacgttcgtgtctggcggatcgacgacgcggcggggacgtcgatcctcggccgcatcgtcatgcccggggcgatcgagaagctgcaatcggctttcggcctcacttcctcgatcatgctcacgcctggcgaactgatcgaggctgcccggcatggcgacggcgccttgatccctgggctgcacggcgcacgtcttgtgtcggcgatggtgaacgacagccgccggatcgagatccgggacttccggcctcaggaccgcgaatggctgaaagcgcgc

SEQ ID NO: 64372 - DNA, 514 bp, Arabidopsis thaliana landsberg
agagcagatcttgtggatcatgacaagatgatgagaagagagagatgatgaaaagagagatgatgaagagagttcatttgtcgagtttcagaaaaatcaagggaagaaagaggagagaaaaagaaatcgatttgcgaataaaaggaaaaaaaaacttattttgtctaaataatcatccaataatataatgctacataagtgcactttataaattaaaatacctaaataagagcttgtaagatgtgtatcttatttaggtgtttatatcattggatgactatttagacaaaataagtttttttttttaatttggccgtttaatacctctaatattaactaaggtatttttctttcaaatttaatactagagatattaaacgggtaaattagaaataaatggtgatttttcctagtttttttacctcttatttaatatcaaaattctgatttattattggggttatgttttttttttaaattctgggaaaaaactcataaagtccctacaatttag

SEQ ID NO: 64373 - DNA, 611 bp, Arabidopsis thaliana landsberg
ctatcagcacctggacggtggacgactcgctcgaccatttggcgctcgtgaaatgccaccatgtgcatgtttggaagatggagctgcaactgcatcacaggtggagagttctgactaagctcaaagccgtatatcctccataaggcctctggaggggtcacccaccttgcatctctgtactgcttgatctcatctacatcatcatctgccttgctcgcatctctcataacaacagacgcacgatcatggcctttgtatatgtacttgaacaagtatttaacagccttgatgctcccgcacgcctcaacattgatgtgacagttgaagagccgaagcaggtaagggttgtaagggacaacccatctattgtccaattcgtatcctcgaaccttttccttacgcccatcatcacgacgtctgtaaataggatatgaatccttcccttgcaaagttgcgccacagaaaggccgggggtaatgattcttgcacgatgcacgacccttagtgcatgggcagttaggatttagcgatctgacgggccatgcatcatatgcttgataaccacgttcgtagtcagggtactttctgctgggactcgctgagatcaaaga

SEQ ID NO: 64374 - DNA, 230 bp, Arabidopsis thaliana landsberg
actatcaataataatttatatttatatcttacacctacttatttaagcggatcttatctggtatatatatattacattgtttttctcaattatatgagagaaataaaatataattattcggctatatgtcccggcacgtcctctacccctcctcccaggcccacccccccccccccttttattccgcccgcgcccccccccccccccctctcccccccaccccccccccc

SEQ ID NO: 64375 - DNA, 1815 bp, Arabidopsis thaliana landsberg
agtgtacctgtgaaataggtttatgacacgttctcaatccgtgccctacaaactgccaatcgattatcatcaccatgaaataattttaatgaacgtttcaagcatcatctagagccttcaagcatcatcattgttcaagaagaaaacaaatgtcgttcgaggccaaacatgtgtttaattttatgatatagttaaagaaaaaaatagaaccgaatgatcttagttatagttcggtttggatttacatatatactggtgtatttctgcttacctcaaccatttgattcctaatatgtaagatattagatacatatgcatatattgtaagtcatgatatcgaaatgatcatctagccgattgtcatgcttaagatagcaactcgggatatcaacaaagcaaagaagtccttgaatgtagaagatagcataaccggtttagttcgatttacaattgaacacactaatttggggtagacttattattactaattaaccgggcatattcatctttgaaggagattaattaacttgttattttcataaacatttttttatgtgctttgtccagccttttcttcaagcttaaatgagattaacttgttctaaacagcgttttaaagaaaaatgaaaagacagaagcatcaccaaaatctgccaggatattctctactaaacaacaatactacattgttataagttcaagcatgtgaaacgagattccaattcagccgagaaccattcacccattctcaatttgattcaagttatattgtaatttcagatttggttataaattgatatattattgcatcatgactatgtaatttcacatttaaattaatataagctttgtcaaaaaaaacgatggatatatgatttgataaaatcattacgaatactgtattcggaatacaaatgtccattggcattcgactatgtaaataaataaataagtaaaggaaacgaacttcgtccatttttttcttcctttttaaattaaagaatgatgaaaaataagtgagataataataaaatctacaataattttgtggaattattgtgaaagcaaacggaattgttatgatgattagttgttttgtgtagattaaccagtttgatgaagacatcaatctcgcaagcaatcctcaaggctccttcgtacgagtgtccgaattcttcctcagacaacctcaatagatcttccaacattgggtggtttagcaaattagcttcaacttctagcttgcattgactctctttatctttacctacgtaaacccgaactcttccttcttctggtaatgccgatgttctcgaagatgaaatgttcttcgctccgcaccatagtagcttcttcaccaaggttctcattctccttgtaatttgtttgaattaataaaatgctgatctcaagacttttgtttcttctcttaaaatttgataatgtgtgttttgtgtttgtaagataacattgtgagatatacatatttatatgtataaacaagtgtcattgggtttacgtagtggacaagaaaaaaaggagaaaggtcgaagggttctatgaagaagttgcggagaatcatatcgtttgtcgcaccgcgtttaatttacttggcttgcagcttaataggcttaaccaaacaattgacattttataccggttttcaaaaactttgattctagcaataaatgatagtaaaatactaaaaatgcctaataagaagtatgacttctccactcaatcttatgatataaagttacgtaatcaccaagaaaacaagctttattgccaatttagtttattgtaatatggtta

SEQ ID NO: 64376 - DNA, 495 bp, Arabidopsis thaliana landsberg
atacaatccaaagttatctaaatgtttctttcgaagcattagaaaaccccaattatgttatgcgtcgtttatcaataataggtagtagtagtactactagtagtagcattcaacaaatatcattattagtaactagaagtctagaagtcattattgatctgagtaaacgttatcttccttttgtttcttaaaagataacaatccagaaataacaaataatagggccaattctaacatgtcattttctgaatttgataacctaattttcttagatgatttatgactatgtaatagttagatctataggagttttttttttttaccatttatgaataatattattagcatgccttatctagaagcattttccacagataaatccacttacaagaaaaggaataaatataatttaccacccttttcatctaaattgttatttaaacttgaacttatattaattctgttttggttcacaaacaaaataatggtgaaaaa

SEQ ID NO: 64377 - DNA, 452 bp, Arabidopsis thaliana landsberg
gtgaaacacaagatcccttatgtcaagctcgctgtacatagaaaccggaggttgaaagtccctgattggtggctttgaagaatggcaacaaaaaattctcaaggttgaagtcttttctcattcttcttccctccaatactgtacattagttgattcttttgttacatttgcgtttcacgatccatttataggcatatatactcttaaacatcatttttttaataaccagaggtagtcacataaatttgtattccatctaaagtttcggtttatctgtttttacttctctttaaggataactgattcaggtactcctatagttcctattgttgtaaacttgtaatggaaacaagaggatcaagctgctcctatatcttcttgtgctccagcttccgttttgtaatggaattttgttatattaaaatgtcagattcttgatggtaggagtatgc

SEQ ID NO: 64378 - DNA, 455 bp, Arabidopsis thaliana landsberg
aatcgaatgttgtactatggaatgtgatgattgtagggtttggcggtagtgggatctgtgaatctagcttggatttgtatatgcttgcaaagaataacagtgtcaagcttgtttccacttcattcactggagctcttggtgcgtgtagtcaaagtgagaattctggtttcggtaggcagatccattgcgacgtggtgaagatgggacttcacaatgacccgtatgtttggacttctctactgtcaatgtattcaaaatgtggtatggttggtgaggcagaaactgtcttcagttgcgttgtggataaaagacttgacatatggaaggctatggttgccgcttatgcagagaatgattatgggttctatgctttggattattccggttccacgtagcaaaacagtgtcttgcactgtatcttttaccatgtccaccgttacactctgtcgcttctc

SEQ ID NO: 64379 - DNA, 598 bp, Arabidopsis thaliana landsberg
ttcgaagtagtttggttcctttgaattgtaagatatacccctgtatctgtagagtgtagataaaggttcatatttgtagtcagaagggctaattgtgaatttttcaactttcagtgtggcacagttgctacttgtgtaagaaaacaccaaagctatgctgcctttgttgctcacatgctgtatgtgaaggctgtgtcactcatgctgagtttattcaacttaaaggggataaagggttatgcaatcaatgccaggagtatgtctttgctttagaagaaattcaagaatatgatgctgctggggtatgtttcaaactgttattactcaactttggatagtagtagtctctaaccttgaaattttggtttccatccattgcaaataactaaggtgtttaggatttgtaaactctgtattaaagagatttatgtccatttgaaacaaaagtgagtatgaaattggatgaatctgagtgaaacaactctaaaagtttaaattagataatttggttaggcttaggaaaaggatgaattaactacacatttggtatgtcttattgtatatgtctatctcccaaggttgtcttaaaatttttggt

SEQ ID NO: 64380 - DNA, 542 bp, Arabidopsis thaliana landsberg
  unsure (1)..(542): unsure at all n locations
taaaacaaatccctttcttttcaaggaaaatttaagaaattgaaacggttattggaaggggaagagctagatactttcgatgttaaccgattcgattcgagatcaaattagtactacccagaaaggaaaaagaagaaagaaaatgaaaatcgccgagatctctggagatcgaagaaaatttgagaaattcgattgggaggatcgagatctgttcatgggtataaatctttgttttttttctttctagaaacgagtagacatggtgaagaagaagaagatgaaggatcggcggtgaagatggtttcacgaacttttcgttttgacaagaagagagggaacagaggtggctagggtttatgatcgaaaaccaaaaaaaaaaaaaaagatctttctttagtggtgattggtcgtgaccgttggatggtattctcgacggtttagattgattctggttcgatgggtccaaggctatctttttttctttnttctcgactgcgaattttttggggtacacgaatatttagaaaaatttaaacgaattt

SEQ ID NO: 64381 - DNA, 567 bp, Arabidopsis thaliana landsberg
  unsure (1)..(567): unsure at all n locations
gcgcacggactnttcgcggtgacgaccgtgactctggtcgcgatcatcgttgtgcagacgatctagcgctgcgcattgggcggagcgcatcgaggcacaccggacaggaatcgtccggtgtgcctcttaacgtcggcttgcaccgaacacttcgaaaggacacttcgtgaacctcgtttccgtccgtatcatcaccgccgacatcaaccgactggtcggcttctacgagcaggtcaccggcagcagcgccaactgggcgacccccgatttcgccgaaatcgccactgcatcaggcacgttggcgataggcagcacgcggacacttgccatcttcggcgaggacatcgctcggccagccgacaaccacacggcgatcatcgaattcctcgtctccgacgtggacgccgacttccagagactgaaggacgtcatcgacgaggtggtgagcgggccgacgaccatgccgtggggcaaccggtccttgctgctgcgcgatccggacggcaatctcatcaacctcttcacgccggtgtcgccggaggccgtcgcgagttcaatgagcgcact

SEQ ID NO: 64382 - DNA, 2167 bp, Arabidopsis thaliana landsberg
aggcccatggccacatgggcccctagcacgtgcggcctcccacacgcgtacggcattccttctttcgcagagtccctgtgacgagcatggaccactctacgtctttctttaccctataggcttggtccacgtgtcttctccaaagacgaaaccactacacactgtggtgaatcttgtaaggcttctgctgttgtaactgcattttgtcgtccggtcatttatcattcaacaataaccacggatcttcaaatcatgttgaggccgctgacaaaagtttatatgttatttcattttcaaatcttttatatcccacttgtgcttgtggatgaacctatctgcatactctatatactcttttcttcttctcatctaaaacaaattacattgcatattacaaatcttgatgtgtagcaaaatataccatggctatctttgacttgacttgagttatgtgatgaaacgttttgagtaggtgtgaacatttgaagaaccagttataacaattttagtttaagtaagtactcgatattgaatatgatggttgaggaatgaagatatgagttgtttttttcatagacaatgacatttactgagaaattcacaaaaatagtgtatatattttgataaaaaagtcaaatgctattctgattgcgaatcacaagtctacattgttatcagaatgcattgaagtttataaacaacaaacacatggcaagtgggtggagttcacattatctaagcagaatttacttgcctttgttcgattttaactcaaaagtttgatttttattcttttacatatctcagcaaagttgtggagaaatgactgatcatgcatgaagttgtaagtaaccaaatcgtgctcaactcgcaatatctctcagatatacagttactgctgcgttcatttagagtctaagcgctgtacgtctacaagctggtaaagatctccccgccgctgcctattcaatggaaggctagtcctaagatggtaaaaaaaacgagattcagttagcggatcacgctatcaaaaaccaagaaagttctggtgtttccgtgattaccttcgttgttcaaggatagagtaatcaatctctgctatgataatggcctcctcatgctcagtcgttgctagtacttctccaaactgtcaaataatatatatgtttcaaagtttagtgatcagctaaaagcttcattatcaatcaagtaacacagaaaaagtttagtgcttacaggcccaacgagtgttgagtgcccccaagcagtgtagccagctcctgaatctctggcaggtgagcatgtcgccacatataactggagaaagtagcatacatagttctattaaccggtccatgactttgataacagtcaattaagtaaaactaaccccaaagagcagaagataatacttgtattgataactcaaagaaaaatgcaggtttgctatgaattcattaagaaatgtcagaacttgtatctctcttttggctatcaatacaagtatttaacttggttcatgtacctgattatccgtagccctgaaatggaacaaaacagatcgatgagcattgtgatttacccatgattaaataagccaagaaagtcgtaatgtagtagactgtgaatcatacctggccctttgtagtaattcccaatgcaatggtccagttgtcatgttaaaggctcccgggtagcacagcaaatgagcccctgatatgattaaagtaaacatgtgggtgatgaggttctttaaaacgtaatggacccgaaaaagagaggaagcagatagtccatttggataaagcattatgatatgaagactcacctcttgcagcatatatcatagctaactcctggaacctgatatcataacagatgcctattccaatacgccctacatctgcaacaaccaacaaaactatcattctcaagcgctgcaccgcgttaaagatttctcataagtactagaaagtgagaggtgatgtgaacggtcctactatgacttgattgttcaataaagacatttccccagtcaaaatagttggcaagatcttaaaaacattattattcataaacactaggccagcatgaaaatgaatcatttcactgatgagaaaagaagatcccaaatctgactggaaatttaaatccttaatccgaaatt

SEQ ID NO: 64383 - DNA, 448 bp, Arabidopsis thaliana landsberg
tggagtgggagctttcttctttacaggtttgaaccaaaccctaaaaatttcctctgcttctcatcaagtttctggcttttagtgtagtattggacattgaaagtgttaggttctggttttaactgaaattgagtctgaatttgcttcaagtctggtctataatgtctgaattgcttctttacaggtttgaaccaaaccctaaaaaattcctctgcttctcatcaagtttctggcttttagtgtagtattgaacattgaaagtgttaggttctggttttaactgaaactgagtctgaattttgcttcaagtctggtctataatgtctgaattgcttcaagtcttggtggtggttaatgtggggatggcttttggtttgtggtgaacagaatctaaggcaaagacaacaatatgaaaagcacgtggctctctctgagattgattacagta

SEQ ID NO: 64384 - DNA, 550 bp, Arabidopsis thaliana landsberg
  unsure (1)..(550): unsure at all n locations
cgggtcggaaagttatcggtgcaatcgagcacgatgtcggcgtcgccaacggcggcaagcccgtcattggaacccaaggtttcaatctcgacatcgcgattgagcgccgcaagctgcgcggccgcggcatcggtcttggcgcggccaacatcgctctgacgataaagcgtctgccgctgcagattgctgatctcgatgcgggcgtggtcgcacagcagcaaacggccgatgccggcgccggcaagcagactcgcggcgggtgaacccaagccgccgaggccgatgatcaggaccgacgaatcgcgcagcaactgctgcccgttgacgccgacttcgcgcaggatgacctgacgaccgtaacgcgcaaaatccgtcatgcgcgctgtccgccgctggcacgctcgcgaccttccagatcgcggcgcgtagtgaccgttttgaatccggcgtcggcgaatagcgagcgcaccgcggcgccctgatcgtagccgtgctcgaccagcagccagcccgccacatgcanatgttcgggggcgtgcgcaatgatttc

SEQ ID NO: 64385 - DNA, 1420 bp, Arabidopsis thaliana landsberg
agatgtcatcacatactttcttatcatttttatcatatatccattacttatctaatactcttgcaattatgcctccttcaagatatgatttttacttacctaatggcgtgtattccggcaaacttacgtacttggggcatgactttctagatgtcaaatcttgtgaaccaacacagtccctgggctgtagtcatgaattaacaaaactgtcagaaactggtgccattctcaaagtctagcaagatgttttagctttaaaccaggaaaaacagtaataatgttaatgattagcaactcttgccaaaccaagcaatttctacacacagctttaagactttgtctgataatttcataatgcttggagacatgttatttgagttttcttatcatgcgagagcaatttcagactttaaaaggaaatcaacaatctaagaatgaatctcgaaaacaaaccttaaaatctttatagaagcatatacgtatttcatcgattgcatctcttttgcaaaccacttcaggggtgatatgaaatgcattctgaatggctgttacgatacctcctagaggatacttttcactgttggaagcaacatagccagcttgataaaggacatcctaccagatttacagatgcagaggcattaagaacttatccaagagagaaaaaatgtaagaaagtgtcttcacaaactgataaactgacagagcagaggaaatctaagatacatgatcatttacatcgcatagaaaaactacattgcagaagaatgcaagcaaatagttaacacatgtaaatcttccgtatgcccaactttcttatttaaccagtccactatgcattatatcataacataaaagcataactcggtgaagacttaccgtgacattatgcttcaagtagagattaagcgtggtaaggaagtaattatactcatcatgaaaaacaggagacgaacaagtcccatgtttctctgaaaataaaaaattatcagcaaaatcgttagagagagaacctatgttatcgaattagcatataaccaaacccgaatgtattctgctaactaacacactgttaagcaaaaggttgtgagattaagcatggaactctataacaacaccaatgaatcaagttctatacaaattatgtggaaggaaatcgaaagaaaaatcaaattaaagaagtaaagattgaatataattaccccactgccagcgtgtattgcaaagatatacatgacaaccaacaaatgaaacagagttagttttggtgaagactgaaagacaatgtcataggagatggaaacacctatctatgaaaagttaataacagatgtgaaaagataatcacctcgtggccccaaaatgaccctttcccaccattgcatgatgatggagaaccacaactgagactaggccagtg

SEQ ID NO: 64386 - DNA, 523 bp, Arabidopsis thaliana landsberg
taccagaaaccatctcggaatctgactcttgtagttgttcttcaggattcttctcaccgtttcgtgatttactagcacttccatttttccctgtcttctcagtcccagacataatctcatcacttcctttacttccaccaaagccttttacattacccatcggaggcttctcagctttaaacttgtacttcttctcaaacatcaaacttttctgatcatttccagattcatccaacggttctacgcgcaatcccgccaaacctttcctctgtgaattcaaccgtttctccatgttagacaatcttgcttctatctctttctcaatatcaatcccagtttcatcatcttcttcttgcttaccctcacttttacgtgcttcacgtgccatcattctgatctctgcaatcttgtcattcatttcaacatgctctagcaaaaccaaattgttaccctcactatcacttgaaacttccggcggtttctcggatttcgttgagtctcccagaaacaaaacagcacaaac

SEQ ID NO: 64387 - DNA, 557 bp, Arabidopsis thaliana landsberg
aaattaaaattgtttggcttttgaagatggagaaaataaggttgttccttgaagttttggtcatttcacagaacttatcgatgttatcaaaatgaccatcatctttttctccttagagaaaaaaaggattaattaaaactgagttttgggctttgtggagaactagactggactccactacagtagtcacaaaaactcaagtgggctttgtaagcttattacaaaaacaaatttccatcacaacgcaaactaatatatacattttaaaaaaaattattaaaaaataaaaagtgttacatgtaagtgaacatctttagggcctgaatgtggagcaagtttactatctaaattatttatttatttattaaataattgtttttttttgtcgacttatttattaaaatattttaaaaatggctctcttgattagaatatataatagggttcttagccgttgcaccattcttgaccgtaataaggctaaaataagccctcgcaccactagccctcccttacaaacagatgggttttgactattaaaacatcatttattacct

SEQ ID NO: 64388 - DNA, 261 bp, Arabidopsis thaliana landsberg
gctttccaagtagaaaaaatctgatcgagttgattggaaagtgtaaagaagaagaaggagaaggagatgaagagtcgatcgaataaggaaagtggcggcgttgagcagtgtgaaatggcggagaaagggatccgatggcgagagagccggagagatggaaacggtgtttttaagttgagaggcctatttggagtttttttaactggacatcaaattccatattatttacgggaataccttccttcttcttataaatgaggt

SEQ ID NO: 64389 - DNA, 768 bp, Arabidopsis thaliana landsberg
atggtaatttaggtacggttaaagtcaaataaatctgtacaaaaactagagtacacgtaaatgcattttgaaacttacatccgatagcttttggtcgaacacttgatgatgcaccggttggtgatataactacataaaccaaaaaaatcatcaacttttaattgaaattatgaacaatttcgagtgaatcaattggtcagaaaaattgttctaaacactaaaccgtttggtccattggaccaaccagcacatcttacatgatcaattaaggtcttgaaccacttgacctatttgtatgaccaatttacacaaaattgtggtgactcgcttcaatttcggaccactcggtgctagagccggtccaacgttatttgttgaatattataaactcatatacgaaataccaaaaaaccttaatttaataacattttaggtcaaaaacgaaaaaaaaacgaaaaaaaagaaggtgaaataacatatatgcatgtgcattttactatgtttactcttaaactgcgatgattatatgatcaatctagtcttggttcgactttttcgggaatatttttacgaataaagtaacaaaacaaaaacacttatataatgcataagttatatggttaaagtttaagttcaatattgatttatataattgataaaacacaaattaacttttaactaaaaaaaactgataattcaaaactggcctgaatcacagtttgtaggggaaataatggtgtcacacatgcaaacatgtctaagcccttc

SEQ ID NO: 64390 - DNA, 579 bp, Arabidopsis thaliana landsberg
ttacttgtgatatttaatttgtttcgttccaaatgatttatttacttgtatcgacctaattatgtatatagtatgaggggatatattgtattgcgatggatagttttataattctcggacatttaaacatttttcatcgccttcttttttgataactaaaactttcttatcttgtaacatctctaagaaaaaagtaacatcaaaaacataaaagagtagctcggagaagttggttctactaattaaatttatgtattccttaaggaataaagctatggttcacattcgagagactacgaatcaaaaaatcaataatttttatttattgaaaagaaattgaaaatggtcattaaagaatcataataatagagagtttgataataacgctgaaaagtcaaaatctaaagttgatcacacaaaaaagaataaacaaagaaaaaccaaagaaagaaagtgagccaaaaatgtcatgactgaaaaaccaaataaaaagtctgaaagtttggggagaaaaaaaaagactgacttgcatgttatcagaaaagcatgaatccttcacttcactatacaattcttaat

SEQ ID NO: 64391 - DNA, 1735 bp, Arabidopsis thaliana landsberg
  unsure (1)..(1735): unsure at all n locations
agcctcttagttctccgctaatgttaacagagacggtggtggtgggttgattcttgggttcatcaagtattggcgtaatgggtcatcgttgttatcgccgttaccgtcgttagccatctgggttttcgccgggaaactggaaagttgagagatttttgaaactagggtcgttttccgataatggtggagataaaggaagaagctttttctgtctgaagcccgaccaaaggttgtaccttttttgggttatgatctgttttgtttttttttatgcttattcagtgttatttattcttgagaatcgttcatagtactatgattttataagattaaagttttcgaaaaagacaaatnctttttttttttttttttttttggttgtttgttacaatgtgtcttattttattaagatgattgataacatgaatagtttacttgtacatatctgattaacgaatcctatgttgatggtaaattaaaaattggacccataacattcgtatcaaacgaactttaatcaaatgttttttttgtccttaatctcaagagatgattgtaacatttaactcaatgttagttaatacacaggaaagtaaatttgtcacgttatatattgttaatgaattctgcagggtgagattattactattggaaatgaaagggtcatatatcctatcctcgattagttagatacactaaccaatttgtcaatttgtgcataaaataaaataattgaaagggtcactttgtttgtcaacggccggacgtgtcattttcgccgattcagatgacgcctggtttcgtaaatttggatttttagataaaccttttcaattattatttttttaatttttaattttgagaaacagaaaacaagcaaaaggactatgtccgctgaaaaattcatcagaaaattcaagtgaacgaaaaaaaaattgattgaatttgcactaatggcaatatatcagaataaaattttggatatcattatattaaaaataaaaacccaaatatcaattttctcaaatggcatcatcgacacaaaaccagttatataattgtaatcacttttaccactaactattgtgttattttagtatccctacttgtcatcttcactacacgtgtaacgaaaaacacattataggtgttattgtaagtacataatttaaggtttcatagttgcagtttagatcaatcatgtagacatgtgaagctccaataaagaaaacatgttcatacggcaacaaagatatgtttatttttgtcatctgatcacataagtattaagtatatttattttactcgtcataaatgtgttgtatcttaatcggtgcaatgtaaacagtaaaagtgaaaactgatgacaagaagtcgaacgtattaaaaatttgaatgtagtaaaatcagaagatattattcgagcttttcttaaggctaaggcatattaacagataacaaacaaagtagcttatactacagaagaatagttagttgaagcaaaaccattaagaagtcgtcaaagtaaatcttgttggctacgtctgaaactctctgactgctgattctgaggacccgagtataagcggtaataactgcttcctgattcgtttagccctggaggagtccacatacttgaggtcccattctgagatagaaccacaagaaaaaaataccggtttaaatttcgtataaacccgagaatagttgtaccgaaccaaaatttcaaatgctc

SEQ ID NO: 64392 - DNA, 606 bp, Arabidopsis thaliana landsberg
aatgcacggcttcaatattatacgtaattttgaaattataacagcaataattaagaaaagagaaaaaaaaaactaggatagttgaacgcttttatcattgggttaggttttgcgacatacctagagaggccaaattacactgaggttggtgtaagccttcgagtatgttggattttgttgtaagagagttattattttatttgttgtattttataattttgttggtaatcaatagtttcccggtttagttttcttcttcaagtggacgcttgttaatggtgaggatacataataaaaataaaagaaatcaaattttaactaaatttcatatcaaaactttgatgttttcggtttggttcatctatattgaacatattcataaactatccagacgtttctatttatttacttggggattacaaagaacatgttaactttgttttgtaaacgtgtcgtatacaaacacaatcgttaaaaagattgaagtttctattacaatacatactatcatcattagatgcactaactcgattgatataacgttatattcaatgtggagaataatatttgatatcaaaatctggtcccatattcatccgtaactat

SEQ ID NO: 64393 - DNA, 517 bp, Arabidopsis thaliana landsberg
  unsure (1)..(517): unsure at all n locations
agccggtctcgtacttgccagccagcgcatcggctacttcgacgttgtcgccaacgctttttggtgactacggnctcgggagtcatgtcgntcatttcacacggttatccatgcatgagtggacgcggcgcaggctcgtccacggggtgcaacatgtcggccaggctcacggcgcgcaacgccatgcccacggcctgattgatccggcgccagttgccgcgcacgctgcaatgcgcctcgcgcgcgcactggccggccgcgacggcacattccgtcatgcccnnnnnnnnnnnnnnnnnnnnnnnnnnnnnnnnnnnnnnnnnnnccttggccgcgcgcgccagacgatagccgccgttgacgccacggaaagattcgaccagttgcgcatggcccagctgcttgagcagcttgctgaccgtgggcaactccaattgcgtgcactccgcgatctgcaccgtgctgagcacgtcgtgcggtgtctccgcgaggcaggtcatgacgacccgtggcgtat

SEQ ID NO: 64394 - DNA, 728 bp, Arabidopsis thaliana landsberg
gccacacggggacggacgaacccaaagagagagaaacagcaacagaaggagggtcatacaaccaacaaaccaaaagaggagccaaacccgacaaccctcaaaaaagggaccatgggcaaagaacacacgggcacaaaaagaagaagcaaagtagggagcggtcttagaaaaaagagatagagacacttgatcggctccatgcgagaaagaggagatgccgaatagactaaaaaacaaaagacaaagcaaagactataagaccccacatcgagagagagaagaaaaagaagatgagagaccatctagactaaaaggaagcgggcaggatccttgaaaaggaaattctagcgctcccaaataatgggaaaaaaaacaaacgtgaacagagagagtatgcatatgccatcaatccaatacacaaacagagcaaagaacgcggggaacacaaaacaagatgcaggggagaacaaaggggaataccgaaatgcataaatagaagcaaaacggggtacaaaatagaacaaaaaaaaagatggtaaaaaccaaatatgataactgaaaataatggggaacacgagggggaacaagagcaaagcaaaaccgaaggaggacaaaaggaatgaaacaatgacgacgatcgaaaaaaaaggggaacaaaaacccaaaaaaaggaaaaacaaaacaaagatggggggaaaaccaaagggggaccaaaaaactgggggggg

SEQ ID NO: 64395 - DNA, 655 bp, Arabidopsis thaliana landsberg
cgtatgggcatgcgcgcactggcgcttgatcgcatgtggtggctcgtctcaccgcaaaacccgttaaaacccaattccggtatggccccccttgaggaccgcctcaacgccgggcgaacgctcatcgccaatgctggcgaaaaactcatcagcgttaccgatatcgaagatcgactcggcacacgcttcaccatcgacacgctgcgcgcattgaaacgcttgtatcctgatatgccgcttgtctggctgatgggggccgacaatatgctgcaatttcctcattgggcgaaatggcgcgagatcgcccgcgagatgcctctggcggtgtacccccgcgctggcttcaccttgaaggcgcggctctcgcccgctgcacaatggctgaaacctgtcaccattgacgccagcgactccggcttgttgccacatcttgaggcccccgctctcacgtgttttgaaggtcgcacacacgccggctgcggcaccggcattcgcgccgcccgcgttataaaagcgtgacacgtccaccggattgatggtgtccggcacgccctctattctgaagcttacggcacacctgttttgtgccatttttggtgaaagaagatttttttgagccctgcacccaaaagcccggcccaatccggaacaaaac

SEQ ID NO: 64396 - DNA, 602 bp, Arabidopsis thaliana landsberg
  unsure (1)..(602): unsure at all n locations
ggtggtttccaggtggtgacaccgcaggcgatctgtcgccgtgtgcggcacgcaatgggcggtcgatgggggtggggggcagacttcggtgctcgtcgttcgcggcgccgtcggcgtgcgccgcccgcagggtgatcccgtggtgctgcggccgggcgagggcgtcgatgtccgcagcggcacggcgccgctcgaggtgcgccgctggccgggtcctcgcgctgccgcactccttgcccgcctcggtcagtagcaaccgatgccgcgccagtctgttatcgtcaccgccgcactgcttgccgcggcactctggggagcgttcctcgggtcgctgcagctttccggcggcgcctcgtttctcgatcgcccagaagcgaccctcaccgatctgaagagcacgctgatcggagcgcgaaagccgccgccggtcgcaacgatcgcggcgatcgacgaccggaccgccgccgagcacggctatccgctcgaccgcgcgacgctggcgcangcngtgaccgagatcgcggcgctgaaaccgaaggtcatcgcgctcgatctgctgntcgtcgattcccgcagcgaggcgggtgacagcgcgctgacca

SEQ ID NO: 64397 - DNA, 518 bp, Arabidopsis thaliana landsberg
ccaatcccgagcgccggctccacgtggtgggcatgtttcttggcggcatggtcgcccaggagctggccgtggggcgccgcagttcattagcacgctgagcctctgctgcacggcggccgagattgttagcgacacctccttctgggagaacgtggccgcgcgcgccgccctcgtgatgccgcaggccgtcgacgtcgccgtgcccgcctcggcgcgccgcatcttcccggaggagtggttgaacgcccccgacgacgtcgtgctgcccgagctcggcatgttgggggtcgggcgcccgcggccgctccccttcgcgctgccgtcctacgcgttggcgggaggctcgacgccgacgccgacgccaccgacgccgtctcccaagtacctcaagttcccgaccaactatcaccgcttcgcggcccaggagatgcgcaagcggctggactcggcccacttcagctccgccggtttcctgctgcagctcatcgcggccggctggcaccgccgcactcccgcag

SEQ ID NO: 64398 - DNA, 154 bp, Arabidopsis thaliana landsberg
tgtatgataaataatcaaatctctgtgtgttattcatgttgagtttcgtaacttttcagattttttttttatggggactggatgatccttgactctacagtgaacatgttgttgaagaatcaatattttttgatgatatcgactgaactattgc

SEQ ID NO: 64399 - DNA, 1674 bp, Arabidopsis thaliana landsberg
  unsure (1)..(1674): unsure at all n locations
tggacactcttactatgtgactatttacactcatgtatttccaatcctatttatattagtgttttttttttttataaatgttttcatttatacatatgaattgttcaatggatccatattttaataaccacaaatttgcaaataaaattagaaaaagttactaaaaatatatattatcttaagattgattttaatttatttatatatttagcataagatttgtagatttttttttttaacaataaagtttttactcttatcataagtaattgtctaattgttgcgagcaaattataaacccttgtagaacaaaaatggtgtagggtttatcatttctcgctttaaacgcccaccatcctctctatatctctctccaggtacgcttcgagctcgtttttactatttttagtctcctttgaatccaaaaccattgtaaaggagccgactttttctccaactgtactctacaaaattgtcaaatttcaaaactttttgattcgagttcgtgaaccatggcgagaggcgtagctggagttttgcgtagagcctatagttcaagagttagggttctattctcgacacgaaatttacattcttttagagaatctgagtctagatctctttgtaattctgattttgatgtgcccacgaaccggttttgttcgggtaatcgggttcggattcagtttccatggaatgattacagatttgggtgctttgagattggtaaagttaggagcttttcgtctactgtggataataacggcgaaaatgatgatattgaagaaagtgttggttctgagagtgatgattatgatgaggaaggtttgattaatgaacttagtgatgtagatgaaggcttgttgaatgattcagtggttgctgagacggatgagattggtagcgaggctgctcgtgctttgaacgatcggtatcatgatcctgtggagttgtacagggagcttaggggaagtgaagtgcgttctaagcttcagcatagtgaatgggatagtttacatgagattttcgggttttttgcgcagtcgggatgggcggctaatcaggctcttgcaatctatatcgggaaatcgtttttcccaactgctgttagcaagtttagggacttcttcattgagaaatgtggaattgaggttgttcaggatcttgttcgtgttgggccaactgatgtagctgttaagtttttgttccctgtgtttgttgaattctgtattgaagagtttcctgatgagatcaaacgttttaagagtattgttgatactgcagacctcacgaaacccgcgacttggtttcctttcgctcgtgctatgaagcgtaaaatcgtttaccattgtggaccgactaacagtggcaaaacgtacaatgctttgcagcggtttatggaagctaagaatggattgtattgcagccctcttaggttattagccatggaagtttnnaataaagtaaatgctttagggatttactgtagtctcttgactggacaagagaagaaatatgttccgttcgccaaccatgtatcttgtacggttgaaatggtgtctacagatgagttttatgaagtggctgtgctcgatgaaattcatatgatggcagatcctagtagaagtcacgcttggacaaaagctttgcttggataaaagctgatgagattca

SEQ ID NO: 64400 - DNA, 492 bp, Arabidopsis thaliana landsberg
cctgcttatctccggcgtccgcgcggagaacggcctgggcctggctaacggcccgaaatgctgcttatgcagcactccgagatggaccggctgccggtgctgtacgagctggccggcatcgtcgcggtgatggcgctggggcagggcgcggtgttcgtgccggcgcggcgcgcgtccaacgtgccgccggtcgtggcgacgcggtcggcatgacgcaccgctcgccaccacccgtccatcggcacctgctgcgcggagtccatccatggtgatgctcgactactacttccagttgggaatgcgcagcctgcggcgcaacccgatgctcaccgccctgaaggtgatggcgatcggcttcggcgtggccgcatcgatgaccacctattcggtgttccgcacggtgtcgggcaacccgactcccgacaagacggcgcggctgatcatcccgctggtggacaactgggggccgcagcagaacctcaagggcgagcc

SEQ ID NO: 64401 - DNA, 156 bp, Arabidopsis thaliana landsberg
tttgtcaacactttttgctaattctttatgagtgaagttgtattatgtttccctgatagtgatcttggcctgagtgttgttgcagactaacgtctataagactgaaaatctagctacattaacatttaggacattataaattcgaagatgatgatc

SEQ ID NO: 64402 - DNA, 2280 bp, Arabidopsis thaliana landsberg
caagtttgtttgactttctaaagagaaataaatactccgcatttcctctggccctgttcgggattttggatgccagcttttggaatctgtagcatgtctgtgaattgttcctatctgctgctattttatacaattatcgtacctagcacgtcacctttatgtcccggttcagcagctgtagttcctacctaatgcctctctgttcttaacataattttccttgtctacagatatgcacgagttacagttagttcacaccgacctcaagcctgagaacattctgttggtgtcttctgaaaatgtaaagcttcctgacaataaggtatctagaactgaaataggttaaggttgggtttgggtacactctctgtagttaaagttttgaaagaaaaagaaaaatcttcaagagtttgtactttttgacagtttggtgtttgattttaaataacagaggagtgctgcaaatgagacacatttcaggtgcttaccaaagtcaagcgccattaaactgattgattttggcagtactgtttgtgataaccggattcatcactccattgtccaaacaagacattgcagatcccccgaggtcattttaggtaggctaatcagttacttgctcgtcaatagatgcttgtggattccgtagctgatgcttaacgaatgaacataatttttccctggtaactaatcagtggcatatcattgcaggtctaggatggagttaccagtgtgacttatggagtataggttgtatactatttgaactatgcacggtaaagtctcttcattttgttgtatgaattcttatctccatgtttattagttgttttacttactattgtcaacattttcaaactgtccatcagggtgaggctctctttcagacgcatgataacctagaacatctagctatgatggagagggcgcttggacctttacctgaacatatgactcgaaaagccaggttacttttctgtttccactaacatttgggtgcgtaaaaagtccacagagatataaatgctcatcggttgttgcatgtatggtcgttatgtttttgtagccggggtgctgagaaatatttcaggagagggtgtcggttgaattggccagaaggagccaactctagagaaagtattagggctgtaaaaagacttgatcgtctcaaggtttaatcaccattaattcttgttagtgtctaatgatatatcttttgtttaatatgccgtaatctgaagtagaaactgcttacaattcttgcaggatatggtatcgaaacatgttgacaacacaagatctagatttgcagatctattgtatggtttattggcatatgatccatctgagcgtctcacagcaaacgaagctcttgaccatcctttctttaagagctcaagttgagaagaagcaaaatcagaaccataaaatgtagaattttacttggtaacaagtttttttgttagattcctctaaagctcccgttctcagtagcaccaaacagtagtattcctatttcagttacgagtttggctacgtttattctggaaaatacctctgttgtacattgtgttgttgagaatataaaacttgcatcatattttgaaactaatcaatcgtgtaaattgcatatcataagcaaaatctacacattgcaccatccattatcatattaatgaaacttaagatgccccaaggactcgatgattctcaatcttaagtgaagaagactgtttcactttcacccaccaagaaactgtatatgtacttataattgaagactaggtacattctctattaataaccattggttttggtcgttgttactcgagatcttcagtgaaatcgaccagcctctcgcccactttgtatcgattatcgaattccagcttgtgaaggtagaggataagatcacgaatgagcttgacactaaaccatatggggattaaggcaaggatcgccggccaaatgaaccgctggacggttaagttgactgcactggaaaatccaagaattgggaacagagagtttaccaccacgtagggaacgcagagagtgaataaaagggacactatgatcgaaccaataacatctcgaatcagccacgtaaagggaagtcggttgattgtaacgcttctgattctttgaagcttttccccgccaggccacagttgcaaaacagttgatccgtgtgagcatagtctgcgagagaagaaagcagttacaataacgagttcttgattgaagcaataatgatggacagacgtttcatcttaccag

SEQ ID NO: 64403 - DNA, 593 bp, Arabidopsis thaliana landsberg
  unsure (1)..(593): unsure at all n locations
nnnnnnnnnnnnnnnnnnnnnnnnnnnnnnnnnnnnnnnnnnnnnnnnnnnnnnnnnnnnnnnnnnnnnnnnnnnnnnnnnnnnnnnnnnnnnnnnnnnnnnnnnnnnnnnnnnnnnnnnnnnnnnnnnnnnnnnnnnnnnnnnnnnnnnnnnnnnnnnnnnnnnnnnnnnnnnnnnnnnnnnnnnnnnnnnnnnnnnnnnnnnnnnnnnnnnnnnnnnnnnnnnnnnnnnnnnnnnnnnnnnnnnnnnnnnnnnnttaaaaattcttttttgtaaattaaaaaagcgattgatataatagatttatttctcaatcaaaaaaaaaaaaaaaggggttctccttttttttttggaaaaaaaacccctccccaatttctatttttttggggcccgttttttttttcccagaaatttttttctcccccccgggggggggaggtttttttttttggggggggggggggagggggggtatccccccccccgcccgggggtcccccccctttttttttttttgtgtgagaaccccccccccccttttttttgttttttgggagaaaaaaaaaaaagaaaacccccctctccccccccct

SEQ ID NO: 64404 - DNA, 1696 bp, Arabidopsis thaliana landsberg
cactggtgcttcttgtaaattattaagacaagttagtttataatctaaatacaagttatcactgggccttaaatgacgctacagctgagcgacttaaggcccaaatattactacgtgagtacgtgacctatatatgtcaaaaatacgtgaagcttagatgggccacttaaggcccaaataaatacgtgaagcagagcttatgtgattatttcctctctcaggtcaggagttgttgtagacacagcagcttggtctctttcattggcacaaagagagaaaatctgaaattgagagagacagagaaaaatggcgtcgcttctgaaagcattcatcgatccaaagaagaacttcctcgctcgtatgcatatgaaagccatatctactcgccttcgcagatacggtcagatctctctcgatccataaccctaatttctgaaatccgagtttgttgtcaatgttcatgagtgaatctgaatctgctttgttttgtttggtttgaatgattaattaggtctgaggtacgatgatctgtacgatcagtattacagtatggacatcaaagaggctatgaacagattgcccagggaggtcgttgatgctcgtaaccagcgtctcaagcgtgccatggacctctccatgaagcacgagtacctccccaaggatcttcaggtataattcttcattctctatttctttggatgaaattgatgttgttagaatcaatctagaatatggataggtaacccaggcatttgagctcgaatattgattaaatgttagaaaaatgaagaaattaagatatcaaattgaaatcgaaactagttcatcagaagatattaccttactttggggattttgtgattgtggagcttagatgtatataaactagtttatgcatagtctatgcttgtctcttgcgttactgtgtttgttctgctgttgcttgagattattggaaattttggattgatgaaaggttgaatccttgttacatctttttttttccctttcaataaagtaaagtggtgtttgcatgtatactattgtattactctatggtttagacttttcgatttttgttactttcttatttgatgttgttattagataagaatgtaactgttattattgctggcttaattaagctatcaaaagttcacaactttaaaagtataaggctcttttagttttccaaaattgattaagctatcagaaattgcaactgttaggtagtgttgtggatattgtaactttcttatttgatgtggttatttcatatacaggcggtgcagaccccattccgtggctatcttcaggacatgcttgctcttgtaagtctcctttttgatgaactaacatagaaatcattatctgcgtctagggtaggaacaatcaaactgcaattcagtgtcataaaagcgtactattccttcttgaagtaaagtttcctctttcttttgggcctatctgcttccctgcattgacaatgatgaaaactttgatgagatgcatgtcttttccttcgttatttgaagcaatatgtttttttcagatcttcaatttccctatttcatgaagtattgcatcataaagaaaatgtttgcaatgtttgaaaagttctgagtgtaacttttctgtaaggatagcccatcatcgttgtcatcatccctgtctttatgttgtgatttgcaggtct

SEQ ID NO: 64405 - DNA, 1722 bp, Arabidopsis thaliana landsberg
tatcaatctcaatgagtatagtttttgtaattgtggttgaatgtgacacatattgttgttggaagaactgggactgaaatgctcactaatgaagctggtgaagtcactaggttactattactactctctctttgtttccactattgtaaagtttggatctttttgtgtgatgtgttatgtctctatgttttttttgtatatgtagtcatttacatgatgtttaatcggtttggatctttttatgtgatgtgttgtctctatgtttgttttgtacatgtagtcatttacaagggatgtttaatcgaacgattcgtcttcttgaagctggaattaagcctgtgtaatgctctcctccttttactttctctgttggtggaaaaggttctctttttttattagttctgaatcttttgatgcagctatgttttcgatgggaagcccccggagttaaagagacaggaactggctaaacggtagatttaattatctggaatgcttcttaaattgagttttagttagacaatggctaaagtgagtttctgaactgttgctttctactcttgattcagttactccaagagagctgatgcaactgcagatttgactggtgcaattgaggtttgtcactcttacttgccttgcctagctttattttattaccggaagagcataaatttagaagcttttctgtgctgataggcaggaaacaaggaagacattgagaagtacagcaaacgaactgtgaaggtagtatattatttttcatctatgaatcgttggactccttagtttttatggcatccacttgaaagcaattgaatctaggactcgtattaatatatgtataaatttccactctccaggtgacaaaacagcataatgatgactgcaaaagactcttgagactcatgggggtgcctgttgttgaggtacttatgttatgtgcagagtcccgagggtctaaatctcttctattaactcgtctttttgtttatgatatgaaatggctaaaagtttgaaaagaagactgatgttgcttcttacatacaggccacttccgaggctgaagcgcaatgtgctgcactttgcaagtcaggaaaggtcttaattcttttgtttgttctctttttcgcgtttaactgtcagtttcaagtgaccactgtcttcaatcttatatgcgatgcttccttatgaaacgcttttgtctgtttaggtttatggtgtggcttctgaagatatggattccttgacttttggagctcctaagtttcttcgccacctgatggatcctagctccagaaagatccctgtcatggaatttgaagttgctaaggtttgtctctcacacacactattctttcttcaacgtgttaagttaatgaactgatccttatattgtggtctcgtttcagattttagaagagcttcaacttaccatggatcagttcatcgacttgtgtatattgtctggatgtgactattgtgacagcatccgaggtatctagatatagatcaatattgtgttattttctctgtgaattgtagaacgcaagttagaaactaatatgtattttgtgaaacaggtatcggagggcagactgccctaaagctcattcgccagcatggatctattgagactatcctcgacccatctaaacaaagaaaggtttaattaagtataagtatctcagagtaacttgatttggtgactatatcctggtt

SEQ ID NO: 64406 - DNA, 629 bp, Arabidopsis thaliana landsberg
  unsure (1)..(629): unsure at all n locations
aacaatactatagaagtctaacaaaaaaaagttcaatatccagtagttcaatatttctaaaaagaaaatttctacacaaagtttatggcaaaaacctaagttattatggagaaaaccaagttattgaaagttatagcgtactgtatgtacaatctttcatcgtgatttcatgtattatagataaaattattcattgtggatgtaatgcaaatagaaccatccgtaaatccatgtattacggaaaaattattcatcacaactcttatgtttgaaaatagttagattcggtcttagatcattattttaaaaatacaaataaacaaatacgatcgacaacaattgctcagcaaatttgacatactgataaagtcattgtttgacaaaacacatatgggccttaatatcaaaacacacggtccattataaaagtaaactgataagataaaacagttccctatgattcctcaataagcagctgctcagcacgttctcgtaattttcaacttcttgacaatttaatacatccattatccaaacaattagcaattaattacacttataaattaatttgtaaactaattaagactgacanacacggctctctcttcttcatcatcatcatcatcttc

SEQ ID NO: 64407 - DNA, 266 bp, Arabidopsis thaliana landsberg
gcgtctaatgtcaaaatgtatcattagcatagttaacaaactttaaaatatctaatatcaaatatacccggtcatagcccggattaccccctagtttctctaatattaattgcaacaaactttaacaatggtaatagtaatggatagctgattttatactatttactaatttagttcttatataagtatgattttcaaaggtaatctgttcacaaaaattcattgacaacgctgtttaagttataaacaaatttttaaaatttttt

SEQ ID NO: 64408 - DNA, 529 bp, Arabidopsis thaliana landsberg
aataacacagtgtctttgggttacaagttgaatatttacgcttttttttagcccccgattttatttcgaaaaagagggaacccctttcagaatggccataatcactggtattgtggggtgtatattgtttagtttcaatcgatcacccagtccggagatctggtataattttttccataaatagaataaaattcaactcaatgagaacgacaaacaacaggcgcagattcctccggagaaggaacgagcaccagcattccgatgaatatgtgaaccggaattatcctggagagtttgctcacaggtacagcgaaaaccctgaaggtgatcagtatataccaagaggctggcaggaagaacaatgggaagagcgggacgaatgggatgaatgggatgaaaatccaggtgaaagcatcaattacaatcgttattacgaacacccgcacggtggcgaatggatgcgtgacacacaaccggaaaacgcaaatgggtcctgtgagttcagggcgcgcaatacccgtttcaggaa

SEQ ID NO: 64409 - DNA, 216 bp, Arabidopsis thaliana landsberg
cccccgagacttgttgacttgggatgtggatctataccgttggatctcttgggacgtggaatatgtagcctcaaaatctgtcttgggttcaaaggaataggtgtatgtgtgcgaaaaattggcacaggcgcatatgcttcaattagtatggcgttattggggcgaattttaagccaacatcctaaccctggatttttattcttgcaccggagcgtg

SEQ ID NO: 64410 - DNA, 201 bp, Arabidopsis thaliana landsberg
tctcgtgtaaaacgtgcgtatcggaaattaaggaaggagaattgtcactcaatccttatcaaatattgaccaatacttaggcaagtaactcttcgttatcttttgaggcttaatgatatctctctaaagggtaatacctcgtctctttaaccaaatatctctcccattttaacatatatctgttttgcacatgaccataaa

SEQ ID NO: 64411 - DNA, 403 bp, Arabidopsis thaliana landsberg
  unsure (1)..(403): unsure at all n locations
aannnnnnnnnnnnnnnnnnnnnnnnnnnnnnnnaaaaatgtactataccataatcaatgtctttagaaccaacctgttacatcaaatatatgggatgtgtgtgatacaatctgtctattttacagatatatacaatcatgtacatcaaaattctttttttaaacaaaaaaatagattaaattcgcacacaatgaaatttcactcaaataggatactaagacgctgaactttatactgacaatctttaacaaaactcaatgtgagtccaaaacaataatcataacaaactaatccataagcataatgaaaacaaagtctatcgtcatttctgttcagatgacataaaggatcaatactatgttgtattttggatcgaaatattttttaattcactacttaaac

SEQ ID NO: 64412 - DNA, 1749 bp, Arabidopsis thaliana landsberg
attagatgatatcaatcatatttaaacggttctgtaactatattattggtccttcgtaaattaaaaagacataattttggctttagttaccaattaacagatctaaagattcttgaagacatgaaaagtgtcataaatttgggtgccgtcaaaaagatacggttgtctccacgttaggtacggtgtggtacttgaagcgacatcaccctcgtggttcaatgtgaactcaacacgtggcgagcttaccgatatcctgtacggtcctaagtttgtttacgtcaaactattatgtcattttctaataagtagagtattatattgtgtataatgaattgattcaaaaacagtttcattatatgctaagaacaaaatctaagatgcttggttttaaattgtttcgtgaatgaatatggtctaaataaagagaactaaatccaagttcacgattttgtgatttggaaaccatctactattagtgaattgtattaattgttgattgttttttcaaacggtttacatatggattatatttataaatatatatagtttcatacatgtatcttgtttctttagtaatagtatttgggaattgggattggtcttgtcacgttaataaaatttgtaacaagtttgtaaaattctcttaaattcacgcatttattattaccaggatccacgcattgagatctgagccgacagttgtattcacttatttgtatacttcaaaatactgatgaacgttaatgctcaatgaagggaataaaatcgatgagatccaagcttaatctagctattgattttatgattcttgttatgcggacacatatatcaaatatttttagttcattattttcgaaggattcttcaacctatttttaaaagtttgtttttcttctgataaagcctattattaaaaatttacacaatgatttctttctacgtcatcgattctaatgtataacatttaaaacgcgagtacaaataattgttgtacacttttctcagtgttacgcgtaccggcgtacgtaggcaactttaggttaaaccgtctatcattttatccatagtatatacgtatgtatctcattacatacgtatcatgtgtaaagttacgcgtatatgacctcatgttcaaacttacttttctaagttttcttcatcgtatcactttttcagtacatgctactaaaatatactactaggatacgcaaaggctttcatatggcttttaaagtactttaagaagcttttaacaattaagaacataatggtttgattaattatgtcaattttttttccttgagatctatcaatattttgacctatctccgtgaccgtttgatcacttttaggtaattgattaacaaataataacttaacatcgtagtctatatatacatgttaagttgttacttgttaccacaaaaaagaaaagaaaatgcgttgttaattaggaatatcttgttaccaccggtgtaaccaatgcagtcgtgttttgattaatatcgatatattagcaatattcgattgaagtttgtgtttaatattaaatactaaacgacgtacgaaatatggttattttgactatacatgttgctgaataatggtgcattctgattataaggtgttgatatgtaagtttgttagagggacatatgaggagacaagtcgctatcgacctaattcttaagaaaaagagtgcatatgcatgtattatgttgtactcagtacctcttaatcattatttaa

SEQ ID NO: 64413 - DNA, 151 bp, Arabidopsis thaliana landsberg
tttttgtaaaaaaaagacagagtaaatcatggttgggtcccatttactaaaaatacagaaaaattgttgatacttatatttgaagccagaatggtcaaaatatttgtgtactttggcagaattgctaatttatttttaagactggcatgtg

SEQ ID NO: 64414 - DNA, 1792 bp, Arabidopsis thaliana landsberg
tctaacctttttctattcgagcatcttaatatcgtattattgaaacaagacattattccacataattacatccgcaaattattcactaaatttacataattacttcaagtaacaattttaccacattatttcaattagtacttaaccaccaatgcatatttgttccgaatttcttgatcgaaaaatatccaaattaacaagttaatgaagaaaaaaaacgaagaagatcaatggtcaatatttaatcggaagcatccacgtccacttcatcagattctatctctctctctctctaagattccttgctctcgcgcttttctctctctctctctctctctcgcgttcgttcttatccacgagctctgcaccgtcgcaatctccgtcttctccatttagatccaacacagagccttttctacatgaaattcggcaaagagtttcgtactcacctcgaagaaactttaccagagtggagagacaagttcctttgctataaacctttaaaaaagcttctcaaatattatccttattactccgccgattttggacccgccaattccgatcacaacgattcgcgtccagtatttgctgatactactaacatctcttccgccgcagacgacggcggtgtggttcccggcgtcaggccatcggaagatctccagggttcgtttgtgaggatacttaacgatgaacttgagaagtttaacgatttttacgttgataaggaagaagatttcgttatcagattacaggtttttgcttccgaatttattctagcttcaggattttaggtcaagttagaacttggttcatgtgattactgattcagaagctaaacaagtttctagaattgaatcattccataggttatcttcgattggatgattaatctcgaatcctagaacaaaattgctagtagttgaaaccggaggtagttctagtgatgatctctaatcaaattggatctagtttctctgtgcttcaagtgagtttgtctgtattgatgtaatgatacagtggtttatttgctctgtggtatatcacaatcgagatcacattgcttagatattagtatggtttatgagccttggtcatcttcttgctctgcttgtttatagacatatgaagctctaattgattagtgtgtgttcatcattttgcaaacaggagctcaaggaaagaatcgagcaagttaaagaaaagaatggggaatttgcatcagaaagtgagttcagcgaagaaatgatggatattcggagagaccttgttaccattcatggcgagatggtgctggtgaggggctacagctcccttaattttgcaggtaatcatatattttaactagaaaaccaatttttgtaacacattactactgtatgctaaaaacatcttccattctaggacttgtcaagattttgaagaattacgataaaagaacaggaggacttttacgtttgcctttcacacagcttgttctccatcaacccttctttactacagagccacttactaggttagtccgtgaatgtgaggccaatctttgagcttctttttccttcataagcggaagttgtagagtcttctagcgcagtgcgagcacactcaagctcacatcagcacaactccccatgaatctcagctgagacttcctcaactcttggcagtgaaaatcttgatatatataaaagtacactcactgtaatgagagctataagagggtttcaaaaggctagctcgacgtacaaccctgtatgattctcatctcttttttcagaacgaggatgatgag

SEQ ID NO: 64415 - DNA, 125 bp, Arabidopsis thaliana landsberg
ctgctgaggtctattctgagccttatagagttaccctgctattgtggtacgaagctctggatagcgacgataacagcctctgactagggtggacaacccgtcgcataggcatgcacacggaatga

SEQ ID NO: 64416 - DNA, 604 bp, Arabidopsis thaliana landsberg
ttaagtgaggtcgacaagatgattcgtctaaccgcctaagtcacaacttttttcaacccctatattcttgtcttaacaataacacctttaattttctttaaccgaatctagctacctatatgtcgtaaattgtttcctttatgttttggtttttgccaatatgtattgaaacgtcaaaactgtgtatcccttacgtaaatatacggaagaactttttttaactaaaactttttttcctaaaagattaagttaatacttttggaaaggagagaccatgtaatccgctacgtaaatatctttaacaataaccatccgaaaggtaataaagttgggaaaaaatgttaacatcatgttgttaagaaagaagaagtacatgagaagaatattggggacatggattggtgaacaagaaattagtaattatgtttggtggaattagttagtgtcttcttctttggtatctttaacctctctatgtgctaaatctctgataatgacaatctcatgtttagaaattagccgtacctttttgtatatagccaagtgacattgaccccgcatttacaattatgttcatagtcaaccacatgctttacttgactag

SEQ ID NO: 64417 - DNA, 617 bp, Arabidopsis thaliana landsberg
  unsure (1)..(617): unsure at all n locations
cgaataatttatgtcaccgtgttattctcgtcgattcctcgaaactgtgtcaacagtgacaaatattattttattaaaataaataaaaagaggataaaacccaaccgctctgagcgatatttcaaagtcttcgcacgaatgcaaacatttctctttctttcaattccactgcaatggcgaaaacagagaagagagtccgagaaggactcggatcttcttcgtatttcctcggctgtttcggattctcccggaaaatatactccgacaagccgatggttacgaagggagacggtggtgagaagaagaagatgaagaagaagcgaatccctcggtggtttttgtgttccaagttccgcctgaagaacagcgagatcaaaccgtcgccgatcgaggaaacagagaaacctacttcgagagtagaagatgaaactgatgataagcagaaacccctctccgtgatacgtcgtataactgatcgtaaaaatattccggttgatgataaagccatgaatcangaaacaaaagaggtatcttaatttcgaaaaagttgtgacttttcacttttctgtccgattggcaaaaaaaaaaaaaaaaaaagaaaaacattttcagacaat

SEQ ID NO: 64418 - DNA, 587 bp, Arabidopsis thaliana landsberg
cggtattccgctggtcggggcagagcgtctcccagccggtcaggcagtaacggcaggtgccgcacgcatagtcaagccacggcacggcgacgcgggtcccggccatcggggcggtgactcccgcgccggtggcggtgacgatgcccacgccctcgtgaccgggcacgaacggcaccgttggcctgaccggccagtcgccgcccgcggcgtggatgtcggtgtggcacaggccggaagcttccatccggaccagtacctggccaggaccgggaacgggcaccggccggtcttcgatgatgagcggctggccgaaaccctggacgactgctgctcgcatgatgatctcctcacacttcacgcggtgtactgtcatcactcaggctccgctcgcgcgtccgtgcgacggcaggtgcgaagggcacccggccggatgtcttaggtcccgcggcggactgtcggcgcgggggccgaaccgttatcctggccctgcggtgtcgccagggaggagctgccggtggagcaagacgctggcacccacccggagctattgccgcaattgcagctcgatgagctgctattggaactgc

SEQ ID NO: 64419 - DNA, 587 bp, Arabidopsis thaliana landsberg
agacaccctatgcgcgaaataccgacaatatgctggatgccgtaggcgtgcaccattattcagtgatcagctggaataaaaaaggttccgccaccgctttcaatgaagaggaatattacactaccatgcagcgcgcattggaaatggaagaactggtaagcaggcattctgctgttatggataaatacgatcctcagaaacgcgtagccatcgcagtagatgaatggggcggatggtatgatgtggagccgggcaccaacggcgcattcctgtaccagcagaataccatgcgcgatgcgatgatcgcaggcgttacactgaatatcttcaacaaccattgcgaccgtgtgcgtatggccaacctggcgcagatcgtaaatgtattgcaggccgtagtgctcaccaatgaagaaaagatcgtgctcacacctacttaccatgtaatggaaatgtacaatgtgcaccaggatgccaccatgctgcctgtaagcgtaaccagcgccgattacaaaatgggaaaggaaaaactgaaagctgtttctgtatcccgcttccgcgacaagaacgggctcacgcatatttcactg

SEQ ID NO: 64420 - DNA, 458 bp, Arabidopsis thaliana landsberg
cgttggaagaaaccgatgcccacagatgggtaattgaggagatggtggacagtgcgggcggtgttccagatcctactgacgaagaaggggctgaactatacctcagagaggcgcctgacaatgcagacgctgcaggtatgctttaaactagcgtatatgatgccgaccgtgagctgaagacgggtattgactacaaagggaccgggcagagtcctgaaatgcccttactttccatgggcggggtagaagagcggatcatctttgtcaataacctcgccggaactgaatgtaatctgcaatctctagacactacagaccacaaagaggagaacacacatactggccgacccgagtatgagactcctgtgctgatggtgaggctgggtctgtgcacatgcactataccgacatacatatatgtagagactaaccatccgtttcctgaggagatcacaaag

SEQ ID NO: 64421 - DNA, 439 bp, Arabidopsis thaliana landsberg
catatgagagcatcttatacactcaggtgatcacaaacattcatgcaggcccctgatatataccactgaaaatgagctccataggctaacttacccttgttcaccatctacctctcctacctaattaccaactatctaattataccttcaaagccacgcaccccatagtctgaggagcccgtgtactgcaccatgctgaatggcgagtcctatccacaaccatgtgagcactcagctggtgaccttgaatccacaatctatcacgaaaaccaaagggctctgttgtccacccccatacatacatctcctggatcggcctgtgcatcgcccctgcttgagccctggggatcaagctaaccatgagcacgaccatgtatataactccagacaaaatcctgattctcgcgacacatgacagatggatgtgggatagggtttt

SEQ ID NO: 64422 - DNA, 611 bp, Arabidopsis thaliana landsberg
  unsure (1)..(611): unsure at all n locations
actaagctatcactgtcttttctctttctacctgttttgttgtataagttttcacttttctacactgggtgtgagagagaagtaatgtgatcttttagaactatctctaccaactattgaatgagacgttttcaaataaactatacttgcctttagttatgaagattattatagaatcaattttttttttaatatcatatgtgtaacatacacagtactgatcgacctaggcctagatagaaaaagaaatggagccctaataaggtagtgtactaattatctcataaaagataattcgataagtaacacaagaattcatgtaaactcgttttaaacatcttagcaattaagaaacattgttgaaagttaaccactttacacattcatcccatgcgtttcttctcccgcgttgatgttactcgaagtctaaataacactacacttggattaaactaaacaatccccgtactttntttaatcgaacgtacgttgatcgtcaaatagcaatataatatccgatggtcgtgctatttattagattcgtttggtgaaattgatacgcatgttctttttgaacctttaacanaacaatgttngacgaaaaaaaaaaa

SEQ ID NO: 64423 - DNA, 403 bp, Arabidopsis thaliana landsberg
gattccggattcgaggagaagatgtatgtgctctccactctcatcctggttcattccggtgtagtctacaggagaactttgagaatccacgggggcaaggtacagcttcgtatacaacgaatggattgaatatgcgtcgatctgcgatgactaattctcttgtgagaattggtggtgttgaaggtgaatgggtgcgaagagctttgactactttgattagaccatcttcacatcaactaaagagaagatctgcttatgagcctcgtcgaagtagactcgcatctatgtggaaagcagaagatctttgaatctctcttcagggttgttcttgtttatgatatactcagatctgccatgaacgagttgaatcaaggagcagaatcggagctgagtcataccggac

SEQ ID NO: 64424 - DNA, 1157 bp, Arabidopsis thaliana landsberg
tatgaaaaacaaaatagtagtcagtgaacataaaaaaaattatcgaaaattttacgatgagtaaagatcctctctttatttctcaagtaaagcaataatcagaaaaagctaaattgagttatcaaaagcagtttatctaacaaatgttaattaactttttctggtttaatattattgttcactaaccatgcataatcgtataacaacaaaaataatctcattggtaccattacatcaaataataaatagcgggaagataaacatagaaaaagtgataaaacaatctgcttcaagaaaaagataccccagtggacgactagggtcaatgaaaatgaaaacagagacaaatggcaattcgtaattattcacatttatttcagggtactttcgtaaatccccaacctgaccgtttctcgaatctgattacgtggcagtcatcacaaatgcccacaaaagcacttcgctgaaactcaatctcagtcgttagatcagaatccaattcttttcaatacggcaagttgagatccccaaacccatcatgtgtaaccatggttaagtcaattaacccaacacatagaaatctcctaaaatcaccaaaaaggtcacgaactttctcgttaattacataaaatgccattcttcgctttagctataaattcgtcttctgagactcgctaggtttgccgaaccaatcaccctaaggggacacttaaagagagaaacaaatccttcttctaaaatattcttcaatcttcttctcgaagcttctccaaaaatggcgattacttcttctagaaccgccagatcaaacggatctgcttcgctccgatccaaatcaccgtccggtcgattctgtggcgtttactcaaaccgtgtgccgtcatcatctccgtcgtcgtcaggtttcgcttcttccacaagctcaagtttctcgtcaccgtcgacagcgtttttcagcagccacaatcagaacaaccaccaccaacacagatctgcttctccgacgcgtgtgaatctattcacatcagcaccgatgacgcaatcgtttcgttactcaatcgataacagatctatatcaccgaatcgatctatcgctgtttcctccaacaaacctagcaatcatcacaagattccggattcgaggagaagatgtatgt

SEQ ID NO: 64425 - DNA, 1955 bp, Arabidopsis thaliana landsberg
gcaagacctttcatcatatctggtaatgccaaaaactcgtctctgccaatctttgggtatgtcaaatcatgggaaagtctcttttacatcagaccatctgcttcataagcttcctgatatgtggtctccacaaatgggctttgccatcccagcggataccaacttaactaccattggccattactaaagatccagtgaccatcaaggttttggaacttgaggtatcaccatgtacttgtcaacttgtttgtccacaaagtcacgaatctgcatatatattaatcaaatgcagggacaatcaatcagaaactgttctaaaatagataacaaatatatagtgatatttactatgagaacctgtgaccaagattatctaaattgacatttttgtcgacaccagagagagggataaactagaaacttaggagacaataactgtggcaaaagaaaactctgaaacttttgaagctatttacaaaccttatttttccgctttgagtcgaggaactgtgtaacagccatagctttctccacatctgaaaaatgatgcataacctgataaatgcccaagagtttcagaagactcattttcttaattcaagttgaaacaagaaacgcaatatagtagtgtagaaaaccacaaagtcacaaacctttgttgctggcttcttcataattgacttgtatacatctctatcaattttctttgctctatacggggccataagcaacgatgcaacaaaatctacaactccctgtttcaaacgatctgcactccggatatgatttttatgtggctctttattcactgtaacctgtgacacggaacattcattcgctcgttggtcatgcttccaactaggagggccagtcgaacaagcaatcgaatcttcttcatcctttatatgcaaagtacgattgaaaaattcaggatcagcagcagcagcttgagattgccatctatctatagcctgagaatccttgaaaccatcgctactaccaccagtatcaacccatgccccagttaagaaactggtatccgcagccacactttctccagaacattctctgaacttcgaatgagatacaagctcattcgaatggctagcctgtgaatagttatcaactggaatccttgcactgtcaaggtcaaggcacgaggcaggaaaatcataccagtccctaactttgcagttcctcgagtcaatctctgacatacaatcttgtcttcatgagacatttccaggaaactttttcctgaaatcagattcgtccatctttgcatactgctctcgcctgccaaacttatgaaatgaggggatcttaggaagctgcaatgaagtattatgataggcctcagaaaatgcctgcaagacagaaacatataatttattcgttaacaaacagataaataaagagttaacggcctcagagaaaacaaaaacattcagtaagcatccataaatgcctttcactaatttagagattaaaaaaaacttgcctttgcagctgcttctgctgctgcacgagccgcctcagcttcagcaaacacagccttctcttcctctgacataggtagctggttgtcctcaaactcttcatctgttttcacatcgttgccattgctcagctttcccttactgtctgtgtccggactattcagttttcttcttattctagaggtgtttgtagtaattcgcttgactcaacgatttctttccactattagctttttctttccggtatagatccagccacacattaacaagctgacttgcaatggcacgaatatcacggctcgtgtgtgcacaaactttttctttcacagtcttcccaatacctgcatcagccagtggaaagtcaccaacttagagaaaaatcaaacagggctgaaaccccataacagatagcacatgatggcgagtcttacgacagaaactgatgcgtgcgatata

SEQ ID NO: 64426 - DNA, 2342 bp, Arabidopsis thaliana landsberg
tcctccgggagaggtaaaatcatctttcatgtagtcatcaaataaagtttgctcctctatggaaagtatagagatatataaattgatatgaaacaatttaccattggatgctgcagcgggaaaatgcagttgatcaattcagagcgggagaaaaatgggttttgatagccactgatgtgattgccagaggtatggatttcaaaggcatcaactgcgtgataaactatgatttcccggattcagcttctgcatacatccacaggattggtacgcatattattattactagagcctctgtatctaaatcttatattctctgttctatgagagtcatttttgatgatgagttgatgtatttggcctcttttaatacatttcaggacggtctgggagagcgggaaggagcggagaagcgataactttctacacggaacaagatgtgcctttcctaaggaacatagccaacacaatgatgtcatcaggctgtgaggttccatcgtggatcatgtctttgaagaagaagaaatggaggaagcataggccgagacgtgattctatatctactaaaccaaaagccgataaaaacgatacagatgagtaacctcaaattttgtcttttatatttcttgttgttgttacattgatgaattagtcttggtcttttggatccaaaacactttacactgtggctagaatcgggaatctagtagaatcgaacttagttgtcacttggatcgtactacgaaatacatatgtaactcaaacctagttactattcgattgtgagacttccggtttttcatgtcggattcaatgatttcttaagatgcattataccataagttttggtttggtataactttaagagcgatgtatattatttgggttgggtttaatcaaaccggttttctccgaattggataatacttaagttcttgcttagctggggcatcactccaaataattattggaattaaagagtaataaatatcaatgatcttctttgttaaaataaacgaatcatgacaaccaaatattagctcaaagttaagaaggaaagagaaaaaacaaaacaattgattacatatttttctaattttacaaaatttgggacaataaaatctatcaaacaatcttaatatcatttgttcataagaaacaaaaaaaattagattggaccgacggagagagagaatgatccaaaactctgactaacaaaacacaagacgtgtgcattatgtatatgtcttttctagataatcaattccattttgaggttattaactaatatacaaaacaatacttatgatttacatctcatataaataaataagtttatgcacatattaagatttctaagaaattatatattgaagcataccacaacgaccacatgtattatggtacattaaaaaaaaacaatcatggtgtagatacacgattttcatgattaaaaaaccaaaaaaattgaatctattattgagtgaactcgtacgttccacttccaattgtttaagttcacaaaaaaaatcaagattgacctagtttacaaaatcttagggttatattttcagcatttcaataatgattaaatcatggtaatgagtaattaagcatcattaagagatttaaaaccaattaatctcattagctgcggaagctgttagttaagagcaaaaaaaaagcgccaagctgttaaaggaggaaatcaaagtagggcccacaaaaaaagcagcccaattagtgggctcacacacacacagagacagagacaaatactctctctgctccaaattcctctctctctctctctctctgagttcttctcaagtcaggaaagatcaaaacttcgacccattcaaattctcatttccaaggaagtctcacattggcattaaaaggaacttaaaaggcgtgtttttgatggtttaaagttcagtttcgagcttctcttcttcaagatctgcttttacaggttcgattcctcttctatctcccgtttccaggctaaagaaggttcctttctattcaattcaactgttttgacttttgggtttgatcaaagaatttagctattatatttgtgacatcagagaatctgttgcaatccgtgattttggaaattttttatcatctgaaccaacatttttcatctgagtaggaggatcaaacatagaacggcgacgagatggttaaaaaagcgaaatggctgaaaaacgttaaaaaggcttttagcccagattcaaaggtaccagctttgccttttgttctaatcactatattgatgtgaaattcatgtcttgttggtgcttatcaaagcctatatttggtggcttttctta

SEQ ID NO: 64427 - DNA, 1804 bp, Arabidopsis thaliana landsberg
  unsure (1)..(1804): unsure at all n locations
catggatatgtaagagagtctagtttacaatagatggcaaagtacacagagcatatacaacaacttaaactattgttaatctaccttcatcattttgtcaatggaagtgaaaaaaacaatcccaatctagagaaactaacaaagccatatgattcttttactgatttatttacaacgggagagttgtgataccagttatgcatttggtctaaagctgagatctgaatatctgtgttaacttattgctaccattatttgaaggcttctctttactacctattgtactctcttgtgtttctacagtttgtaatcatttggctttcattattattattataagcttttaagtctatggctttctccttaattttctgatggctatcctatgatattccatcaggcctgcctgatctannnnnnnnnnnnnnnnnnnnacaattctctgatgttcaatcattaattgcttttaaaatgcgttttctaatctgaagattctctctctctctctctttctctatctgtagttttcaagagaaaatttgattagcccagttttacctcaagtcaaaatcgaagacactgatgatgttacagaggagatggtggaaaccacgttaaagaggggtctagatttctattcaactatacaggcacacgacgggcactggccaggtgattatggtggtcctatgtttcttctcccaggactggtcagttcatatgtttcgtgcctaagctttcttttgcaaattttacggaaaacttgacaaaaactacttttgattacagataattacactctccataactggagcactgaatacagtattgtcggaacaacataaacaagaaatgcgccgttatctctataatcaccaggcaagaaatttctcgtatctttactataattctgtttccttgcaatgctgtacttggattttccatcgcaaaatagatgtttacacatctttctgtttcaaagattttcgtcttctactttctaattgttaaactaatttgcactattggtggcatgtggtttcagaatgaggacggaggttggggtttacatattgagggccctagcaccatgtttgggtctgtgttgaactatgttactctaaggttgcttggagaaggacctaacgatggagatggagatatggagaaaggacgagactggatactaaatcatggtggtgctaccaatattacatcttgggggaaaatgtggctatcggtactaaagttttgacctctatctgtcctttaaagttatcgtatgaaaatttctgttacttgactcatctttttgcttggatctgctaatactgtaaataaaggtacttggagcttttgaatggtccggaaataacccactgccacctgagatatggcttctcccatatttcctgccaatacatccaggtaaaatgacaatctcatgtgttcttgactttctcaacttatatactgtttaagtttattcttttccctgtctccaattgttgatctgactaaactattcattcaaatgaagtgcctcgtattatcaattcttggttcagccgctatttataaagaatggaaaaaccagagtgctgtaaccatgcccgtatctgttttgtctcctttatgcttccttaggttcaactatttatttgggatttaattatagttatattggtaatgcgctccataagcagtacattatttcagactttatgatatggaacaccctcgatcatggacaactcaagtgaagtaaatcttgaatttttttgtaaatctgcttggaatcgag

SEQ ID NO: 64428 - DNA, 1309 bp, Arabidopsis thaliana landsberg
ggcagcaatgtttgctaggaagccaggaatagtatccttaaggctgtatctttggctccaatatttagctgtagagtcctgactgaggctctcctgtacaaaaaaaaattgacattgttagatcaagcaattaacaatagtgcagacgagctgagcaatcgaagtacctttttgagagacctgttctcggcaatgaaaaattccccatacggatcatcaatgatcccttcatagacccaccttaattaaacactatttaaagttagttgacacatcaaagaataataatataagcgatctagcaaatagggtaaccatgtacagatctgccaaaccaaaagataacaaacatgttcgctaatcactccatccaaacaaaggaaaaacatagtcacaggttggacttagatttatctgagcattccaagcaataacaaaagggaaagggcagagattgtagcacaatgtttttttgatgggagtctagttacgagcaagaaagaaagaggcatggtaatcaacctttccaatatgcttaggtatgcgttgcttgcacactccgtcattttctctaacaatgacctcactgaattatcaccagccatcgctttagcctaggcatgatagtcttcaagattaggacatttaataaaaaagctaattctagtaccaaaaaaatccaaaaacttttaatgaccaaagcaggaatctacctgactttgcaagagattaagaacaccagaacccacaaactgcttcgttgaagcctgctgaattactgcagccaatgcgcgcatggatcccatcatgggctgagagatacgaaaaacaatcgatcagcataatgtttacgtaacttgtagcttggattatttgaagaaagacagacctgacagtaaaaccataatccttggatagaaagtcttccaagtcgaaattgatgttccaattgtgccaccatggcttgataatcctggtaaaagagaggatggttaatactagtgtaacaatagcaaagaatgttgtcaaattacctcaaagctaacataaaatgatatcctcagtccaaaaaatgcatgacatgtgttagacacgaaactcaagatgtgaaatggaaagaaaagaatcagactatcagtttattcaatgcggcaatagtaagagagggattagagagacagtaagaacttggaacaaagaagacagtaagagctatatgtgtcatcttagatattcatacatatgcatatacacacactcagaaatgtgattaaaaaacaccaattcagtggacaagaaagaaacccaa

SEQ ID NO: 64429 - DNA, 719 bp, Arabidopsis thaliana landsberg
tccaaaatgtctgacgagtattcattgttacaacattaacttcttctagacccatcattaattgtttgcatattatattcttggccaccacaaaacatctactaatcatcatgacgttaaacgcataaatccgactttgtgctcgtaaaggtaagatttgtattgcttcgtttggagattttaacttggagtcttggagagatcaacaaactaaaaagaaaaaatatgaatattgttacattttttatttttctatttggtaatttctccgaaattgacaatgacagatccaccaaataaaaaccgaatattacctgtcagttcctttctcacttctccaaaatattttactggttattgtagttattagttaagcttggtttttgaacttgaaagtaattggtcttaattttaactcgtctcttgtccctttattttaatatcgttgcaactgataactacagctacgggatggttcataaaccgtcgttagtagccaaccaatccccagaagcttattaattccaaattatatctagatccaattaataatactgaaactcattaacaaaccatactttcaaagatcggcatatcggatttcttcgtttatgttgatcttacatcttcattcggattgataatctcaaccaattaattattttacgtacatatatattcatttatttatataaattaaaaatatttccaaactactt

SEQ ID NO: 64430 - DNA, 613 bp, Arabidopsis thaliana landsberg
gctggaacggatgtggtggtctgtttctatccatttcaactttctcaacaacaacaacagtccttcaaattatggtaactgacaagacctgtaacaagaatctgacatactgaactataaagaatcactgctaaaactttaaagatgccaaattgcttcagagattgtaggctacaaatttcccctcccaaatatttaagctgcaaaaaaaaacaattgggagaaataattaagttttggcagaagttgaatcctacagaaactatcaattaaacacagactactcatcaaagttcttcccatttgcaattgtagatgaataatccgaccagaaaactccaaaaacatgctttttgttccaaaaatggaaactttctctacaacaaccttaaatcaattaatccaaaaacctcaatagaagtaatttaagaaaaacaaaaccttcgctcgatttgaaagatttcaccataccaaatcgctaaaattagcttcagacaccaaaaaaataaagaatcagaaaatggcaaagaatccaaaactgatagaacaataccacaaagaaaaaatgtagagcttgacaggtggaatagattcaagaaagattgtgagagct

SEQ ID NO: 64431 - DNA, 294 bp, Arabidopsis thaliana landsberg
  unsure (1)..(294): unsure at all n locations
ggaaaagacaaacggccccacgacccaaactcacctcaaagggagaaaagaccacaaagcagggacaaaaaacaacgcggccgcaacacaccaccgcaaaaacaggggggcgcaaaggaccacccaccacancgaccagaaacaaggccgcaagcccggagacggaaacaaaacccacganggagcgccgaacancgagaaccaaggccgcagcaggaacaacaacagaggcaaccgccacggggggagagacagccaggagacgggggagcccgaacaggcaaagccgggggg

SEQ ID NO: 64432 - DNA, 624 bp, Arabidopsis thaliana landsberg
  unsure (1)..(624): unsure at all n locations
tgtctcccaacttttagttctaagagtttcactatttccctttttgaaaatcaaaatagggtaagggggtttagaatgtgtgaagactattataatttcctaaacactcaactgattaaaattgtgagtcatctttacctagagctcaaatatacatttttcattaaacaaactttgtatttcatttggtggaattcattttatgattttgacggattgttttggttgtagaacaatttaaattttctttttagtttcctatataattctgcgaaaatacatatagggggatcttagtaggggaatgggaccatataaaaaaggaaataatagtaatgtaaaacagaaatccgagtcagaaaaataatagtggagggtacaatgtagctgttgatgaatgccacgtatccacatctcatgaaagtgctcaacgaatcctctttaatttagcctgtgggatccattggccacattgtcgatctcgactnttttggtgttttggttgtatttttaaagtacatagttgttctttgggaccactctttattgcacctaccctcatatcgcttatatctctcttatatcgtttatgcagattttaaaactttattgattctacaaaac

SEQ ID NO: 64433 - DNA, 543 bp, Arabidopsis thaliana landsberg
tccttgcatcgaggggatgtgacttggcctacgccttcgatcttgcgtcagcgaccgccggctgcgcggcaggggcgcgatcaggggcgtgtcgaccgggaagggaccgagttttgcggccccgcccggcgatccgatcggcgcatcctggccgggcagcagatcggtgaagaagcggacgttctcctcctgatagggagcgaacgccgtgggcaggtcatcctcgtaatagatggcttccaccgggcacaccggctcgcacgcaccgcagtccacacactcgtccgggtggatgtagagcatccgctcgccctcgtagatgcagtcgacggggcactcctcaacgcaggcgcggtccttgatgtccacgcacggctgtccgatcacgtatgccatgacagccatttacacgacttcattcgtataaactagagaggcagctgcaaccacagtggcgacggagccggcgacgaaccttccgtgagatcgccatgatccatcggcggcgcccctggcgcgctgggcccgggtggcagctttccg

SEQ ID NO: 64434 - DNA, 353 bp, Arabidopsis thaliana landsberg
  unsure (1)..(353): unsure at all n locations
agccccagaccacgagaaacacgaaaccacgaaacccccaagcacccgggaaagagagaaagagggggagaagacggccccaagaaaacaaggncnacagangaaanaacaaacgccgacccagaaaccaaaagnaaagacaacagacaaaaccccccngggannaaggagagcggccnncaaagaaagaaacgnacagcacagaaaaggggaagaagaagaaacacgcgcggaaccagaagaaggcacgaaagcaagaaccacaagcaaaaccacaaccccaanaggaancaaaagcagcacaaaaggaggaggaggcaacggaggaagaaccaacggccagaccaagagag

SEQ ID NO: 64435 - DNA, 337 bp, Arabidopsis thaliana landsberg
aaaaaaaacaggaacaaaaaacctggaagaagagaacaaaaaaacacaggctaagtgcgacaaggttgataggcgtgataaagaagaaaacgtaggagaagggcataaagagaaaaatgaaccggaggactcacaaaaagaacagacaacaaggacctaaagaaaaataaagaaactgggcaaaactgacacaaagccagaagcaatactatggaaaaaagcatagaaaaagtaaacaactaagaaagctatcggacagaagaaagcaaggaaagaccgaaagagagcacaaacgaacaaggaaaaacaaatagaaaacaaagctcaaacggtaacc

SEQ ID NO: 64436 - DNA, 559 bp, Arabidopsis thaliana landsberg
ggccatgtctgtatgtctgttggataaaaaaaaaccagaaaaagggtcatgagacacaacttccatctcgattcgaacctctaatgcctgaatacaaccacacacacaaattcaaatgtgttggacacacggaagcatatacgcaacgtatatttaatacattgatgtattattctttgttttattatctacattgtaatagttttatattttaatttagttattaggtttttttttgttccattattttcttattattagttgttatactgtgccaatttcaacctaacagagggaggtgtactggtgccaattagcttgtgcacaaggaaatggactgctgaaccatatatagctggagtctggagaggtgagctggctatctcagaatgcctgttggagcgaggaggcttcattccagaaattttacatatttgtttgagtgttagatacagaataaattattaatatgcataatggattatctaatttattggttagatattttctgctttatattaaattgtagaataagctaattaaaggggagcgccaactt

SEQ ID NO: 64437 - DNA, 488 bp, Arabidopsis thaliana landsberg
tagtctgagcaagcaagctaacataagtactcggatgtactaaagcgtcatggacgattatgtgggaaataacctgaaaatcataggattaaggggaaaggtgcttaacagcacactaagtgccttacaggctatgatcaataattgagaaataggacctaaggatactgtagagtcaatagtaggccgaggagactggcgatcggacaacatgacaacctacatagtggggaaggatcttcattaccgctatatgtgacagagggctaatctccaaaagatacaaagaacccaagaagataaagaccaacaattccatccccgcagaaaaaaaaatcataaacactttaaaatggggcatagtgctaaagagaggaattttgaatgggtgataagtattggaagaattgaccaaagttctaggtcatctaggaaatgcaaatcaaaacaactttgagattctgtcgaacatcatgtagttttacacg

SEQ ID NO: 64438 - DNA, 1928 bp, Arabidopsis thaliana landsberg
ttgttggtgccaggtttaggaaattgtaatttaatgggtgtttgaataatttgttcttcccctttgcaaaatttgtaaatttttgtggtttgggtgtttgcaatgcacataacaggctacctgattctctcctattttctcaaatggaagattgcatctataattgctgaggggagtgagttggccgaaccagcaccggttttgtatatctctggtgaagaggttagtactagtcatgtctatttttctcaaagtttctgctccttacttgtcttcctcacaccgggtttctgatcaaactcgtggattgtgtaattgctccgtggctgtttctttttcaaactatgctgcttaagatggtctgaatgagcttacttgcacatgtttaagacgcaacatagtaatcatagcttgagttttagttaggagctttattttgtgcatctgcacttcatctgaaaaattgttggctgttttcttctcgcgttttctatttaatggcagagatatcgtgttttagtctgttcttaaggatctcatcccacgcattctgttgacttgattacacattcttcataaattcttctgttttttgcccactgcagagtgtcgagcaaataggaagtcgtgctgacaggatgagaattcaaactgaagagctctacctgttttcgagctcggatcttcaggtataccttatttatgtgaattaatattcttattatcttaaacaaacggaagtcatagtttggaacttctttaaacacctaagcaatgagctctatattcctattttgtgcatactgttaatctccaagttaattttcttcatgtttacgtgtcagacaccaactctactgtgtgaaattccaagcctttgcgtatcataactttaaatttacctgaagcaaatcgttctgttatgatttatttcaggacattctaaacaaagctcatcgactatctcctcgagctctcataattgactcaattcaaaccgtttacctaaaagatgtgactggaagtgctggtggtctcacacaggtttaaaagtttttactctctaagtgttagatgaagaccaggctccagcattctcttttttattcgcatatgcttttctcgtaactttttttttgtctgctgaaacggctattttcttggaaatctctgatggtggcaggttaaagaatgcacatcaaccctgttgcgatttgctaagaaatctaatatccctgttttcttggtgagtaagcaccatccttttccttccatatctggatctggtgtttgatctggatcagatcttttatgcacgtcactttctgttttaggttggacatgttacgaaagcgggtgatattgcaggacctcgtgttttggagcacatagtagatgttgtcttgtacttggaggtgctttttactttctgttgtctttagatatgcaatcatgatataaggtgcttggcagttttaactaaatacttcgggttttttttttattaactttataacctcttttctagacgataacaagtatatgagcttaatttgttaggaagattaaacagaagatgattagttgacatgtactttccatcaaatttcagggtgaagagtcatcatcgtaccgcttgcttcgatctgtgaagaatcggtttggctcgactgatgaagtatgtatacaaatccttgatagtatgcctttgcagattagtaatttcccttactggctcctttcagttttatcgagaacttgctagttcaagcatcttatatctgtggattgtgttccctttattctttacgtggttcgagtttgcgtgttatctgtacacttatttttagttcgagttgaaaattatcgaataaatcgtggctatctcctttgtcagcttggagtttttgaaatggctaactcaggac

SEQ ID NO: 64439 - DNA, 547 bp, Arabidopsis thaliana landsberg
tgttataatctacaagcatttgctaagtataattttttgtctacttattatcttatctgtctgtaatctcagataccaagaaattaaatctttttttttggtatctgagtgttactttttataaatgtattttgaaaagtattatttcaatttatagataaatataattatgactctcaagtggatttttttttcacggtcaattggagtttggctgtgaatcttgtgaataatatcaactaattaagagtcggccgatactccgtatctttgatcactttcacccatatcttgaaatttaccaaatgttttctttcattggggtttctatacctttttttttggttctttctgcaatttgggttttaaagaaaaaacctataattacaaaaaaggttaaaagttaaaactaagcacgttcaaatatgttctttcgagatcccaccttcctgtctatcttataagaagtcgaacacgtgtgctcgttgtgtgaatagagtggctatttcacatatatattaaactatgttgtatcataatacactga

SEQ ID NO: 64440 - DNA, 557 bp, Arabidopsis thaliana landsberg
  unsure (1)..(557): unsure at all n locations
ttatagtcagcaccaaagcgggatgagccatctcttctaaaatttacactggccaggtattttcctttgtaattataatttatcctgccgaaaagcgatagcattgtccattgcccttttcgtgaattaccgccgataattgttccggcattcaacgtttgcactatgtcgttagcgaacccgtttgctttnnnnnnnnnnnnnnnnnnnnnnnnnnnnnnnnnnnnnnnnnnnnnnaatacttccagatcatgcttatcattaaaggtattcttataagtcaacgtattttcgttagataaactgatatatctcgatgtggatgagctggcggtaggatcaaccggcggtttctccccattaagagcgactgttgaaggactaaaaacattacgcctgtaagaattgatctgagcattgaacgtagccttaaaacttatatggggtgtgatctctgcaatcgcgtaaatattccctaaaatgcccagctgttccagcttatttaccacccctgtagccacacccacggtgttgataaaatctttcacgttaacgct

SEQ ID NO: 64441 - DNA, 438 bp, Arabidopsis thaliana landsberg
agatgtgttaacgcaactgattcgatcagggggagcccgctatagacattatagtatgagttctgctgcttagccatgacataggggatcacaccaggcaactatctatgagacttcatggttcacctaaccggggcatttcggcaaattcacactctctcattctgctgaactctatcactagagcccttatgtcagtctagcctgcgatcgattaaattattcaccatagggacctgtaattggatcctacattaactaaaccagggttataagtgcgtcctaagaatgggtgtatcgacttaggagcacgagcgcacatcataagagtgcgtatttaagccaataatatcgacgcttatacggctattcctacctgcgatgtcgggagatactcggaacgccacccggtctttcatgattcgacattgagacaag

SEQ ID NO: 64442 - DNA, 453 bp, Arabidopsis thaliana landsberg
gctccgtccagattgatacagatagagcgaacgcagcatcgctcgctaaagcattatacacatcgattgggatcccgatggtgatctgttgcacaatctactcgttcctatattgcacatacccgagggaccgagacagagcaaaaatgcaagccttgatcgagtcagagatgcaactactcaatgaagaggaagatgagatcgaagtgaagtgttttggagctgaagaacacgatgaggcttatttgcttaagcagcatcagaatgagagttaagaacagagtcaaatgatgatgatttgggttgttattgacaatagggttccatacttcaattataggaagatggggtcatagttataatttttgtaaaagaaaaagactgaagtgaaatataccggtagataacatttacaagaacagaataaaagggaaaatactgatttttgttttt

SEQ ID NO: 64443 - DNA, 490 bp, Arabidopsis thaliana landsberg
cggccagccattatttcaatttctgttagttgataaacaattttttacattttattggttcaaagttcaaaccattgtttttacactttattccacacactatacacatgcaagagagatctaagggtcagttgtatgattggcggtgaagtcaggctcggtgggtttttgaggtagcaaaggaagagtgtagcgaggaggaaggttggagatattgtgcctcagattgtgaagcgcgtttgatgcgaaacgcgacgcgtaaagagcgcctccaaggctcaaggacgacgacacggttgcagcattgtgttctttatcttgactagcgagcgcttctcggagacgatcttcttcattgcgtagtgacttggctaacttcctccgacagtatcttcttcacgctgcttgtataaaagacacgctccatgttcttcattgcactgagttaaacctgtatatataatcaagatcccgttaagaagatccaaaa

SEQ ID NO: 64444 - DNA, 578 bp, Arabidopsis thaliana landsberg
taatattttgatgttctggattttgacgcttattaagaactcaattattgtttaatcattttaacattttttttagtgttataagacaataaaaataaagaaaaatgctagaaaaacaatttttatgaaacaaaaaacaaaagctagagcatcaaacttttaggaacatatggagtatttggtatcaaacgatttcgtctatacgatatggcaattttaagcgaattgaatatattctgtaaaataaaaagattgtataagtgcattgaaggctataattgttttatatttttttttggtgaatcaagcaattgaaagtaaccagataggaaactgctacgtctttttcaatcacatcgtcgaaagttgtacattttctacaacaacaagtaattcaaatcaaatcctaaatgcctactacgattgttaaactaaacaacaacaaagtaagtttaaattcaaacgttgataagaaactatctactttgttagttttggtgtaggaaaaagtaagtggtacaaatagacagtttgtttttgggttttaatgtttcgggtgttaccagttacgaatcatc

SEQ ID NO: 64445 - DNA, 568 bp, Arabidopsis thaliana landsberg
acatgtaattttgatcaacagattcctatgcttcttgttcaaagagaagctctcaatgatgctatcgtaggagagttaaacgtaatatcttttagcttatacataaccatttttgttatagtttctctcagaatacaataagagttaatcctagatatatctgtatgtttcacagggataccatcacatgcctgagacaagaggtttatgcttgtctgaagaacaaacagttacaagtgtatgtctcttcctggaaagttacttgaaattttgactctaaacagtaattttattttgctctgttttttattttttggttcttcacaggttcttagaagaccgagacttggtgctcaccgtcttgttggtatgagaactcagcctcaaaggcttacacgcaaatgtgaagtcacagcgattctagttctttacgggctcccgcggtactacactactcactcaattctcaaattcccttttcgacagtaaatgactactaacctaatcacttttgtggatgaagattactgaccggagcaattctcgcccatgagctcatgcatggatg

SEQ ID NO: 64446 - DNA, 1619 bp, Arabidopsis thaliana landsberg
tctcaactaaaaaggtttcctaccataatcatgtttatatcagagcctaaaggccaacttctgatgattgatggaaaaactgaagaagatgtttctagaagtttggagagggttttgcttacaatgcggattacagcttcagaacctaaggttcacctcagctaaattcttgaactgttatatccttggaacaatttcctctcacctgtatcaaagaataattttgtgggtcgtacaggacgtggcatttgttattgatggctgggctctagaaattgctctgaaacaccatcgcaaggattttgttgaattagctatactttctaggacagccatatgttgtcgcgtcacaccttcacaaaaagcccaggtaccccacccaacgttaggtgctataagtattcaattttcctagtaccaagtggccttccactggtcatcttattttctgttttcgttgaacttttggctcgactttacagttagttgaaatcttaaaatcctgcgattatcgaacccttgcaattggtgacggtgggaatgatgtaagaatgatacagcaagctgatattggggtcggcatcagcggaagagaagggctgcaggcagcaagagctgcagactatagcattggaagtaaggaatatatgtacataatatgtatcttcaagctaataccaaggaaacaatttctgattggttcttgctggactactctttgattgcaggattcaggtttctaaaaagactgattcttgttcatgggaggtattcatataaccggacagcatttttgtcccagtattccttctacaaatcggtgttgatatgcttcatccagattttgtaagtttattatctcagatatgttctcagtggatatcatccaagtcgttcatgaaatactgacaacagaatctatgtagcttctcttttatttcaggcgtttctggaaccagtctttttaattcagttaggccggatgggcttataacgttttctacaccagtgttcctgttcttgttagtgtaattgataaagatcttagtgaagcatcagtgatgcaacaccctcaaattttgttctactgccaagcgggaaggtatgcttgattaataatgtctaaatctggtttcactaaatctgaagtcaactgttcatacgtttatgcatatttgttaatttcatttttctcacgattcaggcttctgaatccaagcacatttgcggggtggtttggccgatcccttttccacgtgagtactgtcctctcaaatctactcaattgagtacattttcttcactacttcaaaagtcacaaaaaattactatgcaaactccacacacctagttagaatgcttgtagtaacttttttttcttctttcttcctttttgttcatattcccttgtaataaatctggattctggaatctatttgcaggccattgttgtatttgtaataaccatacacgcatatgcttacgagaaaagtgaaatggaggagcttggaatggtagctctttctggatgtatatggcttcaagcttttgttgtggctcaagaaaccaagtaacagctccttgtccttgtgacgacgctcatttagtctcatacataa

SEQ ID NO: 64447 - DNA, 482 bp, Arabidopsis thaliana landsberg
aagaaaaagataaaaaacaaaaggaaaagagggggggagacaaatgaaggaaaaacgcggaaaaaaaaaccctaaaagaaaaaaaaaagccacggggtaaaaaaagaaagaagagaggagacacccaaagaaaaaaaagagggggacaagaggaggcaaaaaaaaaaggggcaaacaaaaaaaaaaccgagtccggagaaagacaaataaagcccaagaaaaagcaaggctagacaaagcaaaaaccacaaaaaatccgctcgaagcacagaccaatcagcataaaagaacggagggccgagaaaggagccaaacgaaaaggaaaatccgaagggagtaaacaaaccgaaacaatgaaaaaaaaaagaacgagaacgcaatagcaaaaaaaaccaaaaaataagattaaaaaaaacaaaccaaacccgaaaaggaacgaggactgaatcggaaaaccaaacttaaaacgccgacgaagagag

SEQ ID NO: 64448 - DNA, 403 bp, Arabidopsis thaliana landsberg
ctttgaattcttcggctcgataatgattcttcataagcgtcaatttgtttgattttttgacgaatttgttgagatctgaaaattttgtgattcgtactactgtagctgcttctcgttcataaccttggttcgttgtgttatttgtagctctaagattcgttttgagcaatgtcttctgtttcaagccagccacagtttcgttacacgcaacctccttcaaaggttcttcatttgagaaacttgccatgggaatgcactgaagaggagttaattgaactcggaaagccttttggtactgttgttaatacaaaatgcaatgttggagctaatcgaaatcaagctttcattgagtttgtaagttccaagagattatgccaaagttacaattaagggttaccatggt

SEQ ID NO: 64449 - DNA, 145 bp, Arabidopsis thaliana landsberg
aaaaagaaatactaagaaaaccgaaactcataaaaagaagataatactcagaagaagagcccaactgacgcaaagcccaaaaaaaaaaaaaagtgaaataacgagaaaaaccactaccaaggagcaatgaattatcataacaaga

SEQ ID NO: 64450 - DNA, 213 bp, Arabidopsis thaliana landsberg
aaaggcacaactcttttggttgaagaccttgcttgactaatggaacaaaacccgttgttactgactttcatattttttttgttgcaactcattgcctaattgtgcatgatagattaatgtcatctaccatattaaaaaatatagacgtacagatctggcgtaataagatggttgatgatcaatctggtggagttcggttggatgagtacctgt

SEQ ID NO: 64451 - DNA, 590 bp, Arabidopsis thaliana landsberg
agaccgttgtgaaattgcgtttttttacagggttatatttatgctggaattttttctgtgaatttaaaggcggcatcttcgactaatcaagactatgatctcctccaggggagacagcttgaagaaagttctatggcttctgttgcagattttgaagagggagttgcttttatccttggtcaggtcaaagccgttgaatcaactagtgagggtaagaaatgtgctctccaaaacgatgaaagggacttggtaggatgtgcgacctcggaaatgttggaatctatcagcaaaaaatgcgaagcaagcattattgatgataacaaacgttctgtgaacatgaatgctttacaggatagtactccatctaatgttgaaaagcatcctgaaacattttcagtagcgaagcctgctttgtctagcacactctcctctgcacatagtaatcaaatgagaggaagggactgtgttccatgtgaggttatagatgagacgaaagttatagtaattggagctggtcctgctggattaacagcagcacgtcatttacagcgccagggtttttctgtataccgtcttgaggcaaggagtag

SEQ ID NO: 64452 - DNA, 486 bp, Arabidopsis thaliana landsberg
tgaccttgtgatgcacaccgtcaacttgttgaggatgctttgaacatagttctagaggtatgagcctgggccgatggtttcggttctgtagctaagcgaagattctctaaaacccgtccatgaatcacctgtgctggacatgacctagctggttgaggcagaccaacccgcaaaccagctggaggggtacatttgaagactgatcacacctctatctcagaaggctgcagggcttctcctactactgaaccctcttgctcatttccagagacgccctcgagagcacaatgtggtagtctctaccactgggcactgtcctataaccactctgtcgaggaaacaccagtccttcttttgtcgaccgcggttcgggtcctgcccttgtgccccctactggcttggactgtagagcagaaaggtatctgtttccaccctacggagaacttcacagctgagggttgtggatgaaaacagcgatgctcatac

SEQ ID NO: 64453 - DNA, 1570 bp, Arabidopsis thaliana landsberg
tgccagtttttatcaatatatatggtgagttggacttcaactggtgatgttgcatttgtgtgcaggagacgatgctcataagacgaatggttctgccaaacctggtgctggtggagacgatgcagaggtaagtataagagattcctttactcggggtaaatcaaattaaaataagccgattttgattcaagatttctttgcttatgttgcagtgatatgatatgtgtgcacctggacaatatgtttcaagaactgaatgtgcggtgaataatagtgaaaagtagagtttctctgttccctatatcatgattgtctatgttacttgtactctggtttagccctaaatgtctctctggtttgaatgtattgcatgcctgtctcaggacactcttatttgtaattcactactgtcgtcttactatctatccttatggatccaatcttgaaacttatattccttcatttctgaattgctgagatagaagctgattggattcggtactctctgattcatattctgtcactgattgaatcaacaacaccaaatacagtaaactctgttcagtttctttcactggtgtggtgaataatctagcatacacaagccaagcgtaaatagataatgaagcttgcatttcttgaatcattgcgaacatttacccatacgtaatatgccaaagcaagcagagccaaactccaaaaaataaataaagaagaattagaatcgaataagaagaaagaatgaatagtttgttgaatttgacagaagagctctttcccatctttcacatagaaatgctttctgagtcttttaaataggctattcggatcgaatcatagggaagcagagaatgatgatagggctttttcaatcataagaggaaatgctttatagagtcctctagaaactgatggctaggacaaaccatctccttcactttatctccattcttgtacatcttaaatgtcggaactttcctgatactctctgctttcgccaacgccatgctctcctccacatccacctaataacatttcattttctcagttaacacattgagaaacataggttatacatataagtttagaagaaaatgtgatataaaaagcatatttggaatgtgttcttgttcttaccataaagaaatgtactaatggataccgaagacataaagtgttgatgaatggagaaatttcttcgcattgtcggtttgatgatgatttgaaatgaaatacagagacacctgaagagaaatgtttccaacttgagcaagacacgcaaaatctcaaccttttgagacaaattgaagtttctcattagacttaccgggaagtgctacggatttcttgaacttatccaaagtcgaaaccgcttcaacttcattattgaaacctaggcttttagattcttggcttctgttcattagcactgttttcgctctctctagagactctgcaacttcactgtctcctggaagttctcttctcaagaactcataatctttaactgcatcctcccacctaccaagctatatatttcaacacacattgtcattcgaatacactgcaa

SEQ ID NO: 64454 - DNA, 2217 bp, Arabidopsis thaliana landsberg
tttaacagtgatatatacaaacaccaatcaatagatctggcaacctagcacgaaatatctattaaaaatgaatgaagatgaaacagagaagcaaaatcttacagtttctggtcatcgtcgatctcgagcttcttctggcatccagtagttggattcgcaacgttgaactgaaacgaagaaacatgaaaaaggttagcaaaggaaactcgaatacgagcaaatgtagagtctattcgatttcgccgtcacgcaccttcatcttcgacgtctagggtttctctgtaacgcaagacagcatatttataccaagagagaagattcgtttggtggatttatatgggccgttttctgcgattatgggcccgatggcccttttatcattttcttcttcctaaattcatgaaataataatttcaaacagaaaaaacatagcattagtttattttgaagaaaatttgatacatatatatatatatatataaaccttccgtgttcaaaaaaaaataaaaaatatatatatataaaccttttctcctcaaaataatgtgtaattttgtttgacctttttttgcaacttggccttgattaaaaaagttcgtgttaaacaaatttctgccaatgattattctcttaagcaacctgtttcaatcacggaatcgttttttattttcttttccgggagtacgatatctgactaattctttctttttgttgtttgactatctctcttccttacaaaccaagtcatttcaacgatataaaataaaatgtttcgggtcacgggtgatggtgaatgaatactacgtggttacgccttactgcaatgtcttttactactacattcgtcttgttaattaaacaatgtttttcttatatcaaaacttaaaaactgtatgttagataagtaaaatatatttgtcttctctttttacatctagttctgtaatattagttaatcagaaacggggttgcatgatatcacttacaaaaggcatatatatatgctttctttatttagttttactgatgaaacttatttttcaccactacccgcgacttgctgcatctataattttgttacttttgtgtttttatacaaaactggatggatcacgaaagacttgagaccgaggaatgaaaagtagccgtgttaacttttaagttagaacagaaaatatgagatactgaaatttgcggccacttgagcagagatttaatttgtggcacatataacatatgatatgagtttaatatgttaacatgggagttataacgtctactatgtaaatgcatgcgtgtgtagggaggtccaataatgcccttgtcaagttaaaatggaaaaaaagttaattttgcaaaggtacgttagtccagtactggttaattaataaaaacctattttgttaaaatttcaaccatattattagttatttaatagtttaataagataagtactttattgtatgctggtttttgacaagagatgatgtaaggatttatatcttcaattaaacaaaaaagaaaagaatgtttcttatggaaatgtaacttttatattacgtcattagcagaaagggtcgttaatatgtataatttacttctaaaaacaaaaacttcttcgaaccaaacaccttttggcgttaaatcttatccatttataaatatgagttcaaaatattttcaagatgtatacattccacggtacttaaccaaaaccaaaaacaaaagaaaaatgaagagacatctcaacgacgtcgtcttagtgtttctcgtttttatcttcggcgtgaaattggggaagggacagaatacgacaatccaagtaattaatgttggggttgtgactgatgttgggacaactgcctccaacttgagcttgctcgccattaacatgtctctctcagacttttactcttctcgtccagaatctcggaccaggcttcttcttaactttgccgactctagagacgatgttgttggcgctgcagcggctggtatgttctgtctttaatgattcgattgtttctataagtaaacgtgaaacgcaaatgaaagcaaaaaatttcgtttgtgattattttttccgtttccacgttatactaactatatatagtatagctcaagacatgtgaattggccttgtgggttctgttttctccgtcatgcaaccgctaatattgtttttggaacaactgatcatatatgcgtatcatatgt

SEQ ID NO: 64455 - DNA, 1251 bp, Arabidopsis thaliana landsberg
tataccacatcataaagaaattcacacgtcgtttaccgtatcagagatctgttgataaaatattcatgggtgtatggaaaataaagaagttttgcctgataagtgataatctacgacttctggaaactagtattacaaaaccattttggatatcccatcactacacactatcttagctataagtgctataagagaccagtacttacactgtaagtgtttcttaattaagtatcggtcaccgtgaggttacaaaatacatttctattactgaaaagattaagtccttgaatgacaaacaaaagttgtctagattaggagttggtctgtaattcttcctctgctatcctaaactgaacggtcaaagctcggtcatctacgccattattttattatacctgctcatctttctgctggtcaaactggtccctgtaaaagtccagtcctccacgaggattctctttatgactcagagaagccctccacctagatttcaagcagtttcataagcaaaccataattgaaattgaacttgtaaaaacaaactgaaccaatatgacaaatatcaattacctacagcctaatggatctggtaaaggaccatctatgccatccatataagaagcaccaacatctttaagtcttcctggacgaccaacatgcagtcgttcccatgcccataactgcagcagaacaagagggccacatatggtagaaacagtcctcttacttgcccggcacaactctctgtagagaagtgctagagtagcactaccccagctaagcttagccacttcatcaaagtcccttagcagagggagaaacgtcaaagccacatcatgtttagacttatctccataaagaaaaccactcatcaaagctaatacaaaagctctagtgtgacacttcaacgtcacttcatcaggatcagcaggtaaattccgaaaattctcacgcagccacgctaaggacacatgagaaccatgaagatccttgggacctggcctatgaccaagcaaatcctcacataaatcagcccagttgtattttgtactaccagttactgcaggtccatcgacacgtagacccaacaaaatattcacatcttgtaaagtcacagtgatctctccagcaggaagatgaaaagtatgcgtttcgggtctccatctctccaccaaagctgttatcagagcataatcaagttgtataaaggcaaccttgtaactccatatagaccaaactctatcaactttt

SEQ ID NO: 64456 - DNA, 746 bp, Arabidopsis thaliana landsberg
ggggccgtcgtggtggccgtggccgtagccgcagcccccgttccgccgcccagccggcggatgcgtccgccaacgaaatctctcccgctccggaatcaatggatcccaacgccgcgcctgttgaaacaacggatcacgccgatcacacggagcaggcggccgaatccgctggggatttccgggagccgcatcccgaagtgcctgctgattttgcttcccacgaagaggaatccgtagaaaaccacgacatcggctccgcaacggaaacatccgctcccgccgaaccagcccatgctcccgaaccgccgcgtgaccagtcgcgtgatcgtcggcaggaagatcgccggcccgaacgccgcccggagccgcaacgtcccaaaccgtgggtcaaacccgctgatttccgccccgccgaagcttcggccatcagccaagctgttgagcacgccacagaagtagctacgtcactcaagcagatgattgatcatctggacgaagtgctggaactcgtcgaagttgccgaacgtcagaagctcgccgacgaacgcgagattgatgaactccgccgcgcgctccgtcgcatccagccgccacgccgcgaacaaccgccgcaacaacaacaaccttcccgtggcccgcgccgtgatgagcctcgccgcgaaccacgcgaacaaaaccaacgccgcgacgaaccccggcgtccggccccggaaccaccagtccagccgcaccaacgcgaaacagaa

SEQ ID NO: 64457 - DNA, 634 bp, Arabidopsis thaliana landsberg
ccaggaggatgcacattctagttatcgtggtcttaagatctgtccgcattaatcaagtatcctcagctttttcactttttaagttgaaaaataaaacttgcaccttgttttcgaaagaataacagaaatacaagaatgtcttccaaatttctgtaaccgttacataagcccaagattatgtgaatatcattaatgcaaattatgcaatcatcctctattgatactattctatggaaaggttaaaaacactttactgtaatctaatttcattttagaccgctaaaaccattgctaaattatttgtaaataaaaatatgaaagttttaataaaactatgatcaattgaattagattgatttttgggtaatattagtaactaaccatagaatcaaaatacatgaagagaatgatagccttgtgccaaacatatgagcaaataacatttcgttgggtggagtaaatactaaactatctctctattatcttgattttacaacaacgctcgtgctagatgtaacatagatctaagtgattgtgtacatctcttgtggaaaagtcatgtcttaatctgaaatgacatgctatatttgcaaaaacgcatgctattttcttaaaagaaattgccaaaaaggtt

SEQ ID NO: 64458 - DNA, 543 bp, Arabidopsis thaliana landsberg
ttggtcaacttgcatcggaagaattttttaatttatatagatattaatttatcgggattaattatagaagttttactataccatgatttgaggacaacaatgtttatttttaatatccatttaaagttttaattattataatacttggcttttgggacatattcttagagatctttaagatatgtatattgtaaaatcttaacatatgttgaaagctcaattatataatattactatatgtcaaattattttgagacttacataatgcatatctaaaaattgtgtttacaataatcctatataaataaaggttgatgagcaagcgactaagttgcaatcacattcgtttggatcatctatcaccaactttcaaactttcaatttttttatagtttcctagtttttggaaaaatggttttactttttgtaagaagcttgtacaacaaaacataaatataactacacatattagacgaagttattgcgtatattaaaaatttattaaagacttgattggatttattgtttgcagaaagaggagct

SEQ ID NO: 64459 - DNA, 180 bp, Arabidopsis thaliana landsberg
ggaagcgttgacctgacggcggactagaactgataatctgctttatttgggagggatacatgcttagatgcccagtatgtttatataggtacacagtaaaaaagagattcagattatatgagcacaggatcctcaataatgtttttggtcgtatgatgaagcacctggcggtatgtataa

SEQ ID NO: 64460 - DNA, 588 bp, Arabidopsis thaliana landsberg
cgaaactcttgtcctaacattcgttacaaagaaaaacaacgaataagaaaatgcagaggtagatatgggtctaaaatttttgattgttgacgtaacaaaaatatctaaattttaaccaatatatatctaaacgacttctgtgtattgatacaaaaaataacaaataaagataaaatattgatgaaaataaattttcctcaagtttccaaacgataggcaaatgttggttttaatatttgctgttaaaatcattttagcatagtggttaaattaaaaatgcttttagttagaaacatttagtgaatacttgttgttgttaaagaaacgttaagtggatacggtagttcaatactttaagtatgtttctattctcttttttattcttattcatcataatttttatattttcctgttttctcttttcaataataatattaattcataattaacttagatacattttctatatctttaggcctatgagtttctaaatacggccctagctacgtgtttttgtggtgcagctgattagtgcatatagctaaataaataactaaacaatgagatgaccgatgaagtgttcaacgt

SEQ ID NO: 64461 - DNA, 107 bp, Arabidopsis thaliana landsberg
  unsure (1)..(107): unsure at all n locations
agccaaagggncgagaaacncaaggccacnanncnagaacaacgnggaanggagccgggccccccccccgcacccaacacggggaagaaacgaaaacaacggaaaaa

SEQ ID NO: 64462 - DNA, 482 bp, Arabidopsis thaliana landsberg
gtagaacacataggcgttttcctgctgggtccagatggtcgtcgcaccgatcgcgatctggtggctcaatgggccggtctgcaggcggccatttaggccggctgcgaagctgacgttgtcctcgttgtgcggtatctgcgagccgccgatggtcgccgtgccgtcgttgccgaccagcttaggggtgccatacacgcccgtctctcgggtgtgcttggcgccaccggcaaggtaggcggtccagctgtcgttcaggtcccagtcgccacggagcataccgaaggtgtcttcggtctcggtgtaggtccagctttgcccgtagttgtgcttggcgtcgggagcggtaggaatgctcgtcgcggagcccagttgcacgctgttgcgcaggtggttgaggcgctgcttctggtagccgaaatcggtggagaggcggaagtcgttgccgcggtaattcagaccggcgacgaacagcttggtgcgct

SEQ ID NO: 64463 - DNA, 686 bp, Arabidopsis thaliana landsberg
tgaagccgcgacctggctgcgcgagatgaacgccgccagcgcgctcggcctgctgctgcagatactcgccaccctgctgggcgggctgctcggcgccggcgcggccagggccttgcagctcgccctgcaggagcgccgcgcagggcgcccggcagacgaggaccgccacgggcgccggaagcgctagcgcaacgcctgcagcggcaacctcacaacgagcggcgccggtactcgcgatagcgcggcgcccagaagttgcgttcgatggcggcatgcagcatgtcgtccggggtttccagcgccacgccctcggcctgggcctgcttggccacggcgaaggcgatgcgccggctgacctgctggatgtcgcgcagcggcggcagcaccgcgtcgccctccccggtcaccaccggcgagcattcggccagggcgttggaggcggccatcagcatcgtctcggtcacgcgccgggcgccgacggcgatcacccccaggccgatgccggggaagatgtaggagttgttgcactgggcgatgtggatgctgcgcccgccctgctccaccggctggaacgggctgccggtggcgaccagcgcgcggccctcggtccactggaggatttccgccggcgtcgcctcgacccgcgaggtcgggttggacaacggcattaccaacggcagcgggca

SEQ ID NO: 64464 - DNA, 649 bp, Arabidopsis thaliana landsberg
  unsure (1)..(649): unsure at all n locations
gttatccatcacaattgtaagcattttccaacgtggttgtcgtttcaattttgtctctaaagattttttagcaagattttcaaaccgaggtacactttctcgcgaaccatcttcccaataagaataaagtctattatacataacctgcaaggctgcaacacaaactagtggtcatggacatggttttgatcatagacaagagggaagggaatgtaaggatttaaaaccttaaccatgttggaagagaggtgaaggatgtcaatgtttctcatccaaccaattgccatcgttaggttatacatgtggaaagttcttgcccgtcccttccatggtatatcaagatcacggcgggatcaacaaatcgaatttgactatttagggacatctttttatattttcctattacgttatttttaattacatcaacaatcctattactagttaatgattttttcaatagtcaaaagcctactctttcggtggacaaataaagaaaatctcaaaaatttcgaagtttattcaaattagctaatgactnttccaataggcaaaagcctattttacttgatatatataataataaagacagaagaacccctgcatgtctaccagtatatatattatctacacacataaacatcattacact

SEQ ID NO: 64465 - DNA, 760 bp, Arabidopsis thaliana landsberg
taaatataaaaatttaaagtccaaagttaataaaaacaaatgcaattttcacttcaaaacttaattattcttcagtagaatattcaatagattttacaccaagtattttttgagtattaattatttatatatttttggacaaattttgagtactaattatatatatatatatatgtaatttataacaattgtcgcatataggaataatcatttttcccccagctggactaatcatttattacataaactctgatttgaatgaactttgtatagtaactactcaaaaaatatttattactagctatcaaatgactgttacgatcgcaacctaatatttcaattcaaaactgaaaggtacgttaatgggttaacacattctttttacttaactgatatttttagtaaaaataaacaaaaataatagggaaaattgaacacaaaatgaaaagtgttctcgagttttcttatcactcctcataattcataataaagatttatataacgtatttgtaagttgtaacgttcaggattttatgtattattatgtcatcgtacaacaatgtttaattttccggcttttgcatgaaaagtgaaacctttcgcaaacgtgcatgagattcaatctcaccttagattgtaaaaagaaaaaaaaaactaaagtagacggaaatcataacttaatatgagatcactcatcactcaaaataagattaccccaagttgaagaaaaaaatttggctatcaattgtagcgcataaac

SEQ ID NO: 64466 - DNA, 1988 bp, Arabidopsis thaliana landsberg
attaatgcagctatgttaatactttgagccttcttcttctcttctgcatctgctaactctttcgcctttgcctctgctttcaatctctctttctcttccattagtttctccagatctccctctcttcctcctttcctcagttcttctttcacaaactcttgcagttcctcactcactcttaccgtgtcatcatccagcatctcatccacaatcttgagcatctcgtcgagtctaccagcttcacttaacgccctcatgatgaatttgtaagcctcatcgtccatcttgagtttgctcaccatcatatcgaagaaagattttgcatcgtcgagtttcccagctttgatcaactgatcttgcaaacggttatacacagccaaatttggtcttagattagactcaaccattgttttgtaatacgcagctccttcatctatcttaccttccttgaaacaagtatccattaacaaaccatatgtgtactcatcaggcttcacatttttctcttccatttcaccataaagcttctcagcctcagccaacaactcgttgtcacacagctgattcatcagattgttgaacgataaagtatcaggactacacttaaaatcacccatttgcctaaaaacctccatagcttcctcaaactttcctccagcacagtacccattaaccatcacattaaaagttcccaaatttacagccaaatgcctcggtggattatgttcctttttcaccgcatcaaacaacttcaaagcctcatcaaacttcccattctcactcaaagcctccagcacataattataagccatagcactgatcctaacctttgaattctctccaacagcttcctcataacactccatagcctctttctccatctccttcatgaaataccccttcatcaattgcccataaaccacaccatcatcaacaaacccaccaagcttctcctttaactcctgatgaagctttaacacaccatcagcatcagaattcttcacacaccccatcattagataactataaacaacaggatccaccacaaaacctttaacagccatatcctctttaatctccattgctttctcaagattgtcattactaactaaacccttaactaaaatcctaaaagtagcaatagaaggattcaatggagcattatctataaacaacttgtaatgctccaacgcaatttcaggtttccttacatcaagataagcctggaatatcaaattgtatgtgatgatattaggtgcaataccagcttgattaatgaatccatgcaattgcagaagcgctccatacttagcttgtcgaagctgcgccgctaaaacagtattcacagtgaaaatcgtgggacggcaattcgaatacacagagtgacgagtgtacagagcagcttcttctaaatcattctctcggatcaatttcaggatatgattatgaagatcgagacgtttcccaacgagagcagagacagattcaggtaatttcgggatattagggttttgaattggtcgagggatttgagattgttgttgctgagatctgttgaatgaattaaccggtggctccatacgaagacgacgcttacgacggcgacgttcagcggcggcttcttcctgagtcgcgaatgacatgtatcggacggcgagaaatggctgcggcggaacacggtggcggtaggatcttgatagtgtttgaaggtggtttaaaaaggcggctttagaaatcgacatggttgaaatgtttgagattttctgagtggaaaaatgattcctttcagaggaaatgagagagataagggttcttgttagggttttaggagtttggagatgatgatgatgaggtttagggattgtttgggaacgtggataaatatgcttgggcttggctatttacgtttgggctttattgggccataagctcgatttttggaggacccattcttgatttcatcatataattatagttaaatattttta

SEQ ID NO: 64467 - DNA, 606 bp, Arabidopsis thaliana landsberg
ctctcaggatataccttaaaaatgttcgaaaaccatcaaggaaaaaaacaaaaaaaaacaagcctataggattgaatattgtaatagtttaacctaacatatatcatatatgggtcatgggtgattggaggatgatctcatttcatttttgaatgattttgtgggttgttgtaataatgaaacaatataaagaaaagaaaaaaaaaacaagcctataggagagtcctaccgtgaaacaaaatcgtgtaggacaatcattctccatatagagagactcgtcgtcttaccaagctttggctggcttccttaagtgctcaccattactccaatcaaagtatatcttgactttttaactctctcttttctgtcattttattgcctttttggttcatcttaatttagattttatttaacaaatgaaatgaaatcgcgcaaggtacgtgttcgattcgcaacctcgctttcgagtttatttttttctaaacgtgcaaaagcgaaaagaaagtataaaataccttttggtacaactcattatgtggagttgatacggaggtgtgtccactatcaacccaaataaccaaaaggtcctgatttggtcaattcttt

SEQ ID NO: 64468 - DNA, 1271 bp, Arabidopsis thaliana landsberg
  unsure (1)..(1271): unsure at all n locations
aaatatatacacctagaaattagattatagtgagtatttttcaggaatatttatgaatatatatatatatatatatatatatatatatatatatcataactaacaaaagaagatcaattttcctttttaaaaactacaatatatgcaggttcctaattagtgtttttctttttgtatcattatgtgattagaagaccttaattaaggagaagtagagaacaagtaagtaccgtggaaggaaatagctcagcagtactgtaaactcctgacaactttgcagttcgcaagtctctccccaaggcttattacaaattcacaaacgaaaatcattaggcataaattcagaatctcaataaacatatggccaaaaacataaactctgaaaaatatttgtaacagtttgagtaagaagaagaagaagatggcaattagctattaccagtggagaagaagatcagtagtatcagagaggaaacaagaagagctttgaagaaacaagattgacccattgttgtctctttgaacttctgaagaatttatatatattaacctttatattattattttaattagtaaattttgttagttattaatccattttctatcatatagtcaaaactttaataaagagaaaagggaacctttagtttcaaggttttccacttttcctggaaattgcttcagcttcagatccaatgaagaaatatggtaattaattgattagaaaactcaatttacatatataagtgagttatattaagaactagtagtaataaaacttaattatggtttaaattgctgccagttgattattgagaagcaaagtcgcacgtgtaactccaatgagtccacgtgatgttgaactggagtcaagctcctcatgtctgccactaccaaagcgtatcactaattttatctggtaaatgctatatagtcaaaaacttccaaaataatattatgaacataccagatttttaaaaagcaaaacttcctccatttataattaggctatcgtccagatgtccccgaggttggcaagtagggactttggactgtgataatctttagaatggaaacacactttatcaataaaaataaaagtagaaaattttacacattttagtgaacttttttaatccagaaaactatcgattactgtgtttatatgtagttagggacaaggtttgacttatctataatagaataccatgttgtcatcttactattatagccgtccattaacatttaaacacataacangacaaatgaat

SEQ ID NO: 64469 - DNA, 451 bp, Arabidopsis thaliana landsberg
gcgtgaacctgtagcggcgcaccccgctcagccggcggtttcggccagggcggcgtccagggtgtctattatcaggtcggcgtgttcctgttcgaaggccagcagcgggcggatcttgaggatgttctcctgcgggccggcggcgctgatcagcacgccgcgctcgcgcatggcgttgaccactcggcgcgtctgcgcggcggccggggccttgctggcgcggtcggcgaccagctcgacgccgaggaacagcccggcgccgcgcacgttgccgatcagctcgtggcgccgggccaggcgctggaagccttcgcgcaggtagttgccgagctgttccgagcgctgttgcaggccttcctcgcggatcacgtcaagcaccgcctggccggccgttcagctcaccgggttgctgccgaaggtgttgaagtatctcccgctgcgtttgaagctt

SEQ ID NO: 64470 - DNA, 294 bp, Arabidopsis thaliana landsberg
  unsure (1)..(294): unsure at all n locations
ccaataaatcgacataagtcatgtttcgagtacatactgtatattcttatacacaaggaagttgggaagcggcaacagatccaattgcctgctcgaactcaactgcacacataagtttgcattgtggcaaaatttaacggcaggcttctagtctttccttattgagtttgagagagctaaggctatctcatttgaatggctaaaccggcccttagccttgtcctcgttggcagtatatgacannnnnnnnnnnnnnnnnnnnnnnagctactattatcgcatgtctctacactt

SEQ ID NO: 64471 - DNA, 287 bp, Arabidopsis thaliana landsberg
gacgagaacggcaaaaaaaaccccggcattttgagatagtcggcacccaaacgccccgaagaaccaaaggcagaccgagcagggaaagcccagaccacacgacgagggagcagggagagaccgcagaccggaggaagcacaccaaaaaaggcaacagagccgaccgccgaaccaagaagaacgggacgaggacgagaagagcaacccgagcacgacaaaaccggggacaccgaggacaaagccgcccccgggacaacaaaaacgcgaccactacagggacacggaca

SEQ ID NO: 64472 - DNA, 1841 bp, Arabidopsis thaliana landsberg
aaagaattagcgactcggtcgcttgcaaatttagttagggtttgcttttgcttccaattcaattgggaaatattttcttatcaccttttgcgtttttgtttactattttctcatgatcctattggaggttgggtgatatgtactaaaagatttcgttactattttctcataatgttttcgttttagatattttgatgatatgtactaaaagatttcgttttatctcaactttttttttctttgggggtcaaaactcaaaactcttatctatgtacattttttaatctttgaatatggaatgttggaaacaaacttggaattcaatatgagttcatgaagcagtgtttgagttcatgatgcaatgaaacgtcgtcgtataagatagccacgtcacgagcattattttaatgtaaaatatgacgtcatcttatcttcctcgctcaaatttcaattgcagccaccaaagagagccttttgtgataatcagtgaagtgaagtgtagatagaccacgagacgaagaatgagttcgtgggtttgctcttccgtaactcgaaacgtcgtaaagtcacatcctttatcattaaccaaacaccttgatttcccggcgacgattcggagaagatcagtcagctttccggcgacgattcggagaagatcagtcagctttccgataacatctgcgccgaaatttccgtctttgaaactccaaaagtctcaatcgtcgatccatgaaggagaagaagactcagaatcagccgtacaagccctcacgattccagaagagtggttgctcccttctagagccattgaggtgctttctcgcttccattaaacgtcaatttcaatttttttcaagcaattgacttcagggttttgcaattcttctgcttctgatttcaaatttccccaacattgcttactcgaatgctgatttagggttcctctgtttcttgttaaaatttgcttaatttatgagaaaacagagaaaaagtcgcttgctttgatagtatggtatgattttttagattgctgattgtgaaatgtttgatcaggaatctgaatggttgagagtaactttgcacaaatggttggatgatgagtattgccctgagccaaccaatgtggagatcagtgaagtagctgcaaagtcttactatagttcactgctagagaaagaaagtgacatgggagagattttgttgaagatggctcaagatttaacttccatttcataccaagaaagcttccatggagctttcacatccgctaatgcagctataaatttgattgttgacagaatagaaaccggcctagtctagtctagtctagtgcagtctagttcacttgaagtttcaagaacagttttctttgtatattatgagttttgttacttcacttggtcaggtgcagggaaatctaacgtctttacagttgtgaatcctccatctaccaccagattatgcccatttacatactttgaatcatcggaagcgagatacaccgctgcattagctacatcggttggttcacaaacctctccatttaacattcctgtactctgcactatctggatcagccttgagtcatcaacaccggggtaaatctgtcgcatctcatccatcacgaatgatgttgtgatcgcaaaaggagaaatgcagttgacccggatcctgtgcttgcatagttctgaagctgttgatcttacaattccgataacagcggattttgagacgctgtaagtatgttgggctaaaccgcccatcatccccgtgacactccctgcacaaatgatggatccagagttacgcgggatcatcacacgagcagcatgtttattccg

SEQ ID NO: 64473 - DNA, 2225 bp, Arabidopsis thaliana landsberg
aaagggaatatctttacgctttcctgtaagcacaaacaaaggaacattcagcatgaaagtggtcaaacgtttgtaaaaatacctactttagcattacccaaatcagtgtttttctttatgataaactaacttttgaggatatcaaagctttggtttgggagtgtaaatatatataccatagagaatgacttgcataacgtgtaaaacttggacgtctcatttggctcaatcaaagctatactgcatccatctgcgaatgctctagcagtcctcccacatctatgtacatacacctatatggataaaaggctcagagcttgtaaaattgttatcaatcaaaaactagaaaacttagagacggttgaagcttacttctgccgaatgtggaagtttgtagtgaataatagttcggacattcttaatatcaataccccttgctacaagatctgttgctatgagtattccattttcgctcgcacggaaacggtcgattgactgtgacatataaagagtgaggaaaggaaaatatgctaagtaacactagtaagcaaatacgtgtgtttccgaaacccccttgaactcaggacacaacaaaatattgtagcaaaaggagtcatgatgacaaataactaagcaatagaaagttcaaccttcaaccgagctcgctgcttcatttctgagaagagtgtgcaaacatcaagtccaagaatctttaaaagcccagagatatgccgcaaatcagtcactgatgtgcagaaaacaattgtccgcccttgtccatggacgctcaaaatataatacaagtatgcgtctttttccttctcttcgcacctgtagtttgttataagataaatatactaagaacaccgagatagaccaaaagaataagtagcatcaaagatttctggatgttttgcaagcaaataatgagtagaagcatggtgtcctccaagcaatgaaagcttacttattacccagtcaaattaaaagcttcggagggatataggttaaatagtacttacttaataaaagattcttcaatctttggtgccaaaatagatgtagttgtcagatcaatgatggcaacattatctctcattccagctcgttcagataaaacctcaatagaattcacttcaccagatgatgattgctttgactttgaggagccacgctttagctttttacggaaatccgaagacagcgctatggtggctgagaaaacaaaagtttgtcttttcttcttcgggacgtttaaaactgtgtcattactcttcacagtttgcgttttcccttcatttggtttatctgtcactggaagcaagtcgagtatagactgcagctccctgaaatgacctctttcaaccatgcgatcagcctcgtccaacacaaagaacgacaaggaatgcagctgccaaagatgattagaaaacgacagaacaatttagtgtctaagaatagctatataacagtaataacaattttacacgtgccttaattagcagacatactcaacttcaggaaaatggtattagattacaaactgattactgcatctacgcataaatccaataactacatcaaaatctgttaatgtaaaagcaagataccggactaatggaagcacatgattctttttactctccgtttatgcattgcatacctctacaagatgcttttctccagcggacataagttcccataaccttcctggagttgcaacaactatttcaggtttctcttttaaacgtctttcctgcttctctgaaaacatcccaccaacaataggaacgaccttgacgctaagattcttggcagcattctcaagatgctccgtcacctggaataagggaaaagttggaattgtatctcagaacttcctcatgacccacccacaagtcaacaaagaagcatgtcagaaggaaaaaaaaaaaaaagaagcaatgtggtaatagtcaaggatacctgaagagcaagttccctagttggagtgatgattagagctcgtaaatagccatctgcagcatatttctgtgcttcttctcccttcaatgcatacaatttaccaaccttttcccgctcgtctaagaggcgttgcagtatgggcaacccaaaagcacgtgtctttccagatcctgtctctgcagcaccaataacatcctgcggtccaaatatgagccatctatcaataaaatatactttcttgatagacacacaagctgggg

SEQ ID NO: 64474 - DNA, 603 bp, Arabidopsis thaliana landsberg
aatcttgggataaaactcctttgtgactcttgtgctcatgacgaaaagaaacgacatatgaaacctttgtcatattaccctaattggtagatcttatgaattcttatcattttatatgcctctaattggatgtaactcatgatattttctatttcaactctcagatctttagaatcccaaagaaaagaaaacaacaacaaaaatgtctcagtcaaacatggtaccagtggctaacaacggagacaacaacaacgacaacgaaaacaacaacaacaacaacaatggtggaactgacaacactaatgctggaaatgattctggagatcaagatttcgacagtgggaatacctcaagtggcaatcatggagaagggttgggaaacaatcaagctcctcgtcataagaagaaaaaatacaatcgtcacacccaacttcagatttcggagatggaagcgtaatttttcttcatttctttaaataactcaacttctatctagctagatcagcactaagttatttataatcatttcacatctctcctttttttttcttttatgtgttgaatagtctcttcagagagtgtcctcacccagatgacaaacaa

SEQ ID NO: 64475 - DNA, 725 bp, Arabidopsis thaliana landsberg
ttctgctcctgattcagttattgctccagcaaactggttgtttctatcacctgagcaataaacttgttcacttgacaaagcctttgtatttattccatagagaccatagcaattaactcggaaacaccttaccttctctaccttcttggccagaggtaaattcacttcctcttccttccaattggacatctcttgttttgtgtagttactcttcattgctctaatctttttggccttttcgtcaactacagcctcgctttcctgagatgcagatggttacttatactacaatcaaaagacatcaagaagggaacatgcattaaaaataaatgttaccattgactcatgagataaatcaaacagaaatggcttgttgttgttcttcctctcaacttcttcaacaagatctaaaagcttctgaacttgcttagctttcttgcgcttacttgttctgagcctattctcaaacagaaccatgcggttgttgcatgcagcgagaatttcctagaaccatataaaccaatcaattgatagatgtacgtcacaagatgtggtttctacagaaagataagaggaaaacacagtaaccttgaaatcaggagagccctccaaatactcattgattgtcacatttggcattcaataagtgaaatcctcaatgggggaaaaacaaccgatcaaggtaagtccaaaaaaaggaaatcttccgaaaaagggggtttttc

SEQ ID NO: 64476 - DNA, 645 bp, Arabidopsis thaliana landsberg
aaagaaatcaaacagttgcaacatcaagaacatataaatagttgcaggaccatatagttctcatcacacagagctccaaaatttgacgggtgcatttcacatgtaacattttatacataaagtatgagtgtcacacatacatgaataaaagagacgtgctagaaacttcgaacggctggtatatatatatggggcaaattctatacaccaccaacctggaggggtatcttatatcattaaagtttacccaatttgtcctgttcttttgcaaatgcaaggattttatttttataatcacatcaaccttcaggtgacattttcaacattaagctcttgacctctttctttgttgttatgtaataaatagctttatatcagaatatttgaagttgcttgcttgttatcttaagtcagcgaaaatggaaggcattcacaagctaattatcttggccctaatatggatttttttgataactaatatcgttgatgctcaagatcaacagggcattgtgcggatatacaatggactgcacgtatataagagctacttcttcttatctttaagaagtggtttgaacctaaccaatgctgacttagattgcagactttagggtggttacatatcttatggaatctttacacttg

SEQ ID NO: 64477 - DNA, 1244 bp, Arabidopsis thaliana landsberg
taaaaatttattaggcaccaaacgattgcactccgttgtaaaccagttttttttcgaataaagttttaaattttattaaaaaaaaaaaaaaaaagaagaatcaaatctaagcccacaaataagatattattttagtgagcctacatatatttgaagagaaaaaatatttttgcaaaccacttaataaataaactattgtgtcatatactcctgtgactcatgtttgattatagataatagtgacaaattatcgtcgtgcattccacaaagcaggcggtgttggagttatacacgtgatttaaatgtaatctccaaaagaaacttcagagtaaaaaaactacgaacgcaataattcaccaaaagaaattatctctgaagtgttttgattcgtttgtctaaaggaaattatcccaattaaaccattgatcactatgtacactccacattacaacgcaacgacgtttcaaacttttcaactaatattctatgcatatgcatatgctataatgttaataagaggaacgtacgtaaaaccaaagagtatagggtgtacaagactaatattctgaaaattacaggtaaaattgtaattgttgaaaaatctttagcacacacaacacaagcatagctaaaggctaaaccaaaagtcacgggaacaaaggtagtaaatatcctaaagttacaaaaactcatatacatgtagtatgtctgtcttaagagagtctacaaggaaatcatatccaaaagtgattgtgatgaatttttatttgttatgctaaagagattatgatgaaataacgtctacaataaatcattaaatactccatacacgactccaccatgaatgggagatcaaaacaattaagtaaactacaaacaaataaaattgaataaaacaaataaacgtgtgtcccctaaacgcaaaattaaaagatacaaaacaatatatcctctcactcactcacgtcgtcgtcgtactaagcttggccgctttgaacggcggatgaagcagcccaaactcgtccttggcatcgagcggcctatccgtctgattgcgcgtgggtttcacgcgccggctcccaagcgatttatgcgtgaaaccatacatttgaaggatctgattgtctccgaaattaaacgctctatccatctgccgtagacaccgttccaccggataatctccaaatttcccgcacggtttacacccgacgaaatgcgtaaccaatggccaccgatggtctcca

SEQ ID NO: 64478 - DNA, 549 bp, Arabidopsis thaliana landsberg
agtccgagctgaagtgccgaccgtcgaatcggtgtcaggcagagacggtcgatgtaaccgtcctgaatgtcggtgaccagtgccggcgctcgggtcataccggtgacggcaaaggcgatggccatcggaatgaggaacgccttgtagtccaagctgcctgcgtggctggccacattttccagggcaccgtggttgacaatgtagaacaaggcggtgacgaacacggcaggaagcaccgcggtcggttctcgccgcatttgtcgaagtgcacgacccgccaccgaggtgatgttacgacgaaacccggcctgactgtcgagaacggggccagcgtggacgaccgtcacgccggcacggctttttgaatgtgcgatcccgtgagttacatgaagacgtcatctagtgtcagtgtgcgcacggtcattgctcggacgtgaagcgtcttcgcgtgcagggcgattgccacggggctcaactcggcggtgacatccttcgagctgacgacgatcctgcccgcttcataagacactgcgtctatgccgacgagca

SEQ ID NO: 64479 - DNA, 562 bp, Arabidopsis thaliana landsberg
  unsure (1)..(562): unsure at all n locations
aggttccataatgtaaagtatacgtatttcaatgtaaataaatttctgtgaaaagaaaaggccaaaagtcagaaaagattgaaagacaaatgctctactaaccgaaaagaaattgaaattagccaaagaaactaaatcacaattagtaaacaagaaaaaacacaatgaaatgatagtatttagttactcatgacatcacgtagattagagaaagagtggcgtaaatcacgtgataacgatttatccagtaaaattcaggaacaagccttttagatattattatttacttacttgattaatgataataagccttcaactatttaccctttttctttctccttttctatgggctccataaaattataaacataaataattttaattgcattgagaagaaactaaacttttccaaaagaaacaaagtaatccgtttgatgttaagcaaaaagaattagtattgagtatgttttattttgtataaaattaggatttgtaaattttgtgatggcngcctttgtatgggttttctttttccatctttctcacatcttctattgttact

SEQ ID NO: 64480 - DNA, 1133 bp, Arabidopsis thaliana landsberg
aatcataatcgcaataaaagcggtatgcatcatatcacaagaaaaaaaccaatcccatctctctgcaaatcgatagaacctgtgcaaacaaaacatttgtgaaggtacatgttcatactcttcttctctcaatcgaagtaaaatcctattcttctattttaaaattcttaccacctcaattagataagcaagtgcatatattatattccatgaaaaaaaaagattcactagtaacataaccaaaaccaagttcatagcttttttttctttcgggtttaagatataactttttctaaagttttttaagtttttataaatatatatatatatatatatatattaaagataattactcttatggttagattcgatttgagattattacacttatggttagatatcgaatctacttttcttgtaacatatagttaaattgctgacaaagacctgatcaaatgagtcggtgaaacttctaataactgaaatcttgacccaaagaaaaccctaccaaaataaccaaaaaaaataaaattattaaaaaccccctctactttattatctcttaaattcacacactttatcttttcaattttagatttcatcctctaattttctaatttactatgttgtattatttattaaaattgatttagatttaatctcttgcttctaaacaagttggcaaccaaaaattagattctaatttcacgaaattaagatggaccaatttgatctaaaaacaacatctagggatgtctttgtcaagaaaagtaaaatgttggttgagttcaaacatttatattttgggtctgtgtaaaagagaaacgtgagaaagagagagagagaagaagaaggtatcttttaagaagtcgtgaaggctctcttcgagcgatgcgttgaagaaaggcgagtgaccaacaacgatggcgaaaatatctttcctctcttcttattcttcatcatcttatcacgatcctcattataaacgctaaatttttccaacagttgtactctgtcactcgaacttctccgatctccgattttcacatctccggtatgttacgattgactgcatcgcgatcgtagaatttcgctgaaattttgtgagatagtaatgtttgtatgaatgatac

SEQ ID NO: 64481 - DNA, 589 bp, Arabidopsis thaliana landsberg
  unsure (1)..(589): unsure at all n locations
gacttcctttgaatgacacagacttccttgctgacacttttttctctctagttgagctactaacctctctaattttttcctgggaagctggatgcttcctcctgagacaaagataacaacattttacatcaatatatgtatatgtggctgaatagaaaatctgaatttggagatttagtgaattaccttgtctgcttgattaaggtatccattttcaaactaaaatatggtgggaggacttgagaagatgtgtttgagggttttggttttttaagggtttttgagattattgctttgcatgcaagtttcatatttggatcataaagatgtgcaggtaaagtaaagaacactttttctattcttctccctcttcagctttttggttctttgctttctcaaaacgacagtgaaaagaacaaaccagattccctttatattcaattttcatacatggataaggaatcttttacattcagaaaacacatcaactacaatctcgcttaacagagaaaatgaatcttanataaccagataacactgccaaattcctatctgtaaatgaaacaaagtgtgctatacataactaaac

SEQ ID NO: 64482 - DNA, 1169 bp, Arabidopsis thaliana landsberg
cttttgaagaaacttggctagagaactatcatgtaacggtttttaaaaacagagtttttgttagagtaaacattttctcgtaatttgagtttgttgtggtttgaaattgtaaaacaaaacagagtggccttgaacttggaccttcttcgtcaaggagcaagagcagaagtgaagaactgttgcctttagaggaaccaagaagcttatcaagaagattctcaggtgaggttacagaataactccagatcagattttgttattcaactgaaaatgttttctgaaatcagtttacgtttttgtgttgacacagggcaactttcgtttatagattcagagacgaaagatcataaacctcctacactaaagtccccaatgagaaagtcatcttcggtaaaaaagactttctccatgaacttgatgggagaccacaccaaacagaatcaagattcagaggagaaacatgaaagacaaagaaaaccggtttctgaaccaccacggatacaaccaccgcttaggacacgatcagaaccttgtgctccaccgccacctcctcctcctcttctatcaccttcgcctctgcggcttccacctagggaaaccaaaaggcagagttctgagcatactagtcgaaaggatgattctacagctgatgcttgggaaaaagctgaactatctaagatcaaagcaaggtaagtagtctcaattcacaaaaacttatttatgtgtgttatttacactcacatatgtattacacaagcaggtatgagaagttaaacagaaagatagatttgtgggaagcgaagaaaagggaaaaagctcgaaggaagctggacatatctgaggttgataatataatgactttgtataatctaatctcataatcattatattataactggatgataacttgagttcattattctctaacatgttggtacatgaacagcagagcgaactagaacagaggagaaagagaggtttgcagagatttagagaagacacagaatacattgaacagattgctgctggagccagagctcaggcggagaaagacagacagagcaaagagttcaaggtgaaggagaaggccggtgttatccgtagtaccggtaaactccctggaaatgcatgctgtttctgacactaaaacaaaggatttctgataactg

SEQ ID NO: 64483 - DNA, 579 bp, Arabidopsis thaliana landsberg
  unsure (1)..(579): unsure at all n locations
gagagatagtcgttcatcccagccgcaagacaacttttcgctgttcacccttaatagcgttagccgtcatggcagcaattggaannnnnnnnnnnnnnnnnnnnnnnnntttgcgaatggttccagttgcctcatagccatccatttctggcatttgacaatccataagcactaagtcgaccgattgcctttgaaggaaagcgattgcttcacgtccattgctgacaatggaagccttatgccccaacttttgcaagaaaccgagagcaaccttctggttgattaaattgtcctcggccaccaaaatatgcatctctttgcgcaacggaaccatacttggctgtggatcacctgcaatagtcacactgcgcgcggcacctttttgcaggcggatacgtacccagaacgtcgagccaattttttcaaaactcttcacgccaatttcgccgcccatcagttcaatcaaacgcttggaaattgataagccaaggccggttccgccaaaacgccgcgtggttgatgcatcagcttgggaaaacgcttgaacaaacgacccacgtccgttcgacatccaatccc

SEQ ID NO: 64484 - DNA, 830 bp, Arabidopsis thaliana landsberg
acggttgattcgatttcaaattttatcctacggagaacaaacaataacatcaaatgaggacatcttacctcttttctaaggagtttctcatcagaacacgcatgctacttcatctcagccatgaacttctcatactcagactctccaacagtggatggattctctgcaggaggctgtactggaggtttgggagcccagggtacgttccccatgctctgtgaatagccaacagtgggtggcataggaggattaggtgcccaaggtgcattaacaagaccttgtgagtgatcaggtgttgagacagaaggattgttggcccatggcatgttacccatgttttgggaatgatcagtagacgaggccgctgctggaggtgttggagggggaacagcattgtagtaagacggataactcatatatggaggctgtccaggcatagccgtgactgagctaccatagacatttggtggtatagacgacgtagcagcaccactatcagcttgtactcctggtgggaagctttgctggggttcactagaagatgggttttgagtagtgccaggtggaggtgcttgtgtcacatgaggtggtggtggtgggtattgcattccataaggaggcatatgttgaccatggacaggatggtaagaaccaggaggaggagggggaagagcatatggagaataggaaggaacaggaggaccccaaggaactggagctgttgaataaccaccagtggcatactgttgagatggataggcaccaggcggctggtttgagggaggataaccttgagttggtggttgaggagctggaggtcctggaggtgc

SEQ ID NO: 64485 - DNA, 1223 bp, Arabidopsis thaliana landsberg
agcattttgaaaacgttgataaagattcgggagataaacaaatagtaaaagggaaggtcacttactcttttataactggttgtgctttgaagagcctcttctgggcttcttctgtctccattctcctcctctcttccctttctcttcgcatttcctcttcgtgccttactagactctctaactggaacggttctggttgtgtgcattgcttaggttctggttttggtggtacctgagagttggaacacgtaagatttatcaacaccatctctctcttctgcaacacaaaaacaaaaccaaggaaggaaaataagaagtttaggatgtacataccactggatagtccgtcgtgtaaggatatggatttgcctttggaactcttgcctttacatctcctaatttcttatacatgagttccatataaaatttcttctctttctcagcgcctctttcctggattccacaaaaaagtagttttcaaagaacggtcagcaaagattggtggcaagtcatttggaccttagagaggttgttcgttgtacacatacttctgtcttaagattgaaggggtttggagcagtgttccttggtagaggtttttcatggcaagattcggagttcagtgagagctgaaaagaaaaattgtgtcaaagaccgagacatccagaggaaaatactaaagaatacagtggttctgttaattgaagtataccttgtcgaatatatctaagacagattctggtcgtgatatcctctcatctgtcgcaaagtgaaactcttgaggtatcgttatgtgcttcttggtgttgcaaaagatacccatttctcctttactttcaaatatctgggtgatttgatgtgatttcaagttagattaagagagagaaatgaagtaaacagtattaaactacaccagttcagtagctggagtacctttttgttcaaaggttttgctttgaactttggtgccttcttcagttcctcttgctcaagttctgcagtagtttttgctatagtacgacgagctcttagcattgttcggagcacagggctcttttgttcagtaaggcgatgcttctgatcattatgctgcgtggaaaacagaggaatatcagatggcatgaaatcaatttatgtatacatacaacttgtctgggagagaaaagaagctacagacctgcttacacactttttgtgaagctattgaagatgtctctgcatgc

SEQ ID NO: 64486 - DNA, 1408 bp, Arabidopsis thaliana landsberg
agtttccttcctgtaaggcctctgctgttgttctaccgaatgatgcaggcaagtaagagatgatacttgtgaaaatcaatagggaagtgccatttccaagtttcagatcagagattctctctccaatatatgtagtgagaacagaaccaagcgttaacaacgtaacagaagaaacaacccattccgtgctgaagtcattaacgtaaggacgaaggtaaaacacttgtccgattgcttgtactatcgcaaaaccaactgaagcatatctagtatactgaagaatcttttttctaccagcttcaccttcttttttctgaagatcttgcaactttggatagacttgagcaagaagctgaaacacaatctgagcgttgatgaaaggaacaatcccgagagaacatataccaagtctacctatgcctccaccagaaaatgtatccaaagtgctcaaaatgctattctgatccaaatttccaacaaaagcttctcgattaaccccgccgagtggtatgtaaattccaagccgagagagagctaaaaacccaagaagcttcagaaacttccctggcaatggccctttgaagaaatctccaaaatcaatggaactgtcctcaatagcagctgaagttttcaaagagtaaagcaaccatcatcaatcatgctaaaacatacaataagcaaatgtagataagccaaaacgaacctgccacgcctctaccagaagacggcttatctcgcctgttaccggaagagctttcaaatgatggtgacaaaagactcacaaagctttcccaaatgctacttaaaccagaagtttcatctggattgatccccaacggatcaaaaaccgaagcctcagagctgaaacatcaactccaatcaacaaacaatgcagcagtaagtgacaaaacatcagcatttctacgaactagtgatgaaataaccctcaaatctccacaattcaagagaaattcacatgaaaagtttcgaactttaagtcgcaatatctataacaagatcattatcttcgatttcaaatggaacccatctgaaatctgaaagaagaagtaccttctagagttgataacaagaccgagattccatgatttggctttacaagtgttcctcctggtctttgtcgaaacagagaagaagcttcctttgtaaagagaagagcttcgcaatctcgaagatgatttgtgattgagacgagacagagacgcgaagtttgaagaagaagaagagtaagaggaaacttcgcttaccgttatcatccttatccttcttctccttctccacaacaacgacgatttcttcttttccttttcactttttttttttttcttacggaatccagctaatgggccaggccttttaggcccaatacatcttttgcacattattaatc

SEQ ID NO: 64487 - DNA, 571 bp, Arabidopsis thaliana landsberg
aatgccacgctgttcatgatatcatattctcgagttttatttgtttatttgtgtaatctatacattatttggattacaaaaagagttaggaacaaaaatggtaactggattcatccatcgctttatgggacccataacagactgacaaaaaaaagagttaggagcaaatgcattagaaaaatgtatcttcaattgaaaaatgtctccaatataatgaagtttttcaccagcttatttcagtttcggttcggttatggttggttttctttattggggtcgatttttgtattggtttacttgacatattaattcagtaaacatcggtttaaccagcttggatactttctataaatgtatttaaaattaacactataatggtgacaaaaaaaagtggtataaatttttgtaatattgcaagagtataaacctggatacacccacaactttaaaaccatctcgatttattgaaacagcagtcacaatcaggtaattgaattttctttaaaaacaaaaatttcaggtttagtttctacttttgaagaattagaatgaataatagattttgaaaaca

SEQ ID NO: 64488 - DNA, 517 bp, Arabidopsis thaliana landsberg
tcgattaggattcaactccataggcgtaagtttacgtgttttgtttgcgagaaacgtacgaaagctcttactggtactacaagtccctataagaagaagaggaaaataaaattaaattgaattgggcttactgggctttaattcggcccatattgaatccatgaagatagatattttatttgtttaaagtgaacactttctagaaatgaactttatggaaaaggccaaccctacatgtatgatggggtaattcgacaatttatttaaagaattcatgcaactatatactccatgtattgcccatacaattgatatatgtgttctatgcatcaatttttacccattaagaacttgaataaatactcttggtagcagaactaatattaccctcttaaaggagataactgggacaaatacgtgacatatagttaaccgcgtggaatatcacaggaacagatttcacacggggctggaagctgagtcattaaatctacaacattttgatgaaccgttctaa

SEQ ID NO: 64489 - DNA, 438 bp, Arabidopsis thaliana landsberg
aggagtccggcgggggccagacgacctggatggtgctcggctggtccggcgagcacttcaccgtgctgggctgcgcgcccgcatccgacgtcgtgccctctgccggagaactctcgaaaggctcctgcctgtcttgatccctggcggcccgcggctgatcgggtgcggaggtatcacagggcatagcaacggactcctgccgacggtggctgtcgatgaggagacgcgagtggacgctccgggatttcaactggccgaacaggcggccgaacggtacgagcgctgggtcggcacgtacatgaccccgatggccgaggcgctgatcgatgccgaggaagtagcacccgggcaagacgtgctcgacgtggcctgcggcaccgggttcgtcaccaggcttgggggccagcgcatcggaccgaggcacgttaccggcgtgga

SEQ ID NO: 64490 - DNA, 1317 bp, Arabidopsis thaliana landsberg
acagaacagctactttcgttttccaaacctctgcatatctctgccatggtttctttcaacagttctccctcatcattcccgttttcatcacgtacaagccgcagcaactgacgaccttgattgataatagaactcagcagcagcagctcgtcgatagattctgtgtcaacatatcttgaaagaagaaccccaagccagcgagacgagtcaccactatcccaagattcaatacctggctcaaaatagttaccaagcaattcaagaaatcgacacaagtcacgttcttcaagagtgataaggagatgctgtgttaacgaagagaaagactcctccctaagaaactcctcaacagcatcccacacatcatacatatcttcttcatacatgaaacgaataaagagatctataaagaatttggtttcaagaaacaaaatctgtccatctttaagcgactcagcaaactcattggaagaccagaactcagggacattgtcaagaaaattctgaatagttctttcaacgtctaaatcaagaagataatgaggctttgtagctacaaccgcaggcgattgcccatgtttacctcgccactcaagctcttcccaacaaatatcccgattcgcaaacgcaaactgcgccaatgcttttgcacctctcttgtgatcagacccaccatcataagcaaactcagaaaaccactctagtatacgcttctgattccctacaaatatcaaaaactcaacatcaagcacaatcttaagataatgtaaatacacaatgtgaaaccaaagactcttttaccttcaaagaacttctcaagtatataacttcttttagctaacaaaaatccaagtttccttggtctcttctcaaacatcattgtcaaaagctgagataaaaactgcatctttctaggttttgatctcaataacttcatgaagatattaagttgctttctaggagatatagaaatagtggaaagagcactacaaagccaaagcctagcttctgatcgagctccatgagtcaccaataattgaatttgagagcctaatttgttcaacagaggcaaaataacattgatgttgctacttttctgggcatcatcgttccactttggttcagataagaacaaattcaccatcttggtttgattattcaatttgatattaacaacaacaggatttgggtttcatcgtcaggaaaagtaagcccctgcaattgaaaatttgaagatatcagaaaccgaaagattcaaatcgaaagtttagggtttcaagatgatttagggtttgaaaagagacagaagaggacctg

SEQ ID NO: 64491 - DNA, 530 bp, Arabidopsis thaliana landsberg
accgtgctacacctaggtatggtctgttatgcatgagacgtgatgctcacaacgttagatatagacctaactgctgatgcggctccatccaccaccggataatccgtgagtggttgtctaaagctagtttagttaaacacgagcaattttggcctgctttcacataggatgaagggccactataactcgaggcttactataagactgacccctaatttatagcgcctcagattgtacatcccttcttatatccttcatcaatcattgtcttagccattaaagaattactatacattttctattagaaaaaaagtaaggtggaattagctacctttatttattgtgtatggaaatgtgtattaactatttcctttacacattaccaaaaacaatagataggagcgcttgggcgggtgtacccaaccggataaaagctggggattgggaacacaccaataggggttcaatacccgtcgatcgcccatgatgcccgggaccaagatattatgatatcttttgccgcctttgga

SEQ ID NO: 64492 - DNA, 390 bp, Arabidopsis thaliana landsberg
caaaaagaaagaacaaaggtttgtgttctatcccttctgatgtcagcattacagttcaatgcttctgcgactgattatacgtgtgcatgtcgcgtatttcaagctctactttgtatatgcattagactgcaaggacccatcttgcatgagcttaagactaagacacttaaacaggtccctcgagtactgcctggaagcttttctccgatccgttcccgttgacatcatcggtgctaattcgtagaaacttattttgccatcctggacaacatgttggttcagcaacatcaaattctttagcctttttacacgtatagaaaatattataggctacaacacttatatcttaccttattggtatcgacatctagaataatggcattaacaact

SEQ ID NO: 64493 - DNA, 671 bp, Arabidopsis thaliana landsberg
ccgctgacgcgtgctcaacacagtcccttatcgtgctgtcctatcacataaaacaacttttctcttgcagtgtcgaccgaattttactttcttgattatgttacgaacaaatttatagaggaatttttggtcaaaacgaaatgagacttcttttctataatgcatgaaaactttgtggaagttttattaccctttcttaaacaacgtttcgtgtttctatagatagttataaactatacagatttgattaacagattctcatgtgcatctttcaaatttaaagttcgtattaagtaggccatttgtggaaaatgagtcaaatagtcttctaaaaatcattacttattttaagaacaattattttgtggaaaagatatatagtttttgaccccaaaaagagatatatattttagttagtattaccaaatcaaatgaacataactaaagaaaaagtagatagtctacattaataagctaagaatattatggataacatatcgaaataagtgaacgatatatgaaaatatttttttagaataaactacaatattaaaaattcaaaaacaaacaacagataaaatcgatcaatgaccaaataaagtttctgatgtaaaagtgcagaatgaaactgtaaacgacatgttaaccattcaccagcaattttacccact

SEQ ID NO: 64494 - DNA, 533 bp, Arabidopsis thaliana landsberg
agatatgttgcagcaatgacagtttcgggtggccgggttgcacgtgcgtgcagccggctcttgtctgaaggcattcaacgtcccgctgttgcttctcttgtcattgcaggggcgcccgcctgacatccttatcgtaccggcgtatgtccgcggtgtcctacacgagtgagcgcaccgactccaacagcagcatgcagtacatgctgccgcaagggcaaacaagcccgtcgcgggagtccggcgcacccgtgtcctcggaaatgctgaatcacctcaacgcacaggtcaacagcggcacgcacgccgagtaccaggtatggcgcgcacagcagctgggggcccaggaaggcaccgtcggtccccaagtgcagagtcggggtgagcaagaagttgacatgtgatgacggacaacatgctggaatccctgggtccaactgcaaggacccccattcctgaggatgcacagggcagcttggtgtatgtattccagagtgcaaaaagaatttggtgaagtgtttgggtgaggagcccat

SEQ ID NO: 64495 - DNA, 611 bp, Arabidopsis thaliana landsberg
tcctcattaatttctcagtggcaaacttctattaatgctctaattaactaaatctaaatttacaaaacattagttccaaccaattaagcttcttccttttgagttttttctttcttttttctttttcttcaggaaataaaataactgtttttgaagaaagggacagttgatagaatttcagaaacctataaagaaaaacattataataaaataaaataaaaatctggaagttgcagaattaacagagtccttataaaagacttgatcttctctgtctttcgctttcacttgcattatcaacacaagatgttggacctctctcttcttatcattttcattaccattattgtttctttgctttggtaactgtgtcttgcttttaaagatttggcttctttttttttttttggttcataagttttaattgctattgctaagtcgttgtctaaatctctggctatgtaccctataacttcacaacttagatcaatgtgcttctactctatgtataaaaccagctttgagcatgttaaacattgtaaactttttaagatcctttacattttctttaagtctttatcaaatacttgacatattgaagattcttatat

SEQ ID NO: 64496 - DNA, 1758 bp, Arabidopsis thaliana landsberg
ttatgatgatgaccattttttcagaaagtattttaaaagaagtgaagaagattataaatcgcacactaccaaagtccatggagtagtttatcaatgataaatcattcattctaaaaaatgaaataagtcttcatatatataataaaaattaatatagaaaacccatacatttgcattgttatcgtttctcttcttttttttttgccagtttctggagttagaggtcccattttattgcaaagttgggaattgacgatacatatagtcgaagaggcttaagtttaatatgacttttctatctttgaagcttttttgtatatatacatacataacttctagggccattgtacaagggagaaccctaaaatagagtatggatagatccactactttttgaatatacgaatcatctcttctacttagttttccaacttattacaatctatgaataaaatatctgagagagtaatatatttttcagagtataaatgttactttgaattctaaagaaatttggatgcatatacgagttgctctatctttccttagcgtaaaaggaacggctacataaagacacaaaaaggcccccatgaaatgattgagatgcttccacggttttttcctctctattttttaatattttctccttatgaaaaagctaattattgattcctcatgtcttccgagacattaacacatttcagaaaactttatagtctgattatccgattttatattcttttattgcaatttagaaaaccccgtattcataaaaccacataattttatttatattgatttaggaaaagaaaacaaatttatcaacaaaaagacgtttttaaaaaaacatatatgatgttcttattgatcccatatgataaaataggtattatccaattatattaaataatgtgaaaagctgcttttgtggaggaaaaaatctaagcttttcataggatatatgaaacttttaaaagaaatttggaggcgttgattcttgtatacttgtagtaattttatagcatatagttttatatttcaaaaataatagtaatacgtatatggcttgtcccatgaaactactacaaaccgagcaagagaccgtataacagtataggttccgacaaaaggatcttcggaccctaagactcgtgctctttcttatattcatatgcataagaatatttgataacaaagttcttatatagtaatcttttattgcttaatacaagacattaattttcttaaagaaattaaaagtgcttttaccggttgacgacctaaaaccatttatttaattatcatagtatattttaagagaccagtttaattactttggaaaaaaagaagaagaccaatttacttatatattaaatattatagatgacgaatctaaataaaagacaatggacatcagatggaaaaaattgctggcattcaaaaccaatcctactttaaagtacttgaaataaactaaaaatttcaagcacttgaaacatcaaatatacacacatagcttcttgaccaaaatatatattttgttcaacaactttccttctttatcattttcataccggtctaatcatctaagtcttcaactaacaaaatgatcgatactatataatggacttatgctttattctatacacatcttaggtctttaattatatatggatctatatcggtttcttctcatgacatgttatcttttaactttgggtgatatcaaaacttaccatgcacgatctcacaaaacat

SEQ ID NO: 64497 - DNA, 1952 bp, Arabidopsis thaliana landsberg
tcctctttcactgcatatacattggtttccacagtttcttcctcaaccttaggtgctacttcctccatagtgaaatcaatccaaacttatgcagatacaaaagaaactcaaatcagaagagacgcatgatcaaatcattaacaaaaaaaaggaaactttattcattatacacaatctctctactttatttgttgtatccaaatttctccgaagtaaaaatacagaatcaaatgaccaagtggcccacgccccctgtttggaatggaacgcgcatgtaacaattactctactttattgggtccggtcataacaggatttactaataaaaaaagtacggactttagtagattgtctaaattcaagaacacagacaaacagagtttctggcttctttcagctaacactgtcggttaccttctaccattttttggtccttttgtgaacaaccaatccgcattaagcagtgtttatttttgaaaaaaatgtgaaattcttgtgagtgaaacaagcagacgaaattgcagaaagtgagagtttttagcgatgaagaaattcggggaaaataaagtttctttcatttaaggaaataaaccaatagtaagacaggacaaggaaaataaatacttactgcactgaacaatgaagtaaccagtaaaatcaaaaacccattttcaccgtttcacaataactccggtggcgagaatcccggcgacgattccggccgttgagaacttgttaaacagagcaatagaggctgaaacagagaaatgtagatctggatgaagcagagaatcaaaaacgcagctcactgattgaagcttttttgaatggaatcgaacaaaagtgaaaacgacgattaaaaattgagggaaaatagctggagagagagatgttggcgaaagaaaaagaaaaaaaagtaaggaacagtgtaaacagtgtgtagcggaagagtgtgttgtgtaatatgtttaacaaaaccccaaaatatacacccctatattatactttaatttatgtttttcaccctcttattttttaaagttccatgcaagtaccttacatttaaaattatcatgcgatgtcggaaactcaattttgtttctaagtttacccggtgaaaatgataaaacggttataaaagtatgagacagttgtggataattatagtagtatagggactataatgaaaagtaattatccagaagaaaagagaggaacattataaaaagagaacaaattagagaatttgatggtgagagagaaaagtttgaaaatttagagaattttaaattggcggaaaccgtaaaggcagagttaaatggcaagtggacgtttttcgaaaattgatgaaattgtttttatttatttaaccaacgataaaatgatgtgctcaaaaagtcaagaaaacagattcctttttaaaaaaatttaaattttttgtgttctacttatcccaaattattactcataaaaatcttcaattaattttaaaataagctccacctaagaatcaattaatgtcactatcttttataagtaatcaaaataattgcatccgccattccttctacccaataattattagtataacccactaaatattattatcccctacctataattttggtaccttgttttaatcaatgaaaagaatcgaaaaacaaaaatatgtatagccagagtggaacataaatgaaagtttgaaaaaaatcacatttgttgatgatgataatctttttaactaaagtatcccaatgaaagcttcatatcttaattcttgaacattattcataattcatcatcatcatcatcttttcttcaagtagcttcaacacaagtctattgcccaactactatttatagtttaagcatacgtatttatgtttctttggtttaattgcacaaaaccgaatttggttcggattcaattctattatttcggtattcctaca

SEQ ID NO: 64498 - DNA, 1343 bp, Arabidopsis thaliana landsberg
agtaagacccctgaagataatctacttactatgtctagaaacactaactaaacccattggaaaagcttgtcgtttacatccatattggtagttgaaggtccaatagagtagttatcttctgtttaagaacttactcttttacattgttgtttttccccttggcaattgaaaacaactatatatcttacgtctgccattttatgcttgcagcgaagttagcgatacagaggacgatgattcagattcctgcatctgcacaattatgtagtccaccaatccgcaatcaaccaccattaacatggagtttaacaatgagctcgtccttgtaatctgacttcttttcagccatcagtttttgtgaggacagacaaacgagaacttgagcgattgggcatcacaatcatgtaactgtctgatttttatgctaaggtgacttctgacaagaagccagtccaaacaagggatttagactcataagctatatcagattgtctcatctcagtgacaagagtgagtatatagattattattgctgtcgtgttcaatagaggctgatcttcaaagcgaagatcatcgagtgctgtttgatttgacagtgttttgatagtaaactatgtatctgtttctcgaacatacacacttgttaagttgtaagtataatatgcagcaatttattattttttctcttcttcttatagtacttgatccaaaaaagttgaaagatcacaacttgtatcaagatgtagttgcagaaacaaccagtgggaagaatagccctaaaagggaaaacaaatacaaacctccatccatacacacacaaagaatcagaaatgctacaaagacaaacaaacaaaacacagtttttcttcttcttccttcttgttaaccactgtgaaacctttacctgttctccatgttggtgatatccacaattggggatctcttcgatgaaccattcgcatgaagactctttggtgaggccaaccaattggaaaggctagtattaacgattatctccttcagtagtggttttgcttgatcatccatatcctcttcaacattctctttcattacccgtttaactttcactggccttgctttaaccgctttccactgagcaagattctccactggattcaaaagaggagccacgtcctgctcattctcttcttcttcttcttcttcatcttcatcatcagcatcatcttcatagtcgttttcatcatcggtgtaatagtcttcatcttccaaatcactctctccataacccatttcatcatcttcatcctcaaaactatccacacagttgtggtatctatagtttgaaggatacacagatctac

SEQ ID NO: 64499 - DNA, 1353 bp, Arabidopsis thaliana landsberg
atcaagttatgttcttaatgtcctcataacttcaatgacatcaaatttttgatgttaacgtacaaacattcgataactagatggtaatgtatggcttggttataaatacttgtcttaatcataaaccagaaaaagaaacaatgaggtatagtggtttctcctttttatcttcacacatgtctccgaaacccaatttggttcctctaattatttttcttcaaagattcccaaaccaaatgacaaaccatcttcctaacttagtactagacccccacctcccctccatatatcttttatatatatgctttctctttatatatatgccaaaccttatattcatccacaaaacacacaataagaacaacaagaaaaggtgagtacaaggaaaaacaagtaaaaactatgccgatccgatctaaccccttcttcaatatggatagctcggccttgctctcgctcttgcggcacacgggtacctccatggactctaaaagctcgaagaaatcttctggaagcatcggtggcggggtgctcaaaatgttcaagctcataccaatgttatcatctggttgcaagatggtgaacttgttgagtcgagggcatcgaagacccttacttaaagactacgcaacaacgggaacaatattcgggtttcgcaaaggaagagtctttcttgctatacaagaagatcctcattgcctgccaatgttcatcatcgagctcccgatgctgacttcggcgctgcaaaaggagatggcctcggaaactgttaggattgctttggaaagcgagacaaagacgtcgaggaagaaggtgttggaggagtacgtgtgggggatttactgtaacggacggaaaatcgggtattcgataaggagaaagaacatgagtgaggaggagatgtatgtgattgatgcattgagaggtgtttccatgggggctggagttttaccatgtaagaaccaatatgatcaagagacagaaggagaaatgacttacatgagagctcgattcgatagagtgattggctctaaagactctgaagcattgtatatgatcaaccctgaaggtagtggtctgggcacagagcttagtatttactttctcaggtctcattaactgttgttacacttttattttttcaataataattaatggtgataaaatatttcgttagaaatataatttctatgaaaaataagttaaatctttttttctaaaaggtgaacttttccattgagcattattaatgaaggaaacataaattgtggattagaggttccctatgggccgtaccattaggctatgactatggtcttgaatgttgatcatccttttcatacgtaaccactc

SEQ ID NO: 64500 - DNA, 636 bp, Arabidopsis thaliana landsberg
gaaattttgcccaaatcctgtgattcttccgtgggagctattcgacgtcgttatcttctatttcggatgtaattttacttttgatctttacttagtattgatgtctcggtgttaggtggcagattctatctatttcgaggttatcaatcttagggtttacgaaggttaggtgttgtggaatttggatagaatctttaaaatttgaaagctttgccccttttttctagagattacctccctttttgaattcaatcttaccctttatgtattgcaatttgatgatgattgtggtttccgtgagtagtagattcaagtttcagaaactcattgcttgttggttgagttagaatctgaaagtttcaatctttttagctctgactgtgcattcattattgagatgatatagttttaccatcgattcgattggtgaaacaaaagtttcttagtgattgtgatttgtgatatcttctatgtctatccatatgcttgttatgtagctttcactggaactgagagcttagatttgttgtgtttaggtactcttacgtacaaatttagttttattacgatttgtgagaaagcattaggaaccacttgcctgcattgagcgtgaaaccgatatcaagagatttgatg

SEQ ID NO: 64501 - DNA, 450 bp, Arabidopsis thaliana landsberg
  unsure (1)..(450): unsure at all n locations
accggggcgagtaccgactgtaacatccgcccaataagaaagctacaaaacaaaaattctgtttgtaaacagaaaaactgaataatttacccaactgtgtgcgaaatctttttcgcggagatccttttcctgattttgatccatcctgataatgttgccctgcataagtaatggttcgattcaaaaaatcctcatccaactttaacaatttcactaaacgtctttttgccctttacaaaatgcgcccacacaacactttttttcaaatacccatgtaattgatacccacgccgcggcatatgatccttcctcctgnnnnnnnnnnnnnnnnnnnnnnnnnnnnnnnnnnnnnccttgaacacagcagcaaaatacctgccctcgcccgcaacgagcgacttcaacgccgaaacgatgtctagcaacagcctgaacggaatttccatacgg

SEQ ID NO: 64502 - DNA, 595 bp, Arabidopsis thaliana landsberg
  unsure (1)..(595): unsure at all n locations
atcgagaacccccacgatccgtattcgccccattgttctgcccaccactctgcgtagtccgctgaatgatttttggggttaaaccctcaatcttttcccccttgactagttcaacactcctaaacttctgagtgcattcacttacatcaagggaatatagatggtcaacttcaaactcctgaaccgcatcaatagatacagaggctttagcacaagccactttaatcatccaaggttcactggcccaatagaaactgcccttatctttagaccgagcccaatgcaggggtcgttccttggtatggatgaagaacatcttnnnnnnnnnnnnnnnnnnnnnnnnnnnnnnnnnnnnnnnnntcacctttttgagaatttcaggaccatgaacagagatattgtagatgagagcttcgctgtctacttcaaacttggtatgaacgtctagatttttcagcccatacttggctagcggaccattatgagcaccaactacatgctcatgccaaaaaggatgggcattctcagcgacttaacacccatccgaacgaaacgaatggccccataaaaccttagacgctggattctgggggaa

SEQ ID NO: 64503 - DNA, 498 bp, Arabidopsis thaliana landsberg
catctaataatggcgggaagcaacttacataactggtcagtttgtaatgtatataaatgttgacggcactcgcttagttaacttgtgaaatggttaacgagggaaaagtattataatcgttgcttagggaaaactatttagaacaattccgcattagtcttttggacttatccaacaaataattgatattgacaaattaacactataatctccattagcttattttaaccctacggttggcttctaagaacaactctaatttgaacatttctttgagtgacttttcagtgtcggcgtttcacatggatgtctttatctgcaacctcaaagaaaaagtttcgattataattgttagaagtttttattatactctgaactttttttgtaacttttagatataaaaaaaacatatatatggggcttatcttatacattactaactaaatgcatctgggcctgggcctgattctgggcttagccataactggattattttcc

SEQ ID NO: 64504 - DNA, 592 bp, Arabidopsis thaliana landsberg
gcaaaaaaaaaaagacggcggtgcattcgagagaaagtcacagctgtattatggcatagagggcacattatttacagggggaggggagagtcggccactcggctcagatgatgcgggcaccgcgcaggagggcggcagcgagcagcgaggcggcggcggcggcaccggcgagcttccagcggggcagcgcgccgtcgagcaggtcgtgctggaactgcgtggagacggcgatggtgcgctgaaagtggtccatgcagatgggactctgctcgcccttggcggtggcctgggccaggcggatggtggtgcggatctggcggccgttgaggcggtaggcggcgaggcggtgcacgtctgcgggcgccagggtgcggatggcggccgcgtccagcagcgtctgccacacctgttcgcgactggtcgccttcagcgcggggtacttgagcgccaccgaattgcggctgtggaaggcctcgttgaaacgcttgacgcggctggtggtgaggaagacgatgccctgtgggcactcgagcaggcgcaggaagatgccgaccagggcgttgcgctagatgtccttgtcggtgcggccttc

SEQ ID NO: 64505 - DNA, 179 bp, Arabidopsis thaliana landsberg
cgtccccaggatctgggcggcggtgatggcgccggaattggggccgccgatattcttcatgtctgcgatcttggattttatcatcttgtcgtagaagggatcgagcggcaattgccacacccgctcgccggtgacgcggtccgccgacagcatgcggacggccagtgcgtctattttgg

SEQ ID NO: 64506 - DNA, 129 bp, Arabidopsis thaliana landsberg
tgcccgggtcaaagagcaaagaggcgaagcactcagtatcacactatgtgcggaaaccctttgagctttatcggacggaggaaggaaaacacaggaagagccacagcctagcgggacacaggaagggaa

SEQ ID NO: 64507 - DNA, 1242 bp, Arabidopsis thaliana landsberg
cattgtttaaattactggaaactcagatggatggttcgggaaaacctcagtctttcaatgatccaagcaatattttgcgagctaagaaaattgatatagggcagatacggattctcgaagatgatcttaacttgattacatccgatgtggttaaatttgtatcttcattctcggatgctgagggcataaatcaagcatctggacaccgtcagcctggattggttgacgaggctttgacagaaatgagtggaagccagttgagtttctctagcgtcgtagatgaagtgtttggacttcagaaagtgacatctgctcttatgtcaattgatggacatggtttagttcccaaaaatctctctgctgttaccggccatggaaaagctccaatgttgactagctatcattcagattccttgtataatcgacagggtcccttacaatctagctcttataatatgttatcatctccccctgggaagggttcagctatgaagaagatagccatctctaactctgaccaggagttatccctgatactgtctccatccctctctactgggaatggagtctctgagtcaggctctagactggtcactgaatcctcattgtcacctcttcccctatgtaagaacatttttccatagcctttttttttaccttcatagaactttctcaatattagaattcaaaaatttctgttatttgcagctcaaacagctgatcttgcaacatcatctgctggtcctttgttaaggaaagatcagaagccccggaaacgttcagcttcagatttgctaagattgatcccatccctccaggtagtggaaggtgttgctagtcccaataagagaagaaaaacctctgaactggtacagagtgaattagtgaagagttggagccctgcatcacagaccttatccactgccgtgtcaacatcaacaaaaactataggatgcagctatgggaatctcatagctgaagcaaacaaggggaatgcaccttcaagcgtttttgtttatgctcttctccatgtggtcaggcattcttcgttgtccataaagcatgccaaactaactagtcagatggaggcattggatattcaatatgttgaggaaatgggactaagagatgcattttcagatatatggttcaggcttccatttgctcaaaatgattcctggcaacatatatgcttgcagcttggtagacctggaagcatgtgttgggatgtgaaataaatga

SEQ ID NO: 64508 - DNA, 1693 bp, Arabidopsis thaliana landsberg
gtgttgagttattagttaaaattaaagttgtccaataagtacgagtatcgtgaatccctctgtttgtctttgactctttgtagttggacattgacaatttcatattgtggtaacattaattagttaattaatgtatgagttcgagtttttaacgtactattccttataaattctgcatcaatgttttgtatgtgataaatctatgaatattagattacacaactatacaaccacacaccatgaaaatacaatttgataatgacatttatgtacttcgaaataccaagtactcttaaaactctaaactttttacataaatctagagctatagagtaaacaaatgattctaaattgttgattttagtttattatagaaattccagtatatcaagatgttgtaaatttacttagtgcatgatcacattcagtttctgtggatggtaaaatgatgatacatgacaaaaatttaatatcagtgtgcaagttttgtattgatttgtatacaacatttttttttcaaagcttaaagtggttacttgattaagaatcatctagaaaagcacataacctacagttacatgtcgaatctctaatcaatttcttctatacaaaacattaattacattttctcctctacctaaatattatgacactgacaagagatgtgtggcctgtaacttgggcgcgtcgccatttatttcagttcttataccgaaattgaatttgtttgaatttgacccggtctaatccggtttatctcaactggttcgagactttatcttctcaattactctttcgttttctcttcgcttgtgtatctgcgagcgatttctcgaagcacgaaaatggcgtccgtacgactcttcttcactttaatctccttcgtattccttatatccacctctgtttccgaatccaaagtattggatcctcctcacgtcgctgaatcattcaacgttagcctcatccaggttcgtctctctttccccgtttgaactttccttcatcgtctttgggtagaaacttttcccgagaaacttatgattttccttgtatgcgtgtaaatttatatctatgatgcagaaattggggaatacttgtgcttacacagtgatcatctcgacgagctgttcgtcgactaggtacacgcgcgatcagatcagcgtcgctttcggcgatggctatggtaaccaggttagatttcttcgctgagtgagattttgatttcttcagaacatttgattttgatttggtaacactttggtttatcgattatgcttagggttccaattgaatgtttcattccaaaatacacatctgttttcgcacatatctgattcttcgtaattgagctttgttacaatggactttctcagattttgagctcatctttggtttcattagatttttagtatgttcaggtccagttctagttagctactgaatatgcataacattgtcactcctatggaagaattctagctaccaaaagtttgcaaatgcttagctctggttgatctgaacatttgagttttagagaaatatacacatctttggaatagatgaaagtttcaatggattggttttgattgtaactagtgtctaatctgttcatgcataaatcactaataaactaataaactgtaaggatgttcgctttggttggatggtcaatgaaatttagctgctcgag

SEQ ID NO: 64509 - DNA, 648 bp, Arabidopsis thaliana landsberg
ggaaggatggcgtagaggtaaactaaccttcgggagacaagcagacactggaatcctgatgtcttattagaggcttctaaattggtagaatctggaggggaatgagaaacaccctgtcacttacataatgcagactggcatcagaagccaatataaagccctacatgaagtgagttggaagccgtacagatgttctgtcggaagagaaacttgaaggtgacgcatcaactacactctgcaaaaacatgctctctctgttcctacaaacaacaaaaacaaagaaaatttcaattaactgtgactcaaagattggttagtctcttgtgcaaaatggaaataaggataccttggagaatatgaagaagaagatgatgaagaagtgggagaggaagtagacgaagacgaagaagaagatgaatatgcacaattcatcagagccatcatttttctcgttctttgcaaactctttttaaaagaatcttactcggaaactcaagatcatgttttctagaagaaagaaaaaaaaaagcaaaaaataaagctccaagcctttttgcttcttctcttatgttaatgtgacttcacaacctgaaaagggaatgactttgtaactttccgggaaaagtagccaagtgaaaccgacatttt

SEQ ID NO: 64510 - DNA, 653 bp, Arabidopsis thaliana landsberg
gtgtcattagaaagctaagttaaatcttcattattcgctctagtagaatgaagggtaaaattgtcaagacacaaaaccagaaatgtttaattctgtaaagcattacaaaagttcctaatctctaatttccaacccaacaaatgcctatttttaataataactcctaaaataataggaacaaaaagaagaaagaatgaagagaaatgaaatagaacaaactacaggaaataaaacctttgttacttttaaaaaaatgtaatattaattaattttacaaaatggtttatttacaaaaaaaaacaaatttcatggaatttataagaaatatttcttttatttcgtgaaatttgtatattttcttgtaaataatccattttgttaaataaattaatattacattttttataaaaggaaagaatattgtttctttttgttccttgtcaaatttggcgaaaaatatttttgtgatatgattccaaatgaggtggataaattatgtaaatctcatatatatcaaatattacttccaaatggtataacaaattatgaatgagaaggaattacataaaatattattttaaatagtataagatcataggaaagtaaattattcctaactttctccttcgtagtcttcagtcttcactaataaa

SEQ ID NO: 64511 - DNA, 509 bp, Arabidopsis thaliana landsberg
ccctggagacgtcactatcatcagacttcgagtttggatcattgactcccacatctccatcacaagaccccttctcggaaaattctcccgctgatcatcttttcctcaacggccgtctattaccacactcttttccaacgagcacgataacgacacgttcagtgtcacgtactaccagcgaaaacactttccggagcgatagttggagcagccgaagcagttatagtagcagcccgacatcttacactccaagaacaagcacttgtaatatcttcaagatcacaagttctagtaccggtcatgggaaagagactaatataacatgttttggtactcggtccgaagagattatgtgcctaaggcccgcaacttcttcaaagaaaacaaacacttgcatcagcaaagaatactatcaccaaccatcgttaatattggatctaaagaagagaccaccggtggaaaatggtaaagccgtaaacacgacaaataaggtttcgtatttgccgcaa

SEQ ID NO: 64512 - DNA, 454 bp, Arabidopsis thaliana landsberg
cgctgtgaggccggtgaagactcgctaaattgaaatattttcaattcaggctttctccaacactacaccaagggcgagagaaggcctgtaccaggagcacatacaagagctgcaaaaaccaaaatttctcaagtctcaagctttaatgaaactctgatagcacactggagccacatttcactctaaaactaagcaatgcgcaaaagcaatcagaacacttgttgtataaaaattctccacctattgtagaacattgtgatcctatgatgttctcaagtctcaagctttatgaaactcacacattaaacagtggaagaagcacaatttaggtgagagccgcatttcacatctataagctaacaaacatcaaatcaggaagaaagatgaaatattgaacagtaaaaacagtgaattctcaacctttaaaccagatttcagatcttaaagacaaaga

SEQ ID NO: 64513 - DNA, 1711 bp, Arabidopsis thaliana landsberg
ccttttcttacgcagactgtgtcttggatctctgggagcaggaggtggcggctctggtatcacaaacggtggaatggttgtagagtcttcaccatataaaacgcggactgattgagctatagctgacacagttggaggtagagtgggtggttcaggtgacttcacggtaggaacagtcacaacattccgtaaccaatgaggtagcttgttctctgaagagctaattcccattatgtctctccccatgggattggagggattcaaccctcgatttgggtgaaggaaagatggattggctgatcttcccaagaatacgttgttgcttgaatcaagcatctgaggtaacggcatatctaaaaacaagggtagtttcccgcgcttaatagcatcccgtttttcctctgctctcagtgtgtttaaggaacttaaactatccaaacccaatgaacctaagttgcccattccaagagagttgagtggaaaaggcttctcgttgggaatatttgtcgatgtccctgctcgttcagatggtccagcagaaggctccccgggaagattgtcagtgcacagatttgccatgggaggaaaatgctcacttcgaaatcccaggtgatcagatggttcaaataacggaaggggagatgctagatcgccgaatccgagttttatgtctgtgagatgggattggaaccttggaggagtggcatatttaccatgtaaggcccgattcattattccttggggaagaccaggaaacaaggaagatttggtggacttatcagtcctgcttgatttagatggcagagatgaaagactatccaagaatttacgttgctcttcttcccacctagctgccaagtactctggtgttttaaatttcgaaaatttgagccttggatctctgagaattgtctcccagtttccatacccatgtctgcgaatcccaatccagagagaatctagttcatcctcggaccatgcatctactctttgttttctttttctggacgtgcccaattccagagccagttcttagcattatattcttcagcacctttcgatggttctctgggatagatgaaagagctgatggaaactgatcctaacccaaaggcggtaagtccttctcttgttgggggaagacaggtggatccataggagggattttcatattgggtagaaacggcattggtgttccgccaaataggtcttgcatagaatgaccagtaccttcaaatcttttcctcatcgaaagattggccattatgtcttgatgcgaagttcccattgttctcggctgaaatggaaatcgaggaagcagcttatcatcaaatggaaggttaagcaacggaaacttctcctggaaatcagcaaaagcagcaccagaacttcgaggacgctcaaaatcccctgacggaggaaactacaatgtcacaagattaaagcccatatataagtaatatgtttctgttttaatatgtgtatggaaagtagatgtgtctgatgaaattgcatttagaggagggtggggaatacctgacgatgtggaagccaaccatccatattactaagaggctgctgaaaaggttcttcctttatgttctgtggttttagtttacccataggaggttcctggtcatttgcttccctctcaaccaagttcgatgtttggggtagattcaaaggaaaaacccgtcctgttatgggtctg

SEQ ID NO: 64514 - DNA, 256 bp, Arabidopsis thaliana landsberg
gttgttcatattatgaattaattagggttttcagaaatatagattattgaatattgagccttattctacgttggaactcaaagtgtcatgaaacggaaacccacaaaccatttgacatataatgtatatgttaatctattcaaatggattttcatagttaagaacataaatataaatcatgtagtatatatatgagaaatagattagtgtgaatatgattttttttggcactttctatctgatacttattactttg

SEQ ID NO: 64515 - DNA, 185 bp, Arabidopsis thaliana landsberg
gagattttatgtggatcattcgtataagatcaatttgattaactgcatttgtctttgagattttatgttagggcttcataaaatcatcttaacctctggaggtaagaaagtgagtgcctgaccacaagaattatcacatcgtctctttaagaaatttctattcaacttttaaaccttggatcgca

SEQ ID NO: 64516 - DNA, 1693 bp, Arabidopsis thaliana landsberg
ctcttcctcttctccattttctcgagatttagcttttctcttcgtgatcgggaacgtgttgatcagattctagcgtggattcgtatcccaggtaagattcgcagctgaaatcgaatttgtttctcgatattcttttctctctagatctatttccagacgtagtgtttgattaatttttgtatacgccgatagtctcgtcatcagttgaatttttcatgtaattcgaattatgattctcagatctttcgctgaaggagtgatgattgaattgttcacattttgttctcctgacttgaattctatgttcgccgttgggtccactagcttctttgtgtgtactgaactgcgtaatatcgcggtctctagctcgtgtatgtgtttaactcgtcttggggttttggacttttgctttcagctacagagagctttgattggaatgtgctgaggaacattcatttcggctctaataagccaatcggagtgagttcgccagcatggggattttcaatggtttgcctgtaccctcggataaaactgtaagttcactttcctcactcgtagactcctacttgagttggaaaacctgaagtttgggcttatgaggaattgtgttgttctatggtgttctttcatccccttggggatttatagggacatttaagtataacggttctttttcttatatctcttcatttcggggttggagttaattgtaagaagttgtacgatggctagacaagaaattgactgaattaccaccactcttgatttggttatgtatttggttttggagtacatgtgtgtgtatatgtgcctgagtgttgatggttattgcagtaccttagggaggagctggcaagaatagatgagagctgggctgctgcacgatttgactctttaccacatgttgttcatattttgacatcaaaagaccgtgaagctgacattcatatattaaaggaacaaagtgatgttgtcgaggaggttgttgatgaagttgtccatgcttatcatggtggtttcaacaaggccattcaaaactactcacaggtttctaatatctgttagctcttcctttttattggaatagttcgttctgttattctaaagtagcatcctctgttaccgcttattgacttccatattgcacgcttcatttgccaaagatacaacaaatctaatattgatactaactatggctgcttctatggtttctgcatgtagaattttctttttggaatagtaccctctgttgtaatttatctactaaaatttcatttgtggaacaccttggttttgattatctctcttcttttgctctgctttcaatgtattcctcatcagatcttgcgattattcagtgagtccactgaaaagataggcgacttgaagcacgatttagcagaagcgaaacagagcttgggtgcacgcaataaacaattacatcagttgtggtaccgttctgttacattgcggcacatcatctcacttttggatcaaatcgagggcattgccaaggttggttggattagctgtaacatttctttgtttatttttgagtttacagtgcttgctatgtatctgcgctgctatcaagtttcatacttcattcatcatctctgtatctctgatgttacttttgttgatatgctcccgatatagtacttactttttttattttggctaccttaaa

SEQ ID NO: 64517 - DNA, 1128 bp, Arabidopsis thaliana landsberg
  unsure (1)..(1128): unsure at all n locations
tctcttcatgttatttgttgatgttttgaatccgcagaaatatcgagccgtctcaatgttgtttttatgccaaggtgtggttatcctgcggtgaatgcttcttactatgacttgagctttcattcgataagttctaacaaagattgtaagctttacaagaatttgaggactatcaagtgctacaactgtgattcttgcaagtagagccatcaacttgcccccttaaagctcttttgttacaacaattgtgtcattcattttcagatgagactaactattcttttcatttgattaataaccgcagagctggagttgctcagtacatgaaaaccgagtggcgacttgttgcgatcttcaatgtggtcctgtttgttgtcttggtaagctctcttcttagcacgagatttgactctgaacaaagttttggccttttaaacggtttagtgcaaatttccaacataacctttaaagattgccaaaccacaacagtaccaaaacagttttttaaaaaaaaaatttgtggatcttgaaatattcttgtgagaactgattcatttgttttcttttcagtcaatggtttactttgttggatgctgtgcgagaagaaatgctgctagttaccgatccatagcttagaaaccgaagcccgggttaaaggggacacttcaccggattctcccaagctacagatgaatcacattctcttccatgttggtgaatgcttccaagagagacacaagagcaacaacttctcatcgttctttttactctgtaatctatatgttgttgaaacagagcaaaaatttgatcagatttttcacacagaaaacatatttgacatcaaaatctacactttttatcttttaagagtaaaaatttagtgagctaatgcataacagaaattaaaaatttatgattccattctttgcaatttacgggttcaattaattacttaatccttattctcatgaaannnnnnnnnnnnnnnnnnnnnnnnttgtggttaaattttggttatcaacncggtttcaattgcataccgcgattttttatatctcagaccggatatatcagtgaaagcgtttacaattactgccttaaaccctaaaacctcagaaagaaaaaaaa

SEQ ID NO: 64518 - DNA, 1082 bp, Arabidopsis thaliana landsberg
tggttctgtgtctcatgaagattcttagtgaaattttcactgctttagttgtaatgatgtgcaagtttctaccttttaatgttgattgtttctgcaactttatagtaatttatgtgtattactacttttggtgaagctattggctgtggcagtgataatatttggggtgtggatgagtacacacaatgatggttgcagaaggtcacttacatttccagttatagctcttggtggtttcatcttcttgatgtgagtttacactactttcacaattggcataacccaacaatggttcttgcttatgtttcttttttttttgtgtgtgtgtttacttattgttcatgaaatgtctatgatctgatgcttttcagatccataatcggatttcttggcgcgtgcaagagaagtgtggcgcttctttggattgtatccttcacttgccatgttctgttttctgtttcttttgttggaaacttttgaattttaatcttccttgacatgattgattttcctttgaagtatcttgccgtgctcctgatcgttttgatcgcgattcttgtctttaccgtactggcgtaagcctcatcttcctaatggttaatcgtcaaaactcagctgttgaatcattgaagatctcagcttttgttttacaggttcattgtaacaaacaatggttctggccatactaaccctggtttaaggtaactataacttatttctctgcggttacgtaccagttttcatgtgtaaattcttgaaactttctgcataaaatcaggtacaaggagtataagctgaatgattacagctcatggtttctaaaacaggtactataatttacagtggcactgatatagaatagaaaaaacttgctttcaatttctctttttctaattcttgatgtttcagcttaacaacaccagtaactggataagactaaagagttgtcttgttaaatccgagcaatgtcggaagctttccaagaaatacaaggtctattatctttccaccaacaaaaagatgccttatattattgaatattagacactcatgatctctgaaatgatctcagaccatcaaac

SEQ ID NO: 64519 - DNA, 746 bp, Arabidopsis thaliana landsberg
aacccttgctctacctggattttcaccaagttaaaatttcctgctgccacaaaaaactgcctagctacctctgcggaatttaggttgtctaagcaaactaaactttcttctatctaattttgtcccgctggtggtgaggctactatgacataaccaaacaatgaaagaatatgctctatgcgattccctctgtctattatcttctctccaatcttagtttcagtgatttgaattgttgttcatgtgacgatgtattctcctgcacctgtagagctgaattagcaagtcctaaagggttaggttagtaactatatatttttgtcaattttcatattcaccatttaaagaaaattcgtagtttttatgaatatgacaggctttcctaggccttttccctttggtcgggctcataattgtgttgatattattacaaaacttggattttttattcattctacgtctgaagggtcaagggcatgtttaaaatatgtttaaaataatatttatttgtctgcgtccttctaaagatggcttcaaaattcaaatagaagaaaaatccaatgcaagtaggtgtgctatctagtcctacacacattttaaggaatttataaatgttagtcatacgcattattattgttccagggtacctccatgcagcagttgcgttgtctatctaataaattgagatcatataagttaaaatattgtgtcagaatattttgaaaatcacgttgaagctttatggt

SEQ ID NO: 64520 - DNA, 455 bp, Arabidopsis thaliana landsberg
  unsure (1)..(455): unsure at all n locations
gcaggtgcaattggtgaaagtaacatcgcttcaggagtcaattcagttgcaattggtgaaagtaatgcggggaggggaaataaatccgtttccttgggtacgtctgccaatgcaacgggacttggctcagtttcaatcggacataacattagttcggcagcaagctattgcacaacgtttggcatttacaataacaatggcgatgttcctaacggaagtaacacggaccggcnnnnnnnnnnnnnnnnnnnnnnnnnnnnnnnnnnnnnnnnnnnnatcactattttgaaaaatggcaatattggtgtgggcagtaacgctgcttcacccgaatatcctttggacattgacggaagaatgcgtttgcgacataatggaaatgtagctggtttatggatgaacaacgcagccaacaatccttctactttcatcggtaatcaaaatgacaacaccat

SEQ ID NO: 64521 - DNA, 582 bp, Arabidopsis thaliana landsberg
ctgccaagagccgctcagggcaaagccgtcatgcacggcgcgtacaggcttattacctaccttcctgaacataaaatgagtttggtatgcgcctacttatgtatggcgatgagacactaaagctgaccgttatgctgaagacaagaccgggccgagtcactgacatacatgccggcgtagtgaactgcaaggtcgggcgcataaacgtcattgcaagaaccgttcgcgcaacagggatgccgaccagctaatatttcaggcggtgcgcatagtcatacatggggcctcaaaccggcacaccaagtttctggaaaccaaaacgggcgttgtcctgaaacagcgacagcgcaccaggtttcactacgttcatgctcatagcccgccctgcttcaactggacgaattcgcgacgcgaaatagccgtaaactgcacgcggtcgccgggcaaaagaaatgtatacggcgttttgtcaggatcaaacaagggatgaggcatggcgccaatgacatgccagccccccgggctggtatttgggtaaacgacgctttgccgattggcaatggctaccgagccaccgggcac

SEQ ID NO: 64522 - DNA, 1974 bp, Arabidopsis thaliana landsberg
cataaaggtcttcaagtttattcctgggaagtttaagctgggaaacttgaggtagtaccgagtcccatcttcctctattaatatcagaaataaacgtctcgacgctgtctactgtattcaaggaaacctgacactcgctttgtaatgtctggaatgtctgattcaaggaattttctttgcagaactgaagcataatctttattacactgagacattcaacacaatagagagctattagggatgaagatctacacaaagctgacatatagcatcaaaacgttctccatccaatattactaacaaaatggctaataatactgtcaatggtttcaatccaagccgagaattaacaagagttcaaatttatacaaattgggtttttcctcgagacgcattgcaaagaatcaaaacactctaacgatgatctccctcaaattttcgtatacgacgttaatttaaacgaagaatagctacggaggaatctagatattcagaagcaattagctttagaagaaccaagctaaaacaaattatgggtagatttaaaaaccacaactttagtatggaggatataaaaaaaccaacattcaagatgttttctccaaacatgtaacctaagatccatctgagcattcgtaaacgatggttcttggagcacaattcatatcagtgacactaaacgaaaactagggtttgtaagagaaagcgaaatcttactctcgagcttcgatttcgagcgccatactcagtcgtagtgggttttcgccggagacgctaagaggtaaaaatgcagcagaaaacacacgcgaaggagtttcaatttggttttaattccaggacaatgcctcaaatatcaaatattatgggtcaaaattaaactttcagaaactccgagtgttattttgtaaatttaaaattgcaaaacattgcttacataccatttagctttagcttcacaccctttttttttacaacttttagagaaagacaaagacaacaataaacacattgacactgtggtcttcaagagttctccactggttcgttccactcctctgttcttcaactctagagctccatcatcatcttcattgctcactactattactttcttgagatcaataactgatatactttgactgaagctgagagactctttgttccgaatggaaggaatttgctggctgctctgtttcatatcttccatgttgatattcatcaccagtaactgacaagattccaaattggaatcaattccagaacatctggctcttttcatgggctttgatgctatacaattgaaaataagagcaagcaagacaggagaaagatgttcaatccagagaccaaaaccaacagaagaccaacccgatgatgcaaatcaatctattgttgtaaggagcgtatgctaattcctctaccaaaaccatagccaaaggtgctcgcttttatagatttgaccctgtggaacctttttttttctttctataacagtttaagatacacatttctttaccagagatcaatctgaggcttaagtatgcatatttcctttggcttctgtgaaactgtacagtccatttccactaaatcctatattctacaatatttcttacatacatctgtggctacacttcaaaatgcctcgtcttcttcagaattttcctcttcatcgtcttcttcttcttctccagatcttgaactacactccctttcagcttcaaaagcaatgctcatctctttcttcaccacatcagccaagtcctgtctgtttgcactcacataagcatctctaactgctttaaacaacgattggtttggttcaagctccccaaacgtcagccggctatgtaccctctttacaccttccaccattcccgttttcccgtatatcccaacaaggtaggcttgcgtgacaatatctggttctagacctatatcctgcaatctgaatgtatgcctttagggccatgt

SEQ ID NO: 64523 - DNA, 1540 bp, Arabidopsis thaliana landsberg
agaaaaatctacgaagtctctgtgccgctttttaaggcttctcgtcttgtacaacttttttttaaaaaaaatgcgcaagtttcttttctgtaacgtgacatattattttcgttaaccctaataattttggtgttttctttattttgttatataacatgtatagattttggacctaaactttaccacttaaaagagtgtctacaatgataaaaataatagatcataataagtagatgatagaattcaatcttaggtctaaaatttcgtaataaacctttaaattttaatacacgatatattataatatattattatatattataatatattattatatattataatatattattatatattataatatattattatatatacacccaaaaccggctcaatagaactggaattttggtacaaattttaaaaattagtctttttcagtactaattttgtttatacacaaccatttacttacatatatataaacaataaaataatatatatatatatatatatatatttatataagaaaaaggatatataaaaatttggaccctttaacaacataattacaaaaaaataagagtatttaggataaattgttttttattaactttttagcaaggaaaaacaattcaataatttctattcttcatgcatcatatattttatgatcgactgaacaatatcaccatcaaccactacatggttgcaaccaaagagagagcaaccatgtagcattcgactaccaacaaacaatatcaccatcaaccactatatggttggaaccaaagaaagagtaaccatgtagcaaaccaacagtatcaccatcaatcactacatggttgcaaccaaaaaaataataaccatataacattcgactaccaaccaaccaacaatatcaccattaatcattacatggttgcaacacaaaaaagaacaatcatgtagtattttgccatcaaataaaaagacttttcacgaattgttaataaaatatattatatttattttagacttgcaaaagatatcagtcactaattgaaaataatcattttcgcatacaagaatgtcattcttcttacttctttgcatgcatcaacttgtcaacttcattcaactatatcctaaattgtttgaatctacaaaatatattttcaattattaaaaataattaaaattacgccaacattacaaaatatttgacaataattaggctcttagaaaaatttattagaggaaaacaaaatctataaaatcctgacgatttcacgtttcataatgaagatttcaaaatattattttgtacaccactagtacgtttgattttttgaacaggaggtcgcatattggtcgccacatatactataatgttttggccattttgattagttaattaggaaatatattaacggcgttatatatttaatttggtactagttttaccatttacttgctttttagtccctatcccatctattttactatataatctaaaaattaaagaacattcttcttgtaaactataacgcccgtt

SEQ ID NO: 64524 - DNA, 565 bp, Arabidopsis thaliana landsberg
ggcccgagaggatgatacgctcccctggatgctggagactggttcccatactcgtagtgcaggaagaggtgggcattgtccagcttgaggccaaagcctgagacttccgcggcgaagccgtgtagaatgccatcggcgccgaaccttggttgcgccagtgtgccgccaagccggaagctgccatcgagcttgcctttcacgtcggcgacggcatccgtgagcagttcgacgaaaccgagccggttgaggtggatggcgatctggccggccagggcctgctgtttagacacctgcgtttatttggccgtccagacggtcattttcatccagcttctcctgcgcctggatctgctgcgaacccggcgccagcgtggcgttcacggcgagggcgccagaaagtcaacagaacacgggtggggtggacggtatacgtgacgctgccgtgcgcggaggtgatgctggcgttgccgctgagtacgccagctgcgctgcggcgcaccttgccgttgccgtccaggctgccatcggtgcgcatcggcacgttggcgacgcctacggcattcac

SEQ ID NO: 64525 - DNA, 1753 bp, Arabidopsis thaliana landsberg
gcaattgcgagactttgttgtcggtttgagctatttcgattctgttgtcgaaatttggaaactttttttgattttctctatagacgtatctttggggctgaagaaagggattttgttatctgaatagtttttgaagctcaattttgttacggtgaaattctaacaagttggttcctttttgttgatttgttttagggtttttgggtatagaggacgaggaatgttttattcgcagtttatattagctaagaaaggccctcttgggacaatatggattgctgcccatttggagaggaagcttcgaaagaatcaggtcgctgatactgatattggagtctccgttggtgagtattttgctaccttttgcttttgtgtacaatacctctgattcaggtctcactactttgagctcattagggttagcagaagctaaagtttccttctttttcagtggttatgtggctaaacaagttcatctaaaatatttcctaatataactaatttctttttctgagcagattctattctctttccggaagctccgattgcattgcgattgtctagtcatcttctgcttggtgttgtgcgtatatattcgagaaaggtgaattacctcttcgatgattgcagtgaggcattgcttaaggtaaagcaagcttttcgctctgctgctgttgacctaccccctgaagaatctacagcgccgtatcactctattacgttgccagagacatttgatcttgatgactttgagcttccagacaatgagatctttcaggggttggtttctttatgttttaacattcaaactcgtattccactcttactccaatttgcataatttgtttatttgttgctccttgttttcctgtctagcagtaattacgttgatcatcatgttagtacaaaagagcagatcacccttcaggataccatggatggcgttgtatactcaacgtcacaatttggattagatggtcagtggttgtttcatatttacttgtctttagtttgtagatagctatgccgtagataagcaaagtcattttaaaacttttgcagagcgatttggtgatggcgacacttctcaagctgctttggatcttgatgaggtatttttgtgtttataatagatattttctactttgttcaagtcattttggaacaagaaataggatagccatatagaaagctgaatatgaagaggttatctgtagatttcatttgcttttagattttgggttctttctctcctctgtttgggtagacgcagcagctggaagctctgattggtatccagttgcggagtcctagaccgtgaaaagcttgtaatttgaagtgttaattgtagggtcaggataatgttgatgttttctttttctagtgaagctttgcatatttgcaatcagaacttctctcttattattttggatgtgatcttttatcattcctctcttgttgtgcaggcagtattccaggacaaggatgttattggatccgacgatgagggagttccggggtcagtttttgttcattatctatggctatattctttgtagcatgatggttctatgcttccctatggttccctatggttcttctcaaattaactatcgaagtgtcagcttgatcttcttttctggagctgttcagtaccttttctattttttcataccgctacttcagattgttatcatagattttaaatgcttcacatgagggaagatctcgagttgactgaatgataaaaagc

SEQ ID NO: 64526 - DNA, 590 bp, Arabidopsis thaliana landsberg
tatcaaaaaaataaaaaaatatgtagtagaggtcatctgaagaaggtctcccgttatcaacgataatctagaaaatatcattcggagtttctactaccattaaaaattaataacttcaaatcaaaaccaaaagatttgtaagtatcataaaaaaatatccattagatcaaggataaaggatatatacaatatttatcattgtataaaaggtctcgtgcataaataggaagacgtgaccttaggttttggtgagcctcaaggaaagactgttgaacattttgagagaaagagagtgatttttaaattggtgttaatctaagtgtttcaagttcacttaagacttgttgttagatttttctgttgtttgtaaaatcttttagagtctttacaagtttagctaggtatgtttaggctcatttgaaaaatttagaacgttttttgagcaaactgagaagttgtgctgaaaaaaacaactcggagaccatatttatagatgttgtcgatcaacaccattcatagatttcggcgacaccggtcgtgacagaagcttagacaatttgaagtttgaagaatgcaatatgcttaaattt

SEQ ID NO: 64527 - DNA, 2577 bp, Arabidopsis thaliana landsberg
gttgaactgtctccgcctggtatgaagcctactgcagtatcttcagctggtccagatatgcatgctaaacctgaaattactgatctacaggctttgaatcatatggttggtacatgcagtgagtttcctgcatcagaacagctttctccacttggcgagaagagtgaagaagcatcaatggaaaatgatgaatatatgaaaacacccacggacagagatacacctgctcaaatacaagatgctgaagccttgggtctctttaagtggtttgcctcatctcaggctgcagaggacataaactcagatgatgagattctccgggaaactatccttagtcctcttttgcctttagcgtctattaacaaggttcttgaaatggctagtacagattatgtgagccaatcccaaaaggaatgtcaagacattcttgattctcaggaaaatcttccagactttgggagttcgactaagagagctttacctagtaatcctgatagccagaatcttagaacttcatccgacaaacaatctcttgaaatagaagtcgctagtgatgttccagatagctccacttcaaatggagcaagcgaaaattcattccggagatacagaaagagtgatttacatacgagtgaagtaatggagtataagaacaggagcttctctaagagcaacaagcctagcaactcagtatggggacctttaccttttacactgaccaaaaatcttcagaaggactttgactgtacaaatgctagtgataaacttggtttaacaaagattagttcttaccccatgaatgagatgacagacaattatattgttccagtcaaagaacatcaagcagatgtttgtaatacaattgacagaaacgttttggctggatgttctctgcgggacttgatgagaaaaaaacggttatgccatggagaatcgcctgtttcacagcatatgaagtctaggaaggttagagattcccgacacggggaaaaaaatgagtgcaccttgagatgtgaggccaaaaaacaaggtcctgctctttctgcagaatttagcgaatttgtttgtggcgatactccaaatttatctcctatagatgctggaaattgcgagtgtaatatatccactgagtcatctgaacttcattctgttgatagatgttcagctaaagagacagcaagtcaaaacagtgatgaagttttaaggaatttgtcatctaccactgttccatttggtaaggatccacaaactgtggaatcaggaacactagtgtctagcaatatacatgttgggattgaaatagatagtgtccaaaaatcggggagggagcaagagtcaactgccaatgaaactgatgagacgggaagattaatatgcctaaccttaagcaagaagcctccttctctcgattgcctaagtgctggactgcaggattctgcacattctcatgaaattcatgccagggaaaaacagcatgatgaatatggtacctttacccatcttgttctggttctagtttctgccacttctacagttaatgcaaatgcggttgaaatataaatttataaaactgaagttaggtcaacttaagttcttgcagaacttctctctggctgtgctctttatttatttttacttcgacctgagatacttctgacatcctgtttgttttttgttctcttggaagagggaaattccaacgacatcccgttttttcccttggaggacaacaaggaggaaaagaaacactttttccaaggaacttcccttggtattcccttgcatcatctcaatgacggctccaatctttacctactgacccctgccttttcacccccttctgtggattctgttttacaatggatatcgaatgacaaaggtattgtgtagagttagtcggaagtcactggactgcctaatttaattcaatttaacatattctcaaagtttcaatatacatgcttaaagcgttttcccttacgaaaatggtactgtccctgattaagatattcatttcattaaaagtaagtgaaaatgataacttttgttttaaacttttgaatttttccacgtccaggagactctaatattgattcagaaaaacaaccattacgagataatcataatgatcgtggagcaagtttcactgatcttgcttctgcatctaatgtggtgtctgtgtctgagcacgtggagcagcataataacctttttgtgaattcagaatcaaatgcttatacagagtcggagatagatctgaaacccaaaggaacgtttcttaatcttaacttgcaggccagtgtttcccaagagctgtctcagatttcaggccctgatgggaaatctgggcccactcccttaagtcaaatgggattccgagatcctgcgagcatgggtgctgggcaacagcttacaattctgagtatagaggtgctttaacttaaccctcgtctttgtgaagctacagcttcgattactaagagtatttaaatggtctgtgcacgtattgattagtaatggacacttggaatggtttacaaacagtggacttaagaagtcaaaaatgtgcagctcgtt

SEQ ID NO: 64528 - DNA, 1515 bp, Arabidopsis thaliana landsberg
tgttagtacagaagagagataaagaaagaggaaaaaaaacgtgggaattataactacaaacagtgcgtagatcacattcacggggcaaataaatcagagaaaagatttggtgttatccaccgacttgggattgctgtggaggaggagacgaagaaggagaaggaggcttaggaatataaggattgagaggagttccatgctcaataggacctggttttatcgaagcttttgttgtcggagttggatccactggaaaattgtaatcctccaaccccactttcatttctgtgtgtgttttcaatatgtaatcattaatgtatacaatgaaaaacatgaaagagagtaacaaggaggattgatttgattaccagaagaagaagctagtagtgagaagcttaggattattacaaccaaaaggaagacaaagcttgacgtcttcatcttcttctctagagattgaggaagaggaggaaacaatgaagaaaggtttcttaaagacagagagacaaagagagagagagcaaattgtcaaatgatgtgtgttaatattgggaaataaggccatgtggggttttggatctctgtcttgaatgtgatgttgtgggttaaaatcgagatcatagctattgctctctctctatctctgataatctctgtacaagagaggaaagcatctcaaacagctcaaagctcattcattggttacactttaatgctctccactattatttttcttgtaagccacgtgtcctgaattctctattttccattagcagtgtcttctcgtcgatgtatctatttgatcaccattgaatcattgatagaaacgagaatgagaaaatggaagaaaaaataacaaaagataatgtggatggagtggagagacaaatatggtgaagaagatacagaggttgaagcggcgccttttctataaatactagatagtatgtggttgttgactatttatttcttgggcttttaatgttttttttttaattttttaccttatgtttttgaattacgcaataaatagtgtgtaagagaagagtagtaaattagtagtagtataattaaccgtctaattgagtttcatagcagtcacgtatgaactggtagtaacagaaacgatatagtaaacacacaataatgtattgatgttattgcaaaaacaaaagttagttagttccaatttttaattattttcccccatttaaataattaaatgccaacgaaaaatatagcatttattaatgtgcttttttgtctttagatcgatctctaagcgatattgttgtcttcaaatactaaacaccattaggcttaatgtaagttttgttgccttagattttttttttttttattcagttagtagtttttacttaattcgtatttgttaagaatggtcacatccatacttccagatgattttgatcttcattttggtttcggggtttggggaccttatattgggggttatgatgagtttgtgtaggtatcttttttttttttttttgg

SEQ ID NO: 64529 - DNA, 595 bp, Arabidopsis thaliana landsberg
  unsure (1)..(595): unsure at all n locations
ttattatatacacacattcactcatgtattcaataattgattctcaaaccattagctatgtacgataaatatgcttgtttcttcatacaacattattgtttatataggtttcactaaaaaaaaacatgcagacggaccagatattaaaatattgcaacaaaatttttcatactctaaatttacaattttgctcatcttatctaaagctataacacataacttaaagcaatatgatgaattcattgatatgtataccgtaaatggctaaaccgcgtgaaatatcttagcaggtaaaaaataaagggaatttaaatcatatttatatctttatattttaatcaaatctaaaacatcttctaagactattagaattgataaacaaaaaatatagttttattaatatatcccaaaactatacatgaaattgctattcatgtatagactgactcaaaacaaaatttagtaatgtttttttttttgtaaaactctacgttttaatttaaagactaaattcaactttgcaaaaatatattcgntactatttttatttatttttcgtggttaacgtatgacaactagttgtaatcaatttact

SEQ ID NO: 64530 - DNA, 515 bp, Arabidopsis thaliana landsberg
  unsure (1)..(515): unsure at all n locations
tggctcgccctannnnnnnnnnnnnnnnnnnnnnnnnnnnnnnnnnnnnnnnnnnnnnnnnnnnnnnnnnnnnnnnnnnnnnnnnnnnnnnnnnnnnnnnnnnnnnnnnnnnnnnnnnnnnnnnnnnnnnnnnnnnnnnnnnnnnnnnnnnnnnnnnnnnnnnnnnnnnnnnnnnnnnnnnnnnnnnnnnnnnnnnnnnnnnnnnnnnnnnnnnnnnnnnnnnnnnnnnnnnnnnnnnnnnnnnnnnnnnnnnnnnnnnnnnnnnnnnnnnnnnnnnnnnnnnnnnnnnnnnnnnnnnnnnnnnnnnnnnnnnnnnnnnnnnnnnnnnnnnnnnnnnnnnnnnnnnnnnncctcattctaattagtataagagaaagaannnnnnnnnnnnnnnnnnnnnnnnnnnnnnnncttaaaccatgtgaatactatgccattgaaagaggacgcaaaccctcacgctctataacacgaaaatatgagtttcacgcgtataccatttaacccccaaagaa

SEQ ID NO: 64531 - DNA, 153 bp, Arabidopsis thaliana landsberg
ggctgtgggactgcggctcatactaaaacacgtacgcggcgagagcccagtcttcctcccactggtgacgagcttacgggacaaggttctaatctacttcccccatgagggctctggtgccccttccctgacggtgctactgtgactagccag

SEQ ID NO: 64532 - DNA, 368 bp, Arabidopsis thaliana landsberg
ctttccgaaacatccggagttcatctaagaagatcttcgcgcggctcggcgtgcgcagccgcagcgtgttctgcgcgcggctgctcggcgtcacgccgcacgcctgaggggcgtgccgggcacgactacccgatgcgggtggaggagccgggccgtccgactgactagcctggggtcaccataagaaccacaggagatcttgcgagggcaggctacatggacgacgcccagtttgagcgaagccgtttgtttataggcggtgagtggggtaaaccttattgctagagcaccttaaagcttgtctacgcatacaccgtaacggcgctcgggagcgcgcccgaaggacaaaaggtcgacatcaaccgtgc

SEQ ID NO: 64533 - DNA, 568 bp, Arabidopsis thaliana landsberg
  unsure (1)..(568): unsure at all n locations
tattactactgatctccattatctatctacgtataagcangtgcgtcgccgaacattactagangaagcngaagnngtttgagagagagcaaaagaggcacgacccataacnactancngaaacaaccaatagtaaaaaaaaggtcgagagagagaaaaataaaaacctctctttaattatttgggggtaaaaatccttggattgtagaagaatcattacctctccttgcgcttctcgagaaaacgttgcagtgactttctccttgcgatgggaagatctgcatacacacgcataaaccagtttcttatcagaaattaaacaacatgtttatactgctattaataacgcatattaatacgcatagacataaaccatagtctttaactctttgatatctaattccaaactaattagcaaccaattcctctctaacaacaaactcttcttagatctctacatgcaataatatgtaactaagattctagaagaatccagcactaagagattggtatttttatatactaacctccttctagattctggccaaagagctttgggcttagagtg

SEQ ID NO: 64534 - DNA, 126 bp, Arabidopsis thaliana landsberg
cgcagctgccttttatttttggggggggggaggggaaaaaagcaccttgccaactatccacttcaatctcttttaatacgcatttggtattaccaaacctattcttacaccttcttaaatcaaact

SEQ ID NO: 64535 - DNA, 2053 bp, Arabidopsis thaliana landsberg
  unsure (1)..(2053): unsure at all n locations
tatctataagcaaaacatctcgtctctgccacggaacagcaacacattcctcttcaagaatcctaagacaatcatggactatatccgcaggtaaaggctttccatccccaaaagtcacagcctttcttggatcatttcgcttatcctcccatcccgtataagcagctaccatgctgttaaaccatactttacggcttctcgactcgtcatatttgatagccggaatcggacccattaccgtcttggctccaccatcctctgtccattccagtttcattcccaaatcaaccgccctatcaaagcaagtttcatcaatgttatcaagaagccccctcaacgaacatacactgtgagaatctacaagtgatgatgaagtacctttgctcagcaaggttcttgtcatgggttaagaatgtagatttccaaccacgtccaatgggagatgaaggatcatcatcttcacctaaaaccctaacataaagcaaaccatgttcctctaatctctgaacaaactctggatgtttatctttcattctctcatacacaacatgactcaacacaattggagtctctccaccacacttaggctcaatctcacagtaaaagaacaactttgatggaaactcacgaacctaacaaacaccatcaatcaaattcaataaagctcaaaactttagatgtaaaaaatcaaattcacataaacccaaatctgattttgatcaatacctgagccatctcgtggtgaaaaggaatcttctgatcaggaggagattcattagcagtgaagacacgaccgacgacgctagtgcgaggagcagcgcctccgacgtaaggaagctcatcgaaaccgaaagcttcaacgacgtcgttgaaatcatcggcggaattcaccggaaaacctctgaatagcactgctccggattcgtgcaagagagaatcgagatagtgtttctgagttttgatagtttgagtgaatagtgggagagacagagcaggaattggaatcgaagcagacggtggtgatatcaccgccgggaatggtttggattcgtagtgcttttgctgtgggattcgagtttccaccaacaacagttccgccattttttttctgatgttttctcaaattattttctaatcttagtattttcacaatctctttgatgtcactatcacacaacatactcatgatgttatggtaagttttttttataccagactcatgatttttttttaccatgaaccactataaattggttttgatgtggaacactctctatgatatgttagaatatttattcatgcatgtttgtgggaaaattaaagaccaattaaaagtgtaacacaataacacatcattctaaacatgtatttgtgtataaaaggtatattctaatcactttggccaaagcaccatcctaacaacggatggatttaagcggctagctacacttttatttggtcaagacaagtacgaatacacaacactacaacaacataagtagatattgaaccctaagagtaattaagaggcttaactaaagtttacagngaagctgatttttgagcttaattaacatttaacaacaacggcaacaagttcgcgtggaggtaattgagcctacacagcagcggcaagcaggacatgctactttatcacctccagtaacgtgagaggctacaaaataatcattaaaaaatgtttacaaataagataaattaatattgaaaatgctctcattaatgttctgattatttagtgatgaggtttgtcaatgttcttgcctgctggttcggtgggactttcagtagcatgaacatcttcatatgcgaatagagatacataaaaaaactctaaattgataggtaaattctcaaattaaatcagttaactaagcagtttacttacctgcgagacaagagataaaacttgtcgtagataaaaccatggttgtgatgaaaatgataagaatcattttcttcatagagctagtcataatgagtcttgagtatggtttttggtttctatcagcttatatgtctaagtgtgtattta

SEQ ID NO: 64536 - DNA, 435 bp, Arabidopsis thaliana landsberg
ggataacggcacgggcatagatccggaagcactcgaaaaaatatttataccatttttcactacaaaaaaaaccggttcgggcataggactcagtctctccaggcagatcatgcgagaacatcaggggacactgacagtcaaatcaacagttggaaaaggaacagagttttttatgagattctgatactcagtttcataaagtcaccagtttaaaaaactgaaaactttactccggccagcattccaacacgactcaacagaaatgactcacggatagcggttgatgctttattagctcgctcctgctcgttgtcaatccggctatcctcaacataagacttcgtgaaaaccacttttcgttgattttctttcaaggtcattattcgatcttcgtgattcacttcatagcagtgatttccatttttttcggaaaat

SEQ ID NO: 64537 - DNA, 2507 bp, Arabidopsis thaliana landsberg
tatttgaactacaaagttttacttgtaattgacttcttgtaacgaagccaagcaaatttcagtaatatattcgaaacctaattcattcattgctgctcaaaatcagtattaagtcaaacatagcggttgtaattggtcacccgaaagtaataatcacatgggaatgctaacgtctagattatcaataaaaaatgtcaattacttcctgaacttttaggtctgaaacatatttaactcatgtactcaatgacaaagtttagaagctcttacaggctgaagacacaaatgtcagtgagcacgtgagatttgtcataaaaattgtcgatgatgaatctgcagaaggaataagtttatggaccgacgataaatgtctagccatctatgctataaattttacttcattttttttgttggagtgaatttcagtgaaggcataccaaacaacctcgtaagaacatttaaacatatgaaatgccatcgatttctttctaagaaatcacatataatttaaatcgacgttgttataatctctcgatttactccatgtagaaaaatttccttgagaaatgatcacatgaacaagcacatcttctgctcccacaatattgcttttttgacacatatttccttatatttatgaatagaacccgtatattttcagaaatgtgatacgaaaactcttcaatgaattatatagcccaacccataactttgggctttcacgtattaatggacccttcttgcgtgcgactcacgtgtgaatactgcaagacacgtggcttctctattcaacgcgcaaatcagttacgtgtacaatttatccgcctccttcggatccgaatcagcttcctgatttatttcccgtcattacccaaattcgccggcaatgttgtaaaaatccctaatccaaaactatttcgtggattttagggaaaaaagagaattcgaacaaggtcgtcgtcgtcgtcggatttgtagatcatcatggagttctctttgatcgcagatacagtcacagtttgcacggctaagcaaggtatcgcgtttgggaaatctcttcttcaaaggttggatttggccaatcacatttctttcgccgattccgttgttgatcatcaatctcccggtggaggaatcgttcaagcatcggcgattattttccccgtcgatgcaattgctcctccaccggtcagatctagctcttataagacaattcgccggatccgtaaaaagcgacgaaccaggcgagtttcgtttggtggagatggagatgacgcaggagattttggtcgttttctgttagaaggtgatttcggtggtagcgacggtccatttggatttggaggcggaggaaacgatggaggcggaaagggatggaactactgcggcggcggtggtttcgggagggataattgggatgggtcttcgttttcgtcttggtcagatccagcgatggaatttgtgtatgaagtgatttgctggatcgcgttgtctaattgtgtgcactttgcgttcaagaggatagtgaggatcgtgaccgaccgtgaaagggagaagttgaacattgcattatcttcggtatgctgacaaattcgaggtcgtggtgatgattcctggttaaaagtcttcttaatctcggtttcaattacatcatatgatctctcgtgtgtatatatattacattgtacatatttatttaatttctccttcgcaagttcacattagattgttataattcgttctgtttagagtagtgagatagtcatcattagagacatgaatgatgattgatttgtttgattaagtggataaaaactgaaaagtctctcacatgagtgtttaagacaagcatgtaaataccataatcctaataaactccatccattacataatgcattgttcatgtttaatattaagcactgggcttgttgaactctcccggatttactggagaatgaagacccatggatggctctctcctctcaacctgcattgtctcacggcgcctatcataccttggcctaggacggggtctagtatgacgctgttccgtgaacctgtactgtggtctgggtatgacctttccttcaacgtacaagtcacctgaacatgagagccaaagacagatggtatcagtattaagaaccatatctcagtacccaatcattcagacaaaatctacaaacgttacacacctccgtagtctttgtttggtacatcgagataggaatccggcagcacccagagaacaccaggcaatgctaatgaatcacacaactctagatcagatttctcaaacagtaaaatatgttctcattttatagtactagagacagacaataactgcgataaaacaaagatcaagagaagttcctcctagctgttgaacagagcagtccaaacagagaaaccttttacgataaactcaacatcataagtaacaactagaaaagctatgtcagagcaaaaaaggcttagaacctaattgcaaatatggagaagttgat

SEQ ID NO: 64538 - DNA, 602 bp, Arabidopsis thaliana landsberg
  unsure (1)..(602): unsure at all n locations
nnnnnnnnnnnnnnnnnnnnnnnnnnnnnnnnnnnnnnnnnnnnnnnnnnnnnnnnnnnnnnnnnnnnnnnnnnnnnnnnnnnnnnnnnnnnnnnnnnnnnnnnnnnnnnnnnnnnnnnnnnnnnnnnnnnnnnnnnnnnnnnnnnnnnnnnnnnnnnnnnnnnnnnnnnnnnnnnnnnnnnnnnnnnnnnnnnnnnnnnnnnnnnnnnnnnnnnnnnnnnnnnnnnnnnnnnnnnnnnnnnnnnnnnnnnnnnnnnnnnnnnnnnnnnnnnnnnnnnnnnnnnnnnnnnnnnnnnnnnnnnnnnnnnnnnnnnnnnnnnnnnnnnnnnnnnnnnnnnnnnnnnnnnnnnnnnnnnnnnnnnnnnnnnnnnnnnnnnnnnnnnnnnnnnnnnnnnnnnnnnnnnnnnnnnnnnnnnnnnnnnnnnnnnnnnnnnnnnnnnnnnnnnnnnnnnnnnnnnnnnnnnnnnnnnnnnnnnnnnnnnnnnnnnnnnnnnnnnnnnnnnnnnnnnnnttatctatatgggtcatcttttattctttttttttatcctggtggagtttattcttttctctgctctttatttattttatctccctatttt

SEQ ID NO: 64539 - DNA, 403 bp, Arabidopsis thaliana landsberg
  unsure (1)..(403): unsure at all n locations
tcggcccgganaaaatgccactcnggatactggcatatatatccaacctagctcatgcatactctttttgtgtgtggctagcggtattagatcgactcttcacaagggatcgtttgagaatgtggaatgtggaagcaacgattgttcaaccttaagttctcaacctatacgggagaagtaaaagattttgtcatagaaatatacattcaggatctcaagagtttaagtttacgagagatggagaaaactttgtcggcctccatggccagtgtacccttgtagttaatttcattggagtgcatatcagagtaccagaatttcgaatcagaaaatctgattttgtaggagcttccatggcgagtgtacccttgtagaagatattataaattgggatgatggaagc

SEQ ID NO: 64540 - DNA, 539 bp, Arabidopsis thaliana landsberg
  unsure (1)..(539): unsure at all n locations
aatacatttttttgnccacattcnttggttgggttggaaactcgaaaatgacacattgataacatgggcacaaataactagatcatatgtttttgtcatattttgagcacaatttgtgcatatttcaagcaaattttgaacatatatcaaatccgtcataaccaattaatgttattattagtacttgtttttattataataatgacgtcataatcaatactaaacgtaccagcaaaatgatggtacatatcggctttaaaatagtattcaccaaatatttctggaggcttgtaatctttcttgctgaagacgaagtcaattagggccatttccatttgagtaaatctatttgtgtctaatggaaaaatagagatatctactttaagttgatgaagcttttcgtttgcttttatgttcctaatggcaacggtatcaactcgatgatttagactcttaaggaactttaccatatttttatggagaattaggaagtttgtggtgttggataaagggtagaagggaggaacccgggaaaaaga

SEQ ID NO: 64541 - DNA, 223 bp, Arabidopsis thaliana landsberg
tctcttgtgaaaagttccgtgctcacaggttagtattggctgctcgatctcctgtctttgaaagcgagttcctcgatgttacgggagaagaagatcgtgatatcgaagtactgacgtgcagcctatagtgcacatggtttactgtctcggactgcaagacaggctcggtgtcactatgtaaataaaaaacggctcggctgcatgttaactaattgggacacta

SEQ ID NO: 64542 - DNA, 454 bp, Arabidopsis thaliana landsberg
  unsure (1)..(454): unsure at all n locations
ctcatatgttccgatccgtgtttttcacgagagaatggacggannnnnnnnnnnnnnnnnnnnnnnnnnnnnnnnnnnnnnnnnnnnnnnnnnnnnnnnnnnnnnnnnnnnnnnnnnnnnnnnnnnnnnnnnnnnnnnnnnnnnnnnnnnnnnnnnnnnnnnnnnnnnnnnnnnnnnnnnnnnnnnnnnnnnnnnnnnnnnnnnnnnnnnnnnnnnnnnnnnnnnnnnnnnnnnnnnnnnnnnnnnnnnnnnnnnnnnnnnnnnnnnnnnnnnnnnnnnnnnnnnnnntatatgagcaagaacattacactaaacggtgaccataaaaggatataaaatgatacactggagattggcgagagaccgcaccgatgattcattgcaccgctgccagaccaacagagccatgagccagagctccaggggctgacagaaaagcatccaggaacatgtc

SEQ ID NO: 64543 - DNA, 506 bp, Arabidopsis thaliana landsberg
  unsure (1)..(506): unsure at all n locations
agtaagcacaactgtgcnttgctggttagtggatagctccaaatcccgctacttatatgctgntggtctgtgttaggtactacaaatggatactggagcgcaacttccatgatttaaataaaggggtgcggggtaatcaggtgagtgactttatgatgcacccaggttctcatatttattgttatgaataattattttctttgtccctgcactgtaagttaggtggattattttaatatgcatccgacttcttaagtttgttgatattaagctaacaatctctgagttacaatcaacaggtttcacttttaaacatcgtggtggagttgaagaaatgctgcaatcatcctttcttatttgaaagtgcagaccatggatatgggggtgatataaacgataactctaagctggattaaattattctaagtagcggaaagctagtttttctagacaagctactgttttgactggcgtgagactaagcattcgtgtggcttatctttttc

SEQ ID NO: 64544 - DNA, 1965 bp, Arabidopsis thaliana landsberg
cttatctaccttgtttgacttacaaattgatcagttcatatgactagagatattagttgtatattacaattgacaatttcatgcatattcaatgtgctagtacctaggcctcatctctcgtttgaagctcaactcgttgctggaaagtttcatgagctacgtcccattaaatgtatggaacaatcgagtccaccttctgatcattcgagggcatacagtggcaagcaaaagcatgatgcattgacgagatatccccagagaattcgtaggttgaatatatttccagctaataaaatggaggtaatattctggtttttgatgtcattgtttatctgaataggacatatttcatgctaatggaagcttattatacttgctaccttttcagtcgtcaacatttttcttttttctaacctattatatttgtagattgatatatgggttatatggtgtccttttgtattccttttctttgtctaccctttcttctgattctgtaactatcaaactcgcaggatatacaaccaattgatcgttttgtcgtggaggagtatttgctggatgtgctcttctatttgaatggatggtgtgtattttcccaaagcttgtgttcttttgacgtttttgtatgtttcttctatatttttcttgcacagtggtcgtccattcatgctggttttggtgtagatcttggtttttgtcccccaaccatagcaaattagtcacgtgttttctaaattattaaccttagagtatggtgtattaatctaagttcatgacttactctttgaataatatggtcactgattcagctgggcgactaattggctactactaagggctagtgtttttgcgttgagtatctagttgaacctagcatatacttatttaagtcattattatggttgtagacttgcctagcatatacatgttttctaatcaacatcttagcttatgctaagtctctttctttctggttactaaattttgtttgccttcttaaattatatagaattttgtttcactaattaatttattgcaaagctagtcggaaggagtgtgcatcctacatggctaatcttcctgttacatttcggtacgagtatcttatggcagagacactattttctcaggtaacttctgttgtataaattttgggattatctctctagtgagtattcacgttgtaatataaaagcatacgtttctggcagattataccaattaattccaagatctgtgatttttaaatataacaattgtatctactgtttttcagatactgctgctaccccagccaccattcaagactctttattatacactcgtgattatggatctttgtaaggtacaaaggattatactgttcatccgatggtttttaaatccctgctgttatttcttttttcaacctgattccaaatattcaattaatttaggctcttccgggtgcctttcctgctgttgttgctggcgctgttcgtgcactatttgagaaaatatccgacttagacatggaatccaggacgcgtcttatcctctggttttctcaccacttgtaagtatataatttcatatttcttacctcttgattttttgtaatctggaaaaggtgctttattgtcgaatgtttggtgaatgttccatatatgttagaaagttacctagcttataaaatatggattattgaaacataaaatatggattttcagtcagcattactgacgattcgtttacatgatacagtggtcgtgtttgagtcttactttctcgattaattgagaaatatgttattcatcacatgaagttgattacgtatttcgttttgctctctactctcatgttgataactccatgcttaacagatccaacttccaattcatctggccgtgggaagagtgggcttttgtgttggatcttcccaagtgggcccctaagcgtgtatttgttcaggagattttgcaa

SEQ ID NO: 64545 - DNA, 569 bp, Arabidopsis thaliana landsberg
  unsure (1)..(569): unsure at all n locations
tgagacgaaatcagctacaaacaataatgtactccagatattatttcaaaagttgtccactactcgacaaacacgacatattagttaatcatgaaaactcaatagatatgttcaatgagataactattgaatcatcgatgtccgggagctggtggaacatagcgtcagtgggaaatcgcataagcggactgtgtaccgacaatttcataatttaaacgaggatgcatttatataacagaatttacccaagtcatctgatcagactatattgcgattatcgaataacctaccattcatcttaattcaaatgtatacataaataggataagttactacaacaacaacttttttaccaaaaaaaagaaaaaaaaaatacagcaacttctcagcttcatctgattgactattttatgacgaaactcgtctacagcctccattaacgtgggtatggctatattgtcttccactagactaatgcatggaccatacttctagaatactaaactgactaaaaccaatattttctagctggattntgatgattaatatgtttttggtttttttgaaag

SEQ ID NO: 64546 - DNA, 304 bp, Arabidopsis thaliana landsberg
ccccggccgggggatgcacgtgcaggtgccacaataagcagccgtgttgaaacgccgactttttattcatatgggcgagatgcatgtccgggagaaccacagctgccctgagtagctcgcatagaggtgggcctcacaacggggacatagaacacttgctaaaccactccatctcttcgagagaatccctttggcacaggggaggctgcgaaccatacaggttctaccggagcaataccactcttgacctagaatagccagatgacacacaaaagtctacatgaaagcctgaccatgaactaga

SEQ ID NO: 64547 - DNA, 1216 bp, Arabidopsis thaliana landsberg
gtacaacatttattacattattttaaaaactctttaatgcaagtactcattatgaattttgaattttatcataagttatgatattgtgtatttttttctttgtattttctaattgtatgtaatgttttttttgttgtattttaaaatattagttaactacataattaacataatcatttctagatttacgtatgagacaatagcaagcaaataattttgtttgggtacaaaaacattttttattaaatttaagggattgatttgcaatttaaaaactaaggtatttgttgttcaacaatttgcctcacactattcagttggttcatttttacctcatttgtaaccagattgtgttcgtgattatgtattgccaaagtaataatattctttcataatttaggcgaaagaactattataaatttttcaaactttttatcgattatggaaatgtcactctcacaacatttattacaataatacgacaattattttcattagtctcctatataaccaaaaacctaagaactacaaaggaaattaaactccaaagcaaaactaaacctcactcactcccgacagtaaccaaataagacttagcgatttctccatccgctcctttagggtaaaatccaccgggaacactttcatttccacttccatacacaatccgtagaatctcctcaggtgttctatcaaacgaaagcgagagctcattaccgaccaatacattcccaatcacttgtccttctgcacccatgaatttaggtacgatcaatccctcatctttcacacccgcttttcccaatttgttccttagatccgaaatcttatccgtgaaagccgcaaccgtgacaccataaggatagactatgtgtgccgctcgagcatataacatacctctaatcaccgcgtcttgacccgattctactcccaaaagtcctgctactaactgaaaaaaatgtttgcataatatcatgtaaatataatgggggtattcaaaaaaaatatataacaattgagaacaaacttatctctcttgtaagccttgtttaaaatagtttacttttccaataaaagttttgaaatatatcaaatattctttgtaattaggtgaagttttagacataactcgtaaagagtgtgtattttatgttattttcacaaaatgaatcaatgaaatatcatcttaacacattaatgtgaatgaaaaggaatt

SEQ ID NO: 64548 - DNA, 1316 bp, Arabidopsis thaliana landsberg
gacaaagggaatggtaacacaaagaatcaaacgttttgtttttttttgggtaagggcagattttgtgagcttggattgtggaggtgcagagccatttactgatgaacttggacttaaatggtcacctgataatcatctcgtttatggagaaaccgctaagatagcgtccgttaacgaaacaagaactcagtacacgactttaaggcatttccctgctgattcaagaaagtattgctacactctcaatgtcacgagtaggaatagatatctcattagagctactttcttgtatggtaatttcgacaacagcaacaatgtatatcccaaattcgatatctccctcggggcgactcattgggcgaccattgttatctctgaaacgtatataatcgaaacggcagaactggtgtttctggcttctgctcctagtgtcagtatttgtttatcaaatgccacaactggacagccgtttatatctactcttgagcttaggcagttgagtggttcgatgtatggttcgatgctttctgaagaccggttttacctgagtgttgcagcacggataaatttcggggctgaaagtgaagcttctgtgaggtcagtatacagttcataatctgtttgttgtttcagcattgtgatttatcaggatgagttgaagaaatgagttggtattgcaggtacccggatgatccgtatgatagaatatgggaatctgatttgcaaaagaagcctaattatcttgtggatgttgctgctgggactgtgcgagtgtcgactacattgccaatcgaaagcagggtcgatgacagaccgcctcagaaggttatgcagacggctgtggttggaacaaacgggtccttaacttacaggctgaacctagatggcttccctggttttggttgggcattcacatactttgctgaaatcgaggatttggctgaggatgagtcaaggaagtttagattagttctacctgagcagcctgagtatagcaaatcggttgttaacatcaaggaaaatacacagagaccgtatcgcgtttatgcacctggctatcctaacataacacttccatttgtgctgaactttcgatttgccaaaacggctgattcttctaggggacctattctgaatgccatggagattagcaaatatctgcggaaaagcgatggctcagtagatggtgagtactactagcccctcctcttagtgttgtggcctcacatttgattctaagatgattgcttgtattgcagcaactgttatggctaatgtggcatcgctatattcttccactgaatgggctcaagaag

SEQ ID NO: 64549 - DNA, 588 bp, Arabidopsis thaliana landsberg
  unsure (1)..(588): unsure at all n locations
ctgcagcatgaccacgatctggctcctgatctttttgaatacgttttgcagcggacacgggttggcctccgggcaatggctgaggcccattccgcagccggtgaaaatgctgtcgccttcgatcgcacgtacaatgtcagccaggggacgttgcaagcctcccgaatccacataaaaaccgccgttaggacctttggaggacaggataagcccgtctttactgagcttttgcaggattttggccaggaatggttcaggtgagttgatatgcacggcaatctcccggattccgaccttttgtccttcttccgacttttgggcaatgtaaaacaccgcccgcatagcatactcgcatgttttcgaaaatattcccatgggctgattcaggtgctctgccgcttacctggtgcaaaggtaataactgngtggttaataaaggagttttttatcttttattgtttgcgcattcgccaaaagctccccagcgatgtcttccgggcatttttttaaatttgaaattttgttgaaaatttttccaatcctggtcaaatctgaaaatccgtggtcattggtttttaactcaaaaaa

SEQ ID NO: 64550 - DNA, 572 bp, Arabidopsis thaliana landsberg
  unsure (1)..(572): unsure at all n locations
tttttcaataactctggaagcaaaaatggcataagagtcctttggatttggaatcgcttctacttcactctcaccttcctcctattctctctctctttctatgtcaagttagcttagccgtctcaccagaaagctaaccttacctcacaaacattgattgtgttacactaatctcttaaatagagagccgtaatttctacacactctgatcgctagatggaaacggagatatcaggaatggataatccagctatgaccttggacgaggtttccatggaacgcaacaagagctnnnnnnnnnnnnnnnnnnnnnnnnattatctatctctctgttactagttcttccttgtccacattttgttgttggttctgatcagttagattctgtagaaattaagagctatgatcacaataaacttggtttagttgaggcagatccatgatctcgttgtaggctaggctaatatacatgttggtaaaaactttaaaagtcttgttggctgtaaattntgtggattaagtttattgatgggaccaagatgatgattgtcggctagtgtgttactactgtc

SEQ ID NO: 64551 - DNA, 497 bp, Arabidopsis thaliana landsberg
  unsure (1)..(497): unsure at all n locations
gactgttgcccaattgatcgaaccaatgtggcttggaagtacttcaggggcgatgcctctgcgggggtttgataatttcacatttgtgacccgctaannnnnnnnnnnnnnnnnnnnnnnnnnnnnnnnnnnnnnnnnnnnnnnnnnnnnnnnnnnnnnnnnnnnnnnnnnnnnnnnnnnnnnnnnnnnnnnnnnnnnnnnnnnnnnnnnnnnnnnnnnnnnnnnnnnnnnnnnnnnnnnnnnnnnnnnnnnnnnnnnnnnnnnnnnnnnnnnnnnnnnnnnnnnnnnnnnnnnnnnnnnnnnnnnnnnnnnnnnnnnnnnnnnnnnnnnnnnnnnnnnnnnnnnnnnnnnnnnnnnnnnnnnnnnnnnnnnnnnnnnnnnnnnnnnnnnnnnnnnnnnnnnnnnnnnnnnnnnnnnnnnnnnnnnnnnnnnnnnnnnnnnnnnnnnnnnnnnnnnnnnnnnnnnnnnnnnnnnnnnnnnnnnnnnnnnnnnnnnnn

SEQ ID NO: 64552 - DNA, 2296 bp, Arabidopsis thaliana landsberg
cgcttactgcattggattaagaggagagactgaacattgggccaaccaaaaaaagaatacatatgattgtgtatgggaaatttaaattcactatttatttttaacttaagtttcatttaatgactctcttgttcaattattcttagttgactactcttcttatcgtgcaatggcaaaaaaaaaagatgtaatagatgatatataaagggttagctaattccaatgatccaaaggcaaatttgttctgttttgactatttagttccaagatttctactattgcaaacccatcgaacgttcacacactattagagttagaccatagaataattttatttgataaagcagacaaaagatgtgattgggcaaaacatgaacggcaatatagaagactcgacgtccaccccaccctactcacccccaccctactttcatggctcccactagctcggcccattgggcctttctaactaatgagaacatataattaccgtacattttctttaattcggcttctttttatcagtttgtcgataatttttcaaagtttttccatttatcattctaacttttaactaaataaattatactcataataataatgcgttgaccaaagtattacctacttagaatgatgtggttttcatgcgtaaccatgaaccatccaatatcaattaaaaaagctaataatgaaaaaggtatagttgcgtgacgtatatttgcaatatgggattggagaataaaataacataggaaaatggctaaaaataaatgcggaaaaaagttactagtaaaatcgtgattgggagggacacgaaataagaaagcgaagatataagaaatataattggtcagaatttgacaaatcatataacgatatagagaagagaccaatatgaataaaaatggaaaaaaggatggcttccactaatggggaaggtcattataatcaagacataatccaaattagctttataaatcacgtgccactttacttgtacttgtataccacctcttcatcaatcgcattatatatatcactcatcatctatcttatatataaacagtagtattatgtaaatactatagtactatgttattcttttatatatgtccgtccacacatgcgtacacatatttctatctcacataaacagtagtagtataatgcagtctgtaatattctcggcttttaggtacacaatttataattcattcagagttggatctaatatcgctgaagagataattaaaaaaataattagggagataattaagggataatagacagcaaagagcaagctagttttgagtacgaaacccgagactaggagaaagaaataagagagattcgcgggggagccatgcgtgggattattattctaatcatttccttaaaaaattcataatcaatgacctcttattatatcagtgtaagttaatccctttttctgacgacatcaaaacttataattaaaaaaaacttaagcgtattacgtgcaagacaactcagctccacacttctcccatctgactatactcagccctctctttgttttttcctaattatctctttcttcgttactacctaaatttctgagcacttgcttgctacattttttttaaaaaaaatcttcgtatttgtatgtatgtcattataatttttagattttatttttggtttaagaactaatcaacagtacattcaaaaagaaaactagaaaggtgcgatattttaaatagtaggttaagtggataaacggtcaggatggtatgtaatacgaagatgagataaaacagtttgataatgtgacaagtttttttagttagggcaggacagacctatcaactccatgctcagactctgcaaagcccatcatacactgtttcgagaagaagggcattctcgtcaattcaatacccatttattttcctctaagccgttgtacttgcgacagagcccgaaataattgtagtttttatacgtttattacacccagacgaggtaaattaattaagaagtaattattaattttaaaagtcacgattgtgtatgtatgtatgtccgtacactgttaaaaaggggtcccagatctgacggtcgtgattaaaatgcgacgctgcactttctttctttctttcttctctactttattcaaatttttcagtatccattctttctctctctttttttctttctctactcataaaagttgttcactttaaattattggatacttccctcacatttactcttttttgtgcaatcctttcaattttaatttaaattattcagc

SEQ ID NO: 64553 - DNA, 705 bp, Arabidopsis thaliana landsberg
  unsure (1)..(705): unsure at all n locations
aggaaatcttgtagggcatttttgaatccaaggtaacaaggtaaatgccaaggtaataatagttgaggaccanngctgagaaaaccgatatgagcatatccaggggagcaccacctcaaagaaaaacgacattgtcttgtcataattaagctcaaattctcgtgaaccacaagtctcaaaacagagagggacctcttcttgtaggatttactcaacatagccgaagcctaaaagatctttctttactaagtttccagagaaacaatccaattccaatcactcatcaataacagacaaaacaagaattgacctgttcttagcggagtcaacaggagtccatgactgagtgaacaacgtgtcacctctcttggtcgtgaatagcgagaaatctctgacggagcttccatcgccaccgttatcctgcaaaacccgtctcattgccaatttccgcctaatggctacttgctcatctaccaccgtcgtcgtcggcgaagaaggggaaacaccgcaaccaatgttcatcttcctcttctgctgtgatgattttaacctcatctgaaacacctgcaccgacattgatgatcgtcgagtagctatgacactaatcggaacatcatttcgattttgaatcccgtttagtaatctgggaaatgagcttctagtagcaattacgaccgttcctttacttgaacagatcataaacaa

SEQ ID NO: 64554 - DNA, 168 bp, Arabidopsis thaliana landsberg
cgcacctcatactatgatctatgtcgctgtatgtcaacctctggcaataacctgatgaacctataaatatccaggacctatcggtaagactcatgaagtactatcataattaatagcatttgaccagacactcaaccatatgctgttacccacattaaacgctccgcc

SEQ ID NO: 64555 - DNA, 542 bp, Arabidopsis thaliana landsberg
  unsure (1)..(542): unsure at all n locations
actaaggtgtctaattcaggaacatatccagcttctctagtctcttctatcagtaaccccaagactgattatttctggaactcgcattagnnnnnnnnnnnnnnnnnnnnnnnnnnnnnnnnnnnnnnnnnnnnnncaggatccagctcataccgggttttttgttggatcccatcatgctaatcatcttcctcactctcgagaaatcgacccacttcccttctgctgcatagatgtctgaaagcatgacataagcccccaccatttctgggttcaactacataacttttcttgcaggtgatctacttatcaatccattgtgcttatgcgctttacaagccccaagaatcactccccacgtggattcgtctggcttaaacggcattctgtcaactaattcataagcctcacctattttcccaggtgttccaagcaaattcaccacacagttgtagatatctcgatctggatttataccattctcactttccatcacattaaagtcttcaatacttgttcacttaaccagatggtgacactct

SEQ ID NO: 64556 - DNA, 1840 bp, Arabidopsis thaliana landsberg
  unsure (1)..(1840): unsure at all n locations
ctgtgtgacagtattctccatttttctctcttgttcctggattttagtttcatgtcacttttgtatggcagcacagcattccttataggcccacagcggcaggtgactatgatgcttgacccagctcgtatctacgctactgcattgtatctagcaagcattatcattgccttgttttgtgctctttatgtaagtggggtttctcaattcaaaatactggatgcacaacattgcttatgttcagttaaaactaggtagtgaaaatgccttgttggactaaatataatctgtcatcatctttctgtacaggttcgcaacaagcttctgacactgctggctatcattcttgagttcactggtctaatttggtatgctaaaacttgctttcaagctcttacatttttatcctaactttcttagtaatacaattacatgatatatactcttcgaatagtatattatcccgagtggacctaatgctccttatacggcttctgagtttgtcacaaaagctgtcaacattcatcttggagaatgaatcccttgtgttctttaaaactgcaggtatagcttgagctacatcccttttgcaagaaccatggtctcaaagatcttcatgacttgttttgacaccgagttttaagctacagtttacacacatcaggtcaaagatttcttgttccaaaaccttgatgctctggctgaacgattggtcaatctcctccaaatgtgttcaaagcaggacttgtttgatgcaccggtaacgtgccatgccctttatggcttataattgcctctttacatcaagttcacgtcttcacaaatcctagcacagttttttgtatatttgctgtggaacttaacgtagatttggatgttattgctgtttgctacaaaattaagatgttaacttcacttgttttagtttcattgtcatggttacgctaaagacttaatccaggagggaaattgcatattcttatcaaaagcacttaacttgaaagttgcagcataaaatctaaaaatgggaggaaaataaaatctgaaaataatatgcaaagaaatagaaatcgatccctgcccttaacgaacgaaatcacatagtacagtacaaccttgtaaaaagctagcagataaaaagagaacattcagtagaagccaaagagatgcagaagaacaaagctcaatgacttgaagcggctggagaagtaagctctctagaagacaacagtgtcgagcatagtgcctagtgtctgaacaatgttggatgacatgaggttcgagacatgttcttccagatgcttctttgcatcttgtcttcccacattcacaattgccagcttctctggtgacaactcgttctcctctttaaccgccttgttatatttagcagccaagctcaacatctcctgttaaacaggagataatgaaaatgtcaatgaacatgattgtagaatatgcttgaacagataaaaacataaccctgtgtttctttacctggaccgtctgttcgttggtcttggagtgggtgtcaaagcgtcttagcgtcagaccatctgtccatttcttcttgtggaggttgagtaacatcttctcctcaagctcgttcttcctatagttgattgctattgagtaatagtgtctgttcaacccgtgaatcaaagcctgcatagtagtatccaaaagtcagtatcagagaaaacctttgatttcgtttcaacttaaaaacaggacacattcagttagtgataatcacctggatcgatggtttgttcacgtgcccaaagttcgatgttgtttgacggngttcctgccaagcataatggtctgtggatttatg

SEQ ID NO: 64557 - DNA, 1822 bp, Arabidopsis thaliana landsberg
gatcactttttgtaataatactatgaaatgattactttaaaccacgatataaacaacaacagccagttttcgtatttttttgctttcatcttcgtttttttcctaacaagaagaaaattattgatgagaaaacaatgttaaggacttgaatatttgcacaaaatgagcaacttagatatagatgttataacacaatattcatagagtaattttgaaaatatgagaataagatggtaatgatggttttcatactaaacaatatgtaaatactactacatcaattgtggtctagtctttaagccatttctatcggtgaaatatgataaaaaattctttaaaatatatatatatatatatatatataattaagtttttttctattttaatcaagaaaaacttccaaaaatatatcgatagagctgctcttaagatttagagtgtgcacagactttaacaaaatagagtttctaaataaaaatattgaaaataaagttggagatgttaactttttattagtgaagtcctcggctcaaaatctcactatctaatgttagtttaatcatgtatatgaattatagagcgaatggtatttatgtgattttcagctggattaaaagaaaagagaaatggaaaagaaatcgctattttgtttgttagttgttgcatatggtttaacatgtttttgaacaaatgttatgtttaaaccaaaaacatgtaaacaaaatactgttttggaattacttaggacaattattggtaaaattattaagatattcagctaaatttaaagatgtgtacttactagctatataccaaacacttaataatccagaaaataatgaagttagatgagatgtatcagacagtctacagctaggtacactctgaaataaaatgtttgcttacgttgtgatcagtgatcatcataaccaacctttaccagtaaatggactgttgttgcaatcattatatccaaataatataatattcctaagatttctggtactattattgtataccaaacctttttgtacaactccaaacatgaccgtaaagaggataaaaaacacatattcgatcagaaaaaacatagaatatgtcaagataaagacttcaatccagtatctgatctgatataatcttcatctaaaccacgcccaaaattatgaagaactgaatctagtttccatattcggtataattaatgtactttttacatttgagcaacctaaaccaaattcaaaattaaataaataaataaacaagacttatcccaagcaatattatagaactagaatgcattaacgtataactgtggttgtgatgtatttacatacgaagagctagataagagagattttttcttttgggtgacagcatgagaggttatatgatactatagtatagactatactgtatagtatcatacacttaaatattataatgtcggtccacaataatttcttcaaaacggtcactagcaccactaaaagaaaccatctgatcagaccgttgctcctgcgatcacatgcaaatcccaccatatgtcacgttccacctcatccgtctcttcttaattctaacatgactagtaatatcaaatctggaccgtcgattagatacatgtggtggaccgtgaagcagacgagcggtgagtgtccgtgtcaaaaggagttggttcggtccgcttattatgttacgtgtgcgtttgttaagtgtgaacaatttatcagttccgggtttgacttttaactttgtttataaattttatttgaagatatattaattttgaattagtagtctgatagttttcatagagtct

SEQ ID NO: 64558 - DNA, 713 bp, Arabidopsis thaliana landsberg
gctgccgtcaccgaccatgacgatcacatcgtcatccggccgcgccagcttgaccccgagcccgccggcaatctcatagcccatggtcgaaaagccatattccatatggtagctgcccggcccttgggccttccacagcttatgcaattccccgggcaggccgccggcggcgcaaaccagcgtcgcattctcgcgggcgcgctgcaccgcgccgatcacctgggcatcagagggcaattcgctattggtcgtgccggtcgcccggtcggccgcgatgagccattgatccttgccagccttggccttggcggtccaatcgggatcggcctgccagccggtcagcgcggaattaagcgcttccagccccgcgcgcgcatcggccaccagcggcagcgcccgatgcttgtgcgcatcgaacggctgcacgttcaaccccacgatcttgagcgcatcgttcttgaacagcgcccaggagccggtggtgaaatcctgcagccgcgtgccgatggccaaaacgacatcggcctgctcggccagatcgttcgaggccgaggtgcccgtcaccccgaccgaacccatattgagcccgtgatcgtgcggtaggctcgattttccggcctgtgtcttcagcaaccgcacgccataacgctcggcaaatgtgcgcaaggcccggctggcctgcgaatacagaacgccggcacccgggatgatca

SEQ ID NO: 64559 - DNA, 574 bp, Arabidopsis thaliana landsberg
tattaatagtactatatgtatattttctcgacataattaacttatgataccaatacttgtttaaattattaaagttccggccaaatacttatttatttaccatcttggaagaagcattaatgtgaaagaaataacacttcaacatgaacagaacaaacatctgtttaatccctaattgcagatacaaattgcatgactttcctacactgcaagatctttctccttaaaatgaagaaaatagccaaacatctccaagaatttgcaagaacagcggacgatgttgaaatgtgtaaaatacgtgcgggtagggtcgtgtaaactttcttcttttttattcacacttcacgtgttgtgtgtggaactatgttcacattagtttaacagctcgacacaaccatattcatacaaagtcttgataatattgattgcgttcgagccagaaccttcaaaactccattaaaaaaaacaaaaaaaatatatttgaaggaacaagaaaatgtattgctcagcacagaaggttagggagatcattctgagtgcattacaaaatgtggaggctgaaacattaatattc

SEQ ID NO: 64560 - DNA, 1557 bp, Arabidopsis thaliana landsberg
  unsure (1)..(1557): unsure at all n locations
ccaagaaacagtaacttcttgaatagacaaagaaaatatatatttttctagcctatatttgtttggtcaatctttgaatcacattattgaaattgtataatcattttacttgctcgtgcatatttcccttttcttctcgtttgtctaatttttacctgctatttcagtgccaatgatgagactgttgagcctgaaaatcgtggtggatatctggctttcacttcaaaggtgcatatatctttgtccatgcgcataccttcatcatctttgtcgatatgggttgtttgaattcacatgttttactggtgatcccaaattctagttgtatttctgacacatttgctgctcagaaaagatgctctgattcatcatgttgtgtcatatctcattagatatattggcaggattctgcaggtgtgaaacatcttcagaaattagttgatgcaggtcttacccatctacatcttcttccaacatttcagtttggtgatgttgatgatgagaaggagaattggaagtctgtaggtatatttgatgtctcaagcacacgcttaaacttaatagactgtaaacgattcatttttgggatgcattttctctttaaatttgaggccttatttattgaactcaagttagagatcaaaagccggaagggccttaagtcttcagaccaatagaaacataagcaaaagtaacaaagtcgtctgtcttatttctggtttttattgtagatataatttgacctttttattgtagacaccagtctgctggaaggattacgacctgattcaactgaggcacaagctcgtattacagaaatccagaatgatgatggctataactgggggtagtttgttttacacaagttacttcattcttcataatgaatcaatcaccttcatcacaagttttatgttttgtgaaggtataatcctgtgctctggggagtcccaaaaggaagctatgctagtgatccgactggtccatgccgcataattgaatttagaaaaatggttcaggtttgcatttttcccatgtttggatattgaaaatagtaagtgtatactggtcctggttatttgcaatactaataggctcattgaaagctaaaatttgtagtgattcatacaatgtgttgatgactgcatgataaagcctcatgctatttcgagttggctctttatgtagcttcttttggcaggctcttaattgtactggtcttaatgtcgtcttagatgttgtttacaaccacttgcatgcaagtgggccacatgacaaagaatctgttcttgataaggtgtgcacctaactaagatttgattaattttcagtttgataactaactgtctagcctgaattctcagctatcttccacgaaaaaatgtatttgcttagatagttccaggttactatttgagaaggaacagtgatggttttattgaaaacagtacatgcgtaaacaacactgctagcgagcactatatggttgatcgtctcatacgggatgatctattanattggggtgtaactataagtacatgctngtatctcttctga

SEQ ID NO: 64561 - DNA, 355 bp, Arabidopsis thaliana landsberg
gagaggagcgtaaaactattcatagctacagattttatcatttattaaccagatgctcaaactttagcgaaattgatgttttgatacgagaataccacttaccccccaagactgatattctgtctcactcccatactatgattcaaggcttaaggattcaagaagataaatgttgtctccaataaagattcgaaaaacaaaactcgaaaaacctgatcaaaagatgtgcgactataggacgacaaacatcctattttgtagggatcttaaagcccagagcccaaacgtccttctgcaggcgtctaagcgacagcgacaatacagcacaccatttcctttgcaggctcataataac

SEQ ID NO: 64562 - DNA, 540 bp, Arabidopsis thaliana landsberg
catgttcactgcattcacattcagctcaaaacctttgttctgtatttctccaaggttggcatatatactactgaagcctgttacgctcggaagtgtgcgttgtaccagcaggtcttttgtatgcgaattataatactccacggaaccggaaaccagtcccctgaacaatgagtagtcaaggccgaaattggtagccacttttctttcccatttcagttcggggttagccaggttggcagagaatacgctgatcacattgttggctgtaccgcttccattcacatatacataagtgcctgcgcccagggtagccagagcctggaaggcatcgatggagctgttaccgttttcgccataagaaaccctcagcttggcataatcgagccaatggcttgttttcttcatgaacgattcatcgctcagtgtccaggccaccgcagcagaggggaaataggcccttttgttctcttttccgaagccggaatagccgtcccttctttctgaagggttatggtatagcgctggtcataactatatacc

SEQ ID NO: 64563 - DNA, 457 bp, Arabidopsis thaliana landsberg
  unsure (1)..(457): unsure at all n locations
caggcaccgnccgcttggatacggccttgctgcaccggctggccgcggcgaatcttgccggtctgccggtcccagcccaacgggctccacaccatgagaccgacgccctggtccagaccgagcgggatcaactcccactcgtgatggcgcccgaccagtgaataatagccctgatagacgacatagcgcgcgaggccgtatttctccgaggttgccagcgatttcatcagatgccagcccgagaagttggacgcgccgatatagccgatcttgccactcgtgaccaggtcgtttagcgcgcgcagcgttttctcgaccggcgtcagggcgtcgaagccgtgcatgacgtaaacgtcgatatagtcagtgcccaatcgcttgagactggcttcgcaggcgcggatcangagatggcgcgacaagcccttgtcgtaggggccatcagccatggtgaaag

SEQ ID NO: 64564 - DNA, 599 bp, Arabidopsis thaliana landsberg
tctaagtgctacgcgcggttatgattgttatgtgcctgtttctgtttgcttttctggtgtatatagtctccatgtatatttatacaaactggtcacggggagcatcaagatattatgttgtgtttgactgtggaagtactgggactcgtgcatatgtttatcaggcttccataaactacaagaaagatagtagtctccccattgttatgaaatctttgacagaaggtatttctagaaagagtaggggtcgtgcttatgatcggatggagacagagcctgggtttgataagctcgtcaataacagaacaggcctgaaaactgcaattaaaccccttattcagtgggcagagaagcaaatcccgaagaatgctcatagaaccacatctctctttgtttacgcaacagcaggcgtccggaggcttcggcctgctgattcaagctggattttaggtaatgtgtggtctatactagcgaagtctccctttacttgccggagggagtgggttaagatcatcagtggtactgaggaagcttattttggatggaccgcccttaattaccaaacaagtatgttgggagccctaccaaagaaggcaaca

SEQ ID NO: 64565 - DNA, 134 bp, Arabidopsis thaliana landsberg
acacacacgcatttggcacggactttttgaaacaaagccagaaacaaaaccccacgaaccagcggagcgagttgggacccgaaatcaaaaaggcaaaataactatagtggacgacacgaaagagagaaacccac

SEQ ID NO: 64566 - DNA, 559 bp, Arabidopsis thaliana landsberg
  unsure (1)..(559): unsure at all n locations
ctgaacacagaaccaaatcccctgttttgaacagatcagcatttgtgttgtttgactcgggctcgacatttgtgtaccaaatggtttcgttttgaccgttcacgatcaccaaatttccgtcatctgcaatctttagagctcccttgtgatccaacaacggcttctctctattcgcaacccaaacaactgtttgaggttctatgttcttgtaccatattccaacataccttaacgtcgaatttttgggggtgaagaatccaagctcgaagctttcatcctcgctgatcagtgagtctccctctcgtattgtgtggtttctagtgaatgagttgcttgtggagcaagatacgttgctacatagttgatggaatatcaaaagagtcgtcaccaaagtaaggtttctgttaaatcctgccatatttgagatgatttgagcttcagagatctgtttataacaagaaggaaaagaaagacaagaacaaaattngtggctatcgaagtttcatgtagactagtttggtctttctcaatttaacgagaaaagtcgtcttttaaattg

SEQ ID NO: 64567 - DNA, 476 bp, Arabidopsis thaliana landsberg
taacgcagtctcactaagaacaaagggtgagggactgcggtgcagaataaattacgtccgcagcgttgccccagccttttcggcggcggcgacgatcttttgcgacaaggcttcgatctctgcgtccgtcagggcggtggtgccttgcggttgcagcgtgacggtgacggccagcgactttttatcgccggcgatcttatcgcccgcatagacgtcgaaaagctgcgcgtcagcaatcagcgcgcggtcgaccttgcggatcgccttggtcagcgtgtcggcggcggcgtcgcgcgccacgacaaaggcgaagtcgcgcgtcagtgcctgcaacggcggcagcttcagcagcggcttggcatggcccgctgacttcttcggctgcggcaggcggtcgaggaacagctcgacggcccaagcgtcagcgtcgtggtcggcggccttcagcaaggtcgggtgcagcgcgcccgcatgtg

SEQ ID NO: 64568 - DNA, 494 bp, Arabidopsis thaliana landsberg
taacgacatggccctcgccggcaggtgctggccctcgccgtcccggacctcacgcccccgacctcggtccgtcactccggcgaggagcctgggttcgtggcggcccccgccggtggcctggggcaggtcgtgctcgagcaggcgctcctcgagcgggacgccgtcgaccccggcagcgtcgccgtgatcgtgcccgactccgcgctggccaccgtggtggatgccttcgaggccgcgggtgtggagttcggacgggcggcccgacacggcctcgaccagcagatcacgatcgtcccggtcagcctcgtgaagggcctcgagctcgacgcctacgtcgtcgtagagccggccgccatcctggaggaggaggtgcagggcgcccgggcgctctacgtgcgcctgacccgggccacgaagcggttggtgctcgtccacgagcgaccactcccctcggtgctcaccgagccgtcctctgggtgatcgtcgacatcggg

SEQ ID NO: 64569 - DNA, 807 bp, Arabidopsis thaliana landsberg
tgcattgcctgagaatcgatgacatcgagttttcgcattttaaccgcgtagttcttgtaaaccctgtgaatttcagcaattctgtctttgtgttgatctggttttggttcaatcttgagtggtttcagctcttgtaatggagtctctgattcctcaagaatagtgcacaatcctcctgttcttgcagtccttagttctgttttcaacttctcaatcacatcactatgctcaaactcatcatcatctgaatctgaaccatcatcaaactcatcatatacctcttcttgttcatcaaagcccattttcatctcttcttctctctgcataaactcttcttcttctccataaggaaagtttgaaatctgtaaacttgggtttagttctatgaacccatcatcatcaaacaagttgtcttcaccaccaacaacattctcgtgaactaatgattcatttaaaacaccacagctcatgaactcataaaccaacatctcttctttcacgtgttccttcataaaaccatctgattctgatttctccaaaaccatggaactcgtgttttcatcagagaccatcttcttcttctcctcctcctgaacagtaatagcagaatactcatgaaacctaaaactaaacgctttaggttcttctacaaaaccaacgatacttttgttgtcggaataaaactcgcatctcttgctaatcgaaaccagaaaactttccatctgatcatcgtcttgtgtaccacaaaattgcttttgatcttgatgatctccaaaaaccagagaatcttttgtgttctgtttctcg

SEQ ID NO: 64570 - DNA, 636 bp, Arabidopsis thaliana landsberg
  unsure (1)..(636): unsure at all n locations
ataacatattctaaaaggaaaatgtgtgaaggaaaggaggcgtgggattttcttttgcgacaaactctacatggacgcggggtggtgcctctggtccttaccctaatcgtttgatgatatatttttaccatgttatcatttcgaaaacgttttatagtatatatatttttattttatttttgttaaagaacgttttatagtatattacataagatgtgttgacgatgattagtatataatttctaggacaattagaaaaattcaaaggtaagctagatatataatttcatagtaggggaggtgctactttaggtacttgttaacatggaaattatataatagaaaagttaaaatctaaatcatattcccgtacttattaatttctaggacatttttttagtataactcgagtaattcttgttgctagactaatttcagggcatgcaagttagtttgggtacaaagataccatgtaaagtatccggaccaaaacttataaaaacgagaatatgagtatataaaacaaataaagaaactcagncaaacatgtctatgtccttaaatttcaacagttatataaaaactagattttcaatttttggatattcttattttactatatcatactaaaaaaaa

SEQ ID NO: 64571 - DNA, 191 bp, Arabidopsis thaliana landsberg
tattatttcatctccaagcttcgaaaacccaaaagagaagtggccactttcttcgcctataccctattaaatcaaatccattgctcatgtcactccccttgctgctacctccgactacatcgcatctcattcttccgcatctgcactccatgccgtttatcatccctaagctgcacttgaaacaacgtggc

SEQ ID NO: 64572 - DNA, 545 bp, Arabidopsis thaliana landsberg
gagaagatcaaaatatttgtttttgtttacgattataacattacaaggtttccagcggggtttattagatgtttcgatcgtggcgtgggtttaaaaattcagaaataatatgaacatatgattctattcatgctagaagaaaaaaaaaaaaaatcggatttacagacaatgtatgatgcagatgggatccacacccatgtaaccattgtcccaaaagatcaaccgtcgtattgggtctacttggttggcccatatttctcacccacaaaatgagaagacaaataatctgcaactaataaaaccataacatatcatttgtcttttgtcctcttcatcttactttcttttccattcttcccctcaaaaaagaccaatgatctcatctctcaacaccatttcttgttttaacaacgcacattaactaaccccattgatgtgactattaatttagatgaccaaaaaacatttactataaaaacagaagaaatgtttgttcaaaaaaataaattaaaaaagaagacagaaaaggttgcgggtgaataatg

SEQ ID NO: 64573 - DNA, 546 bp, Arabidopsis thaliana landsberg
cgctgtggccacccagacattcctgatcagcggcctcaatcccgcatcagcctacaacttgtccatgttcgccacccgcaacaccgccacccctcgcacgaccatttattccgtgaccgatgtgaatggaacccatgccacgaatctagttgtatcaggaaccgcctccaactcggggtctaattcttcagatgcccaagggaatgataaaaccatcgtctcgttaaatggcttggtgccaaatactgcgggccaattaacattttcgttgatcgtgggtgactcgcaaaacttcgcctatctcggagcattgctcatttcagccgcaccaaccccgccggtgttcaccattcaaccgcagtcacagacagaccgagtgggcaccacgaacactttgacggcttatgctgcgggtaatcccagctatcagtggtatttcaccaatgccccgataccggcggcgaccaacacgaatctgctgcttgccggcgtggattttaccaataccggcaattattatgtcgtggccttcaatagtctgggtat

SEQ ID NO: 64574 - DNA, 1265 bp, Arabidopsis thaliana landsberg
tttttttgtggaatagccttttttttggcaatttcggatcctgaacattccaacagaagatctgcagcatcattttgatgtacagttgcctgagagtgttaagcaactcttgacatatgcaaggaactttttagagttctgctcttttcaggcacttcatcaagtgatgaaaaaacctgattacttgagtgatcaagagttccgtcagctaatgtttgacatgatgcttgcttgggagactcccagtgtcacaagtgagcaggaaaacaaagtgagaaatctttctaatttgccatgttcatagtattaaaaatagaaatatatggatttatgctttgtatcttatttgtctcaaatttgccaagttcaggatgcagcatctccctccaagcaggactcagaggatgaggatggatggtcgctattctattcaagtcccactaatatggcaatgcaggttattaccatcttcgacttcctttacttctgcattagttataattggaaggacttaacagactttcccctgaaaaatatccttaataggttgatgaaaaaaagtctgtcggacaggaggcttttgcaagaattgctccggtttgtcctgccattgcagatgcaataactgtacataatctttttgatgcactaactagctcgtcaggccacaggcttcattatatcgtatatgacaaatacctccgcacacttgacaagtatgaacttacctcttcagtccttcaaattgcttttctgcatttgtttactcgtaaatgtcttagtgttataaatcgtaggtgatacgtttcttttttggtactctaaataccttaagtctacatctctagtatccgttttacttattcttacctcaaccacacctaatgatcccttagctggcaacataatacgtcaaaaaagtattgcttgctaatttaagtattaaatgctaacgttgaagatgataaaaaaatatatatatatatatatatatatatattctgtagctcagttaatggtactcaaagtaggaatgaatctttttggatgtcacggcttcaatttagaatgaaataaatccactgagagatggtctgcccaatatttcttgcggatgtctatttcctcaaaacatctggttttttgctcttattttttgcttgcccttcgtatatttgtagaattttcacggctgcaaaaagcactctaggaccttcagctgccaatcttcagcttgccaagggagaaatagtgcttgatatgga

SEQ ID NO: 64575 - DNA, 489 bp, Arabidopsis thaliana landsberg
  unsure (1)..(489): unsure at all n locations
aaccatacatatgacattatgattaattaactgtattgattccattatctaaaacgtcatgaaggaaaggttttataaacgttaccttcattgatgnnnnnnnnnnnnnnnnnnnnnnnnnnnnnnnnnnnnnnnnnnnnnnnnnnnnnagtcaactaagatagtcatgcttgcatagacatgcaacaatttaccttcattttcgtaaattttaccgcgtatgtatataatttaccttaacttgctcttgataaaaatttatgtaagtgatggcctcttgaagcacagaagcagtatcagtctgaaatgttttcaaacgaaatgtttcattttcttcgctgtattttttgaaaagaaacgttgaaagagagaagaactatatatgatttataaaattaaaaaaaaaaactaaaagctgttacaaaaataaaatatttttaaaataatatgacaacaaataaagaaaaggagtacggtctttttttgtag

SEQ ID NO: 64576 - DNA, 1894 bp, Arabidopsis thaliana landsberg
tttacttattcacatgaaagaagaagctaaagcatttcaggaagaattttgtaattattgtgtttgattttatgtcggcacaaaaagaaaccgtagattctaatttacttggatagaaaaaaaaaactaaaaaaaaaattcttactgcaattaaggaatataaatggtgattactcaaagatgaattaacttagacgactaaattctgttcattatgcggatatattgatttgggccactcctggatcggagttgattgatcatcaacacaaaaaaaaattgaaatataatttggaattttttcttctcaattatatttagaaaaaaattcgtccgcaattaatttggtgcaaggaacatcatgattagggcgtgctctttgggtttggcaaacaaggtccagaggagcttggatataatccaaattttcttttattaccggcggctataacaaacaattaattacgctttcgaaaagttaattaacattgtcacaatttaatcaccaatattcgataccgacttgaaacctgagtaatattagggagttctgaagcatattattaatatgacacagtagcatgtgacgtataatcattagtttgtttctactttttgtataagccactaccacaaatcccaagaccataatatattttgaaactgtaatgattatttaactaatgttgaagtaattatttgttcaattgccaaaacttattgcatttggtaagtatcataaacccaaatgtgacttgttgcaaacaaatttagattaagattttggtttttatttgcaagcataatttttttaaattttcatagggatattaaattgctaagggcatattttttcgaatgctattatgatttatgtggtctaaaaagtaatcaatcacattatttaaaatgctaggggacaacctagtagagttaaacaggcttttacaccttttgattgtcttagagacaaaactgatcattatctcctctttttcagtgttatctttttgttctttttctttctccagtcatttacaattcaatactcctataaacatacatcacatgattagtgtttcacaacatataaagatacaaattctatatctgtattgtaatcacacatgatacataacatcttgaaactacttgacatcacagagaccggtcttttcatcgcagaatccatcacggcctagcagacgttgaggcggtgcactgagaagaggagaagaaggcgaaccatatgcgtttctccggctatttccacagccaagactcttcctcgtgtccactccggtcaatgggtttgtcccggttgcgtatttacacagagccttcaaaacgttatgaaaaccattagtaaaatactttttgatagtggaacggaagctaggataaatataatggtgtgttgttgttacctgtttctgaagaagatcaatcacagcgtcactaaaatcagcaccttcgattttggcaccaccgaggtcacttctggttagaaccgatcggaccagcactgcatttgtcagattcgcctcatttagcacctagaatcgccagtaacagaaccaaggtttcaccgaaagataaatgtatcatatgcaagtaattgtatacaaagtatggtgtgtggtgtttaccatgcggtccatcaatgtatcgctcaaatcagcacctgccattgaaatccacagctttcataaatacaaaccacattaagattaaggtattcgagaagagttattatgaatgaatttccccacaaaatatgaattcttgcaagagaagatttcttggcttaagtagtttacagaacaacaaactggctcaagtactaaattctcagatttctaaagctaacacttgttagatttgaaagctcggg

SEQ ID NO: 64577 - DNA, 610 bp, Arabidopsis thaliana landsberg
actttcaaatttcgtttttaacagaatactttcacattgttatttttcttttaataaaacaataaacacgagttggaaacataatgtaaagataactttaagaactgatattgagtccacaagagctcaataatatttaacactgaatccactttaacacaaaaccaagggtctttctcagaattgttataattttgttgttggcgaaaaagaaaaaagaaacaaaaaggtcacattttttacatttctatatttagtgcaagttgtttaatagtgacactactattggaaatgacccaaagtgactggacgagaagatattatattatttatgattttgatatatacttcctcttttcgcacaaaatccggtttaagacattattttgtaagaaaatataattattttatatttccaatacaaattttttatctaattttaattttaattctaatattttaatttattatttacgaagagaaatctatttaaaataacgaacgatatgtaatagagatttatatatttttaatatgtatgaaaaatgctagaataacatttttgtgagagaatttaaatagtcaaatagtttttttttttttttttttt

SEQ ID NO: 64578 - DNA, 551 bp, Arabidopsis thaliana landsberg
ttcgcagtgcgcgccacggtcgaggccggcaatctcatcgcttagggcttcatcggcaaggtgatcaacacgggcggcctgggtccccatgccatccgcaacaaccagcggcccgactggttcttcgaccggtcgcgctatggcggcattctctgcgacattgccagccaccagttcgagcagttcctgttcttctccaatgccatggatgccgaagtggtctcggccagcgtcgccaatcgcggcaatcccgaccggccgggcctgcaggatgtgggtgacgtgcatctgcgtacgcctgatacgaccggctatatccgcgtcgactggttcacccccgaaggcctgcccacctggggcgacgggcgcctcaccatcctgggcaccgagggctatatcgagctacggaaatacatcgacattgccgggcggccgggtgaaaatcacctctttatcgtcaacaagcaggggccgcgccatgtcgattgctcccaggtcgagcggccgttcgggcggctctttctcgacgatgtgcgcaatcgcaccgagac

SEQ ID NO: 64579 - DNA, 357 bp, Arabidopsis thaliana landsberg
aaacaattcgcccgtatcctctagaggagcttcataattctgctgtgcaacagtatcggaatatgcacttgtgatggatgcccaagttctgatactgaccaggagtgagacctttatggagcaacttattatcttcccttatacaaaaaaaggtattattcgattgcctgggccaatcatggttccactaaactttgtacattggagccatctgagtcccttttattcttcactgaccacactttggttttttacataaactgaacacacccaaaataaacctgttgaattaaacaaggcaaaccttttgggataggaatgaattgttgatacaagcatgatttggtgttaaaatat

SEQ ID NO: 64580 - DNA, 1891 bp, Arabidopsis thaliana landsberg
atataatttttaaaataaaactcacaactttatacctttgtgttgccaatcagattttaaccgccaaaatttttacagccaaaatctctacaaccatagtctttacaaccaaaattgacagttattaccaatcggctctaaacataacttttttgaggggctcactggtattgatcagattccttttggaagtgaaaggtgatttttctaacttcctaatgatgtctttactaacttccgtatttttcatatttttaccaagcaatttgcaacgaaactgtaaacttttgaggaagtattgcaaatacgtctgaaatttgggactactttagcgactacaaacagtctttgattcgtcctaatttgcgaccaaaatgatatagtcatctatatattggtatcaaaacaatcacgacaatgggacaattttccgacttccgtttgtggttgtaactatgcgatgtagttacttctgttttctatatagtccttaatttgtcacaaaaaagtctttgaatagtggctaatatttgagaccgaaaaaataatctcaaaatgctggcccttagcttttaaagttttatttttctcttttaagactttggtttggttttatattagagaatttccataaataaatgaaaaaagatcttaatttttcatctccagtctctactttggatgtttaactattttccaacatattcatgtacttttttagttatgcaatatctaataaaaaattacagtgtttaactattttctaactattttcatgtgcttttttagttatgcaaacagcaaaccggagtaaaaataaagcagatcttctttgaaacatcaaaccggagttttcttattttaagttgtaacatcaaactggagttttcttatcacttgtggaatctaatggaatgcttctttagctttggacactcttcttcaatcatgaaaatggtacaacattctagtagtagatgctttcagatcaggtagatggctaaggggtaagctctctagtttctcaaatgggatgataatacctacctgcccttcagtagcttcttcttccttgattataacctttagtgctttgaggaacaaacaacagacaagtcaaatcctttagaccattgccacaatactttgatttgcttaattccatttcgtaatcataacccatttcgtaaatttaattgttaatataagaaaaatatatgattttggcattcatctatggccaattttgctgtgaatacatacttccttgtatctatttaacaggtaacacaaatcatataccaccgattcctcaacttaagcaaacggcagatcacactcggaatcgagacaccaaatgtgatttctgaccgtaacataaatcagtcagaaggtctgcgtatagtaagcagtgagaagagagtaaaagtacgttaaccgtttgatccgtactcgattcttctctctcaccattggtcctcgtcaagctgaaatcaactggactcctaaacttttccaggtaaggacaaccgcgagtgaggaaactccatgtgacttgtgagatatctctgacacaactcagaatctgcctagacttttctttgatatctctgtgtgaattagaggtttcaagcataagacatttcatgcacttgacatcagattctccacatgatttcatcaaaagcttccgggccaaatctaacaataattctccagcatttttccagaatttcgctgcagatatagcaaaagaaggttctgctgagaagagaaggtgagaaacacctgcaaggaataaagagtaggctgcacttatcctgctcatgtcaaaaacaatgccagcttcagaatcaatcgaacggactctgtaagcagtagctagagtaat

SEQ ID NO: 64581 - DNA, 1076 bp, Arabidopsis thaliana landsberg
ttataactactaatcccataattgatcttatatatcatagtatgtttacatcgacaaatgtcacttttggacatcacgaacatatgtaaaaatggcatgaaaaactttatttaacatgtaacaaattaatagtagttgtccaaaagaaaaaacatttaacaatatataatacgtcatcaagacccttttgtctatatacgtcaagatgcagattatttcggaccattgctataaaacttaaaccacaaatttagaaaattattaataattaatttaacgattaaatcaagaaaacaagaaggattagcatttcatctttagaattaaggagagacacacgaaaccataataaaataaacaaaatgtggtgttatataataatcaaagaaatatatcattggcacttttgaaatggcgtcagcaaatgtgaacttcaaggtgtaggatccttcattttttcataagggatttgaggttaattgatgtcaatcaatttttttataaacatcgttttttttaatatgtaattcattggtctagcaaatatatacatagattaaatattgtggcaaaatcttgtctcccataaagcaaaatacaaagaaacactaaaccaatttggtcatgcacaaaccaaaccagagcaaaaactgagatcgtctactcctcccgtgggtgctacggcgaaccatcgctgagtaggtgtcggagatggggcgagatataaacatctttttgaatttatataccatgaaaaaataatattaattttaccaaaaaaaaataataatattaaccattaaacttactctattaatattattattagaaaactataccactttatttttacttaacagtcacaatatattaaatggaaataaagttggtacaatttttttcactaaaaactctgtttaagaaaatgaataatttgtaagttattatacaatttagtaactatttgaatgaacatgtatgttgatgtgatatctgaatactataatagatttttgtgaaagaaatttgatttgctagatttttttactcatctgatcgaagaaacaaaattttaa

SEQ ID NO: 64582 - DNA, 801 bp, Arabidopsis thaliana landsberg
ccctcaagaatccacccaaagtcattaaaaccatctttttttttttgggacaagtcattaaaaccatctaaaagttcaaattcattttcaaataaagtcttaaacaaaagaagcttgggttaaggcttttgatcactttgtgtcaagtttgctttttttgatgttatcatgattagaatatctcaatatcataacatgaaaacgcaaacccaaacccaaacattaacacaaacatataagtatataaccagagccaatgtaacccattgtgattataaatatatttttcacaaccaaagcttcatctttgaaatagccataactaaagctcataaaagaggacacgaaggcccattaacattaacactaacagagtaatgatgaaacaccaagacccatgaatcgaagcactttgtcatctctagcttccaaaccacaacaaactctgattcatttctagttctagcagaagtccattgattaagtttgtcttaagggaaatcttccattatttgattcacacttatttctccttatttcttgaagaacacctcatttgctaaacagaatgctcaatcccatcagtcaaatatcttttagtcctaaacattactattacctccttgatgctggagatggaagaggattcacagacgccgcggatcttaagaggattcacgagtttacattacgatatgaagattctaaatagttacagatgtgaacttgttatataaatctctagaccacaattacttcagcagcattcttacatctctaccatatgtgatataatattat

SEQ ID NO: 64583 - DNA, 567 bp, Arabidopsis thaliana landsberg
gagcaggcggctgacatagccgatggcggcttccatccaggggttgtactgggccgcttccatcatgaactgcgtgtttgccttggtggcgttcgggtacttggaatacttgaacagcatcatctgcgtgatctgcatcagctcggtatgcttgcccgtcgtacccaccggcaggtgcgcatgcacgatgtcctcggcaagcgcatgctgtttcgggtctttggagttcttcgcggcgtagtacaccgaaatgccgttggccgtcagccccagctggccatccaggaaagccttgttgttggacgaatcgttccagcccagcgtgcccggaatgaacgtcttgtagagctgggtggcgtactcgagcgcggcgatggtttcgggcgactggatgacgacctggcccttggggttgaccatcatgccgccgtgcgaccacagcagccagtgcgcgaaattgttggcatcgcccacggcatgtcccagcgcaaagccggcaggcgtgcccttggccttgagcgccttgcacagcttgaggaaccccggaagatcgttgggaacgccgtc

SEQ ID NO: 64584 - DNA, 466 bp, Arabidopsis thaliana landsberg
gcgtatggttgtagggtgtgtcgtcatgataaagtatggacaatatggatcaatctattacataaaaaaaaactatcataagaaaaattcttgtaagatatatatcttgaggattatgaatgtgattcttcaagtaaggtaaacaagacgaagttcttgtatatcacacctctgatgtttcaaatcagctttgcatctgcttggtgcgtatacacaaattctgattcacatgcattaattactcggagtagttaatgcgcgatcatccacttggaacatattgtaaaatgttgctagatctagatgctgagtactaaataatttagtaatacaacttaataggaccagaaaaaatctgtgatctacttgcttatataatacacatcaaaatgatatttgtcgaatcataccccctatgcatggtctaatctatatttgtgggatactatattcttttggattctac

SEQ ID NO: 64585 - DNA, 1440 bp, Arabidopsis thaliana landsberg
aactatacctttttccagtcacggtttagaaagatatcggcagtttcaccgccttcaaccatagttagcaagactatgaatcccgtatactgaacccagtcgatgagccaataaacagatgcattatacacataaaaaaagaaacacaagaaagaattcaggaaggaatgatgaaactaccaaagaaaaacaggctaacgtagtgatgctacaattcatcaatagagttgcaggaacaacttatataaaaaacagaagtttaccaagtaaaggcaacatccattcacggtttcagcagctatgtgcccggcacaagtgacaacacagagaatggccccgagaccaagaaatgaataaatgaacctgaagctcataagaagattggttcagaaattttcatcagcaatggcatacttcatatttcataacaatgataacttccccctcacacaaaaacaagatatgccactttccagtgccatcttacaagaatcctgaagctatctcttccatagcctaactacttctagacacctcaagcttacagaatttatgatctttccacgggaaaaaacatagtttcaccccaacaagatgtgtcactcatttccagtgccatcaaatttgaaagacaaatcttacaagaatcttaaaactgtctcttccaaagcctaacaacagcttctagcttccacacacctcaaatcttacagaaatctatgatcttgtctctgcctaaattgctcagtaccgttctccaaccactcggaatttaaacaaagatacaaacgcccaaaaagccagaaagtgatcaaacacacaaaaagatgaaactttcaacataccacggaacagggtgatcagaatcaggaaaaggaagatttcccatttgttcttgccattgcctaatcagccaaacagcgtagagaatcatagcaatcccaaccatcccaattagagaattcacgagctttaacatggactgtaaacaacttctcacgatcctcaccatctttaataacccaaaaaaaacctagacgaagagaccagagacaaccaacaacaaattctcttcgtctgttgggtctaggaagaagagaaatcgataaagataataacttttgtaaatcctgttgctccagatgtcttctcctttctaagcaaatcgtaaagttgtaatttttttgatacttgtttttcttttttgagctaagaagatatctattgacaaaaaaaaaatcacacttgatgccaaaaaaagaaaaacaattattttggattaccacataattgaattggtccatggtagtaacttgaaaggtcaagtggcttggctatatgaagaagaggagactctctggtcagagacggcgatgattctaggccgatgggtttccttcagttgcggaaacacgccggtgactaattgttccgaacgac

SEQ ID NO: 64586 - DNA, 1720 bp, Arabidopsis thaliana landsberg
gaagcttattacgagaatcctcaacatctggtttcgggctttcgaatcaactctggatgttctgcctcagcctgagagagctgtgacatcttctcagcagcgtctgaaagtgaatctttcagttgacgattttccagaagaagagaatccagttggcgctttaaaccagcatcattcttgccttcagacaccaacttttcatcttccatcaaaattttatccaatttagagatgacaaatgggatcttctttttcagcgcccctagctccttatccttccccacaaaagaaaaagaacccctttccgttaaattcagatacttgcgcttaaaggtaaagcattgctctgtcaactcttgtattttataatcatggtctcttttcattttattcatctcgatcttaaagtgattgatcatctcatcaggagacatgtgtcttaaggtctcgttatgctcaggtattaagccagtagaactctcttcatgcttaccattttcccaaactgaagaaactgaattaaggcttcctgacatcttgcggtgtaattgctccactcttttccgatcccctacctctcctgcctcgtccccgttttcatgatccaaaaacgatttacgaatcgcctctagttcctggcgcagaccagtaatctctttgatatttccaagtatgagacttctattaccaccaaattcagctttttggtccaacaatctctgttcatactcatccttgagactccgaagaacactagtaaccactgcagactcaatttctttttgaaaatcatgctcctgctgccacgaggagggaagttccatatcattcttccgcttcaacacagtctctagaatgctcttcaaagaatcaagcattttatcgacagttttggacctggtctcatgcggactgctgtctaaacccaatgaatcatccacagtggcacctgatccattgatgtgaatatactctctcaaattggtgagttcttcaacgagcatcaacaactgtttcctcgctttctttttaagactgctcgaagatccttgagtaagttcatcatgaatcaaacgggactcagaggattcattctcttcagaaccaacatggtacagaagcaaagtctccctaatctttgacaattcaagatctttctgagctatcttctcagcagcatcagactcaatagcagttaccattccccttataatcgaatcactcaccactcgtgagatagttaacctatcatttatgtcctcccagtaagaatctaaatcctcaagaaaatcaacatccggattctcgttctctttaagaacaccattaacctggagtgatgatgataaagtgtcatcatgaaactctaaactaccattctcagacttcacgacctcttcctccataaggttattaactaattccaccactcttttctcacaataaccctgtgagagaaacaacagtgtgcaataaaaatcaaaactttacaacaaaatttactccttaattaagctatcccagctaatgaattgagattacaaatcctataagaaaactctaacgaccatgaccaaataaaaggagaagcaaacttacaagtcgaggtaaagtgacgaattgaccttaagaagagctaatcacagcgtcgatttcaaggatgagacggtcttcttgttcttgcagagttttagggtttcccaaagaaaacgcatagtaa

SEQ ID NO: 64587 - DNA, 406 bp, Arabidopsis thaliana landsberg
  unsure (1)..(406): unsure at all n locations
ggactctccttaatccttaggaaaaaaaaatgaattgtccttccaaaattaaagactcgagctggttcaattcacactaaccaaaccggaatacaagaagatttggtcaaataaggtcacgaacagatgttaaaaacaaatgggcctagaaattaaaaccctaacgttctttaaaaccgacaccaaattaacattataaaaaccacaaaattttgtcaacaaaattttgttcatctccaaaatctttttgcaacttctcatcttcactttcttaaagattacgcttctttctcttctgttacaaaacgatgaagaaaatgggattgacttgtagatggatagcnnnnnnnnnnnnnnnnnnnnnnctctcgcttaaattcaacgctctcgttgttacaacgctgat

SEQ ID NO: 64588 - DNA, 609 bp, Arabidopsis thaliana landsberg
aacacttgatatactcaacttgcaaaacgatttcatcattattaatgggtttgtgatcactaatcaacgggagagagagaacggtgtgtatatatagaagtgaagttataaaatgtacgggaaagtgggtatgacggctaattgattgccctgtaaaaactttggagttacgagagagatataaatgattaatggtaactaatgctaataagagggacgttttttttaaggattaggtaattgatagacgtctctcttagcatctctctgatctatggatataatttataagccaatcgtagttaatttgctcttttgtgaagtagctagttgatttcatataattacagtttttcctaagtattatatactccttagtatttgtaatcagttaacttgtaacgtatggtgccaattaatattttaattgttaacgaaaaatagttataaacttatagttggagctgcgagtaacggttaagaaattaataatacatttcccacaaaaaaaaaacggtttcaattaattggagataatggctgcgagtagttaatacttttcaggtgattcttgtaagtaatggcctcttaagacatgagaaataaatc

SEQ ID NO: 64589 - DNA, 490 bp, Arabidopsis thaliana landsberg
tttagttcatgtttctcagatggctactagaagggttgataaggctaaggagtttgtgaagagagatatgtaggtttatgtgaaagttatatcgatttcgagtgataagtatagtctttctatgagggatgttgatcagaatacaggtagagatttgattcctttgaggaagccttcagatgaagatgattcatccaggagtaatccgtcgtatagaactaaggatgggcaagtgactaagactgggatttcagggatcaggattgtggcggagaatgatgttgcaccttcacgtagaccgttgaagaagatgagctctcctgagagatgggaagccaagcagttgattgcctctggtgttttgagagtagatgagtttccaatgtatgatgaggatggagatgggatgctttatcaagaggaaggtgctgaagaagaacttgagattgagatgaatgaagacgaacctgctttcttacaagggcagact

SEQ ID NO: 64590 - DNA, 720 bp, Arabidopsis thaliana landsberg
  unsure (1)..(720): unsure at all n locations
attatacttcaatatgatataaagttataagatgaattcttaacaatttttatatatcgatcgaagtaaagtataacaactgcgattcgattgtggtgttttataaataagttttgattgtgaaagtaaaaacaagttttttgcaaaaaaaaaattgaagatctgactgtgtaatttctcgtcaaaatgagattccacaaatttttgttagctaatgtcttatgagttgtgtaagttcattacagatgaattttattttttttactttataaactcacaaatgactttttattttttaatcatcttaattaaagctagggttggggaaaaagcgataacataatttcagcaccacgtgacaaaaacttatagtcaaatcattcagctcgtttgcataattgatactcgaaaataacatatgatagtgagaatacttatggtccaatagtcacaaatatattagtataatattatcaaagttaataaagatagttgggaagatggtctccttaatgatcaatcttatcaaataccacccaatagtactatacaaacacgtcacttcataattgctactaaaactatttatgttccctctaaatggaataaacgaaaaatcaacactatatttccaattcaagattcggaaaattgttaaagatttggaaaagaactttgatttttgtagcanatacttaagttctatcaataaaactaaaa

SEQ ID NO: 64591 - DNA, 1534 bp, Arabidopsis thaliana landsberg
tgttaaccatgcactcgaatattaatcttctttaatggattatactctataggttgagaaaaatatatgtggagaatcagttattttcagagaatttttactcaaagaatggtgcatacgattgcttgtaaattatccttgatatctttagttattgtgagtgaatcatattaaaatgttagcactgctaagaactggcttaaaagggctcatatgcaatagttggatgttaatgggttagagtatgttgtttgtgttagtgagtccagtgtctttttctcgagagatgtcctttcttgttgcagttgatcatagggtttaacaaggtgaacacaaacaattttatactgtggatctgtttcaatgctttagtacctccttttgcggtttcccgagggagatcctatatactattctgtcgaaacttatgtttcggactgaacttctttacttttaactgtcaatttctgtgaaggactaaactaaacaataggtataactttccatgtctttactactgatttgagatgctctgtctctttgtttttcaggaaaaacttcttcagagtagtagtagaattgaagtttctctagggaagaagttagtaaaagatatgcttcctgagatagaaaaagaacacaaggttccaatctgctctatacttttctattttttttttgttttttttttctgtttttcatggctgaaaattctcttcaactgcatattttcataatggaattttttccactgtcagaggaaagaaaaattgttgaaaaagcaacacagacaggctcttctccttgataactttgtggttgttgatggtcttgctgggcgatctctccgtgataggaagccagttagatacacttttggtaatgttatgaccttgttggaaattcatgcccgtggttcttcctttttggcattttttcctatttaaatccatctaaatctctactggactgaagtattactaatttcaaaagttattgcagatgattatgataagtccataaatgatgctatcaagataacaaagtacgtctgagtctcccttgcattgaatcatctctgttggttttctctaacattgttattggatgactatcttctattgtctcttacattctgtttgttttcgtgatactatctcaggaagaaacatccatcaccagaacatcctctccacagaagagaatctgccaggttggacgctcttgcgaatggcagatcgaccagttcaacccaccctactgagcctgtgaacgatacagcatctgggagatcttctgattttgctgattatgatgatttcgatgagcatagagatgaatctttggacagaaggcaagatacagtgtatttttcttctctccttaaatctcccctctggaactatgcaaacctttagcttaattaacaagtataatgttgtggcagtaacaggcgcagacaacgacctcaacgatattcagctacggactttgttgaaactgtttcagacaatgaggtagaatttcaaagtga

SEQ ID NO: 64592 - DNA, 853 bp, Arabidopsis thaliana landsberg
tttattgtttttgttggtagcatcgaccatgtgtaatatgattattgaatggcaagtgacaacttcacatgcttttattaactatagatttctgttatatagttaacgatcagtaagtttgatgtcagaacgaaaagaatattgttaagttctcgaatcgttgctatagatttgttttgtgatttcttctttgcattttacatatattaaattttttaacgattttgatattaagcagaaagcagtataaatgatgttttaaaatcaataaactttggaaccatatgaaatttatccaagacacataagtttaacaaaaagttaactaagcagtgtatgaaattattatttaacctatagcatagccaaacaaacaaacaaaaatgacctaaacttatttactttaacatgcaaagaaaataaaattattgatcgaatatcgcatatattatagtgccaatataaatgttttgcctaacacttctaattttttaatgattcagatttagtcatcattcgtacctatggctatagtcgagctaaattccgcacttataagagatattctgttaaattattcgtttcaaataacaaaatcttattggtaatcatgtaacatgaatggaccagatcgtcgatctaacaaaccccatgtttatatagtttggcagcttttgaaatttataataacgtgattgaattagtgtcagtgactaattaacaacgttcttttagtcaatatgattccactcagtggctacaataatgattacccgaattgattaggtgattctaatgataacagaatcaataatttatcgattgatcatctcttaaagagaaggaatcagac

SEQ ID NO: 64593 - DNA, 1105 bp, Arabidopsis thaliana landsberg
aggtttttgtatcatgcgcaggtgtggtccattgtgccaactgccaaccccggctcatacatccaaaagaaaagagttttttaaaattaaaattaactgatatctattaaaattaattaagtgatatagtactatactgtatagcagaaaatataaaagatgatggcacttatggaatgctgatgggaccagaatttggttggtctgattcgtctggctgagaaagaaagtataatttatttatttttttagtaaacgaaatttgttattaaaaaaataagagccaagtaaaaaatatttttaaaatcgtatatattttattatttatttttagcttccggtaaacaaaaaaacacagcctttgttctgtttctctgcgatttcttcgatgttcctcttcttcgttttgattttcagatttgtttaactcggtcgttgcgttgacttcaaatttcttaaaagagagagagagagagagagaggagatagttcagaaattctgtcagacttgggatctttctcggcaatgcgacgcttgttcgccgcgaaatccctctcccgagaggatacaacctttttgtcattctcttcttcttcggtgacgcgtttcctcaaggctcttcttcctctccgttcagatccaagagatgtccgctaattctcatcctcctaattccaaaaacgtcctctgtaatgcagccgccggtgccgccgccggtaattctctgatctgcttctttcataactttttcttagattttggtttggttgattaaagtttcaaactttctgataggggttgttgcggctacgtttgtgtgtcctcttgatgttataaaaacgaggtttcaggttcatgggctgcctaagctcggtgatgcaaacatcaaaggtttgtcctttttctttccctttaaatcttctcagaaattggattccgttgctgatgtcatcgtatctggtttttgatcaggtagtctaattgttggcagtcttgagcagatcttcaagagagaagggatgcgtggcttataccgcggtctttcccctactgtcatggctcttctctccaattgggccgtgagttttcacttcttcttcttgg

SEQ ID NO: 64594 - DNA, 1999 bp, Arabidopsis thaliana landsberg
agattgatatcaactatgctcttttcaagccaacggaagggatatatgacccgaaaaccgatttgcattacgataacatgcttgatgctcagattgatgctgcttacatggcgttgcaagatgctgggtttaagaagatggaggttatgatcactgaaactgggtgggcttctaaaggggattcagatgaacctgcagcaacaccagagaacgcaagaacgtataactataacctcaggaagaggcttgctaagaagaaagggacacctcttagaccaaaaacggtgcttaaagcctatatctttgcattgttcaatgaaaactcaaaaccgggcaagagttctgagacacactttggactttttaaacctgatggaaccatatcatatgacattggattcaacagtctaaagtctgattctcccaagtcactcatttcatcatcaaaggtatgaattctgtcattaaggaggccatagtatacttgtaatgattgtatccattatatagaacattttgctctttgagtctcattccgactttgaatcttctgcgttttgttgcagtcagctcgttactatgtggcattggtcatctctgtctcggctttcctcttgatgatataaatgcggaaatggtgtgagctttgacgatcctcggatttggtcgtacattcgtagcactataatatatattactagggttgggacgctaacgaaatggtaggagcacaaatttactgcaattctcatatatgtagccaagagatatccagaaaagatatcaccagacactatcatatatacacatcttatgtaaaacaaatctaatacataaatttgggtctctgcttatattttgttggattggatactggggaaattaacggatatcatattcaaatctttcataatctgacaagcctctgggttctgcgtcatttttgtgtaatagaagactggttttgtggaggtagtgtagaggataaaaatagcaggtgtgtcaatgagagtgtcgtaaatagtgttgaggtaaaaaagatcctagtggtttgggttttcagttatggagagtcttcagcctaaagagaagcgtatcctcattagtgtcttattatctctccctccaaattcacaaacttacatattacgtaatgctgctcatagcgacaaaattcaaaaatgtgttcctcctccgactgtattcttcctggcccaccgagccgaagcaacctatcggctgctgacctgagcccttccggcctcttggcatttgcctctggttcttctgtctctctcgtcgactcacgctctctccagctcatttcctccgtctctctcccgtctcccatctcttgtgcattttctacggtcacctctgttcgttgggctcctgtccctgtccagcgtgatctcttctcctctgatctcctcatcgctgtgggtgaccacctcggccgcattgctctcgttgacttccgcctctgttctgttcgtctatggcttgaacaaagctgtgacagtgctagtgctagagggaagagccttggttgtggtggcgtacaggacctatgttgggtattggctcggccagactcctacgtactcgctgccattaccggtccatcttctctctcgctatacacggattcaggacaattattctggaaatatgacgcatcacctgaatatttatcatgcattcgttgtgacccctttgattcccgacatttttgtgtccttggcctcaaagggtttcttatctatttgaaacttcttgggacaaccgaaaatgacatccctacaaaggagtttcaaatccaaacagattgcagcgatctacagaatcttagaacgggaagctgttgctagcaacaatcactcaacattgtcctggcttagcccgctttttctctttattacgcttaattctctttgtcaccgcattggaaacacattcttttcgccacatttcccaaaaagcttttcgtgtttgattt

SEQ ID NO: 64595 - DNA, 2593 bp, Arabidopsis thaliana landsberg
attcgcaggttatagttaaatttaagttccgatgctctatgacgacagttcaataatgcaacaatactactgagattgataagtctctgacacaggcattgaacaatgaaacgagatgaagttgcaaaacaaatctatgacgacagttcaataatgcaacaatactctgagattgattagtctctgacacaggcgttgaacaatgaaacgagatgaagttgcaaaacaaatctatgacgacagttcaataatgcaacaatactctgagattgattagtctctgacacaggcgttgaacaatgaaacgagatgaagttgcaaaacaaatccaaaagtaactaactataagtttgtgcttagtgaaatatcaacaacatatgagaactcaccctctagtgccaccaataggatccaagatccagtggcgacccttaggacctccttctgatttaccacgatctatagcgttgagcacatcatccgaagtcaaaggagaagcaatagcatatgattcatcacttgcaagagtatctttgacaagctctgtaatacgagccaaaacggtctcagcagcaatcttccttaactcaccagaatcctacacataaattacaaagtcataaacaaaatccatcttagttcaatcaagaaaaaccagcaatgtattattttgtatatgtttggcacctcttcagccactaaagacacaggttcattctggagttccctttccagtacaaggctaaccaccgcctgcgaacctaaaacaacatgactttgtttcattaatgagccaataaagatatcgaaatctaaagagtataacagagaaagatatcatttttctgagtgatacacaattttactactaaccataatcagcaacagtaacaggactatcatctgatttgttccaaacgtcagttaccaacagagatttcctcacttcctggaaaaaaagcaaatcaatttcacttgttataatctgactaaaatacaaaacaaaaacccaattcctataaacattgaaaccgaagagataacaagatcgaagatttcagtcacgtctagctagatccccatttcatattttttcataaataaaaaatctcagattttcacatcctaattcgaaaatactcatatcagttgacaatttacaggaaacaagaagaaaaagtctacacatttaactccacaaaagagttcaaagaaaacatctaactctcctcgaacacgtatcgcaaatgtcaacgagcaataagaagaagaaaaaagagaagaatttatggtttaaaatgtaaatcgagaaatcgcagagaatcaatcatgtgatgatccaaaagacggaagaaacgagtgatcgtacgttgctgagacgagcagcgagagaaacagctttcttcgcagcagaaagcatctcatcgtaagacattgaaaaatgggtaaagcaaaagagtaccacgaagttgaagaagaaaatctctgaaagaatcgatttttatgatatgaatggaaaaacctctcgcgactctgaagcaacttctcttcccaatttttattttgatttagaaatatacgtaatactaataaaataataattagttgattgaatatagtttggtttttggtatttaaaatgtatttatttgccaatctctctaccgttgtggaaaagtaggcaatgtatagagtcccctaccgttgcgacaatgataagtttctctcacgttgtctcattcctctctttattttgtttattatactcaccaaaattttatactattttttaattaatagttttatttttattttataattttgtacattttaaaaagttttattattattagaatactctgcagatttcagatggcatattgcaaaactgctataatccaaatgaggaaaacataaatacatgtaacaatccaagaatgaattggtccaataggaagatatttttccttagagagagatatttcattttatatgaattcagatttttatattttatttagtaatatatatgtaatttcggtaagtttgctttctttttgtaggtgaagataacaatcctgattaattttatgtttggcaagaaatagtatatgattctcaactttctaattaaattattttgggttcgttgtatttgtttagtcttttctgatatgcttttattccaaagaggttatatgcttcttcttcctttttccctcttcttttatactagcttactaaattaataattagaggtatgctaatcttaattaaattatattgcaaattgcttttatagatattgtaaatgacgtgtgtaccttttgtgtggccaggtcttgtcaaatctttcgctgaaaacaggttattgtgtgttatatcaacaacttatcattattaacccaaaatatctttgtaacatggattaaaaacaaagcagctagtatatattattcacatgaaaagattaaaaaaaattgtgcgactagtagatttgtgatcgtccctttataaagtttgactagaacactaaaaaacatttaattattgacaaagtcgcaacgattcctttcatcgtgaatgggatatt

SEQ ID NO: 64596 - DNA, 466 bp, Arabidopsis thaliana landsberg
cagaacgaatccgacagttccatgtatataatatctgatgtttgaaaatcagttgatgatgctgggctaattgacctttccatgtgtagggtctcagttggtccaaccagagctaataatatctcagtgaaaaagtctactaaggtatagcaagcgtattggcaaactatatcatgttgtatacttgcaaattactatgactagatgcagttatgagattaaccagaatatcacaattcatcagcatatgagttacagcaaatattacaaactttgtgtcttaaagcatgagattcatcagttaaactacttgatggccatttccttcatttttcttgcaagccttgattctagattgtttcttttttctgatataggagaatgtgagtaaaagaaccaccgaacttgggaacaataacctttacaagacaggtgacttcctaaatgttatgtttgttttcatggc

SEQ ID NO: 64597 - DNA, 886 bp, Arabidopsis thaliana landsberg
tatacatggaactgtacggattcgttctgtaaaagctcatcaactgagatgaacgactaatcctaagtagagatgtaacgtattgcatgtatatgatgtgtatagcagcagctaacgattactgcataccttttcggatttgccatttttacacctttccatttcctgcattgttgcatgttcagtagaatagttttagaacagaatgcaaatcagtacaataaaaactaactaactgattaagaagtgaagaccatggcagttaataactcttttccatgagggataacaaaaaacccttaaaagttaagcaattttacatggtactgctgccacaaagcgttggaatccttagagtgttcccaccaagattacttaaatcagccaaagcttttcttgtgactttagtgtattcctctgaaaaggagacaaatatcggagttaactttcaaaactaggtcccaaaaatgtaatgaagatatactctcccttataaagcttaccccagttttcaatactgcttttgccctttcctgtgattctcgaattttccttctttttgaatcaaaacaaaagtgcattaacatgtgaataagtgcataacatccaacacttgtatgaactcagaaacagggaaaagggataaaccttcatattgtttgtgttagaagttgctcctaaaccattgctaattgttacagactttctcctaaacaatgtaaaagcagaagattaattcttacagattcgtaaagtcaatttcttcatgatcaagccaaaatatgcaccagtaaatacatcatgtaatggatggaagaaaacagaataattgtaaaaacagcaacacaaacctcaaaggaatacgagtcttcttctgtgaagtacc

SEQ ID NO: 64598 - DNA, 921 bp, Arabidopsis thaliana landsberg
aagcaagggacaacgggttattctgaacacaacctgcgattatagcactccacgagacagaattcttctctgggataccttgaaacactctaagagactcgacaaacctcttgccttttgcatacatatccaacaacgcactcgcagcaaccacatcagtatcacaacccactcgaacgacaatcccatgaatctgcattcctaaactggtatcctctaaaaaggaacaaactttaagaataattgcaaaagttctaccgtcaaactcaataccttctctccccatgtcaacgaaaacctcgatagatttcaaactctcgccgttttgcagatacccagaaagcattgagttccaagacacaacatctctcacaggcatcatattgaagaaagaattcgctttaaacatgtcattactcttcgagtaaccatttatcattttgttccaagaaacaacatctctcagcggcattttgtcgaacaccatagaagcagacacgaaatctcttgaatttgtgtagacctgcagcaaacagttcagtacgaatgtagtcggacgaaacccagatattatcatttatgagcccatgaaggcccttttggcctttttgggccccctttaaggggcccctttccttttaaaaaaccggggccctttttccccccttttttgggggccccttttttttttccgggggccccaaaaaccccaaaaatttttttttttcccccccctttttttttggggggaaaaaaaaaaaccccccccaaaaaaaaagggggaccccccaatttttttttttttttttcccccaaaaaaaaaacccccccggggggggggtttttttttaaaaaaaaaacaaaaggggggcccaaggaaaaaaatttttttttttctcaaacccttttttttttttattt

SEQ ID NO: 64599 - DNA, 1732 bp, Arabidopsis thaliana landsberg
ctttggaatcatttcttcagctagagctcgtcgcccgtgacccaagttgcagttgatgagtatgacatttgtatgatcgcaaacttccttgaatgccactatagcatcagcaaaggcgtcttcagctttattgagctctttgctcccgagacggttccgaccaagttcattacatacccaccctttctttctcaaaacagactgaaactcactacagttgcttggaagctcctgtaatgctcttcgtgtttcctcataacaatttaaggcagccaacagattgctttctgcatcatcagttttagaccccttgagatatttgaatattccaccttttttcgctcctggaatttccttagagttagattcattctgctccagagggacagctccttttgtctcacccgatgtgtcttcttcttctttacggctcttgttctcaactttaaaattaacacgttcatcttcaacatctcgtgagaccttgctggcgacatttttggactgtaattttctattgtgcttcctgctatgaggcacagtacgagcactacttccattgctgctacttgcactgcttccactgcttgctctgtcacttttacagctgcaatttactaatgaacacgaggcacaattttgactatactcagttaacttctttttgagccgctgtacttcctttactacttcagactgcatttttaaatgattggttgtcccctttgttcttctggaaagctcctgacctttaagaatgtggaactgaacatatatgtcgccaaccaacatccatactttagcccagaagaggcgtgttgatgaaagttcttcaacactgatgtcagatggccctgattttgcttctaaatcttccacttgcgttctttcatgaaattttgactgcagtgaaagagacttgttcatcgaggaaacaaacaatgtctcctcaaacttctgtggcattgatccataaatcgagcaagctaattccacagtattcaacgcttggtgcaactgtttatcctctttgtaagcttcccctagagacaaatatgattcaccgagaagtaaaacgaggttccacaatttcctatctagtttagatgttggtagccacttacggatatcacagacctcaatacaatcaggatcaccacatgaacacttggaaaaatcaggtaagatatcatgaaatgcatccacctgttctgaagattgtagttgccgtgtccacctcatagactttatagcttgagaaacatggtttattgctgatagtttcgatgagataggactagttgtagtttggcataatgtaccaagatcgagactagtatctgaactggagttcactgcagagccttcagtatcatgggaatctggactatctgaatgtaagagttccttgcaaagtgacacatttgcttccaactttggtcgaacagacactaaaggcacaatattagaaactgagtgatcttcagtgaacttgtcttctgagaaagtcacggtctcattttcatggtcagcaatagtaacaggatcaagtgcttcctcctctaggtccgatattttgacttcacgttgcactccattatactcaaaagtcaaatcagattcctggtcactattcagatattaatcctccgaacagcttgtgtgcatacgcccgtgcaacctatcagaatggtattactaaaaagtacgcattaaatatttataaagaaaa

SEQ ID NO: 64600 - DNA, 520 bp, Arabidopsis thaliana landsberg
tgttctttcttagttaggttagatactattgcagagtcatgttcttctgtgtactccataatatataatttgagggacctattaaaagactaacaaaataaaactgttgaaatgacttgcaagttacaaacagagcaccaaagtgatacgacgaatatttcccatacaatgtcaccactagccatcattattggtgaattgattagctgctcaaattataagccgaatagagaaattaataatatcgagattaatatatcgttaaacaaataaaagtaagcctttgaataaaaatatgtagaggtccacagtgattagaccgaccaaaaaataacaatatttaatttcactgctataagaaagtttatgacataatgataagattcaaagaccaaaatagtagaattctataattagaggaaaatactattttcttttctcattatactatacttgccagcccattttgtcatttatcatgaaaattaaatggttttacatatcttcatttaatgttata

SEQ ID NO: 64601 - DNA, 510 bp, Arabidopsis thaliana landsberg
agcaccgataactcattggataatgacgctactttatccgcaagcagaaatttttcatcttctatggacttttaagattcttctatctcagcaatcttcccctcgttgttgtctgctaaagcttctttataggatttcagcaacgctgtgataacagctgcttcttcttcctcagcttcaccctcctcagcactggcattttcattctcgacatcaacagcaccatccgtctcctgctccatgatttcagaagtgaaacaaaaattcagaaaaagagcaatccagtttacatatacgtttcctatctattcctgatataagctgagacagaacacacactagctacacatttttttaatgacctcctaaacaatcagatttacaccaaaaaagcttcagaacattctgtggcccccatacaagaatcacgtaatcataattcgattgggatagtacatacacaccatggtcttaaactactagtgaaactccttcattttgggaacacac

SEQ ID NO: 64602 - DNA, 563 bp, Arabidopsis thaliana landsberg
  unsure (1)..(563): unsure at all n locations
atgtgttactctgtcaaccaaaaccaatgagttagagttcattcttcaaagtttaatacattcacccactctagactcattaattgaggtattacaatgcttatgcaatcaaaagaaactcaccacagggtcaggggcatcgtcttctttgcacatgacccacgggacaccagtctcagttgctatagccattttagcnnnnnnnnnnnnnnnnnnnnnnnnnnnnnnnnnnnnnnnnnnnnnnnntcttccatactcattctcaatctacagtcaaatgaaagatgacacctttctattaactcacatagatccctaaaaccataaatctgcatgatctccaatccgagcactaatcttttccattaaagtttttacctgagaaaggataatgggaccaccctgggactcgaacaagttctcactcttcatcagctcaactattctctctgtgaatcctttcatagctctctgcanacattatcacaacaacattcatatcacaaggtttaagcttctaataaagtaaatgttctaagaggaaaaatagataatggaactca

SEQ ID NO: 64603 - DNA, 213 bp, Arabidopsis thaliana landsberg
ttaaaaaagcggatagccctagatgcatcccaataatagaggattccttcccgcaatcagaccaaccgctcccaattaaccaacctggactgcgtaaaatcctaaaccacaagacccacttaaacatagcctaactatagcttaaatgacaaacctaccgtgactgattagtcatacatagacccactctattacatcaatacttaaaaactg

SEQ ID NO: 64604 - DNA, 2021 bp, Arabidopsis thaliana landsberg
tataacatcgagacatcaatttcttgcatgggtccaattccaactatctttgtaaaagaccagttttatacatttatatgtttatgtaatttttattcactaaaagattgtaaaaagtcatatttaacttggatgtttggagtcgtgatatttaattcaatataatcccctggccggaatttatttaatatatagtgcaaaatgactcttttgatacagctgattgcacaaatatctttagtagttttagctcagattttgtttttgttttcgttcctatgtcttatgtatttaataaaattaatttggtttcttcaatcaatttcgcattggataagcatcgaagtgttaaataaagtaaagttttgtctcttttccttcaactcggttttaaaaatagctatctctcaagcctatttctaaggccatcaatgtagtctttcagaattcaagtgatgtcaagaacattggatagtttaattccttctgtaggttcaattgaaaaccttgcttttgtgttgcagcatacaatgcacaaaggcttgttcagagaccaattggcatgcctaaggagaaatacacgcactttacaaatatggttatttagaggattaagagtttcccaatgactatagaaccccataatccaaggcgaagacatctaattcatatcacaagagaaatgtttatgcaaaatgttatgacctaatttagcttctatgctttacctactttaagttatttcttgtttatattttggaaattatcagtttactagcattttcgatcatatcgttttaagacactgtaaccacacatttcttggagtatttgtaatatgtgtgtgtacatgcctgtggtgtatgtatatatggacactcacgattgatttaatgctctgtcatatcaaataacgtatttactattacaagctggtggtgtcattgaagtcatcattgtatcttcttccaaattcataaagttactgtcactgatactattggtgggccattttttaccatcacccatttttcactactatttatcttttcttcaaaaatgttttcagcataaaaaaacatatttggaaagatagacgcaaacctacgccaagaaaagagaactccaagtctccaacctaataattagcattagcatttaaaaacaaaaccgcgtgtccatttcatgtttttatgctgtgtaataacatattgctgcggagtacaagctatgcaaattggtattacatgagtttgagttaggatacaagttttttagtcaattgtactaatcaaactgccaaaacaattagttccccagctctaattttttttgttacctttccattattttcgagtaaatatgatactgaataacttattatacatagtttcagtttgtttatcataatttttttttttttttgaatttatatcataaaatatttcaatgtcatttaaatattatcctgatttcgtctatctctctctctctctctctctctatttaagacaagctaaaggtagaactgtagaggccaatctcaaaaagtctccgacactctctagatttcctttgctccttcgttctggccatggcaatggcaaaactcgcaattttcaccactcttatggccatactcgtaatgacatctcaaggaaggattccaacagaaggaggagagaaagaagcagaggctgacagaattacgtcacttccaggtcagcctaacgtcacgttcgagcagttttccggctacgtcaccgtcgataaactctccggaagatcactcttttattggctcactgaagcttctgacctccctctctccaaacctctcgtaatttggctcaacggaggttaatttttaccaaccatttgttttctttttatacattctttgtggttactattagcttttttttggaaactgaattatttacctaacaacattataaatttcgctagatctattttagctaaccaactaatctctgtcacacttcttgtatgggtttgca

SEQ ID NO: 64605 - DNA, 136 bp, Arabidopsis thaliana landsberg
ccttggaagaagaaggtacacgttgcccgggaagaaaggcacatttgacaaaaaactaggaagacatcattaaaccataaacataccatcccctaacaacccttgactgctcggctaaatagaggcgcaaaaaaga

SEQ ID NO: 64606 - DNA, 744 bp, Arabidopsis thaliana landsberg
aggttagcaactctctcaatcttccattataagaacatacgtacgatgcagaaaacaatgcaggggaaaagaagaaaggactgacctttattataactcgatctgccacagcaaatgggaaatggttacttttgtttcttgaacgacctgaatgattcgtgacaccaaatgcacgtctctcctgtgtatatggaaaaggaacctcttgtttgagacataaacaaatgtgagaggtcatatgtatagtagtattgaatttacttgatcgaatccttctcgttttctcttacatggatggtttgactgtgaattctcttctcggcagaatgcttgtaccgcaactcgtaaagctgcgaaaacatcgagagaaaataatgacaaggagttctctcagacaataccaaatacaaaaatcatgaacacaagtaattcactgactgagatttggggttatcgagtcttctgagactggttgtgaacatgtgcaacaagctttctaagaacacgacggaaaatagattccattaagcagaagaaatgagccaaaagcaagagaaaaagaagaggttgtgctagcaaaactttgtaccatctgtttaactttgttctatccctccagctacaaaagagtgtccgcaaggtaaaatcatagtattcagccatcaaagagcctctacaattgtgcaaagagaattacaattaacacaatatatgctatagattaaaccgtaccatttttattac

SEQ ID NO: 64607 - DNA, 494 bp, Arabidopsis thaliana landsberg
tggacgctacaggacagtatgaagcgcagaacacatgttacatgacatatgaattcatacgaggatcatacgtatgctccaagaggctcatatgcatatactgcactcacacgcaagtgcatactatgtgcgcgagtacttatcaatgatgcacttggacttatccaggaatttgagacaaaaacaacgccttggaacatacttcaattggtacaaacgtaaaggtctcatcccgtgcaaacgatcttattttctagctaagaaagagtagatgaatccgggacaacatatcttacattctgaaaataactatggcggaatcatcatttgattaaaaagatacaaaccaaaaaataatatcaaatggaactagttacatctgccaaaaaaaatgtatgagaagttcaatctaagctgagagaatgccaagaccgttgacagatataacttcaaaacctgagaatttccttgaaaacattaaactttacacaaaa

SEQ ID NO: 64608 - DNA, 403 bp, Arabidopsis thaliana landsberg
gctagtagttatccgagctttctttgtcgctaatgaccgacgctttactgaccccttaccgcctaatttatttgctaattgttctcactaaaatcccgggcaaaggacgactggccaggcacggaatgctaccacctacctgcctctgtgcctaggcaatgccgtaataaagcggatatgggcgacgacactacgccggaccttggctaccttaaatctgagcaagtgccatcttattaaagatccatattgcgttattaactggcggtagtgatgctgctggaacccgtctggctcgtacgagttccgcagacattttgccggatccgtcccccgtgatttgagcgaacccgatacgatggatggagtattggaggcccattttatgcatcgtgcattgttc

SEQ ID NO: 64609 - DNA, 602 bp, Arabidopsis thaliana landsberg
acagacaaacaagtttattgaagcaaatctgaacgaaaagggaaagtttgcacttcgtattaagctaggttaactctacaactcttatgttggattgcacacgggtcattattccatcgatctgaaggaccctgcacagaggaacggtggccgtcgtctcggtgccatcacagtcacagagggtaagttcgctcagcaagccgggatgaacagtagtcaaaaggggaaccggtcgaacttccgcaacgagaagctaggggcagtccctgtcgatgttacgggccgctggttcgcttccgtgaatagtactgccactcttcattgcgattacgtgagtacgcaaaagccgcgcaagggcacgatccctatgacggatcagcgtctcgaccgtgttattgagatcctcggactgcgcgatatccgtgtcgtgtgggaccgcctgatgcgcgtcaagtttgaatacatacggatgctggaggaggccagcgaagcaggggacgaggacagtcagggagagttggaccgcgccacgtctttcaacagctggaacggcgaaggagaggacacggtttctcgccggaattctttagtcccacagaccc

SEQ ID NO: 64610 - DNA, 1453 bp, Arabidopsis thaliana landsberg
tcaatacaatcaacatgaaaagtatgttgacaattgggcaaaacccgacccgtctcgctctcttcgaattccgataaacaaacggcgcattcgatcggatctttatgagtctcgtcggagaaagtgaaaacaggaagagatttaataacgtttggatcaagtccacgtgaagcgacgacggaagttgcggcggtggaaggatcagcggtgaagaaaaccatcgtagcgcgacggttacggctacgacgacggagatgacgtctacgagcacggaggagataccaacgagcgtaaagatggaggaagaccattaaaatgacgacgaagaagaggattactattgcacttagcatgattttgccgctcatggcgtaggttttggaaccggagaagttgttgtcttcgggtctgaacggaatcggatcctggtcgttggagttcatggttttcgggtaggagagtgagagattcagagatagattgaaagagagtcaactggtgaaggaagatgatgaaagatttggtttttaagtaatggacgagacagagaggttcgtgagaaagtgcagaagtctaattattattattggcaaagtttggcaagacgacgccaacgttgacgcgcgagttttctcttttgactattctgcccttcttctttttgttttggtaactatttaattagtttgaaaatttcaaagggaaaatgcttagagatatacttttacttgtatttttttttaccataaggttcaaaatagttattaacttttatttttctataaattaagagagcacgtattttggattattattttatgataaagggataaatagatactcattacagggaaaatgggatttaatactttgatatgtaaatagtatcacaacaatatgataaagttaagattatatttgcgggtcaactagttagtatcaaatattcactttaatttagcataatattttctgcattgaaaattttaaattactacaaagatttttttagtcggtaaaataaataaataaatatcacttggctcgtgcttgtcgtccacagttcaaattgttttttccgaatccaaaacttgttcggtggaagttaatctgaccactgtgccgtcgatagaagttcataagttacctttagacattcccagttataattaagtacaatgtttcctcaactggtataaaatgattattctatgttacatatatctcgttccagttgcactgttttgtagtataactcttttgtatcagtatagtccagaacgatagttcaacactatttcgcacaatggctttagacgcctacatagatcgaactgaacaagggcaataccgcctaaccaatcattacaggtcttctatctatacattcaacagctttcttaagaatactatgttcgacttcagtaatctaatctacaactctggttcaatg

SEQ ID NO: 64611 - DNA, 6052 bp, Arabidopsis thaliana landsberg
  unsure (1)..(6052): unsure at all n locations
ctactccatcaaaatgtcctatttacctctaattgactctatgtttggccccacagtactataatgaacagttacaaacctttagaaaatataaataaaaacatccaaacacaaacttgaatggcatcacaagccaacatgaactccaaaagcgtgcaatatacaattaattttaaatatcatattacaatataaataggaagttaaaaagatgcacaaggaatacctgtcaataagtgcttcttgcaaagtgactataagaccatatttcttcaagctagaaattccaaagcccataactactcccgcaagaccaaaagctgctcctctacgctcaccatatttatcactcttcattagcttatccaagagcctcaaaaaaagggcaggggcctcctcctaacaaatcatcagagatagatcttaagcttcaccaaaccgactgatatactccataggccaaagccactaggaaccaaaggtatagtaaaatttgtttcggtaaggtcataaaatatgtaattaacatacttgctttgataacacaagcggagaaaggcatgtcgagacagcacgttgcacagattctgatggtgtattcaacacctccaacagcttttccacaacattatgtactttaggatcatcctgccatcataagtgaatatataagatagagaaggaaatcatgtgcaaagtgtcgagatttaagcaaaaggtagagttatcactcttgctaagtgctttgctagtgctccagtgaatataacaacaccctcacgaaccaagtcatattcctcttcatcagatgcctacatgataagagatttgatgaagctccgaaggtatttgttgtaatcatgaaacaaacaatgtatccagcaggttttcagttgcttgtagaacaaacctctttatttaaataattctcaaagatggggaacagcaatgaaacgttttctttgccatgcttatcaataatcatgataccagcattgatcatctttccacgaacatctgtgttgggatcagcctgcacatgagaaaaacactcagtttcatatattttctgaaagtcaaaagattcaagctatagtttctgaaaacaacataaaatgtgggtttctaggtgataaattgtgaaacccaaatcctttgcaacatggctcagagggggagggttcttttatttgacaagcattcatctgacaagatgagaagatataccagtgcgcgggatatcaaaaaggtcataacagcaggaaggtcctttgttgtcaatacgtcagcagcagattgcagtgctaaggcaattccttgccttcctatccaaccagcatcaaagacatcctcaccagacgtagcatcacggatgtacagagaaaataaagttgaaagggataactgcaaaaccaattaatgtttaaaacccatacttatgccacaaaaagtagtaattcaaaaaatgcaaagacctggattgatgacgggctttcatgaagagcatcagccagtgcttctgctgcagctaaacggacgttgagatttatatgagaaagtgctttaaagattcctgaataatcagtccccaaatcatgaccatagcgggcccataaatcatctgctgattcagccactgactgcaagcataaagatcacagagcatcagattgtgcaacagcgaaaaacataggaggacaataactttgttagcctcagtcaagtacatcaatttatcaatttattatagttgacgcagcaaaaaattagaaaacctgtattatgtacaatacaaaaagataacataactagatatcacatcaaattcaggaggttaaccttttcagggtcatgtagagctatccaaatgtttgttgctattttaacattctgaggaagggagcatttggaaacagctggaatacacttcacagcgtttaagcaggcgagtctgacatgaacatcttttgaatagactccatagagcgcctgtaaacaaaacaaaatatgaaatacaactctctcgaaccggaaattttgctcacaatacatagttacaagaaatacatttgcgacatcatctgcttgcaatccaagacacaattcattcagtgcaggtccaactgatgcttgatacgcgggaacaacacctagcacatgatatagaacctgaaacaaatttagtttagatgttatatttgagaaagggaagctggctatattaacaatatcactcgacataaataaaaaatggaaagaaatgtgcacaatgtaattgccaccaaaattcaacaaatgtatagtataaaaacagacagggttcaagtcaccaaactgatatcatcctgagtcttggaagtggcagcatcggatctagatgcatgtataaaatctgcagcacatcatcatggagttttgtccgctttgatgacagtaaaattcgctccagtatctgggaagacaaatatagttcgttgagtaaaaggaggtataagttagaatactgtcaacaggaatggtaagaaacacaccgggaaaatgaacgtgaatgtatctacaggaagtggtcctgatttacaagatatcgataacccatttacaatcctctcaaaaagaccctcatatgttttcccagccttgtcaactgatggacgaaaatcaaatgaagtatcaacttcatcaatcgcgatcaaacgcagagcagttgaaatttctagagcccagttacacagtggctgaactgtacaacgtgcaagcttcaccaagttttcaaaggctgcagcacttacaataggtgatcgcagcaatggatccaaaaaagtagcctgataaagtgataaggtgagtgtcataggttaatcttagaattacaggagcctgatatgtcaaaggaataatattcatgtatataacaatgagtaacagtgccagtggcagaggaatgaaaataattatttctgaaatcgattcattgactatatagcatatggaaaagtaacaaagcttttacataccaaaaaaggtaactggctgtgacaaaacacaggattagcaagacccatctccccaagggcatgaagcaccaacgaaagacttttttgtatcctgtgaacattttcccgtgttgaggcctcctctttgagcatcagttcccgtgcctcttcctttgccgtttttcctttgtctgcaattaataattcgctgaataatatatatatgctgggggcataacgttaaaacttaaaactatagagtgcttcgttagatatgtaccagctttctttgtcaactttgcagtgtcccttctccctgagtttgcagtttctctactagccaatcctttctttagagaatgattagaactctacaacaagcaataagaagaagatgttattagattcaatatgctaaaagtggaatcatgtttcaagtttataacataataaatagaataaacccatgtcagtaccggctcctgctttgtatacttggcaccaattgtctgagcaacatagacaccttgctcacttaaaagcatcccctcaggtgtatgaaagatctgaataagaaatatacaaaaatattaatattcactactcaaaacttgcagctgaaaagttattacaacccattgcactctgtatgaaatgtcagagttaaatctagaactcaacaagtgtctacagagagaggagggaaatgctaacatcataatctactaaaaagaatacatatggtaaaagtcaggagatttaccttaatgtcagtctctgagagcatatcatgagacagtcgatctggaaggtcttgtagatgctagaaaaattaaacataagacatcaggaaacaagttaaaccggacaatatctttgattagtaaaataatttccttaaaatacatataccatcttgaacactgtgaatgtatcctctggtgccagagacatcatggtggacaaggaatatacggccgcttgctgctccggagttttagcactcgttaaacccattggtccaagtagactctgaaacaatcatttatatcaatagttgattagtaatgccaagaaaccacaagtttcggcacatagaagtcattgacagtcatgagattaccttgcaaacactttccccattggtagacaaaaaagtagcaacatcaaaaccacaagttttgagacacttttgcaatctctgtgtatatcaggtggtgtaaatcactttttaaaagtgcaaagaaaagagatatgagtaagtagaattaaccatgtcgaatgactaatgtcaagattaccttccaaacagcatgtctttttccagtaccaactatgctgggatgatgtgagcagaatatggcacgaacaatccatgagcttggaggtccagcaactgctgccgatgaaatgacaatcaaagccttcactaacacctctacagaggggacgaaaggagcttgatgatccgcgggattatctgcgtcactacagaggtgccaagttagttcctaaatgaataagtcggtgttggcatttaggtccaaacctttcaaaatgtcaaatgaatcaaactgttaaaaaaagtcaagaaatattaggagataacatcagagctaactaaacactaaacaggcagcagtatacttagtggcttggtggtatgaaatatgaatacaaaaagagcttatcatttgtacctggttctagaagaaacgatttggtccccagttatggaaagaaaatccgagaactcgtctaaaagagtagtggctagctgtgaagtcacgaggaagatcttcgtaacagaattgtaagctgttttacgaacattccagcttggatggcaaagcagaaagagaagcaactgcatggaaaataaatgaaacataagtccagaacagggagaaacggttcagaaaacatgaactcgcttaggctacctgtgatagtgatttcaatgaaaatgcttccaaaaccctgaaaccaggcaggagagatagttaaaacctctacaaacagtcaaacaccgaatctcacacattaggcaggaggtttacctggaggagtgttccacaaggagcacctcaagaaggtctacacatactacacaatcatcacttgaaagttttgaggcctttcagttgagacatgcaaagataagaaagaaaacgaagaaaaatgccgcaaaacaaaaagtaagtaccctgccatgacaagagcagaccacagaataagtaccagaagaaaactttagaaaatattaccaaagtaatttgcacaagtgaaggctcattttgagatatcaaagtccataatttctccttcaccatagtatcctctggatttcaaaaagaagaaaaatacgaataaggataaagcaatgaaggaccttcagattatactgaataagaggaatgtgaaacataagctgctggtttgaacctgctttgatgtcacaggcagcaattttggaaacgatcagtagcgcatatatcccatccagacgttgtactgcctttgtaaatcccgtctttacaagttgaattaaaggggatagcaagtctgatatctgtggtatatattcagtagcttatttagctaatgagagggttaatataatagacgccagaaaagatgtttgcaaggagacctgtgatatggtatcgggatttctgcatatgattcgtacacagcggagatgccccctccttagagcttctttctccttaaggccggcagcaatgaaagatactaagtttggttggatggcatcagaagatcgtgatgcccatgaagctacagcagacaaaattgaaagttttacgtcttcatttcctataagataaaacagtaatcagttagcagacgacgataaggtaaagagttgaaagataaatgccaaggatgataactgaaacagggaacatataaccaaatgtggaaaaatatggaaatgaggacatcttccaacttctatttctaacgcttggttcacacaacggaatatgaacaacagctaatattttaccttcatccttgtagcangctatgagaaa

SEQ ID NO: 64612 - DNA, 1447 bp, Arabidopsis thaliana landsberg
aaccccccggattaatgtttccagaaagcaaattgccagtcaaataactgtttattcatgtcgaatggcaaattatacagagtgtatatatatgtagagttcacattaaaagattattgtagtacttacatattctttggtgggttttgaactccttgaactataccattcaatttgttaaatgacaaatcactgcagaaaacaatgcgaaaaaataaatgaatttcttttgatagaaacgtaattgtgtaaatactgtatatatttgcttctatagaatctgcaaaagtttataaacagattctctcatacttgcaaatcattcttacaacaggttattttctctacatttgttttctttcccatgcatgagacgatgattatctacatataattgagtaactttaagcatagaaccgtacagtagtacagcaggtaaatgactaaatgtggaagatacaaacaagctagttttgatatgtctacagagtcgtagtaaatatgattaaaacacttacagaatctttaggtctgtcaaattccagatgtaagaaggaattggaccagacaaacccacattcctcaaaatcctggaacaggcaggaacagagacaatagtttgacattgtcagttagtatcaagcatcacgaagagaaacataaagcttcagtgggaaatatacatacaggcgtttgaggcctttgctagataaattcggaaaggattttatcccagtcgtatcactaagactcctgcatacatatatctataatgcttagaacatcagtttcaattcaatgatccttttgctaatctattgaatatagttcattacaattcaagaagattttctaggcggaccactgcatcagggataggtcctgtcagtccacttgcataaagatgtctgttgatcaaaacacaacacaggttagaacacacaaagaaataaactataagataaattatcgttagtgaagaaggagaagcttacagcttttgaagccgagtccagttgccaatatatgctgggatgataccagtaaagttattgtcacatatccttctgcattatgaaaacaaactactagttcagttcaatatctctgccaataaaacaaacacctagctgctacaattttattagacgcaagttccctgcaaaaacatgtatatgatcattatttgaaaaccttttagataacttctagtttttagatcattatttgaaaactttcattgctaagtagagttaacaacttacactctttcaaggtttaccagtctagcaagagtgccgggaaggattcctgtaaatttattagacgcaagttccctacaaaatccagtttcacaaaatatcaaaactggattccttccacaaaaccaaagaagataattgaggtttaatttgaacaatggttaaaatgcaataaaagggtctta

SEQ ID NO: 64613 - DNA, 2055 bp, Arabidopsis thaliana landsberg
  unsure (1)..(2055): unsure at all n locations
acctctgcacacgtttcaatcgcatagttagtttagaaatattatgttacattgataatataaacatgggagctgtgggaggtgaacattgaaacaattcacatggatatcaaaaatcaaggttcgtgtgcaaacctttccaaagaacttcctgcagaactgcaaagcttctgatagaatctgcaagtgcgtctttatctgcccaatgattgctgtttttcttactctctccatcgtcttctttattcccgttttcgcttctgctatatgtttgaacttcctccttaacttgaccttcattgctaaatcccccaatataattcatcgtcaatctctcatctttctctccatggttaccaacagaaaccgagccagtcgaaaacacaaaatcactacttctcaagtcggaatccaagctggaacaaggcttctccttctcgatatccccccgctcttcgctagccctcttgatggtatcactccagagtttctcttggctacctgaaacaaccttccctcctactacattctttccacctatggtattaccactatgctcttcacttttctcaaacgcttgcccaacagcaaacatacaacctatatcgggactaaacccgttggctacccctggatgatgcaccatattcactgacccaacagagccttcactactctgccttgcttcaactgaagaaaattctacatgtttagaaggaggattcaccaaaccagccaatccacgtttcagtaacttactaccatcatcaacaggagcagcctcatctctcacaggaccatctcttttgatccgtctccatttcttcaaaccaaaacctttcctcgtagaatgtactgatccaccaggagattcaacgttgttcgatcgttgaggtgatccaacacctccttcctcatgatcattatcaggcaatactaataatccatttgcagggactgaattaccattgtcttccacagaatcagggactgactcattcatgcctaaatccatttcacaacaaaaaaaaaggtatcaaattctctgtcatcagagacacaaatctgaaaatttccaacagctaaagaactagattcagctcactacttcaaaagaaagaactgatgtatagtgttattctaacctcatctaccgaaaaaacaatgaacaaaactcaattcacaattcaacaatctcatctaatcaagtccagaaatttcttgaaaaaacaaaattaatgaaaacagagagaagcgactcgaatcaatatttaaagcgtacctaaaacaatccaacgagagcttgcctgagttacagatgagcaagagaaacaaaatcctaaagaatttagagtgcgacggagaaatccgccgacattattaccgggagaagctgtatcaacgaaaatgattaaagtggacgaaatgattctacagacacaggaaaaaaaaaaacattaaagataaagaaagagaaaaaataatgaagatggtgcgaatcatacgtgggacccacatgacataaacccagtgcgccaagctggccgtccgatctggagtacacaacatgtcggaattaaagtgtgtatatgagcccaacatgttggcctgataaggcccattaaaacccagccttaaatattttcaaaataatgaaaagtgtgatttttctattttaaaatttaaaagatttatttggtatcatattcaaaaatcaaaataatgttttatgcagatttgaacatttacaaatcattaaaaaaatcaactccttaaaatgattttcttttacctattttttgtataaaacagatttaaaaaataaataaataaatgctaattcttgaagtatggaattgttttataaatgtaaaatctccattctgttgaggaaatgggtaaatatttaatatatttatataattaaaagttagtgaaagctatttacaatctgaaatctaattccgaggcgatttctgaaaattttagtgaaatttcaaactatggncagatnnngtgattcataaaataaaaattaagtattttagtnncatg

SEQ ID NO: 64614 - DNA, 1058 bp, Arabidopsis thaliana landsberg
aaaacggaaacactcaatgacgatgattgatattgaatgttgtgactcgataggagatcaagtctagagatagttgtaagggaaaaagtagaaaagagtataatacactaaaaatgtatagtagacaaaacgagcaagatttgaggcatcagaagagaaagagacatgtcgaccggtggcaagtggtaggtatcactatgtaacaacacaaacgtcaaaacatgtgagaaagcgtttttgcttcgcttttctttttcaattttccccacttcacttcacttcacacagtcacactcttatcctcagtatctccacttcttttttcaatgaaatgttgtggataaataatacgataattggcatccactatcttaaaccagctttgtatgactatgcccgtgacagcttaccagaatctctgtgttttgattaatactatttccagacactaaaggttcttttttcctaacctaattcataattagtcgaaacgtaaagattgattcttctaattattaatattcatatataattccagtagctgaatcaggttcctgtgttctatctaaaagtatactatacaaataaaaacctttttcttctcgacatgagtttaatactatatgaatatgactacacaaatatttttatattttttgaaaaagataaatatgttgatgttgtatacccaaaaaattgtgttttagctccaaaaaaataccaatgtcttgcttcaacggtctcaatgatcacgatccataaatcataaattttataaagttcaaacgtttctagctacaagctagtttcatatgatgccgacacattaattcatagctttcgtctcttgtcctgtaattagtcttaaatgctttatttcacccatatatagcttttcacttgactcacgtttcaactccgttctaccaacactgatttaatcctcatcagttcaaaaatctccctcactcatcattttctgctatagttcttgatgaataaaaaactctaaccatctcttgttccatctaaatacaatgtggtaattaatgaacgct

SEQ ID NO: 64615 - DNA, 1701 bp, Arabidopsis thaliana landsberg
caaatctcataacccaatcactcccacgaagcttccttctcattcaacatttcaactccgcaaattccaatgatgaaagtattcaattaaccatttatgagtacatttgtaaagattttaattaagcaagtgggatatctaaagatatgcaaatacacacatattaatgtaatgtgtaatgtgtgtaccatacgggggttttcatgctaatttgacgggatgtccctttcttcaatcactacaaatcccggtgcatcagctggattaatcctattttatttgatttttgttaaaaaataattagttcatgtaaatattactataaaaaaaagtcccgaacaattaatgtttattgatggaatatatatcaccaaatgttatatactgacgttttttctattgtcagtaaataacataacccacacaattaatattagtgatttatctgtccatcggtatcacttgtactataagactgatgaactgactaacatctgatggaatttttttagtggttcttaattatgtagcaagatatgatgcatgcatcgtggtttcaaagtgttaactttatataatggatttatgaaatgaaatagacataattgttgattgaggccaattattaaaatatgaacatgcatgcatctatatctatcgtttgtccgcaaatgcatgttacgcaaatttagataaatcttcacagcatatccatgagaaatataaaaaaatgttactttttttttaacgtctagtaaaaaaaagtaatcatctttaacatatttcaatttatatgacgaagctgaaatcagcattagaaagaagaaaaacgtgaagttgaacaacaacaaaaaagaacacatgttgatttgtcacttagaaaacaaatcgaagttagagattaatctagaaagtaatcagaagaaatttcaaaaacttgacattctttaggagaaggaatggatctagctgaatctttactacaagagtcaaaaatttattgatatataatacagttatacacttgactaagcttataaggtttagaattttattattttcttattttggtaatctatgtaacgtttgtgatttttgaacaaaacaggtcatgaaaagcacatataagtttttacgaggcaatattacaccaaagtttatcacaaataattagtttgttaaatggtactaataagatttaattctttgttgtttaatgaactgaagtgttctaacttaagatccctatattttccatttgaaaaaggaaatttcgctccaccaagaatcgaattaaggaaaacgtaaaaagcgattagtttattcgtcgattatgattaaacgaacaagttccaaaaatgcatatttagaatttctagtctattatggctttgggctataaccttacggaaattatcaatgtaagtttcgtcgaaataaaaatttcacttctctatatatcgtaaatacataaatctccaaacacatgtcttggatttttttaataatgtatatatatatatatatatatatagagaaaaaaacacttagaagatttttttgaattttataaagagaaatatatattaagaataagagagaggaaggcatgtaggcatgggattgtgcctcttcattgaacgacaatacttctcatcctcacaaatggttgccttaccattgagttggcattcggatgca

SEQ ID NO: 64616 - DNA, 1496 bp, Arabidopsis thaliana landsberg
cacatacaaataataaattttgatatgcatatgacaaatttttagacatatttttgttaccataaattttgtacctatatttgttatgttaaaaaagcccatttgaacttccaaatgtttgttaaaataagtttacttaagcggggttatttgcctcgtcctgttaacctgcttaagtatacaactacagagtcttgacgagttatttttgagttacttgattcatttcttatacgcttgaaatctaattattattagttatatatatatatatatatatatatatatataagtatttcttttattgtcataaaaataattataagatttttttaatcaaagatacgtataagtattattgagttcttttgagttgtttcggccactcgaatttaggttgtattttgattaatgtttcaaaataccttatatatgtatttcagggtatttttgattactaaaaaataatttctctatttttatgcttactattcagtgttaggctaattagttatatatttatattaaattggttaaaattataaatattgtgttacgttgatatgtcaagctatgctaccattcttacattatatttcatatcattaaatattcaggcataatatactatactatcatattcatatcaactcttttttttttcaatctttgattgtagggtgaaagacgaatttgtgggttataaaacaaaagctcaaatctcactatgacccgcagcagaaagttcttaacgaaaaagatgttgaccgatcaaatgaatgaagcgagccaagatgaagacaatgttgcattgtcgaacaccaaagaaacggagaagaagcagaggaagcggaagaaggattgcgaggaaaagaataagaagaagcgaaagaaggattgcgaggaaaagcatgagacaaaggaaatggagttagcgtggaaacctgaggattgtgctaagccattaggcgaagtgagtaaggttactggcaagggaaaaaagaaaaaaagtcatttcaaaacattcacgtttcgaggcaaccaatatgcgctggtgagtttcgttttacgttttgatttattactttaaaggctttgacatattaatttttaaaactggtttgcaaaaaaaatcaaaatacacaaaactatatatgtggacatggctggtccaaaaataataaaaacatggcgaatttaatatttattgtctttctaatatgttttttttcatttcaattataataatatcaaattcgaactttctaaacttagaagctatttcaaaaaaaaaaaaaaaaaacttacaaactatttgataatgagttatatgcaaaacaataattttctatatgtgtgaaacgactaaaattatatggatagccaaaagatttattttttccttcatttgtgtagttttttcaattgcaataccataaacattatatatcttttttttccccataggaggattcagtgcaattggttccaaacga

SEQ ID NO: 64617 - DNA, 540 bp, Arabidopsis thaliana landsberg
agacgctagcaagtagtgcacggcgcgctgtatcgcgcagcacggcatttcgagccacgtcggttttcgccatggacacgaccagttgtgccagttttccccggagttgatgggccgtggcagcggcggtcacgggcaacaattgcaactgactgcgcaattggctccgctgttgttcagccgacagcctttggcgcgccaaggccttgatttgtgcctgtacgttgagtacctgcgccttgtactggtccatttccacgacggaaacgaagccgcgccgggacaacgggtccatcttgcggaccagcgtcgcatccatggccgccttcgtgtgctgcaaggctaactgggcctgaatctggtgtatttgcgtggtcagcatcgcgatgcgatgacgcacgtcttgactctgatccaaggtctgctcgggcagcgccgacaacgtggcacgaatatgtgcctgctggtctttgagtgccttggcaatagccgcatcggtgttaccccatgcggcactattttcatcacccgcaatggtca

SEQ ID NO: 64618 - DNA, 713 bp, Arabidopsis thaliana landsberg
ctacttattgcagagtcccaatttcatggaacaatgaaactttatttttacatcaacttccccaatgccaagctctaactgcatatttcatcaacaggctagtgaattgatcaaagacatctgttccaacctatgtgctgcatcaaaagaagttggcaacactgactacacgattgttctgaggggtgattcaacattacgtggtcattttcctcaggcaagtttggtaaccctatcatgaaatagcagactatcatgtcaatgttatgatttcagcttggcatctgtttctgtcataacttgatattatgatccacacacaggaagcagatgctgctgtctcaatacttggggaaatggatgcatggattatttgccccttcttccttcaagggggacgttatactattgatgatgtgcattatgttgcggattctgataggtatgtctttgtgagcaacgtgtgtgtgtgtgtgtgtgtgtaattttttcaaactttcagaatcagggaaaagttcccttcagaggatgaagattgatggtcttcattttgaatattgcaggctcgttcctgcaggagagacagagtttgccaaagatgcatcctttggatataaatcctcaaatctccgtgaggtcttaattcttccaacaagggaatcatcttatgttatttgaccctttaagaaattaatagtaaggaacaatttgat

SEQ ID NO: 64619 - DNA, 1557 bp, Arabidopsis thaliana landsberg
tgctttttgagctcatagaccttatttttccctgacgaagacctttcgaattgaaaggcgattgtcggacaatcctatgagttcctttctcccctgaaatgtaaccatatgcataacgcccttcaatttcaagagtcgctgacttaatccctgcctcttctccattagacatttcaacaactttcgtcttgtaccgctgcttctctccccatctcatatacatcctaagcaacatatcagcccaatcctgcactgaaagttatcattgttttaaaagaacctcaattcacatcacaaacacacacaaacctctaagagagtataataataacctgtgcatctgttcctccagctccagctgtaatgtaaacaacagcaccttctttgtcataaggtcctgataaaagctgagtaagctcaaatttatctaaagatttattcaactctttaatgattcccatggcttcttcaagtaaactaacatcagtagagtccatctcttctgttagtttaacaatcgtttcggcatcttcaacctatacctcaagcaacaacacattatctcaaagcctcaacatcataaacatataaaccttagatatgtaacaataccatcgttttgaactcagagagtaaccgcatacgatctttaagatcatttaaagacgataaagtttcttgagctttattacgatcatcccaaaacgatgtatcagtagcttttgattccagatttgtaatctcttgttctagtttgttgcaaattagcagaagctctaatctcttcaacacgagctgatgctatttctacatcttttctcaatgtataaaaatctaatcaccaatgaaacaaaagaaatcaaaaccctaagaattcagattcactgggaaatatgttgatagatcaatggtgataagaaggtaccttgcatcagccactcactggtttcgttttcgttggatacactcaagttactctcctgtgcagcgaatactactgaaacgaaattcggaagaaattggtttacacaaatttgaaatctaaaattgaagttggagcgagagggagagaagaacttactgggcgaattaaaacgagaggacgaagagaaattgggaagagaaagcgggagtgagagacggagaagagggaggtttgttggtcgaagaagcagaagtttaggttttccggcgattgcgaaactccgaccggcgaggggtccgagaacggtgagctccatggacatgtttctgctcaaagcttttcttcagatttctgacctttgccaagttatccatacaaagctagcagccacgtcatcagttttaagtataaaagttaaattgtggaatatatttaaaaattgcgtttttaatggattaaagaaaagagattgacgaagatagtaatgaaaaaaataattcttcaaaaagtagtatatctttttaaacattccacacatagtactacaagttttttattaaatactaaatataaataatttatctaaatacataaacaaaaaaaaatttttcgcaaaacttttttaaaaaatt

SEQ ID NO: 64620 - DNA, 542 bp, Arabidopsis thaliana landsberg
  unsure (1)..(542): unsure at all n locations
aacnnnnnnnnnnnnnnnnnnnnnnnnnnnnnngaacttgtgaactctcgccagtattcttgggacctacgctcggcatcagtccaccactgcgcgtccgtcagaccatcaggcatcgggcggtgacggggaaccggtcgagacaagtcaaaacgccgcgacatactacagaccctcttcgaccgcggaagtcccgattctaacccgccacagccagccgggaggcgccatgcactgcttcccgcccactgatgccggcttcctcagctgcgatatgcaccccaggatgctcataccttccactcccccatcggccatcatcacaacctacggcggctcggccatatccgtaattaaggacgcgcgggtcccacagttggatgacaaatcttattttctcatgaggaaaataagcgcctcagctgtgagctgcgggcggcagatatcaggtgcccggctagccgatcccgaccgaccgagcgtcttcggtccggccctcatccgcgagctgatgagcatgcccggcaccctcagcttgatcg

SEQ ID NO: 64621 - DNA, 189 bp, Arabidopsis thaliana landsberg
ctggatcatgatgaagatgtcgtcttcatggtttgattcaaggaaatcaactgaaacatttacatgcagtaaagatatgtcgtaaactggaataatggtaacgacgattgatcgattagctcattcaatacttttgagttatcttacaattctataaagatagactcactcttttactgtacttgtaat

SEQ ID NO: 64622 - DNA, 3748 bp, Arabidopsis thaliana landsberg
tattatcactaaaagggcagccataaaagtaagtattaaaatatttgatccaatcacatgtttccacttcgtttttgtctgttacctattttcctaatatatattctataccataaactcaataacctaaatataactaacaaacaaagacatttataaactaaatgtttactcaataatattcaaaagctatatttgtccttgagattaattgcatttaaaaagattacacatctggaccagttcaaacattaaattgtggcccacataatggcccagcccaaagtggcaatatcatttctctctaagcgcgttttccatctgacataaatcatattcaaatcttccacagcggaaatgaagttagagaaccatatgatcatcatcataaattcatcattaattatatacattcaaaatcagtaatggaccctcactttctctaaccaaagaattaaataaataaaacaacaacgaaatgtgcttcttctaataatcgaacaagtcttgttgatttttctttcttcttggggcggatcataatttagaaccgcccggaaccttcggatcctttcgctctctccaatggctctgatgcgaaccaggagccagttgaacgtatcttcattgactccaccacctcctcctccgtctccgatccctagagccagaggctctcgttgcgctgccagcgagattctcaccgagatcattgagcgatcgattcaggttcctgagctcacgcttccggaatctcattctggaggtgaatcttgcggctcacgtcatctgatcccggcggagattgattttaggttattggcgtcgaggagagaaggttcggtggatcggttggtgcgatcggcgagagagtttggggcgtttcgtgtgagttatcatgggatatctggggaggagctgaggtctcttgtgagggaatcgggtcgggttttcggagttttggagggaagagacaccgggtttcaccggagtgttgtcggaaacagagacgagatcgtgtgggtacggtcgtggaaggagaggatggaatgggcgcgcgagtatatcggaccggaaagataccgctgcttcaggtattgggcccttaatgggcctttctgtcactctctgtttgattgtgttatggagagatctttggtagatgaagtactaattagagctaaataacaatttgtgaagaatcaatacaaaaaggctataacattcgttttggttatacaagtttcgtttgaactagtgattacattttaaaaatatttgatgaacattgcatttccaaaaaaataattagtgattgagaatttggttccaatttcttgaatctttaatttggttgcagccaagaaatggagaatgtagctgataaacttgaagatatagcgaggaaactagggcaaataatggtagagaactcaagaagaccaaatgataagaagatacaaagaggagaatctgtgcttagcgtttacaggtacaatcatgaaaatgtaactgagcaaagccctcctttgcccaaagagaggaccgaagaaatgcttcattatacactcagccttcaccttccggctaagaactgcgagttccgcgtcaactcagggaaaggtccactttctttccatgctgatcccgacactatccttgtcacttttggtcgtcagcttgaggtatgaacgaacacttaattaatactatatatttgttatatgatgtgatcaatcaattgtatagtaatcttgtaataaatctatggaactataggaatggagtttaggagaattcaaatgtcgtcaaggagaaatcatctatcatcctgatgcatatggctcgcccacttccttctccgtagagctcaagtgcatgtctcttttcttatcacacacttctatcgcaacaacctccaaaacattctctttaacccatcagattttcactgctttcctcctactttttttcttccaatgtttttggatttatggatcacgaatggccgcttagaatactcatatatgtatattttctttttgtgggagggatgcgttcatttgaatcgtggatgatcaacgggtaaaatgtgtttatctactaggtgtaagcttcggttgtatatgtaaacccaacacataaaaatttgttgctcctaaaaaaagaatgccaatatagaactgattgagtttttcctttgtttggactcatatcgactttggatattaacgcaaattttcattgtaagcaattcgtgtgttcttgaatacgttgttcctctcttctgatggggttgtgaattgagataaaataatttgtcataaaaaaaaagatgtaatgtaatgtcctaattaaaactttgagaaaatagcaaaagcaatgcctcaatatgtgactttttttttttttttgagttagatcaaaaaatgtgtctaatcataaaaccatcatttttttttttatgcttttgttaaattcttttcgtaaacaaagacaaaatatcgtagaaatcttctgacgattggttttacaaactttgcttcgtagagtttttttaataacatttttaaagaaatcacacaatattatgacgatgcgtgagaaagaagaaacgtcctaaattaagaatgagggtgggtgtacggacgatgtcgatggctgaggtacaccatcacggtggtaaagacggtgtctctttgaagtagatgtctttattcttgatgacggtaacaatgagaagatcaatattcaataataaagcaatggtgatgtatttgtttttcaaaagaattgatgtttttaaatggatcgatatagcacataaataagttgacttggcggttgggcattatattcgatgtgatgattcgatggttggtttttccggttgggtatgactccacaatgacgcccggatgtcatagtctaaatgactgtgtgaccgtacgataaaatcgagataacttttgaagtttggttgagtattactgcgactgtttaggtgttaattttcattcagataaagtcaataaactaaaaggcaaatagatagtaaataccgttacgaaagctaacacctacatattggaacacatgaatgaatgagcaagagttgttttctttattcgttttactttgtcgagtttttgcttttgcatatttcctaattctttttttagaggtttcttgtttttggtcaaaaatttacaggtttatgataatgttttgaacaagttcacgtgtaaggattaattttttggctttttcaacaacaaaaggggtactagtatgattttaatccacgcacgaatgacttggatccacgaatccaacttcaaattaattataagaaaaacttaatttgcccatcattaatccttagataacaaaatttccagctattaaaaagtaattattatatgtggcattgaatttcaaacaacattcaaatttaaatgttattattttgtcactcaaatttaaaggttatttattgactggataatgttcttggtttgattgggttgctacggttggatgcggttaaagaccaacaatttcatcagaattaaggatggttgatttgtacccacgatataacattcgtgtctaaacatctttacatgcacatgcaatgttgcgagatatagttcacataaaatttggtccggttcacttgtcttgatttggttgtacacttctacctgatgaatatatattcttatgttttaagaaccaaatcata

SEQ ID NO: 64623 - DNA, 533 bp, Arabidopsis thaliana landsberg
gccacatcattttccgcggcatgcagccgggtggtgcgaattctttgcccgtcttggggctcacctgacggaccggggatcccgaaatcttgcgatacctctatcggtgtgcatatgacactgaaaatcagaacgaatctaatttagagagcgcaaatgtccctcacccaaagcggatcagcggatatcggttctgccgccgatttggcggaggccggcgtcttcacctgggatctcggtaccgacaccgtctatgccgatacgacattggcggccctcttcggcttcgatgccgaggtcgcccagtcgggacagcctatcattcacttcctcgaccgcatcgatgcggtcgacaagccgcgcatcgcgcaggcgatccacgaggcgatcgtcaccggcgcggcctatcagcaggactacgatatacttcgccccgacggcacgcgcgcaagtgttccggcgttcggccgctgctttcgtgacgccgccggtacgccgtcgcatatgcccgtgtcgtctgcccgaggcggatg

SEQ ID NO: 64624 - DNA, 727 bp, Arabidopsis thaliana landsberg
acagagacctaggcaggccaaaacccaaaaaacataacctaaaacccctcctcttcaattgagaatcttgaagaaaccaagttgtttgattcagtggaatagagccactgagactccggaatcgtccttgttgcggtttatcctcgaaagacggtaccttttctgcaacggagctcccggagcttcaatctcttcatcatcatcctctacatcaaacggtttatcccaaccaaatctgccatggtggaaaaccgaggttttccgaggtgtactatacgcgaaatgtgactgctttgctatcattgtctgcaaagaaaaacaaagaacatttagattcagaatcaactaatggtgtatgtatcatcaaaacctactaatgatgccaaatttaacttacagcttctcttattgtctttgaaacatgaaacaattgtttcaagtcttcatgctcgaccccacagataatcctcacctgtaataatgaatcacaagatctatcaacacgtgtctatgaaatgtcaaacgatcttacgcacaatgacaaaagttttccagatatggaaaaagttgaacattttctcatttccattacgattttgaatctcagagaacaaaaaggattcaacttttagctcactctgattgacactcgctgaattaacaaagactctcagctaattaacagaacccagaaatcacaaacagataaaaataagttgtgatgaaa

SEQ ID NO: 64625 - DNA, 550 bp, Arabidopsis thaliana landsberg
caaacagggacatagaagaaccatatggtgatggcttctctttcctgttctatgggtatatataacacacatacggataggcacaatgtgttgcttgtgagggcccagcctcttgtataaggccgaagtcttattccgttgaaattctactcaatatgaggtttacctactaagacccatattatatcaaatccaaagaatgtttctcaagttaatatcctaagaatattatccattattattatatatcctcctaacattaggtattttccatcatcatatcttgaaaatttctacaattttttgttcttttactttgataaagataccatccatttgtttcaacaattgttgagctacgtaaataacacattttagaagtttcaccatgaaaaacaagttctacagcggaattattcaactaccataatatcaaaatttaattcgggcatattcaactccagtacagaatttatacaccatgcatctacacagataaatgctgcaatcgatcaagttaagatgtgaatgtgttttgcataattactga

SEQ ID NO: 64626 - DNA, 473 bp, Arabidopsis thaliana landsberg
cctagctcagatgtcgtcgatgcggtatatgcgaaatcactgtttggtttaccggatgctcctgcagcgcatccggacaacgcgtattccgaagccgatccaagtgaagccgtggatctcgtggaacccgaacgattcttcgccgattcctacacgccttcgttggctcgaatgatcactcacgtcatcaaccacgaaggccccgttcttgatgccgtactggcgcgccgcatcgccagggcacacggctggcttcgcacgggcggacgtatccgcgaccgcgtcatcctcatcgccgatcaggcacaccagagttcaagcgaagacgtcggagtcttcttctggccgggcaatcaggactgcatgatagccactgcgtttcgccgccccgtcgacgaaaacaatgttcgttcggccaatgaaatctgcattgaagagcttaccgcgctggctcgcgaagtgagagccaccgg

SEQ ID NO: 64627 - DNA, 408 bp, Arabidopsis thaliana landsberg
  unsure (1)..(408): unsure at all n locations
caaattaaaaataaaaatgtttcataaccatcactatcactttaaccgngaaaggattgcacttaggtgcttagggcggttttactaaactaccacctactatcttaactggatggaacgactaccacattctatgttatccaaagtacacacctaacatacgctccaaattggcttttaatgtatacacacatctatcctacaaatcaattgataatgaaaatgctgaaattcatttaataccatatataataccaatcaaataataggtatgatatataagaaactacactatactaaaatgacaacttggtgcaaatgacatagcataaaaaactttgattccatgagaaatcatgtaaataacacaagaatgcatgacaatatgatcgaccaccacatatgcac

SEQ ID NO: 64628 - DNA, 3191 bp, Arabidopsis thaliana landsberg
gggagagatttgaatttgcttcttcgattcaccagatccttgagctacatgtctcagactcaattctaattccttgttgcagttattggatttgaggaaggattatgaagaccaacatgcaagtaaaaggaagaggaggaaacatgaaggctaatactaatacacaacaagtgatttttgagctgaagaagaaggttgttattgcattaaacaagttagcagatatgagatacatatcatagaggagttgatgagcttgagaaaactgttgagcatttggcaccggataaggtttcatgttttctctcttgtattttggatactgattctgagcagaagagtgctgtgaggaaagagtgtattaggttgatggggactttagctaggtttcatgagggacttgttggtccatatcttggtaagatggtttctagtattgttaagcggcttaaggatcctgattctgttgtgagagatgcgtgtattgagacaatgggtgttttggcttccaagatgagttgttatgaagaccagaactttggtgtttttgtttccttggtgaaacctctttttgaagctattggtgatcagaataagtatgtgcagtctggtgctgccttatgcttggcgagagttattgatagtagtcctgaagctccagttgcgattatacaacgcatgttgatgaggacagtaaagctgcttaataactcgcattttatcgcaaagccagcggttattgagcttaatagaagtatcatcctggtaagctacttctaataccatataagtcattttaatttccgagtctgagcctttggtgctactattatcatgtggttgtataatgaaaaatggttattgactttaatctaggctggtggggcaacgtcgaagtgtgtgttgtcctcagcaatgtctagctttcaagatgcccttaaaaataaggactggactactcgtaaggcagcttctgtagcacttatggagatagctgctactggtgaaaagtttcttggacctctgaaggcgtcctgcatctgctctcttgaatcatgtcgctttgataaagttcgaactcttttgctcaaattcactctctgacagatgataacttttggaatgaaacatctaactttgtgcttttctattttaggtgaaaccagtgagggactcagttatccttgccttaaaatattggaaaggtgtccctgggtctgatagtccagagccatctgaaactgaatcctctgtaaaaggtgggtttaggaaatgaatcttttcttcaaatatttttttttttgcaactcataagactcatagatgctctttctgtttatttgttttgtaatcacagaaagttataatggagctcgagagagtagtgaacttttcagcaccagtgactttaaagtgaaggatggtatgtctatcaaatatgtaacggatgtgacaaggaaaaaggttccggtctctgccaggcaaccacctacacgttacaatgacgaccctcgaaagagtaaccaagatgattggcatattgaaattgcagtcccagaatcttcttttgtctccaaggttgatctttacaatgaagaatcagagggcagttgcatcaccaagacgtttgcagaaacgacaaacacgccagaagtgacatatgagtacattccaatgaaggataaagcagatagctatgtaacaggcggagtcaatgaaaacgatgatatcaagtctattacagtttcatcaagcagtttccgggcaagtggtatggtgaatccagccataacgagtaagaattatgcagctgaagaaactgatttggaagagcagccattctcaacccaagtgaaggatcgtacaagccttgactcttttgtaacagtgtcgagctctcaaattaatcatgactgctgtgctaagattgcaaatgaaatggcttctgtacgtaaacaactctcagatattgaaaataaacagtcacgtttgatagatcagctacaggttagtggattatctgtcacaatctaatgtctttacccagcttacaaatttatagatgctttagtcaacctttgtatcttcaagatgcgtgttctcagtaactaagtttcgtcttctgttaaacttataggtcttttcaacaggaataatgaacaacttttcggttcttcaatccaaggtatcaagcttagagtatgcagtggaggggatagctcagaacgctgccttgcattcagatatatcaaactccaattttgtgaagcacaaccaaggtagtaccatatcaccgaggctgtctagctgtacgtcaagaacttcgacggatatccgcaatcgacaatctacactatccacttccaagtactcaagggagaacaaaacacatgtaagaagcagactaaatgaatcacagggcatggagaagacacggagtaatcctttaggtaagactggtcaactacatactagagaggacatttggaacaacattggacagggaagacaaacattgatccagacccggacatcttctgattcaattcaaagcattagacaacagtatgcagaggtgatgagtggaacaaggaaaccagtgacaggtgtttcttgtgaagatgtggttgaatcagagtatctacaagtgctttcttccggtgatgagcttgcacttgttgagcttcttgacagaacaggcccggtgctggagagtatgtcatcacagaccataaatgaaattctcagtattctattgtcatacctcctagaacgaagattcatgaattcaatacttccttggctgcatcaggtaagtttgttgtagtcatgcttgaattgctactactggaatgtgacaatgataatccagtctattctcgtccagtaggtggatgacttgagtactacatatggagctaattatcttataccatccgcgagatagagagctcaagtgttgtatgcgattcaggaggcttcaggcatggacttttcaaatcttgttgagacaagagcagttgctgaaacagctattaagttgcgcagactatggggtaatctaagttcgtctccttgcaccagtccaccattggttttgctatcacgcactaagaaaacttgcttatgcatggatgtataaaaacagagtaccttttttctaactaacatttttaagctgttcaaaataa

SEQ ID NO: 64629 - DNA, 588 bp, Arabidopsis thaliana landsberg
caactttgatgagttctagtttcatggtggtggttagttgatcggccgattcatttttatttttcttacctaactaactttcgtatatggaacatggacatttgatgggcctttctcggacttcacttttaaaaattctgattgtatataggtcagagaatacatacataattttgatatgttaaatttaaataatgcaaacttcatttactggtttcaaacatcagttgataattatgtaaataacatgtgagacattttgtagaaaaaggaagaattttggccaaaaactgttatgctatttacaaactcaaattgtatcttggaacagtcaaaactaagccaatataactcagtccaaagtttaactcatcaaaacaaatgttttctccatataagaggaatggggaatagatttctccatgcaagaggaggattgtagcaaaggtttctcataaataaaaaagaaacacatattagaggtttgtttgtagttaggagaaataatagggacttttggtttctagtaaatttcacataaatgtcctacacattcaatgaaattatattgttcacacacaagcaaag

SEQ ID NO: 64630 - DNA, 202 bp, Arabidopsis thaliana landsberg
acagcttctcatcggaccctgaataaactaaacctcaggccattttatattaggacaggcccactctaacgctatagagctagccacctaaggtgactgttggtcgactcaagctattgtgagaaaagacgtgatatgacagaggaaccctggggaaagacgtgaaaggatccaaagcataccaaaactgtatacagcccca

SEQ ID NO: 64631 - DNA, 567 bp, Arabidopsis thaliana landsberg
gcctgagcggggtaaagaccgaggccagggtggtggaagctttcattgagactgacgggcaaagaaacttatccattgcggctaggggcaaatgactaatccggaggttttttttctttaggcttacctaaaattcccatcaaagtaatgaatcgagatacgagtagtctctggttcgaccatactccaagagacttgcataggtcctgtcccaaacaccgatgaagagagattcagtatctgggctaaacgatatcccagaaatctctccaaagaaatcaatctcttgctcctttttgtatcctgattttgagtcatagatatgaacgaaatctgctggctcggccatggcaacgtaccgtccgttagatgtgaacctaatggaccgtacggctccaaggataccttttaggacagcgactgattccgagagtttccttgtgtcccaaatacgacaggtcttgtcttggtttcctgcggcaaatgttacaccgtttggatgccaagctgatgccgatgaataatctaagggaccttttagcgacccgaagggctgaaaccaaactc

SEQ ID NO: 64632 - DNA, 104 bp, Arabidopsis thaliana landsberg
atacaaactgagagttcagtctcatatagcatgaggggacatggcttggtaatcgattcaaattggacatttatattctttcaatttctcatattatatatgat

SEQ ID NO: 64633 - DNA, 115 bp, Arabidopsis thaliana landsberg
tcgagaatgcgaattccaatcagactctaaagtggagtcctttctctttccaaaggtctcagaggagtaccaaaaggtgccatagttcgtcgcaaaggttcaagcaaggaaggaa

SEQ ID NO: 64634 - DNA, 442 bp, Arabidopsis thaliana landsberg
tgtttttatatagacacttttttatacttgatgttttaagtgaaaaattatgttctaaattatatgatgttttcaactttcaatacaaaattaattaatttttattggttttgaagatttatattttacatattattttattactggttggatcgtatttaaatagataataaataaagttttagtataataataataataataataaaaatttgtgttcaaaaaccttcaacatcatgtattaaaaatggatggagtatactttttaaatgtatgtctggttatatatatatattggttttctctctaaacagctgtacccatttttgtccaatgacacatctacagttttatgaaaagtcccaaccgttcttcaccacttcttctggttccaatacaatgttgctccaatttctaacaaattaagaaaacaaaagttaaa

SEQ ID NO: 64635 - DNA, 2992 bp, Arabidopsis thaliana landsberg
ctgcaactcaatctctttttgtttttttttgttttaattgtagactccagcttattgtgttggtgatgatcgttctttggcaagtgtttgaatcatattgagaatggctcaggggcagaataggactgttcttcagtcaggacagatgcataattctgttgtagcttctgcttctagtgtttcttctcagcctaatatggtcaatggcatatctcaggacactctcttattacgccaggagatgctcaacagaacgtaagactgtttttctgttttcattctacttgcttatgctgtgtctgtcttgagtcttacttgttgtatattccattgtgtatgtggttgttttattactagtttacatgtaccactcacattagtagtgtactttctcttttactggctcgaataattattgacccatctcatattctagttgtttaatttctcctctcattgacaatctcttggattcctgatttcctggggtttcgtttgtagacaagtcttatggtctttacttttaagggaatttctgatgcaactgcttgtacagtactcttatttatttcattgtttttgttttgtaaagtttatgtaaatggaaaacactcttatttacttgattgttatgcattattcctcattctctccagctacgcttggttacagcagaggcagccttcaaagacagatgatgcctctaaggcaaagttatctgaggttgcaaaacggttagagagtgcaatgtggagaacggctacgtcaaaggttcctcccgttttgatcttctcattgctactgtttgatatatatatattcctagctaagtactacttgggaagctttagtgttgcacaggttgtcattgttcttgatggtaatttcttttggcaggaggattacttagatttccgaagttttgacgttcgcgtagaatctactctcaaacaacttttgagtcagcgccgtgctaatccttcaagctcggtcagtacgatggtccagacacctggggtttcgcatggatggggtcaaagttatacggccacccctatggtggatacgagcaaattcaatagtagtaataacttatcagatgcaacaaccgaaactggaaggctattgccaactaatcgcatgtacagaggtaactatcagtcagatctgatgttagattctattgtataagagtaaaaattctgtcccgattcttttattcatagactatatttcgacaggtacaataaataatggtcgccaggaattatctgcggttggccagatgattcctactcctggatttgacaatagtgctaatgctgatgtttatcagtctcatcgaaatgaagaatattctggagatggtggcaagcttctggctaccgggtctgactttggaaatccatctcagctgcagaagcaacgtcctactggttcaaatgaccttatgggttacaaccttgatcaccagttgggaggtggtttcaggtcaaatattcaccagaatacatctgggatgaccagtattccgctaaatgctggtgtagggatgagcgggaacaatgtacaccttgctaatgtgcccaggagttctgaaggggtcctcagttctacgcatttttcaactttttcccaaccttcgcagcagcctgtcgagcagttgcaggtgtcacatgtgaacagtaaatctctctaatttttccttttatctaatgctatttaaatatcaatgctctcttgatcgtctctcttcgcgttatccttctgacgaatatgtaagtcatagtggtatgctgattggaaatttttttcatcatttgaaggatactcaatgagtaactctggtacttttgtgtctgggaatctctatggagttcaaacatcatctggctcaatagaaactgctgtggatatgaattctatgagcctgaattctatgcggagagttgatacttcattcggtagtcagtcaggcctgcaaaacaatccattgctaaaacctcatctacgtcatcagttcgagaatgggaatttccaatcttcttccaattccaaagaaaacttggctcaggtgagtcatcgaccattagaacgtcaattcaaccaacaagctcattatggtcaataccaccagcaagagctcttaatgaacaatgatgcctatcgtcaatctcagccagcttcaaatttagttagtcaagttaagaatgaacctcgcgttgaatactacaatgaagcttttcagatgcaggctataaataaagtagaaccatccaaaccgcaaaaccaatacaagcagaacactgtgaaagacgagtatgttggtgctcagagtgcaccggtttctagtagccagctaaagatgtctccatcttttccaccacaaactcatcagacacagcaggtgtcacaatggaaagattcgagcagcctctcagctggagtgcagccagtatcaggtctgggtcagtggcattcatcttcgcagaacttgacaccaatatcaaaaaattctaatgaagagagagaacattttggggtaagatttcataagcagcatgaaggtactaataatagttcgtctgtaagagagtctacaaactgccttactgttgctcctagtggcaccttggatgttcctcatctcccagtaggaatcaacgtcttgagtaaacagctgaatggagattgtggtctaagttacaaaaatcagaggcggtggcttttgttcctgctacatgtacgaaaatgcaatgctgcagaagataactgcgaaagtaagtattgttttactgccaaaacgctattgaaacatatcaattgctgcaaggctcctgcttgcgcatatcaatattgtcatcaaacccgacacttgattcatcattacaagcactgcggcgatgaaacatgcccagtctgtgtttctgccataaacttcaaggcgaaacataatgacaaatttaccttacttcaaagagcagagcctagc

SEQ ID NO: 64636 - DNA, 603 bp, Arabidopsis thaliana landsberg
gtatggtaacgaggtcacttaataaatttcatttaattcatatcttaaattttggatttatatgttatattttttacttctaatcttcaatatgtagatatctaatatacgatgaaaaaaatgtatactttgaatataataaagaagaatataatatgatttttgttcgacgatacaaaaagtttagatataattagtttaataattaaaatattacaaaaagttcttttatttttttagcaaaaaaaaatagaatttccattgaaaaaccaatatgttgagtacatgatataatcttgtgatcatagatattacttaaaagaactatcacaattagaaattaacttaagaaaacaatgaacaaaaagttaaatgacttttaaaaaatgtacacaatagaataataagagagtgattacataaaataaaaaattaaagtacaaaatacaatacaccggtcaatgtaaaaaaatatctcataacatgaatcggaaaaacacaatttccagagagaaaggaaaaaatatgtaaaaaaaacaagaaagatatatttttttttaagaaagtaattattttatttataaaaaacaaatattatttttt

SEQ ID NO: 64637 - DNA, 125 bp, Arabidopsis thaliana landsberg
tgaatgagatcattcaggttcctttctgaaagctgatgattcaggggaacacatctttggattctccttgacttcaaaacttccacgaaacgtgtccattatggatttattgtcggaagagagtt

SEQ ID NO: 64638 - DNA, 179 bp, Arabidopsis thaliana landsberg
ggagcgggcatttaaacagctatctttccctccaatgttttccttttatgtaatcttaaaagagtcctctactgtattgggaaaaccaaatgatcaatatggcgggagatccatacttttattgatagctctaaatccaattatattgtaaacgcctaaccctctgttaaaaaaaaagc

SEQ ID NO: 64639 - DNA, 352 bp, Arabidopsis thaliana landsberg
  unsure (1)..(352): unsure at all n locations
gggaggagcgctggatcggagagcatacacactttaaatgggtggctgctnctaggcaaacctgcgagcgggttttgttcaatacctggtttccccctgagcgggcattaaggggacatagctggagatccgagctggttcnnnnnnnnnnnnnnnnnnnnnnnnnnnnnnnnnnnnnnnnnnnnnnnnnnnnnnnnnnnnnnnnnnnnnnnnnnnnnnnnnnnnnnnnnnnnnnnnnnnnnnnnnnnnnnnnnnnnnnnnnnnnnnnnnnnnnnnnnnnnnnnnnnnnnnnnnnnnnnnnnnnnnnnnnnnnnnnnnnnnnnnnnnnnnnnnnnnnnnnnnnnnnnnnnnn

SEQ ID NO: 64640 - DNA, 499 bp, Arabidopsis thaliana landsberg
  unsure (1)..(499): unsure at all n locations
gcccggtcggcagtggcgggcgctggccgatgccatccacgccgacgtctgcgagcacggcttcgacgcttatgcggggcacgttcacccagtcctacgggtcggccggcctggactcggcgctgctgctgatcccgcgggtcggcttcctgccgtgggacgacccgcgggtggccgggaccgtcgacgcggtgcagcgtgagctgtccagtgacggatttctcaagcgctacgcgactgctgagggcgccgtggacggcctgcccggcaccgagggcgcgtttctggtgtgcaccttctggctggccgatgcgctgcacggtatcggccgccgcgacgaggcccgcgaacnnnnnnnnnnnnnnnnnnnnnnnnnnnnnnnnnnnnnnnnnnnnnnnnnnnnnnnnnnnnnnnnnnnnnnnnnnnnnnnnnnnnntacgcccaaggcgttttcgatggtcgggctggtcaacaccgtccgggcgttgagcggcgagtc

SEQ ID NO: 64641 - DNA, 524 bp, Arabidopsis thaliana landsberg
caagctgtttagtctaaggaaattagtgtatttatttttttttgttaaacaagatctgcacgtttatttgtgttggtattttgtctacgtaatttattccatatatatatatatatttttatagtaaattaggattgttgcttgcaattggatatatccgacggtaaataaacggtgtattgtggttcgtacgtgttcgttgaggttgtcgatgatagaggtttgtgtatgggttgccgctatattgtcaaggttccgcatagttgaaatctagttttggattatgtttaattactcatatctggttagctctaaagagtcaatttatgtctcatgaatgaccgtcaaatgatttatgctcagaaaatcaaacttcagcaaatccaaatacaactaacatttacgaaacacaaacaaattgttacacatgtgcctcgttcattcatattttccatgcaacaaaggttacggaaaccaaaaatgaaactatgatagctatttataaaactgattcgaccaacaat

SEQ ID NO: 64642 - DNA, 869 bp, Arabidopsis thaliana landsberg
tctgccaaaaacatttcccaatacattagatcccacacaaaaatataagttcttgaaatcgataatctttttcaagtattaccggtgaggtaatccctcaaagacgccgctagagatatattcttggacaatgaaaatagagcttccggcataaggatgatgatcttgataagtaccaatgcagtgtccaagaacactgaccaaatgcatatgccttagctttgataaaacttccatttgttgagctaaattctgtgttgaattcttctgtttcagcttaatacacctcactgtcactgctatgccttctctaagacaacctttgtacagctgttttgaaattagatatatcgattggttagacactcggatcaattttaaatcatgtcttatttacattttcctttacctgttctccacagagattctctgcatcaaaattgttggttgcttcttccagttcctccaaagagaaaactcggtatggtgatagtccaatcaccgcggatctcatggtttgcggtacacgtcctgcatttgaaaaaatcaagctagttaggttaatgggtgtgaaaacttgattcaagatttcaaagtaatagcctacttagatctggtactgtctttgatgtggtggacctggtggtgttgctgcaaacagtgacctgatcgacgttgtttgcttccaaaggctcttcttttgatcttgattttctcatcctaaccaaaaccaagccagctaaaaccgctgaaacgaggatcacaccgatgataatgccaatcaccaatccaagttcgattcctgtatcttcttctttcctttctttatctttagtgtcagacttcacagcagatactgcatgctgtgc

SEQ ID NO: 64643 - DNA, 1068 bp, Arabidopsis thaliana landsberg
tttgttttgttatatgatgattaaaattaaaatttcaccgatagtcatccaaaattagaataaaacactatttgtcacataattgctgtttttctaattgtctattcaaatcttatgaacctcttcgtaggcccaatatgtagaatttgattgttaaaaggtgaagccttatctggaaaaagcccaactgttattgttcttcctgggcctcgttttgtctcggtctaatttttttacacacgactttaccaatcatagtattcaaagaaatctagcgatctcaagactccgagtgtcacgatagagaatatgaaattgcagaaatgattcaatataattatatatcttagctgttgttaacacgttagatgttgagtttaggaaattaatttattgggtattttcatactattatattcataggtagctataacgatgataagataatttaatgtgtgcaggttgtaaacagttaggaatatgaaataattcaactatatattataatcatctcgtggaaattaaaacaggattgattgcacatgattcattggagacaagaatcgttaaggtgttcacacattacgtgtctttgttatattggggttacaaagatgcattcatatgatgtagtattatcttgagatctccagaaaacaaaccgcatttgaatcacaaaatggatctaccacccaaaatactaccaactcacaaatatcctttgaccatttcgactcgttttgttaatgattcttgtaaaggttgcaatataaaaggtcccatctatggcggctaccgttgcaacgagccttcctctactagtttgttcttccacaaagagtgcgcagaggctccaccggagattatcaaccatccttctcatcctcaacacactcttaaactccacaattctctaaggaacccatgtaaatgtaatctatgtggcaagacttttttcgcttttggttatcgttgttcatcaaaatgtgacttcatcgtggatctcacttgtgggataaatccattgccggtttctatcgaacatccaaagtctcatcatcatccagt

SEQ ID NO: 64644 - DNA, 956 bp, Arabidopsis thaliana landsberg
cataacacatagcaaacataaagtgtatatgcaataaatgaaaattttattgtgattgtaattttttttttttttttttggagatcccgatatccaaaaatgttattctagcaacaaatggtttgactgagctactttagtaattcttcgtcaatagaattgaaattgatcgacaaatatacttataactttcgatccagaaattcgaatatatcttatatttcaaagacatacttacgaaaaaaacttttccatcactttttcattaaaaaatcgaatatatatcttatatcttaacgacatactttcgatccatagagatcgtcttattatatttttccttacaattcaacattttggtgattaagattttttactatacctaaaataagttttttttattacaattcaacattccttactataccttaccaccaaaatgttgaattgtaataataacactcttttaggtatagtaaggaatctttacaaaagaattcaacattctttgattttttcacaaaacctttcgtaaccaaaatttcgagataaatttttaaaactcaactttaacaaaaaagatagttttgaaacttaaacagcttatggtattttggaaacaaacccaataatttaggaaacgttcttaatatgaaactttacaattaaatgttgacccaaaaaaatgactcgtcaaagatactatattacccctatagatattattatttttaactccatgcgtttagagttttcgtcaaacgaatctaatttcattaagaaatgtttgtggcttatagtaagaaatcggtatgaaaattgtattacgtggcgaataagattacaaggagggaaattagttgcagaaggggtaaaagcgtaaaattacatagaaaccagaaaggtcacacacacccaagtttatagagagcacacgaacgaattctcgggaggag

SEQ ID NO: 64645 - DNA, 99 bp, Arabidopsis thaliana landsberg
ctgaatatatccatgattgataagcgtgttcgacgttgttttccccgaatataaaaatgcgaagttcgtttgtatcttgacacgttgaagattgcactg

SEQ ID NO: 64646 - DNA, 1972 bp, Arabidopsis thaliana landsberg
ttactttcttgtacttctttgctatagaatttgaacgttgtggatgtatcttcttgttgagtattgtccttagcatctacacacaaaataacatatggaaaaaatgtttctagtgtacataactattattgaattcacttcttttcataataaaaataatattttgtttaaagattgaataatttgatcatatatgcttaccttttccattcgtgtgttgtgcaatgaatctcctctagataaatcaagaagaggaggtggagttttgaagccacttgtgcaaacaaacatcttcttgagaagaaaagaaagcgatttcttcttcccgatagtaacatctgtattaaccggagttatatctttgctagaatctgtttcttcttcttcttcttcttgcttggggaagatattgtttccaagtgttccgatggctaagaaggtttcttcgtcttgaggcaaaccttggacttctttactcaaaggaggacttgatggttcttgagctatatatacatcatcaaacatatgaaacaaaaatatgaaaatatgctcaaatgatttatgcgaagactgttcatgtagtctatgaataataagaatatttactcacaagaatctgaagtaggcacatgcttctttccgctaagctttctttgaacccaactaaaaatctgtgtagaacaacaagatcaagatttttgcacgatcaaagaaagatcaacactattaatttgatttagacatatatgaaaaccaaccttcatatttcagagacatgcatatataaaagcacatgtatgtgtgtgtttatccaagaaattttctttttctgtcaatgttctccaagaaattttctttttctgtcaatgatcttttacttcttgaaatagctttaggagataaagatgatcaagtggtcccatgtttttaaagacacagtaaacacaagtcccagaagccagcaaaaagccagcgattagaaaattgggttcaagtttctatacaccctcgatatcagtttcttacgacttcaagtcaccatttttgtagcacttgatcccatctttgtggactttgttggtacaccacaattgcgttatatacttataatatgtggaccattttaagagatcgaaatcgagtaaattgtgaaggaaacacatggatttgtctcttcttttacactctcttccctgtagcaactatacagaaaacccacagcttttatatttgatcaggccgtacagaaattacatgcagtgtgtatgtaaaatgtacaaacttactttgaaacttttaaagctttacactcgaattcaaaaccgattttttttttataatttaactaactacccatcgtctccagaacagcaaacagttgagcaacattcaaagcaggcgatgcaagcaatcgctgtgaagagctgtgtgaagacaaggacacattgatcattgagcttagagcagcattggacacaacacatgcagcaacatttgttgcacaaggagacacaacagctcgaagcagccttgacgaacttctcagcagcatcaggagctttctgctcgccaaatcctggcggaacattctctctggtggctgttttatccccaaatcctatcccaaggctttgtagcgggatcgttcttgatatcatcttctgtttctcgccgttgcttgttgtctgttgaaatatttagtgaatatatgttataatgagtctggattggtcctctggaacagaattaatcactaggttttgcttgaatgtggcgattttagttcataacttctagatatataaatgagtagtcctacctttttcttccgccagttcgctgggttcaatcttctgtgttcctaattggacattcgagtaactcggataatagccggtttggatgcttagttacaatctcgaaaagataagcaaatgaagagcaatctgaagagcagtgggggagtgattgt

SEQ ID NO: 64647 - DNA, 863 bp, Arabidopsis thaliana landsberg
caccaatgttgaagcaagagcacctacaaagaagataaatttatgcggtcttagtatgtgggttatattatcattgtagaggatgtacaatgcaaccgttgctttatatacatcatcgaatagactatcttaccgtctttctctatcatagacaagaacttccttgtccctccaccaaccccgaaatattacttctttgcagccatgcacattgctccatcgcaaccattcaaatcctaaattaaatttacataattttaactcatttctaaactgcactcaaaccaaatccggtggaccaaactagagcaaccaaaacggttgaagaaggattcatatagcatctttttgttttttcttttatatcaaaatagctttttttcttcttcttttttcccactaaattgcttctacctatataaactatataaaaaaaaaaggccacaataatgacatattttccactttaagccaaaacttgaggttcttcatatggagaaaaagtatacttataatcatctctatcatcaaacccatcactaccatctttcccttgtctcatcatctctctcacttcttcaatcctctccaacattcccttcacagccaactcaaatgcatcttcactcccatccgatccgtacttcggatcagcgtagactaccttcggtatcaaccttataacctcttctctcaacctcaccactctttcctctggaatctcaatcaacctctccttgatttttatattccactccttcacatccttaaccggtagataaaccgagtaactcgagtgattcttgggcaaatgccacttgttttgagcgtacgctgtccctggatggaagaagaccggaatg

SEQ ID NO: 64648 - DNA, 521 bp, Arabidopsis thaliana landsberg
atttggtataacatatgtaatttggattgttaaagtttgtcatcctataccaaatgtccaagggcaacccaaggattcattatagatttactgttctaatgatccagaagatatatataacatggaaaaattcaaacataatcatgattataaaataataagatggaaaactaaagattgttttatgtatgcaaatttgttgaataaactaatttcaaacaacacataagttgaataaataaaaataagtgataaattgtctattaaaaattaataaataaaaaatcttaccaaaattgtgagtttttgatttcataacagataaatcaacataaattataagatttatattatatcatattggtaaaactgagaacaacacaatgaaaatcagaagagaaaatgggaaaaggttattcgaacttattaaccatactatcaattttatacaggctatttgaattctataggtatgagctcattcgagtgggaaaacaatttttggtcaagtcaatgaaagc

SEQ ID NO: 64649 - DNA, 1218 bp, Arabidopsis thaliana landsberg
cactgcccgcatcagaaccaccctgtgctactttactaaaccacctctgtgctttcttttcgttttcgaccagtctgctctcaagttcagggtcatttgaataaccagagttggctgaattgagtgaagcgtccctgggtcgcttgcagtcacatcttaagcaagcgacattcctcccgtaattgtagaaatcacatctgataagtgaaacaaccaagaaagaaaggaaaggttaaactcatcattcctcatcgcattattcctaaagtagcagaagaaaaaattagtttcttactgaggacactcccattcactaccagtaagctgtctctttggtcttgcttcatcacactggaagcatttgacatttctcgcaaagttcatgccactgcacctgtttcaacaaattcccacatcatatatatagattccctaaacaacaagatgatgaaacaaagacaattacaccttattgacttattagctctaagattaagatctttcgaccacaatactagtgtactagtcagaagtatacttgttcaagctcagatctttccatatatctaggcctacttatatctttccatagaagaattgtacccaagaggctacaggagatttatatcaaaaagctactgagaatccaacaaattcatacctcgagcaaatccagtcaccacgtttcatctcaacgttattctgaaaggacctaactgcttgtccatctctatctgagtactgattttgcatcgtgccatgaacattcgactcaggaggacgcaagctcatcttcgttatctgactcaagaggcttcgaaccgatgactccataatctcttggttatggtgtttgatctcctcagaagaagtaacatccacaacataactcaaaagaagcctcatcaaatcaactgtactcgccttctccatatccatcatctaatgtaaaacacaaaagatcaaaactttgaggcacaaatcaccattgaaccaagtttagacataacctagcattcaccagtaaaagactaagcattttcccgaagatagaacttaccttaccagtcccctgacgaccacttcttaggtaaagacccatccttttaagtgaatctggaccagtcctgaataaaaatggctttccattctcacaccatcacttcaacgtctctcctcgaaagcattctaataagcagtagcatcatcagattaaaa

SEQ ID NO: 64650 - DNA, 379 bp, Arabidopsis thaliana landsberg
tcgtggcacgctgggagcaaggcacaatcatgtgcatggatgacaccagctccccatgcgaggttgccaacgtaaggcacgcatagaccacaaagccgatgggggcctgcaacgccccatggctcatgaagcaaagacagggcttattgcctttcccattgcaaaacagcctggcctagatagaagaggggccaggcatgcgtgatcgcacgaacacattttgaccgtggtagctctgtaacatgttgcgcctgtcgtcctatgtcggatgagctatcgagccgtaccaccagccggggtgcgactgcgaactgtttagcttgacactatttattgactctcaagcctacaccgagctgccgtggaccaagacggtatc

SEQ ID NO: 64651 - DNA, 783 bp, Arabidopsis thaliana landsberg
aactctcctttcagtcaatcctgacgatcgtggaacttccactttatctctcaagagtgaggtactggcatgactcaggcaataaaaactgtgtgttcttatgcgtctgtatttcctggtaatcgcttttgtaacatcaaattatcattcttttattttcagttcttctccaccagacctcttccatgtgatccttcaagcttgcctaaatatcctcccagcaaagagctcgatgcaagaatgcgggatgaggaaagtagaaggtatgccattcagattttctagtctgatgtgacttttatcctgcaatgctcttacgatagcatagtatcattaacgcaaaaagaaatatttatagaaatgctttaatctagttcctgtttttgtagacaagttggaggaaacagggaccaaagacaccaagaaagaagaggaactaaggaatctcgagccatcccagcccctgacgcaaatgcagagctggttgcatcaatgcaggttaaaaaatcttaaaaaatctatttctttcgatgttaaagctttttgcttttattcaacgtttttgaccctctcgcatttatgtcattgcagaaaaggcagagccagtctactaatagaagtcgaagcgagaagtttaatccacatcctgaagaagttgcatccggttttccaatcgatccaccaaggccgtcatcacatgcatttgaaccaaacagagaatcttaggggcatataaattcctacaagagaagcttacaatttggtcctctatcacgtagatct

SEQ ID NO: 64652 - DNA, 376 bp, Arabidopsis thaliana landsberg
aacggactggatcaaaccgcaagactacgcttttatgatcctcttagactcggcgaccatactgggggtatttgggcaggtttgaacgactcaaaacatcaggaagatagaagaagctcttttccgtgaagatgatattattttacaggagcctcgaggcataaccaccattttcgaagacctagtgttactcgagaaccaacgcccttatgtgacttcacgagaaacactatggaccttagctgggaggtctttaaatcgaaggaaactttccgcgacattattctatgagctcttaagtctgacggcgagatcaccgaaggaacgattttccgtcatagaacagaattgtcacacttgtacgtgtggaaacact

SEQ ID NO: 64653 - DNA, 418 bp, Arabidopsis thaliana landsberg
tgaccgcggtgatctggtactcctgcttttctcccacttttttgagcagcgtaagtgactcggctaccacatgggtccggtcgaagtacttcatcgccttgttttctgtgatgacgatcgaattgggtgcattcaatgcggtttctgcatgcccgtgcaggagcgggaagccatacatggccaggagggtagagtggaccgtctgcacatcctccctgaaatgtttatccccgtgcgataccgccacggtaatggcgacatagccatcgcagatggcgaccagattgggataatctgttttcaacgctttccgcagcggccccatggcggtcaggtccagacccatacccggatcgggacatttactacggatgatgtactggttccggcccttggccaaatggcgggtgacttgtca

SEQ ID NO: 64654 - DNA, 641 bp, Arabidopsis thaliana landsberg
  unsure (1)..(641): unsure at all n locations
cgtgccgcgtcgtgcgcccgtcgatcgccgaacgacggccgttcgtgttctgcgccacgtgcggtgtcactgtcatcgagcgcagctcattgatgaagtcctcagcatcataggccttgtcggcgccgagtgtgatcgcttgtggccggtcggcgcgaggctcgatcatgtgcagcgccgccacccgctccgcatgcccgtcggccaacgtcaggcacgcatcgaccagcaagccgtggcggttctccatcagcccatgccccatgaagcagagcttggcctccttgcctttccccttgcgatagagcctggcctcggagtcggtggtcgaggcatgcgtgtcgttcgacctcttctgaccgtggaagtccgcttccgcgttgcgcccgccgccctctgccggcggctcgctcgagccgttcccccggtcggcgtccgacggcgaactcttcggcttgacgctcttcatcgacgcccaagcctcgaccagcgtgccgtcgaccgagaagtgatccatggaaagaagcctcttcaccttgggctgcgccagaatcgcactcangaacttcgccgcgatgtcgcccttcaacagccggtcgcggttcttcgagaacaccgaatgatcccaagctccatcatcg

SEQ ID NO: 64655 - DNA, 1731 bp, Arabidopsis thaliana landsberg
  unsure (1)..(1731): unsure at all n locations
aactaattatagagcaaaacatacatgtatggcattaatttcacaaccctgaagacatatatgcatatgtgtgtttgagttgatttacattttctcaagaattcacacgtataatattggatttgaattcgaaaaatgatgtgatcaaacgcgtctgacagaataaaatgtgatacaattaacttctctggctcgtataacaacggtcctactccaattaatgtagttactggccagtggtgccgaggtacataattaaataaattcatatatgtaaactatttggtttcataaaccacctttgaaagattttagtgggtcctcaattataaagtttagttgaaaatctcttatttctaaattaggcgagaaaataatacaataatacaacagttttagtaaagtatctcacaccgtagcccctattatatcatcacgtggacaatttgctaacgtgaccatccaatgagtaaaacatatcatcactctatacgttcgctttcggctttccaataaatttaggggacctaataagactgtcggaaaccatttgtgttatgtagaactataattaagcatatgtgatatgtttggaagtatacaatagtcagtgtgtaaaaactagttgtaatgatatttttgcagagaccaaaacaatttcgaaccaaactgaactagactttttattacatttgtttacgcaaagaaattaacggtattaaattaaaagaagaaaaataaacaaatcgtttttaattactgntggtaacttttagtcgatgactttttgtaaactaatgtaatgaatgaacagtatctaattaatttaatttttaagtttgaaagttgctttattgtaacataaaaaatctgaaatggagtcgaggagaataaaaaagattctggaatcaggagattgattcctttctctcccacttttgattttagaaaaatggtgattagctatctgctcatatccatctccgaaaaaattggtgcttctcatttcaaaaccacattatccgctttgactcaccaccaaatcaaccaacgattaccatttttcgaatccaatctttcaaaatgtatttcttctagtgttacggcgatttctggggatgatcatttaccattttttccgactgaatcgatcggagaattccaatcctatatataccgagcttttgcggttttcgaaggtgcgatttcgaagtttcgtactatttcttatatatcctcaacgtaattgattgacattagtatgattaatgatatgattagtgattgaatcagttcttatttatatatgatatgaaaataactattgtttgatcgctataagatttgttttttggtttattgagcagttcagagatattttgacagttgacaaagtttaagtagggcctgtgtgagtgtgaagatgcaagaagatttttgttggcatttaagaattgtgaggaaatatcaatagcacttatatatgttagtgtgtgttgttgatgattttcttcaaaagtggtgaactttcatattactggtgaatcaaatagttggaatggcagatagtagaggaatcatgattataaatgttggtccactattagaccacactgggctgaatgtattcctttcttgcttaggtctttctctaggcacaaagttttgtctgctgaaactagcatgttgaagttattttgcttaccattctgagtgctgacatgcttttgg

SEQ ID NO: 64656 - DNA, 456 bp, Arabidopsis thaliana landsberg
aaacgccgcattgccgcagtcttacactcgttctgccccgatacctgcttttcagcagggaggcgcagaacgaggccctgcatggtctcgtgctcaagcgttccaccagtccggcccggctgatcggcaaccacctgcgcacccttttcgaggatctggccgatatcagtcaggctgaagccccggcgatcgtaacagccacggccaatcttgtcgccacgctcatcgcgccgcaggtcgccgcgcgcagccagccctctccaaccgtccgcggcgcggttatcatgcagatcaggcgctatatcgagcagaacatcgggcggcccgatctcgaccccgatcatctgtgcaaggtcttcggcctatcgcgcgcctggctctaccggctgatcgagccgttcggcggcgtcaccgatcatattcgcacgcgccggatgcgcgcggccttcgacatgc

SEQ ID NO: 64657 - DNA, 148 bp, Arabidopsis thaliana landsberg
  unsure (1)..(148): unsure at all n locations
ttaggtaaaataaattcatcaactaaatatattctaccaatttttgtatctatcatgattgntagagttaaaaatgaacggtcactacaagtaatttaaatacgtcttgaaaaaataaaaatagttttttgaaaaacaaattttttat

SEQ ID NO: 64658 - DNA, 106 bp, Arabidopsis thaliana landsberg
cttacttcacactgaagattttgcattccttgctgttttcaggcttatctgtttagttttaggctctgacctaaatctgcggaagctgtcagctattatggataag

SEQ ID NO: 64659 - DNA, 1746 bp, Arabidopsis thaliana landsberg
  unsure (1)..(1746): unsure at all n locations
ggtaagacatgaaacttacagtatctttggttagttaaaaactccaccaaagatataaagcccttaggggagagagagatttcagtcacttaatattatatcaatataaatgattgttatggtttttgtaggtctttatgttctagcaactgaatctgcacgcataccttggtttgacaatatttatgctgatattggtgatgaacaatctttgctgcagtcactttctaccttttctggtcatttgaaacaaataagtgtaagtctgttctctgttgttgtcacaccttttatatcataaagtgatattacttccaacagagttttccttatgtaccctttttctacgactcaaaaacgctttattcctttgaagtttggactcgctaaatcttccaacatgatgggattagataaattattagcgttgtttaaattagtttggaatgattgtttaaattagtttggaagatgtaactctcttgatatatatacaacttatgtttcttttactctgattggtaaacnnnnnnnnnnnnnnnnnnnnttcaacgagcagatcacttgtgttgttagatgaagtaagttaaaagactggttaattatatagtttaggagatttaaggtcagcatatgtttggaagaatctgcgttaaagtcttgcttgctaataacaggttggagctggaacaaatccccttgaaggagctgcattagggatggcaattctcgaatcttttgcagaaagcggttctttactcacgatggcaaccacacatcatggagagcttaagacgcttaaatacaggtttttaactgtacctgacattttgcttggatcacccaagtttttaatgagtattcagtttctatctttctgtatctattgtagcaattccgcctttgagaatgcttgcatggagtttgatgacctgaacctaaaacccacttacaaaattctatggggagtaccaggtttagctacaagctcatctaggctctttaatgatcgatttgtttacctccaaacggaatcagagttaacatgattcaccaacccacgtttgaaattgcttgtcaggtcggtcgaatgcaataaacatagccgataggttggggcttccatgtgatatcatcgaaagtgctcgtgaactctatggctctgcaagtgctgagatcaatgaggtcatacttgacatggaacggtacaagcaagaatatcagagacttttgaatgagtcacgtgtttatataaggtgagattctatataacagcagtaaatcttgacctctcttatgagcattctattcatgtttttcattttttggttttaggctctcaagagagcttcatgagaatctactcacagcacaaaagaacattaacgatcattccaccaaagagagacgaaaaatgagacaagaactaactcaggctggttcgatgactcgttctacacttcgcagaacattgcaacagtttcgctcatctgctggaaaatattctcagtcaaaggtagctacgcaactccaaacaaaagtcaaaacgacgaaggatgaagataatggaattcgttcatcatctgtggtagagagacgaccacttcctggtattgaaataagcttaagccctttaaaagatagctactatctggttatgatctttgaaactgaaccatgtttctgcattaacagaagctcggaatcaaaaggttcctgaagtcggtagctcggtgtgtgcttctt

SEQ ID NO: 64660 - DNA, 601 bp, Arabidopsis thaliana landsberg
  unsure (1)..(601): unsure at all n locations
cgttgcttgttatgcagtatctgcatagagactctggattacaaacaatctcctcgtagaattcatatgtctttaaacatgtgttcttggctttatactgtcctgttgtgaaaatagctgacttcggtactagttttctctgttagtttccaacgcatgaacgtatttagggtagaaactgtggattgtggtccttctgaaggaaaaccataaggacaaagtatgtttatttttctctaatgactcttgtgattgcgtgtatcgtgtctttgcgtgtattgtgtcattgcgtgtatagtttatttgatctgcccagccatgagaagacgatatgttcttggtggtttcatctctcttcaagtaggcatgagtagagagattttgttgatgatttgttgagtgagacatgaaaccagccatattaccacaaaacggttttaagacatgaaagtgggtatgttgttcatataggttgttgcagaaagtaacaaaactagatatacaatgatgatgatttttgcaggctctagttctggtatgagtcttccacaaaattaatatggaagtttctttggngacccaatttgataccataaacaag

SEQ ID NO: 64661 - DNA, 1853 bp, Arabidopsis thaliana landsberg
  unsure (1)..(1853): unsure at all n locations
acgttaattgcaagatcacctgttgtagataaaagtgtagtgttgcctcgttttcctcaacctcaaacatcccaaagggctttaccatcaagagtagctgcaatgttaaacgtgttggtgagcttgagttactagtgtgaattttattgtagatagctgtaccaatcattcttaacttagatatcaatacacatgctttttgcagctgcattcatatatccacctttttctcttccattctcctcagcttggcatttcagtgcatttctttagcttccttggaaaccccaccttttgttttgcatttccacttggctaacttattcgtcctgcgctgatgctaatattgatattatacttctcaaaataactgaccacttcattgttacatttcagatacccactatatttgacaagcaaggagctcaactgcttgctgttgcttgccttgtcgtctcaagaacgctgatctctgaccgaatagcctctttgaatggtaaacatactccatattgttacttgatcagttttattgatagggttccttttctaacaagcaaccatgatttttgcagggaccactgtgaagtatgtcttggagcaagataaggcagcctttgttcgtttgattggtttgagtgttctccaaagtggtgcatcttctataattgctccttcactaaggtaatctttcctttttatgcatttttagtgtttcgaagtcccacccgctatgatcaccttgtcacgacttactaaattgctcaatgaattatgttgttttcatttcttgcatgttgataaaaaagcaagttattgaactaatttaaagtagcttattagttatatttattaaacacctcgctaatatggtttcacataactctttttgttacactcttcaggcatttaacgcaaaggctagcgttagggtggaggattcgtttgactcaacatctgctaaggaactatttgagaaataatgcgttttacaaggtcaattcacgattatgcttttttcatgcattgtgaatgatgattatgaagcatgaacttgtgttattcagtgcaacttgacctaaaagaaagcatgatgcgttatttgcacttataagaaatatgcagagattctgaaagatccataccaatttaaatttacattgatttgngattgttctatgcttctgactgtttatatgtttcttgtaagttgatgtcgcatggctagagacactaaagatctcattgggttcatatctattcaggttttccacatgtcaggcaatagtattgatgcggaccagagactcactcgtgacctggaaaagttaaccgctgacttgtctgggcttcttactggaatggtaaagccatcggttgacattctctggtacgtacgctatgttggattgatttctaatatttgtttcatggttcttggtttgaattatcataatgcaaaaaaaaaacaaattgaaggttcacctggaggatgaagttactgactggtcagaggggagttgccatactttacacatatatgttacttggtcttggttttctgagacgtgttgctcccgatttcggtgatctagccggtgaagaacagcagcttgaagggaagtttcggtaagttttttacgcttcttccagtttgcatatgatttgtgttatagcgactatcagaccaacttttttctgcttatgtaagtttatgcacgagaggctgaacactcatgctgaatctattgcattctttggaggtggagctcgagaaaaggctgtaagtttcttaattgccctaactatagctgctggaatttgggtagttatttttgaatcaaaactaccgg

SEQ ID NO: 64662 - DNA, 1242 bp, Arabidopsis thaliana landsberg
gtgtagagacagagttttttgaaggccagtattctttagttacttcggtagctgtgattgacacatgaaggtctatccggttctctatcaagcatatggtatggaaacagaagtagaaaatgaaagattcaggcagtgaaatgattaaaagagattgggtcatgaagcagaaacgaagaaaacttccgtctatactagatatattagaccaaaaagtggatagttctatggcttttgattccccggaatacacttcttcctctaaaccaagtaagcagcggcttaagactgattcgactcctgaaaggaactcctctaagaggaaaggaaatgatggggtaacttcattttatctttctggtgttcttaaaagtttgtctccttattttattatatggtgttgtttaattaatcatttttctttccttacagaattattttgaatgtgtgatctgtgaccttggtggtgatttattgtgttgtgatagttgtcctcggacctatcataccgcatgcctcaatccacctcttaaggtaaatgattttttttttttccatgtgtcgtttgtagtcgtagattcgcaacacctaaatttgggaaacttgtcttactccttatctcgtctcctccagcggattccaaatggtaagtggatctgcccaaaatgttccccaaacagtgaagcactcaagcctgtcaatcgtttagatgccattgctaagcgagcaagaacaaaaaccaagaaaagaaattcaaaagccggaccaaagtgcgaaagagcttctcagatttattgcagttctataatttctggagaacaatcttcagagaaagggaaatctatatcggccgaagagagcaaatccacaggaaaggaagtttattcttccccgatggatggctgttcaactgctgagcttggtcatgcatctgcggatgaccgacctgattcatcgtctcatggagaagatgatttggggaaacccgtcatacccactgcagatttaccatctgatgcaggattaacgttgctgtcctgtgaagatctctccgaatctaaactatcagatacggagaaaactcatgaagcacccgtggagaagttggaacatgcttccagtgagatcgtggagaacaagacagttgctgaaatggagactggaaaaggtaaaaggaaaaaacggaagcgtgaactaaatgatggggaaagtcttgaaaggtgcaagactgataagaaacgc

SEQ ID NO: 64663 - DNA, 410 bp, Arabidopsis thaliana landsberg
  unsure (1)..(410): unsure at all n locations
acccagnggaggtactgcacgtcggtgccttttaccggatttgggttgaccagggcgcagtcggggatggtggtgccgtctttccttaccgtgcccatgacgcgggcgtgccggcgcacgaacttgacctcgcccggctcgaccggaataccgcagagcgcccgaagctccatatccgcggtgtctgggctggcgaccgggccgagcaggaagctcgcgcggatgggcgccagcccgggtgtccatgaccctaaccgccatgaagaacgggccgaccgggctctgcgggtaacgcgcgaccgcgaggatcacgtaggagggcagcgccggatgcataggcttgggcagcaccccaggggtcgagctacgcgggacctcgaccagcaactgtagggactcggccttgggca

SEQ ID NO: 64664 - DNA, 483 bp, Arabidopsis thaliana landsberg
  unsure (1)..(483): unsure at all n locations
ccagactgacgaccaccattttacccagacctttttgcggcctttttgcatgaagcccatttttgtgatcacacttgggcgacccttcaacctaacctagcacagttcattccggattcgtaatgaaactgccgttccagcnnnnnnnnnnnnnnnnnnnnnnnnnnnnnnnnnnnnnnnnnnnnnnnnnnnnnnnnnnnnnnnnncttcacgcccaaccgcgccttcaaggcgaaacccaagttgctgatgagcgcgaaggacatgcactacacagacgttgatggccgccagattctcnnnnnnnnnnnnnnnnnnnnnnnnnnnnnnnnnnnnnnnnnnnnnnnnnnnnnnnnnnnnnnnnnnnnnnnnnnnnnnncggtgatggatttcgccccgaccttcaatatggcgcatccgctcgcctttgagttcgctcataaactggccggcatcctgcccggcgacctcaaacgcatcttc

SEQ ID NO: 64665 - DNA, 985 bp, Arabidopsis thaliana landsberg
  unsure (1)..(985): unsure at all n locations
ctagacttctaggcttctagcaactgaaaactcaattattagcaagaagggaaatatagttaattaggggtaaattgaggtgcatgcaaatgcatggtatcagacaacgttgatcatttgtttgaaaatagaataatgatgtggacatcgtgcatttctggctaagatcacatgaggtttatgtcaagttgctcaatgttcatacaactttctatataatatagagaaaactagagtttactatcnnnnnnnnnnnnnnnnnnnnnggttcctccaaactattgacattaaaataacacacatgatgatccaagtggaagaattatgtctactagaaattatataagtatatacattagggtaatcaacttggtctcccttatgcaaaactcggaactaattttcaaaccaacaagtcttgtatgcattttgaattgtcaatatatatgtatgatacatatatcagctaaaaggatctatctgtatgagctaaaagtggataattaatttcgatcgataggaccaaatagcatttttttttgctcatttcaatagtttttttttacattctttccattttaaacttttttcaaatgttgtgtgtgtatatatgtatatggtgctgatccaatctcttaaaatgtatttgaaatatataagaattctaggaaatgtaatatgtttatttatatttacagatcaaataaagcaatcatacggctacttcctggacgggaccaaattggccaacggacttgatgacttggttaaactttgagtaacaaaggataaaactgtcttttaagacctggtttcagattcaaaggaccatatattattaatatatatccaaccaaataaatccaaggtaggccaggacattgcatgggatgagctagttttataaacgtgctactggtagatgcagattttaatctaaagtttttatagcataacttttaattattactcccataaatacatt

SEQ ID NO: 64666 - DNA, 2346 bp, Arabidopsis thaliana landsberg
aaaatatcaataaaaaccgatttaagtctaaaaaaattagaatcataaaattgtttggattctaatcggattctatcagacctaatctgatctgatccgatccaaaattcgaatgcccagactatcacatactatggtcatagatttcggagcggatactccaatctcatttgcattttgtcttcttcttctttttttttttaattattaaaaattaccttaagaatctaaatggaaatgcaaaacaatgtggacgtaaagaacttaggatcaaggtaatctagcaacaacaaaataaatggatatatagtaaatttaaaaacaaaatatagacacaataacaaggtactattttttaatagcatttcaatataacaactaaaaacaaatcatgaagaacaaaaaaatatcgaaaaaagctcgcgcatagtgcagatactcacctaattatatataaaggtttgtattcatttagtatcttttggccattttctgtaagtatatattatattgagagtatgatttgaggatcttcatcataaatgaaaaaaataaatatatgtggggacaagatcaaattaatgatttatcatgtgatgtatcagcgatagtatttgttaaatactatttctaaggtttacgtgttaggattaggaatttaggaacgagcacgaatagtcaacatacagaacctaactcgttttgtgttaattgttttagacacatgtgtgtaagtcagtatttgtttttttcctaatggcaaaagtaattcatcgattgaggatagaaatggccattttctttaagagaaaaccaatctgatgaaatagagtttacatagaaaaagataataccacatgatcgtgcttttttgcaagacactcatgtggaaaaagagtgtttgaaagagctaaaatcttctaattctgacagtaaaagttaagctcgtttatttattacatttttcgtcattgtcaactaactatacatgagtacttcatagaatccatgtgatttagcttacaaaaaaaaaaaaaaatgtatattacgtacgtggatagaacttaaaattcgctaatggtttggtaaacgctagagttggggcttaataatggttaaccaaattttaccacaagtcactaaaatatgatagtttagtatgattattgggggactataatatatagtcaattgcattacattcacgtgaaaattccaccaagctcgggacacgcgtagaggtaggatatcacttctcactttccaggcatttaatgatttttaatcgagcttatgggtcaatcatatctatcaatttttattttcttaaacatatccatcaattactctaaattataattaaaaaaatgtattaagctttgtgatatacaaaattatggtcagttcaattagttgagaaactttcagcattaatagatctaaatttggccacatgagataattatgtattttactagaaaaatgttaaattagagccaaaaattccaaaatttcaaccaaaaacttagaatttttatttgtctttcactaagaacgtcgttatcgtgggattaaatatttaattaataaacattagttgcaatactttcatgttcatacatatataaatgttaaatgatcagaccgtgaagcccataagaccattcataattaaccaccaagtacccacttctctctctctctccatacatatactatattatagataaatatcccatcaatacgtaacaaccaccgagatattacaattcacaggtttctagctattttatatagttattgtaaaccaaaagaaaaagatttttggggatagatcaatctcttgcgttcatttttttctctttggtacgaaaatacaaagatggagatcaaagtcaaagcaaaagatgtagagtcgacaatgatgtcaactaaagaggaggatgagatcaagaagatgaaagagtgtgtggtgattcagaaggcagatgaggaggttactaaaggacaagaaactatgaagattttggatggttcaagacaaaaccaagatgaaacaagacaagctgattctaagaatattgactcaccatcatcatcatcacttgagatgaagaagaagttggaaattggtaagtttctaatctttttgtccctttatgtttgataaaacgtcttcttcttatccttttggtatgactaattcatatattaaaccaactaagttatgcttacatgtaacaatttgagacaaaaatataacaaccccttcgaatttttctcttacatttatataccaagtcttagaaatttgggtgaaaaagatataggaattacaattttttc

SEQ ID NO: 64667 - DNA, 1653 bp, Arabidopsis thaliana landsberg
taccttaactaaaatatttcatgcactatctattcgcccaaaaacaagaggcctacatctttacatgcatcatgcccagaatatatgctcgaaaagaacaatcttgcatgaaaccagaaaaaaaaagccacgggtagcatgaacaaaacctgtcatcacaaaagatgatagctccataatcatgacgatggcggattacacgtccaattgcttgattcacagcccgtgcggcttcttgactgtaccacatgcttccagatagtagggttgatcttggaagctacaaaattgtaagaaatattataccttgatgtgtcaataatcaaataaatattgaactcaccttaacatctgcaagttgtgattgttcatccagaaactctcgtttcaatttaacctgttttacacatggtttaatgatgctggaatacaagtagcagcataaaatttaaagctatgtggccccccagtgccagtttaaataaaagtgaagagaaatgagaaagaaactctgaaaaagaacaaaacagttcactaactgttttttgctaccatttcgctaatgagcctaaatacaaattcagaacaaaacattaaaggatagagcagacaaaccctaggatctgtcaccctggcataaggtaacccagtaatgacgacagctctgccagcaccgtcagcaaaatccagtccttcgctgacctgacaacacaacagagagaccagccatactgaagacactacactagagaaacttattgacctcctatcttttataccagcatcctcatacatactatatggatacaggagaaaatttatacaggttgaagaatacataccttaccgcgacaaacggcaaaaaacaccacacccgaagttgctctgtcttgcaatttttctgaaaagtcctaccattaacaaaaatacaagacacgattaaattaatcctattcaagagacgtagatcagaggcatctcttgctcacccgcattgctgcaggaaagagggaggaatccttgggttcaatgacaggtttcttgagcttgcaaattctttcccatactgtcattgagtttctgtaacactgaatgatgaaaaaacggtaggtttacaagctaaagagtactcattttttcatacttaagagaaaattaacaacggccataccccatttttccaaaatgtaatgcaagagtccataaggtaataggaagggaaaaatatcagcagtccttcaggcacgactcgagaaaagttaactgcagagtagaaacacatactaattaattgatcactataaggatagcactcttcgattttgagatctcgccatactctagaactcggttcacaggtcacaaattcagaatgatacattcaggccatccaatatgaactaccaaataacaaaacacttacctatggcattcccaagttcttgtttgtactctgggacatcacgattgcggtagctagaattaagaacgtaccctgatggaccagtacttacaactccagcccatagctgatttgaggatataacatggggattctccaaccgaatgggaaagtccctgcggtttccaaaaaaagatgtttccattattaacctgggggaaaaggcagattgacaatcatagtgagagaaa

SEQ ID NO: 64668 - DNA, 471 bp, Arabidopsis thaliana landsberg
gagcagcagcaggaccagtccggcgtgacgatcgctgggtccgcgtccggaaccccggccgcggagggggggctgacctacggcgacacgatcacctcggtcgcgggcaagtcggtcggcagcagcgagagcatccagcaggtcctcgtgggctaccaccccggtgacaaggtcagcatcgcctggaccgacaccgagggccagtcgcacacctcgacggtcacgctgaccagcggccccgccgcctagtacaaccgcagaagggttcgccccccggccggccgccagccttggggctggttcccgcccggcggcgtcggaagggcccgataggctcgtgccgtgacgaaatggcggacaaggcttggtaaccgcgcgaccagggactcgggctcgcgatggcggccgcgctcgctgaagccgggctacaggtagtcatcttcgggcgatcgcgggagcgggccgttgatg

SEQ ID NO: 64669 - DNA, 155 bp, Arabidopsis thaliana landsberg
actacttaaacatgtcaacgcgtaagatatccagcatcttttgtgcgtacagcagtatcaacaactcctttacgggctccatagcaggaaataatatattctgttaaagacagtccttcgcgtaaattgctttgaataggttaaataaatcattt

SEQ ID NO: 64670 - DNA, 404 bp, Arabidopsis thaliana landsberg
  unsure (1)..(404): unsure at all n locations
ctgttggctctggcggcgatcttctccatcctcaagcttccttacctcaacgccagcgccaagcgcgtggggcgcgaggagcgcaagaagctgtcgctgtggaagcaccgcaacctggtctggggcgtgccggcgatcttcatgtacctgatctgcgagatcggcgtcggcagcctgttcatcaacttcctcaagctgcccgagatcggcaacatgaccgccgccgatgccggcggctggccgctgaccgccctgtggggcggcatggcggtgggccgcttcgtgnnnnnnnnnnnnnnnnnnnnnntcgaggccgagaccgtgctggccggagctgccgtcggcgccttcggccttttgatggtgactggtgtcggcaacggcccgatggcgatgtacgcgct

SEQ ID NO: 64671 - DNA, 1629 bp, Arabidopsis thaliana landsberg
tgccctgaaaattttgcaaaacatggtggcagctgttttggttttatattcttctttgcaggatggttcatgtgccgcagttactgcatcttgcttcgctatcaggcatattaaaatgtaaggtcccttcatttgtgaataagacactgataagcgcgccaatttggcatttctcactttttaattcatgacgtgcatatgattctgctatttccaaaattttcccacttcttcatttctccaaattctgtgaagggatgggatctttaggagggagggaaattagaaactaaagctgcaattgactttaccaaactttttacacagttttccctgttaataattcctttcgaaatttatgcctttatcagacacttaagctctaaattaagcataatcttccaggtatatgcagatactttagacattcgtctagctctttacctatccttcagcaacccatttgttcaattcccctgggtacgtgggtccctagaatcggagaatcaagtagcaaacctcttgctacattgagacctcacgcctctttgggttctgcgctcgcattattagttcaaggtaatcctttttcttatcttgttgcagcaacatcttattcaaagctcatctgcaactcagactatcaacctctacattacaatcagattttcagttttaaatattttgtctagatggtaatataatcaagtagctgaacacatgggtatactcaagtcaatgcagaccaacaaaccaactttagatgttacgaccacttttattatttttatacagatgtaattgctgcaacatgagtaaactaacgaggtttaaaaacatagaaacatttttgtcaatcttaaagcagatatatttatagaatttctcgtgatcttttccctggttcctcatagatggaaatgaatgaatgagtcatgcttaatttatgtttcctggttattacagctgaagtcagttcaattcccgtagtggatgacaacgactcgcttattgacatatactctcgaaggtaaacctctatccatcaatcgacatgatgtcttatgcattccatctttgacgtccttgtgttctgatgatatttgtaattggccagtgatataactgctctggctaaagacaaggcatacgcacagattcatcttgatgacatgacagttcaccaggtaaacctctcatcagaaaccaagatccatcacatgtctcatcaaattacgagttttacttaaatgtaacctgcctatctatcatggaaattgcctcgtttctgatttatttgaacatacatctttacaagaatgaaagaagagatgaaacgttataataaagtggaggataatgtgtttgtgggttttcaggcgctacagttggggcaagatgcgagcccgccttatggaatcttcaacgggcagagatgtcacatgtgcttgcgctcagactctcttgtgaaagtgatggagcggttggcgaatccaggtacacactatctcttatatacaatcttcagctttgttgcttgacacaggaacatcagatgagatgtaactggggtttgggtttgtgtatatacacacaacaggtgtaaggagctggtgatagtggaacagg

SEQ ID NO: 64672 - DNA, 2362 bp, Arabidopsis thaliana landsberg
  unsure (1)..(2362): unsure at all n locations
ctcaaatgctccatcttcttctttctacgattctctcttctctcgggaggtgaaaatgtcttccaaagtcttgtttgtgtcctggtctctctctctctctctgtaatatagaagggatttatatgtaaatataaattagctgtgaaatgttattaatagactaattggaaccttacacctaagttaagctatctctgctgttttatgattcccaaaattcttttttcctaattttgccattgcttttattaaaagatatatcttctttccttcctatgttgaaaatttgaacaaacataagtgaattttgccagttaaatgaatcatcttgtgcgtcggatccaaaatggttttgtacacgtggcggaagaagggccgtttgatgtttgcggtgacaattgccagctgtgcaatcctcatcacgtaatggaccaccaattcctattggttggtgcttccctttttccccattaacaagttttgattttgtattattacaattcttgcataaactaagccgtgacatatacttggaaattggaataaagcctaaccttttttacttgttaaataagctcttatttaccttttgttttgttggtttagtcaacacactttctttcataaagacgactctttctctaaagctttaaggaacagatcatctatgttttacactctatttattcgctgtcttgtcttgacaacgaaagattcgttggaaccattttccttctctgttacggcgtggctaaaagagtagcgtaaggacaagtgtcaagccattgtacaaggagtggacgagcactgacgaagtcgtttggtttaaattcttcgattattgttgtaagaaaagctcgatgtgcaggcaaaaatatcttggtatggacctagtgagttataggagaaaagctcttatatatcaaccatagagaggatgtgaaggtgaaggacggcttccaaaatttaagaattggatctttaatcatcatcttcatcatgcttgccctttgttgcccatcttctttgatcgtttgaacaatgcttggaacaagtgtagtggtttatagtttatacgttgtcttgtctttaacaaagagagttcggtggggaaattttccttgtcatctgaacgtggctaagagaagagaagtgtcaatgcattgtacaaggagtggacgagcactgatgaggctaagttccctgaccagctgtaacataacccgagaccgcaacctatcccaaacagctgcacaaaatcctcacctgagaagtgacctgcagcaaatactcctgagctgatcactagtgccttccaccattccattctcgacgctaaggaggtcaggagaaagcgtctgtacactatctcctcaaggatgggagctactacgcagtagagagcaaaacatccgcttctcgccacttccccgctcaccattatcttctccaattctgattcatgtacagcctgagatcaaacaacatgttaaaatgataatcatcttagcagagaatggtgtagtagatcgattggggtgaccttagggccaaagagttgatcagctacaagcgacgtgacgaagataaagcccacaagacatcccaaacccaatgctgagccaaccacccagtttcttccttcccttgtttcgttattaccctttagaaagttgattgatttgcactgaggcttcgctgtggtcctcagcagcaagactgtccctgcaagttctaccatttggagaaccacaagtgatagcacctgtatattgtaaccacaccatgaaattcaacactaaaaatcaactttgcagaatctaaagcatacagatcatcactcatgaaccgtaacgaaattgcatctcacataggaagaaaactaaattgcaaactgcaagtaaaatcttctgccctttgcttatctctgaagtgtacaattcaactacatatccaacagtctcctcttaatagtaaatgtaaaccttccagacaaaatgaaaggagactcacttgggtctgaggatcaagaacctgccggtggagtatgttggcaacaatggataaacccccaaaactgagaggaatatgcagagagaacatgtaaagagcaaatgtgctccatatgttatcatcctcccatggaatctctgatgccaaaactgagaacccttctccattccccaactgttcaatctataaagcaccggacttggaattagaatctccgtcaaaactagcgaaaaaataaaacttcatccctaatcaatggaaggagacgcacctgagtagtttcttgggaggatttgcttttgnagacaagagcatatgagagaaggtcgacaagtactagcagaggaga

SEQ ID NO: 64673 - DNA, 588 bp, Arabidopsis thaliana landsberg
  unsure (1)..(588): unsure at all n locations
gggctccgttgaaagaccatggctcttgagctggttttaatttcatggcgctttgcgatctcaagcttggcgggcttcatgtaaccagggatctcgaccacctccatacggtccaacagtgggtgcggtatgttgtaccgaatgtttgcagtagttacgaagaatacgttactgagatcatactcaacttccaagtagtgatcgacgaaggtagagttctgttcgggatcgagtacttnnnnnnnnnnnnnnnnnnnnnnnnnnnnnnnnnnnnnnnnnnnnnnnnnnnnctcatccagaaggataagtggattgatcacattggccttcttcattgactgaatgatcttaccaggcatcgcaccgatataggttctacgatgaccgcgaatctctgcctcatcgcgcacaccacctaaagaaatgcggacaaactcacggcctaatgcgtgcgcaatggaacgcgccattgaggtcttaccaacacctggcggtccaaccaaacatacgatctgaccgcgcatcttctctacaagattgagaacgggcatgtggctncagatacgctctttcggttttctaaacata

SEQ ID NO: 64674 - DNA, 233 bp, Arabidopsis thaliana landsberg
atggtgatcacagtacagtttaccaagtaggatattgtatatagttgtggttacctaaaaacaaatataagcatagagtgatcagtctcaggaaaaataagtaaaatgtggaaaaggacaggacttttgtagtttgtattatacatactttgctccactggaaaatttatccatcatcaaactcgagagcaagattccaacgggttcaagttggatcgatctcccccaaaact

SEQ ID NO: 64675 - DNA, 245 bp, Arabidopsis thaliana landsberg
cggggactagactaaatatcaatcagagcggcgcatggtctcgatccacgaatcgctgtatgagtaacggatccctattgtatgttggttgttacgggtcgaggctgggatggatccgactcgtgccctattcaacaatgactagtatttaccttgcacctgctaccgacaagtctattacactgctgagacttccattgctataggaggatgcgtacccacatggcactctctatgatgaatat

SEQ ID NO: 64676 - DNA, 1661 bp, Arabidopsis thaliana landsberg
gcgccttctagaaggctacctccgccgttgtctcagggcggcaggactgacgtcgcagacgctttccatagactctgaaacaaccatccacttctggggcccaccacctctagaccaccggagcgacgatgacagaccggttatgcttctcctccacggcttcggtccgtcgtccatgtggcagtggcggcgacagatgcaagccttctctccctccgctttcagggtttattctcccgatcttgtcttcttcggcgactctacctcttcctccaccaatcgcaccgaagtcttccaggttttataaacctatgtctctatctctctatttattataagtatatgtttgattccacaattttcccattagatttaccgatgatattattgtttttttaaaacgaaacagaattgagaatgattacgaacgctagcatcatgactcggtgaaaaacaaatcagataaagaaccaaagagcaaaaatatttcagaaatttgtttgttaatttggatttagaataaagtatagtataagaatttcttacaagaaaaagctactatatatatatatatatatgttccttttttgttaaatatataatcatctgatttccttgctacaatgctactacatatttttaatatctgaatctcaaaactgtgatcagtatattatgatcaatccttcatgctctctagaaagtatctcaaaagtgaaataagcgatagtcgtgtttaaataaaatatgttttgaactctttttagtattaaaacatatacgtaatataaaacaattaggcggaatgtatggcaaagctaatggcgaaaataggaatagggaagtataatgtggctggaacaagctacggggggtttgttgcgtaccacatggccaaaatgtggccggaaaaagtggagaaagtggtgattgcaagctccggcatcaacatgcgaaagtgtgacggtgaaagtttattgcaaagatccaattgtgagtgcatcgagaaggttatgttaccatccactgcaactgagtttcgcacacttatggctttggcatcttcatggcggttagttcgtatgtttcctgatgctctctggaacgacgtaatcaatgtaagcagctaagtcttgactggtatcttcttcatctacttcttcttcttttggctttagggttaaagaacaattttttgtttaacattttcttctctagcaaactttgaaactaatgtagacttatgcaatgtagaatttgtataaaaagaatagaaaagagaagatagaattgttgaagggagtgactttcggccggagcgaaaatttaaacatcgattctctttctcaggtattattcaaacatcacaacttaaatgcgaaatgttttacgtagtttacttcaacgttaattaataagagtacttaaaatgcgattcatatgatatgatcttaggaggtcctaattgtatggggagacaaagatcagatatttcctgtgaagatggcttacgaattaaaagagttagttaaagtatatttttgttcaagttaaattgctccaacaaaatcgaagcataatattaaaaagcttggctttaatggatggtatacttgtgtaggaatcttggagacaaaacgacactagaaatcattgacaac

SEQ ID NO: 64677 - DNA, 628 bp, Arabidopsis thaliana landsberg
ctaattaacatgttatgtaacccttttctttgtagatatcaagaaatttgagaataactagacatttggactgttgtgtgtataatctcttagctcagtgaattgcatatgctcattaatgttcatatcttacattttcctattctctatatagagattatttaaatcaaattgagatagctttaaatgacgttaaaaatcaaactatttccactataaaatcgaattttaattcatgtagtaattcatttgggatgtaattgtgcatataagacataaccaatatcttttaaaaagctatggactgttgtgtgtagtattatctcgaagctcagcgtttcgctaaaccgagacagcataattgtatgtaataatataaaaaagcggacaataattttaacagattgctatatcacatatatatccatctataagaaaaaatttaaaatttttaagaggcatttgtttttctaggcctaagtaatttgtcattatagacatatatgttgtctaaattggacggctcttaattagtctataattacgtattttgtctccacaaatatgaaataattacgtaagaaaacgaaaaacaacatagcatttacatagttttttttatttttat

SEQ ID NO: 64678 - DNA, 894 bp, Arabidopsis thaliana landsberg
aataaaaacaatgagaaaataaacgcagaaaattagttacgtatgacttttgtttcattgtaaaaccttatctccagagagaagaatgttgttctttgttggatggaactccaaacatgtaacacgtctgctgtggtatctaataactgcacaatgaacttgatccgggatcacatattttggtttaatctgtccagcaaaggaaaaagagaaaagatccagtcaaaaaatctcatcaggtatcaaaaaatgtttggcgcttgaacacgtaaggacttacaggaggaattctcggttggagttggcgcttgaacacaaagtcaatagggttctttgtattcctatgagaagttgggagtattccgtggtcagtaaccactctatgaggacaggacattgtggtgtggccttcaagtgatgcagtagacagcgaaaacattgagtaaattaacattttctccactcaccatcatcaaaaagctcacatgtaagcaagaatcgataagaaatagcaggagctttaccaggcattttacacaagaagcaaggcttcataggacaatcgatatacgttgctcctttaaatccagcttcatggccaggctgtttacaaacctataaaaccaccatgaaacaacaacagatacgaaacaatcaaagccaaacaccaaaatcctctgtctctgcatccaagtgaagaatactaataaacaataaagtgaatttcaggcaccattataatgggaaccaatacagtgaatacttctaatatgttcgaaatcaaaatcaaaagtcattacttattccacataagcctactcagaacttgaaatcataagccaagtaagaaaactcattagaaaagttagggtttttagaatagcgttactttgc

SEQ ID NO: 64679 - DNA, 249 bp, Arabidopsis thaliana landsberg
tattttgacgcaaagatagatagaaaatactgtcaaaagattaaccgtaattattttaacgaaaagcaaaattaaaagatacaaccattcagaagtgtttaagaaaagtaaaaacaattgcaaaaaataactacaaatttttttaaaaaaaatacgataaaacaccaacaaaaattattattattattagattactatttagaaatacattaacaaaagtaaaatacaataataaaaagaataaatatg

SEQ ID NO: 64680 - DNA, 598 bp, Arabidopsis thaliana landsberg
  unsure (1)..(598): unsure at all n locations
tctngatgaacagagaatgacctgaattatattttcacgcaatccttttatgtctggtatagcgtttttaaagattactgttgcttgcattcgggtggcctctcatcttgtttaccttcaccaactatctgagatctccctcccttctgcagtccaagaggaaaaaaaaattaagcagatgattctcacatttatcacaaacatagacactgattgctagtttgctactatagtaataaaatgaattcatgagaatggttctatctcgtactgcccatgccatgattaaagagcttgtttagtctctgctgtgtcattcatgtatccttctcagagtcttctacgtaactacctatttactgattcatactttttaggattgctcagttactttcagcaatctgtatgattcatgggcctctagagcctacatttcctatattaatttctattttcatcacaatgctcagcctgaaacttcttgtgtttggctatttgaatgttggaagtccaaaatcaaaaaaactttagttctgaaaggttacatacccttgcttccgattgatggctgcaaaaaaaaatattaaacgatttcaaa

SEQ ID NO: 64681 - DNA, 256 bp, Arabidopsis thaliana landsberg
gttcaaacagttccatcatcatgccaacaaaactccttgacccgaggagccttaaaaaatatgaacaacactcaacgcaaacatgaactgagctgacctaggagtactgataaacagggataagacatgaacataataactcactagaggccaagactgaataagaaccagcaatccaccaactactcaacggtacagcatacaatactgaagcagaggaccataatacatagccacttgctggttttgctctaac

SEQ ID NO: 64682 - DNA, 1901 bp, Arabidopsis thaliana landsberg
aaagtcatcactttaataacaacacttacactgattaaacaaccaacatacatatacaaaatctatgtatctagatattattcccaaaatatacaacataaaatcaaacacattacccaaaaaagcaaaacaagataaaagtaaacaacattaagattgtactgaaaatgacaatgctgttgaatctgcaccttcttacctcttttaggtgtaaatacatataagaagactatgaacgtacaactttgttctgcttcacacattccggtgactttaagtcctgacacttccatgatggtcgttctataacctgagccacaccaccattataaccttccgacttacttacacttagattgttttcctctaatgtgataccgttttcttgatccttgtaggcacacatgctcaaagggagcttcactcttcctcttcttttccctaatgagctaccctcttcctctgttttctcctttagcgtgttatcgcataagagcagcttcccgtttactctgcttccgtcatctgaatccgcaacaccagcaacatcgtacatagtactagtcagagtcttttgcttcttgtttctgtgaccagaacaatccgtcaagactctaggagaattgtttatagctcgaatcaacctaggctcttcacaagaaaccgtctcagctgcgggaaaagaagcaaacaattccaacgcattcttggctgcagccactgctttagaagcaatgatggccttctcattagcagtagctctcgccgcctttgcaaccttaacagctaaagcagcggttgctttcgacgcctgagcaagctcttccggggaccgagtctggtcattgagtagatggccgagatgatgagtgtgcacaactgctgaagcagaggaaccatttgaagttgtagtagacgaggacgaagaagcgaaaggaggactcggagattcattgctgattctcgagttctggttcttgaatccggcgagtaaacgcttccgtggaggtagaagcgaatcggactcaaggcacgcatttgtcgccatttatctcgaattaaaatcctaaatcaggatcacattatagaatctgtaacaatcaatacttcaaacaaagaccaaatcctcaaaaacatcacagatcaaaatatttaatccttaaaaccaaattatcaacacttgatcaaacaaatttttctcataaaaatcaaaaaggagagattttatcatttataaggtggtgaattgatcaaagacaattgctcagagtttaagaatcaagctagagagttccttatagagtacctgtaattacaagatgaattcacgaggatgctttgaagttaccttatcatctctcaaacagagatgagagatacaaacacagagagattgagagatggagaaattagggttttcagagaaatggggaagaagatagagaagagaggagatttgtttgtattgttgccatcgctctctctgatccgtttttcgtttttatatgtaaaccctacgaatatcagttttaattatctcttaattgttatttttttacttctatctaaattaacttacgtttctttcctttacatttaccttttccatggaaaagtaaaccagaaaattaacttgacaactactatttgcttttcgttttattactaaactgtaataacggccgtcaataactctatgtttgtttgttgattttttatttcttaacggagctaattaataagttaacagtagtattacagatgtacactttctatttgtagaaattaaaaacttcatagatgtactggaggcctttttggcaagttcatggcacatttggtagcaaaagtgtttcaagacccagccccaactatcataaactcaaccatttttcataaca

SEQ ID NO: 64683 - DNA, 394 bp, Arabidopsis thaliana landsberg
ttagatgatcaaaacactatgtttttagtatcgatttttttgcatcaaagaatcatgtacattataaggacgggcattataaccacaaatatctctgccttcgcctctatagtcttgcttgagtcaaagaaaagactcacaaccgtgttttgtctctacaagcgtctttgccgctaaaatattcaaaagaaaaagactctttttttgagtcacccacacatatttacgaaaatacccttatatgcattaatgtcctttaatcagaaccatcaaatcattctttgaactgcaagacactggtttacatataacaatagggctacatcctccactacaaggacaaagtcggaacttagctaacttagcttatcacacacacaacggaatacacttt

SEQ ID NO: 64684 - DNA, 1498 bp, Arabidopsis thaliana landsberg
gcgactatgatgaatgtgcgatttggaaatcctctgactaagtcaacatttgtgaagaatagtgataatgcatacaaggaaagagccatcaccctgtggcggtctttacatgaacccaccaatgttcagggttaaagacatgaatgtcagctcgcttccatttagcatgggacttgccaatgcgatcaatggaaagggacgcattaatatttccttgagcatttgctataactacttacctcacaagaaaatgagaccttacaaactctactgtgcaataataatcctgtcagacattattaaacccttacgataatcacccgaaaaggatgcacaaatatggatactttactcaaacaacaatgtggcaattaatacaacaaagataaaggttttaaaaagtgtggctgggatttctaataaagtctagagaatccataactaatatgttgcttgttccagtatcaaaccagaataccacagtaaaaattcaatcgaaaacacaggcaatcatgaacagaagagtggacttacttcaaacttgaatacaaagtagcctctcccttttgttatattatggccatgaacctcatacattctactcttatccgataaaccttctcgtagaacgcaaagcattgattcaaactggttacgattcattgaatctccaaccaacatcaaacttttacctcgtagcttcaccaagaagtctgtagcattaaacctatgattggaaagtcaataagaacgggatacatgcattctatgcacaaacagaaattacacatgatgtgttctgcgaactgtatcatctataaagtttgacagtaaatacattgatcaaagactaaccgttgattacaactcttttgttttattgtaaagagaaagaagattcttttacctatactaacaattgtttcacaatcagctactaggaaaattcgactcatgttcaacattagttcacactctgtccctaacactagtttaatgctgatcaacatttctatggattgacaataatgctcaacattgtaccatcgccatagctgcaaatcaagtataacaatggcggtttgaaacagagaatagagataattctaaaagcacatcataccgtggaagatcacaaccgtcaggcttccatctccaattaagatagtcagaatcacgcctcccattcctctggcaatcaaaagcatcgtccacataaggacacgatccaggctgatacaatggatactcatcatcgtccttaacccacgatcccctgtacaaatcacagcctctcatcttctcaatcaccgcatgttccacagattctacggaaacttcaccgggcgattctcctctaccttcttcctcctcctcggttttctccgtgtgcgaatcttccacatctttcagtttcagctcagtctctaccgcgacgtcatcgcctccgcggcgcgaatcttctacctccttttgattcgtttccacggtgacgtca

SEQ ID NO: 64685 - DNA, 421 bp, Arabidopsis thaliana landsberg
tacacgttaataccaatatgctttacgagagaatgaaacattcaatgattttgtacttattaaacatttttatttctcctgtgaaaaaagaaatgaagaaaccgacaatgcaaccacaaaggctagaagggtggataaaatggcctacaacgacttaagctcatcaaaggacatttacatcatgagggtatttgaatctctcacacactaacacaacgagtgggaatatcacattattcctttattcccaagtatatgggagtatatctattggtcatgagctgatacaaataatgtttatgagccaactttctaatatattaacttgtaatggataactagaggcagtgtacaataccttatcaatgaggctcctcaagaacaacacaccctgattcttttgcagtatcaccatcttata

SEQ ID NO: 64686 - DNA, 1114 bp, Arabidopsis thaliana landsberg
tccgacatatccgaaaaaatctaatatacttgtattttaacgatggttatttcagaatcttacagtgaacgttgaccaaatagattctgataaacaggggcactgagcaacatatataaatagggaaaaatcctttttctcagtgtacgtcaaattaataatgtctggataacaaaactcgtagccttttctatattcgtgttatgtttagcttttctctaaataaacatcacggttcactaaaacatattttcaggatatttcctataacatttattttttctcggctatatatatttgaaagaactttaaatttgtaatgaatgtggtggtcagatcatgatggtctatgaatccagactaaaatctttcaaccaaccagtagggtcgttaagtataatttattagattaatataatctgttattatattccgaagtgataactaactctctttttgttttttgggtttggattaccaacttaatcatctataaaggttttcactaattctaaacaatcaatatatgagcgaataaactaaatttccgattactaattgaacactcattggttttaggcttttaccgtttgaagcctctcactctcttctcacgttttgatttcaatgaaaacaatatagagatcacgcattaaacattaatcgcagtaaattataataagtcttatcttaacactaaaacgccaggaatcaatacaaagaaactattgaacttagagaaaaaaaaaagcatcttatattagtacaaactctttccagaaagagagatcattcggtagacatatacaatataacataatctttcttaagactcataatgattacccccgaaatatcattggaaggctaccggagcgtagactgcacgcgcttgttcctcggaagctccactatttgcttggactttaaaggagatcgagatgaaaagagagtcttcataatcattgacttcaccagcatcctcttttttgggaacacactcccttgtttcggccccaaccgccactctccatcctgtatcgccaccacctccaccgctttttctaccgtgctcatcgatattcactctctatctaatcctctcttttcgtct

SEQ ID NO: 64687 - DNA, 1599 bp, Arabidopsis thaliana landsberg
gagtcatcttcatttccttttctttctcttaataaataagataagactgggtggttacatagtcttgatacatatggcatacagtgttctgcatccattgaatctaaagtttttaatgtttactcttgaaaatgttgatagtcatctttcagacttaccttacatagaaaaacttcttcttacagctgatatcagcttgtctgttgcttttttgttgagtgtgaattccattaacacggaaatgccaagaaaagtgaagtttttaacctttctacaacttgcagaggaataataaacatgtcactgatatagtcaaaagtttgattgtgacactagaacagccatgtagtttcgtgtaacaacttctcattttcaccctaattaaaacattggttcacatttaaaaacccacataggtttcattgatgctgtgctgttgaaactcagctttaaacagggaaatctggagagggaacaagatctagcttgtggataagactgtgaaccaatagaatctgagtttaaaaactgttagatctcttttgttttttatgggaatggtgagaagtgaatcaccatgcatggcaaagggtcaatagtgcgatacattatatgctaaactgagtcaccaaaataacagagagaagcaagggtagctatttgtttgtcactaaaccctggaaaaagaatccacacccaacagcgtccacaatgtctggttagagttgttcctcttgagggacagagtagcgtcagcagttgattagctagtggtggactttcgccaataatcagatgcggcgagcaccaaacgcatcatgctttaaagcttgatgatcatgacagtggttgatcatcaaaagatgtggcccccttgttgagattttttgataaaatatggatggttgtgattgcttccctgattctcatgctgaacaaagtctcttcatttactgagaacttgttaatgacccttttggtagctgtaaactcaggctgttgtagacttatcttattcgtagccattatataaggttttgctatgtggcagaaagtcaactgaactctgatatatatgctggttttggtttaaagtaaaaaagtagagagaagctgctatgtctttacacaatattgttgtgttagtgtctttaagtacatctttttcttatacgtattgtccttccttgaaactgagcttgcataattgatgatatcagcactgattttttttccctttaactgatatattgcaaggacaaagttaatctccatttctgggtatgtaaatatggctaaacccactataaatatacccccttactttgagtcctgaggcagtcattacctctcttcttcttcttcttcttgttcttctttctttgggttagctgagaaatggatgtaatgaagcttgatcacgacagtgtattataagagcttgagaggatcaccttgaaagctgctgaagttcaagataacattttacgtggcatcttgtaaagaaacaaggacacacagtacttgagtaagtacatgaatggctctaacgatcttctggagtttaaacgccctgttcccatcattacatacaaagat

SEQ ID NO: 64688 - DNA, 1519 bp, Arabidopsis thaliana landsberg
tcttccatggcggcagtgactctatcaccctgtaccatggtactcgtccccttgtattttatctatcatggggcttcttcgtagtcgtagaacgtttccctgatgtaattttttggttttgaaatgttgttattagtgttgtgctagtagaagattgcgtagtgtcattgtaatccaagctcagagaggaaactggaacagaatcaggtacttgtaggagttcttgtgtttgttgtttgttgaaattaggttgcttttgttgatcaatcaagctggttctgtaggttgagtaatttcttcttctccaaagtctggaacatatcttatcgttcaaagcataaatattctgacaatcttcttgagcaagttgagaagtatgcctctgctcggctcgagaatcagtccaagttgattactaaggtaactccaggtttcattgtctcatctgaaacattctatatagattttgagattcatgttttccctatgcatcaggttgcagctttgatggagtgtgataatgttgatgattttattgataagaaatctgatgaacaagttaagaaagatcttgttttggcgtgtaagagattcccttctatcattcttggtgattctcgtcccgtggaattatactccaatagcaaatcttacggtgaatcaagtagcattcttaaaacgccaactgataacagtttccttcctactcctatgcatggaggatggtttgatccggataatctttcgagaacattatcttccttctgtcctgagcttttacagaatgatgattcttctgatccaagagaagatatattagatgatggttcttcttttacgagcaaaactgctacttctgaagttgaagcaacgtctgatgatgtttttgccgctcagcgatttcttgctactagtatagattctatgcctgggttaagtaagaggcacagtaatcagctagacagctgtggttttcacacggtatgcatttgaatacatagaaacaacagtttcttcccaatgaaagggcttaagaccaattttcaaactgtctttccatgcagatgaagaaattattgcatcattttcctcgaacctatgcagatttgcagaatgcacaggttgatattgaggatggacagtatttgatatttgttgggaaagtcttgtcttcaaagtgagatatctctttctgatatctttctaaagttcatctcaaacataatcaaagaaaaatctttgtcaagaaatcgtctctattgcctctgtttttctgttgagaatctctcaattcagcaaccattgcttatgccttttgtgttgagccgcatctacaggtttctgaaattcaaatttgaactctgtgcgattcaatatgcaggggagttagagctagctcttcattttcatttctcgaggttattgtcagctgtgaagtctcaggcagagacagaacttcggaggatctgagtcataatgctgaagataaagcagggaaaacaatttttttgcttctgag

SEQ ID NO: 64689 - DNA, 1512 bp, Arabidopsis thaliana landsberg
cggttcctttcttcataatactttcggttctcaactttttgttttttacttatggggcaacagctgcgggcccggttggcacaatagtcatcatcatactcattttcactcttttgaatatcccatttctcatgttgggaggagtgttaggtaaccgatttggattattagagtttcaacccccatccgctgttaaaagaaacccccgagaaattccaccacagaattggtaccgtagaaagctgtatcaggtgtttcttggaggctttgtacctttcagtgcagttgttctcgaatggcaccaactctatgcaagcttgtggggatttaagatatatacctcgcctggaataatgctttttacattcattgtgcttatcttcttgagttcgagtgtcggtattatcttgacctacattcagctatccggtgaagatcatgaatggtggtggaggtacgtattcttatactgtactgcgttcttttctatccaaacatgtggatttgattgactatgtatgatgagaatccatcacctgatacatatttaccttgagtatatagattgaaacggtcatagtaggaaaaatgtgaaacatgattgtgcttttagaataatcacttaatttccaaagggacatactaaaattatagacgatactattaaaattctttgcagatcgatattgtgcggaggattcacagcggtgttcatgtatgggtatggagtattgttctatctcaggtcagacatgactggatttctgcagctgagcttttacttaggatacactgctttgttatgttacgccctcttcttggttcttggaaccataagtttcttggcttctttgatgcctattcgccacatctatcgatctgtcaagcttgaataactcccaagaactaaagggtcctcttcctttcatcatgcgactcatctctgtattagtatctttttgattttagttgataactctttcatgtttcttttaaggaatggaaatgatcttactagatatagaaaagcagagatacattttgttgttcatcccacagagttagtcttcatatcatatcaccattcaacaacaaactacatcacttacaagttacatatgcattatgcaatcaaataaagcaatccaaaacacacagtaaactaaaaagaaaaaaagcatcaacttcacttgcttcctacgggttcgagctgcaaatgggtggctgcacaactccattatctccctttgaatccgtagcactagatccctcaaactcactctttatgcttcctgacttgtgttcatcagcaaccacttttattatctctgatgcttcttcctccttaactatgtacacaccatctgcttcttcttcttcatcttgatcttcatcttcttcttattcctcctcttcttcatcttcactctcctcttcatggtctttttccatctcgccatcttcggctagtttgctacatcttctgtcaaccacagatagaggagcttccct

SEQ ID NO: 64690 - DNA, 1751 bp, Arabidopsis thaliana landsberg
  unsure (1)..(1751): unsure at all n locations
taatcactgacaatgattttgaaggattcgtgaacaaaaattttccttttaattagttacttgcccaataaagggccagagtataattcataagctatgcattctaataccaaactgttttactatccatttcaatgattgtacaataaacctgattttttttaataccgagtatgttcgcaccgtccagctacaacatccatgtgattttggtatcagaacaagaatttcaagaagtcaagatttttcattgttgtcaacgaagccaagtaaatcagtacatgtcaatatcaatttaatggtataatatatttaaaaaaaaaatcaatgagattttgatagatctttaattcgaatgcaacacgacgaataggacgtctttggaaattccggctcatgaatccttccactctaacgttcatgtcctctctcttccaccgtccatttttccttttctttttggtacttttcataattagttttgttaatacgctgaagttttgaaagtatatagcttcatctaattacacttgttactctacttcataatcaacattcgtctttaattggagtaattttttcaatacgtataggtgaagaagtaaagacagttaattaaagaaatggaaacaggggtaagtggtgacactataaatcgattgagacctagcaaattaataaacctcaaaaatttgtgaaccatgtgttttcgaacacaaacaaatgctaaagacaaatgtgagacttaatgagttttgccacattttgaaagatcctttcggcctctttgcttcattatcccttcctctttctcaatcatcatttgcttcatatgccatgataataattcttttggattaagcttaagtagatctcttaaagcttcacttgtcaataggcaaaaatcttctgtatttagtcaatggaagacccatgagagttttaaccacacgtatagaaaatagagaatatgataacttctcactataggtatgcatgtaaaaccatgacgtcaatgatataactatgacatacttcacatcccacaatgagaaaactaatctgccacaaatatattatggtttttggttaacaacagcaattatacgagcttgaatgttttctatttgtattgatgtattctttgttacagttggtaattgtatcaatcgatatacatgaagtcactttttgtttttatttaagtgtttttttcttcacattttgcttatgttttgcttatattttgcttattttattttataattaaagagtttatgtatatgaacgccaaatatattactccgcctaattccagcagtgggattgagaatgctaatatcaaaccccctaaaaatatgttaaagatggtctcaattatcgtggacgcatcgtccatgtcactcagcgacaagagaagggacctctctcgtttgtacacaacatataaaaatccatcagagtatctaaatagcttgtggagaactctaacgatgattccaactacaactgcactaacaaagtctgtcacctattaccattagtagaaacacctcggacttcaacaaagacattcccaaaactagcttactgcgcaaggaacaaattgaaatggttatgattatcaaagcagtgactgcaaccataagaaaccattcaataaacttccaataaacanagaattttttttcttctccatcgttgaatatgttttcatccanacggttctctttgaaatccaagaaaacaat

SEQ ID NO: 64691 - DNA, 1214 bp, Arabidopsis thaliana landsberg
tggcatttcgggcaagcagcacctaatggattcaagtcaatcacagctttttacccacaagaaacttcaacttccaatggtaaaatttatcaaaatttgtttctttttgtttactctctggatcagacagaagtcatgagctaaccgataggtgatgtatatggatcgtctcagtgagtatagcgatcactggactaggtccagacttcaccaggatggaatcattcggaaaggtcgaagctttcgccgaaacattggttagtctctctacatgcaattgaaacaaacaaacaaactctctgcaaaaagatttccttacaaatgtcaacatgacatttatgtataggtcagtggattggatagaagctggcaaaaaccagtaggagtgactgcaaagctaatcgatagcagagcttctaagggtaaatacaaaaatctcaactcaatgagaatctctgcagtatcttggcattgtttcgttgacacaatctatgatcaggattctattacatcgagtacaccttacaaaaccctggagaagctcgcaagcatttgtactctgcaattggaatggcaacaaacggatggtacaaccgtttatacactgtcacaggacaggtaactctagtctattgccacaataacctatcttattagtatcttatgtctaacacaacgactctcttttgggtattacagtttacagatgaagaatctgctgaacaaagctctaagatccagaaggtagacatacgacactacaacaataaaatagatcaccaaaacctgttgcttatgacctttttctttgtttttgcagacagtcaagtctttcagattcatctgagaatgtcattcatatctatcagcggaactaaattatagaattgatcaaacaatttgtttactgaacaattacttttttgcaatgaaattctgagaaaagagcctactccatactttgaagtaagcttcagtaaacaatcccagtgtgttcagatggaagaagagagaaccctaaatatgcacaatcacagaaaaggacatgatgaacatgttttacttacaatgcaggacttaaagacaaaggctatatacctatcaatgttactcactacactcctgcacctgaaggaagtgtagtggtattacgacttcagacttgaaaagaatcagattttgattctaccatatgtatatgcttgtgtatgtgc

SEQ ID NO: 64692 - DNA, 2257 bp, Arabidopsis thaliana landsberg
ggaaggaacctgatagtgcaattgaagttgaaaccactctgttcttgtcctcgagcttgccatccttagtcatgttagcatctgtcaaagatcacaaaaacttgaatagtagtgtttatatgtggatgcaaatgcagttagaagatgagaaacgttatgtaataatgtcaaaactcaaaagtattgaaaacttattatcaagtcttaatttgataggcacattatatgtattaataataactatctttaccaacattcactcaaatcaatttgacaactaaccaagtagccctagagtcaccaaatccttagttggtccgactattcgccataagttctttagtaatcctctcacattgcaacatacttacataccttatatatacaaaatgtgatcaagatggaagtttaccaggggaagatgctgaggcggtctcagggggtatctttgaggccaacgcaaacaaaaccatgaagtgaagagcacatatgacattatccacagctacacccgctgctataacagatggagatatctgtagagcctccgatatcgcaacaaaattaagggctgcagaacaaaaaacaagaaccaacaattttattctcattcctcttgaagaatccattcccaagttgtgataaacatcttacaagccaatttagcaagattttcctcttttttcgataaacgaaaatcaagcaaagctagaatcttttcggctaaagaagataaacattgagtacctctgtctgtaaacaagccaaagaagcaatgaaggggctccagacaaacttacatccaccaatgtaactccccataagagcagctgctattttccagttatccggaccaagcgatctcatcggtaccaacataaaagccaccactgttccaacaatcgtcgcaactacatcaaaccaactcacaaattaataaaccactcaacacatcatcaataacaatgtcacttcacaatcaatctttttaactaaaaacactcaaagacataaacttttgttagtcttaagcatgaatccaaattaatcccaatccaaaaacttgcctttaagcaaaagactaaatctttaccagatccaattaagaatgcaagaagcaatgacccagtagatcggataatacgacggagatcagctctaaacaacagcaatggaatcgtgtgcggcaagagaaactccatgaagaagtcatacgacggcgtttcaaacggaattaaccttaaattgctagcggcgagcccaagtaacgtacttgtcaacgcaccactcaccatacttccaattttcgtcttctccgacctaatgaagtcggtaatttcatcagtatacaaaaccctagtttcaacagagaggattgaggtgatttaccagacaccgaaagctccggcggcgaagagagcagcccattgtgaccagtgatcgtctggggagattagagggaatcgtagttgtgagtagaccttcacgcgccggcgtcgagatgaaacaagacgatgtggagtgagtgttaccggcggcgatttgttaccgcgtatggttattgatgatgataagtggtggcgggaaagagacacgtggagcgatgagattgtgggggacagtggatttggtgataccactgtgaatagaagagccattgcactttctagatacaccaattaatgtttgaagtcccatattatacttttggaaacttgttttttttgtttccttattcggctaaacaaatttattgagatatcaaattgacgagaagcatattaatataccacataatgaatatgataaaagtttaaaataaaatttaacaatattttttttctaaaactttactctattttctatttttgtaatctatttcttgatacgaaaaaaataacaaataaggaataaataaaatcgataaagaaagtaacataacataggaagccgaaatatataagaagaaaatataatgaatagtatgaaaaaagaaaaatagtaaaaaaaaattatgattagcttcgtttggtggaattctcttctttttagtgttttcatgtattttattgtcttcttgtttatcaggaaaaagaagttaatctagactttgataaaatgatggatcatggatgcccataaaaagagtccttctaattttttttctataacttttttaaaaagaatgcattcactataacaaggtttgttgtatgaataaaattttacatacactcagaaaaaagaagaaaaaaag

SEQ ID NO: 64693 - DNA, 252 bp, Arabidopsis thaliana landsberg
atatgaatcaacataaaattaccaatactaaatttgaaactgtgatacactaaagaaaatatctttggttacatccagctctggcttctgttcaaagtttttcttttgaatttatttaaaggttaattaagatcaccacctaacccacttgtacaacggttctgcagtttttgccatcgaatcccattgtttaattcgcatacgtgtatgattctctacttttaaaaaaaagttaaatagattaattaacaa

SEQ ID NO: 64694 - DNA, 556 bp, Arabidopsis thaliana landsberg
  unsure (1)..(556): unsure at all n locations
nnnnnnnnnnnnnnnnnnnnnnnnnnnnnnnnnnnnnnnnnnnnnnnnnnnnnnnnnnnnnnnnnnnnnnnnnnnnnnnnnnnnnnnnnnnnnnnnnnnnnnnnnnnnnnnnnnnnnnnnnnnnnnnnnnnnnnnnnnnnnnnnnnnnnnnnnnnnnnnnnnnnnnnnnnnnnnnnnnnnnnnnnnnnnnnnnnnnnnnnnnnnnnnnnnnnnnnnnnnnnnnnnnnnnnnnnnnnnnnnnnnnnnnnnnnnnnnnnnnnnnnnnnnnnnnnnnnnnnnnnnnnnnnnnnnnnnnnnnnnnnnnnnnnnnnnnnnnnnnnnnnnnnnnnnnnnnnnnnnnnnnnnnnnnnnnnnnnnnnnnnnnnnnnnnnnnnnnnnnnnnnnnnnnnnnnnnnnnnnnnnnnnnnnnnnnnnnnnnnnnnnnnnnnnnagaagagagtcggatttcagctaagagacaccaaggaggattgtttcataattgcatgatatgatgactggctattatactattttttgctataaaagcataacgtttttactgagagtaaaaaga

SEQ ID NO: 64695 - DNA, 1136 bp, Arabidopsis thaliana landsberg
aaagtagttgaccctcaaatattctcaagtggtgttcatataaaacattgcaatagcttaaatctttattgggtttcatgtaagtgtatttatagggtagacgcatccacctcagtcatttctgagttcagctattactgataaacacctcaacatttctgagattgatagaaaggttacatagatttaagattccgcagatgtggctgcgtcatctttgtgcttaattgcgccggagtccacaagaattggaatctctgcagctagccacggagcgagccccaaacaaagtgcatgtgctataccaaaccgaggactgcataaacaaaatacatccatcaatgaaaagaaaacgagtttgtgctcatattcttgatagaaatggattgcataagatgtcaatccaacctctgtgcttaaccaggtaaaatcgacaacatataaaattaagttgacctgcacaaacagcttagcactagagttttccggcctaattgaatcatcacacacaagaatatcgacaacaaaccaatctaattaacatctttctttcacaattccttaaaatcgagactaaactgatctaaaacactgcatgctcctcttacaatatatatgcaaccagagaaagcttagtactagaatttttcagcctaattgaatcatcgtacacaagaagaactacaacaaaccaatctaattaacatctttctttcacaatttctcttaaaatctgagagtaaactgatctaaaacactgcatgcttctcttacaatgtctatgcaaccagaaagcataaacatttaccagtttttggcccagagcggcttgaaatgcacagtcagacatatcttcccacctcgatacatctacacacaacaacaaaaaacatcaacgacaaatccaattgagtagaaaccacctaaaatcgaaaaaacagaaagcccttaccttttgagtcttgccgtcaatctcaggcagctcaagctcaggggcagtggctggataggtaatagggatatcgaactggagatcgaattcgtatttgagaaggttgtgaacataccaacacttgccagtccaacgcgtgccctaaggattggaagcggagatacggaaccagtcattgtcgttg

SEQ ID NO: 64696 - DNA, 196 bp, Arabidopsis thaliana landsberg
acgctagagtaaaatataaatagtccaaggtcacccacaatcgtcttaaaattattatttatacatgcaaattgatttaagttattatttcttttcaaaagtttagtaataaagatgtgtcagaaataattgaagacaacactgagcttcaacatatagatgtctcttcatcagtcatcaaatcaacaaatcgcta

SEQ ID NO: 64697 - DNA, 648 bp, Arabidopsis thaliana landsberg
ggtgtcctctccgacgttgacccgttcgtacatctggaacggcaacggggcggacggattgagcacctcgagctcggaggtcacgacctcgatctcaccggtcggcaggtcgaggttggcattgccctccggtcgcgcctcgaccacgccggtcaccttgatgcagtactcgttgcgcaactcgtgcgcgccggaggcttccagcagctcgtcacggacgacaacctgggcgatgccgctggcgtctcgcaggtccaggaacgcgaccccaccatgatcacgccgccggccgacccagccggcgagggtgacagtctgtccggcgtccgttgcgcgcaacgttccggcctgatgggtgcgaatcactgaatcctccgtaataacgacgtggtgcgcggcccgcctgaggaaacttcggccgggtagtcgcggcaggagtttccgcagctactgtcagcgcacgaaaaaccaacgccagcgatcctacgggttcgccctccgagcgcgtagtcggcaaccccgcgcacccgccgcgaccgccccgacccgggcgttcggctcacttcagcgaactcggccggtcgatcatcgacaccctgatcaacggtgccaccggccggtccccgacgtttcgttttcgcggtcgac

SEQ ID NO: 64698 - DNA, 103 bp, Arabidopsis thaliana landsberg
ctatctacacgtgtccaaactttagcaccaacgacatttataatgctttaagagtggccaaacaaccaaccggcataattgggtgttacaaataacagaattg

SEQ ID NO: 64699 - DNA, 521 bp, Arabidopsis thaliana landsberg
  unsure (1)..(521): unsure at all n locations
ggatttggaccagtaaatgctttttcctttttctatcagcacattcttactataggtaagataatgtgtccaaagatttcaaaacctcagctagagaagtatgggcaagaacaccaaaaatgatagaagcaaaagaacaccaaagatgatagaagcaatgaatagaaagcggttaagttaccttgtggaaaacagccaaacatgatttgtgggtagacgccatttccggcaaaatgaaattatttcggaagttgaatagaactggggcttcccattacctaactcggtaacagcagtcactaccactgcaagatgcaaatcaacatttccttttagctgaacagctttaacagagttatctgactttcacaattaatgaacatcctataaacaaaaaaagactcaccataatcatcnnnnnnnnnnnnnnnnnnnnnnnnnnnnnnnnnnnnnnnnnnnnncatagatatgcacatgcgattnttctgagagaaaatgacttatattatgagctagctttt

SEQ ID NO: 64700 - DNA, 842 bp, Arabidopsis thaliana landsberg
tagggaaagtgttgtaattgtttcttctaagagttgatctaagatgtttgagactatatcttcgcttatgattccttctatatcttcgagctttaaagcttttccgttaaaccaatctgaaccttcaaggtcagatacagtgagtttgcagatcatgagccacatctcttggtagccatgaagtcggatttcttggtcttttgatctacttgtcaatgtgatgtgatcttgttcaatcgtttcattgagcttactggattcaagttctgaagacaaccgtcttcttgaaatgtttcctgttacaaggaaacaagtatgctttaataacacaagaaaggacatttcaattttcaatactgaagaattaccaacctggtgatggagttactcgaacaccagcataccggtcataatcaagaaccgagacagggctcgaatcatcgcagcttccacactcttcttcttcttttgttgatctcacttcacaatttactaaatcttcttctttggaccaacaaccattactttggacccaattctccttctcgatgttctgtctcaacttagtttcttttcgttttcttctgctcttacgtttctcctttctacgctgcatcagttctccaatctcaagcctctcacgtcctggtgaaacgttcatggcattgatgttgttctctttaccctctaggtgtgtttgatcctctgttttgctctggttctctctagtatctcttctcttcttacaatttctagtcccagctccttatcatttttaccttctcgaaactgagaatgaagaaatcatcatcttcaagctcaacatactcaagagtggactt

SEQ ID NO: 64701 - DNA, 199 bp, Arabidopsis thaliana landsberg
gtaaatgtctatgtaagttttatggtttaatcctaccattttcttatgatggttgttgggaaaatcgatgtattctcttgtaggaattttaatctcatgatttcaaactttaggctacctagaaaaaaacctacgacagtttcttcttattcatatggcgttcaagctacgtgtgcagttcctagtggcgccatccctc

SEQ ID NO: 64702 - DNA, 581 bp, Arabidopsis thaliana landsberg
  unsure (1)..(581): unsure at all n locations
accgaacgcatccgcgcgctggagcctggcttcaagccttagtattggacgcctacgtcaagcaatggctggcggggggcaacgatcccaacaacatcgaactgcatgccacggagcagccgtgggaaaaagccgtgcacgattttgcgcgccgcgatggcgacgtggatatccagaccacgcgcccggcggcacctggcggcgtgatgccgatgccgggcatgggttcgaccgcgatcggcggggtggtgcccgcgcgcggcgccgaacttgccatcaccgcggccgcggttgcggcacaggtggcctcgcccggcgtggacgattaccaggcggccaccagcctgcacgccgggatccccgcggcgttggcggcagcggcacgtgactcgcgcggcgccgtggcggtggtgtttgcgctggccatttccgaccaccccgatttgcaggcgcagcagatccagaccgtcacgcaagatttcgacgccgcgctgggcgctgccgtgcacagtctagtggcgcggatggncgagctgcaccccatgctgcgccttgccgtggcgcaactggcgtttccggcg

SEQ ID NO: 64703 - DNA, 2390 bp, Arabidopsis thaliana landsberg
atttttattcagtcagatactcactaaagagaacctattggttcgaaagatttcaacatattttttatccattaataacgatatctcttctctagcgattaaagattagaagatcagcaaaaacaaaaatatcattagaagacttagatccatcacaattctgtaattttacaaaaactatgacgattcatgattatgtggaaatagaggcgatcggtaaaagttgatttgtttatggtttatttgtaataataaaaaaactacaaggtcccaaaagaaaataataatcaccgaacaagtccctcccatcatcccatattccacatggactctttgaaatccaaggttttgccatttgaccacagatttgtgttattttcaaacacaaaatcaaccaattccgatgaatcagaaacctccgccgtacggttatggcggcgctggtggtggaggagtcggtccttcttccacttccaacaccacaatcatcgggacgttgagtgcacgcgccaagcagacgacgcaatcgatgatcacgacgctccgtccatggcgagagattctcgatctgtccgcgctctctctccctcgcgggtatgatgaagccatggcgcatctaaagcacaacatctcttatttccgtggaaattacgctctcgccgttctcgccattgttttcctcggccttatttaccatccgatgtctatgatcgctttcatcgtcgtcttcatcggatggattcttctctatttctctcgagacgcaaacgattcgattgtgatttcggggaaagaagtagatgacaagatcgtgctggttttactcagcttggtaacggttttggcattggtatatacagatgtgggcgaaaacgttctggtttcgctgatcattggtttgctcatcgtcggagctcacggcgcttttcgtaataccgatgatttgtttcttgatgaagaaagtgctcgccgtggtggcctggtgtctgccggttctggtaaccggccaccgtcgagttataccccaatttgagtaaaccggtttggagaattactcgtaatttcttgggtttttgattgaagaagctaagggaatcaatttagggctttgtattttggaattcccaaagattcttgtatttatattttggcgtgtgtgtttcattttgtttgaatgtatacaacaaatttggaaaaataaaattggtgttatggtatttaatagaattgccaaaaacataatttcagatagaaaaagaaaagtatgcattaaccagatgaaatttcataatgaacaaaaccagtatgttaaattcaagaatcctttggtctacactcacagtagaatcatcaactgatgcaatagaagaaaaacaaagttgggaataactactaactagtcttcttcaagattgatagaatctttgaacttagcatacaataccttcttcaaagctgccatttgtgttacaattgattccttctcttgctcgagtttctcaaggcttttgcaggtcgcttctttcatctcttctatctttgtttctacgtcgtccctcggcacatgagcaaacacttctcctatttgaaaacgcaccatctcctcatcagcaaggatcaactcgttccctgcatcctctagattttcacacttttcctgcataaatcaattgttttttaatcaagctagatgcagaaacacacagtagaatgctgttttaatccccctaatgaaacgattgaacaagacaagtatccacttattattgcaaagtcccacatctccctttttgtttcctacacatgctgaactatcaacaccattacaatatctaattacagtgatctgatataccctagcaggcttatattcaccaacgaaggagaaagttaagggagcagtgatatgtaagagtgcacggatggtataagcaggttacagtagattggtacaacctaaagagaatgtaaaatgagatatgagagtatagagattctcttgtggggttatctgaatgaagtaaaattacaatttacaacaatcaataaaatcaggaattatctcaaataatcttaatcatgatcctacactagaccaacaacacttatcatatactctcaggatcattgtaattagcttttgtatcgggttgtagcagtgctgatttcatttcatcaacaaggagttaatcagttagctgagagcaaaccgatgtgtagtagattcattatttggtgaattcattacgggattggatctaatcacagtattccaccacctaaacgatgcaacatagcgaattgaatccatgaataaaacctaatcttaaaaccctagaatcgtgtagaagaaaaaatcaaggatacataaaaaagagaaccttggcgga

SEQ ID NO: 64704 - DNA, 327 bp, Arabidopsis thaliana landsberg
  unsure (1)..(327): unsure at all n locations
ggattcgnggcaacgcgcaccggcacgaccgggagctttcatcttggnccnggcgngatcgnagtatccgganancacaaaaccccggcgcgaaaagggncaaggaacacgcaaacgaacggcnggcanncgccnccccggagacggagcgngggcggangcngngcngcgaaccgaagncnaaaacgacncncggcaacgganancncggcncncgcaacgangaagaacgnagcgaaangcganacnnggngngaaangcagaancccgngaaccaacgagncnnngaacgcaagnngcgccccaagccnncnggccgagggcac

SEQ ID NO: 64705 - DNA, 185 bp, Arabidopsis thaliana landsberg
caaaaggagcgccacaagacccaatacgtaaccacaccacgccgatgccccaaagacaccagcactcacaaaacctacacccaccgaggggaaacacgaactcccacggcttgggcaaccagaaaaccaagagggcgcgaaccacaatgaggaaccgaatcacacaaccaaacagaggtaagcaa

SEQ ID NO: 64706 - DNA, 528 bp, Arabidopsis thaliana landsberg
tggataaacaattccatcgaattgagaaacgatggtcacatcttgattcacaatacattcaacttgaaattaaagttgaagagtgatagttgtccttataatatctgtatattgaacaaaacattgttactaagaatttgtgttaatcataaccaaaaaagaagaagttagaagtagatttttttttttttgaaaaaaacattaaaacaattctactcgagggagtaggggatcatgaatgtaagagttttttttttttttttttttttacatgtgaaacataataatgggaagtggtgagttgttgcttgggaatgaaacaaaggtagagtcttgagatcgtttggtaggcatgttttttttttatcctcaaatgatcatatcagtcattatccctcttttttttgcctatctattaattaaatctcccctaatttagtgagtgataataaaggagttttttttttttttttagggagtgataataaaggagttagtttccatcaaactagttgtttgattcacaga

SEQ ID NO: 64707 - DNA, 524 bp, Arabidopsis thaliana landsberg
  unsure (1)..(524): unsure at all n locations
ggataagcgattttgtgtgacccgaaagaataaagaaacaaccggaatgatgatttttaatgagataaaagaaaaaggaaacaagtgaaatctaaattttttttatatgaataacttcatcaaactaaacggtctaaattcgagttctagtttttagttaaacagaaatctgaattttctttatacttctaggaaattattttgtctacatcagattcgacaatttggtttcatatttcttctaaagcctagcaaaaactctaaaagaaaattcaaatttcgatcacctatgctaagtaaataattntaatttattctacctgcacaaataccatgtcatatgaatcactttcactctattatctatgtttatcacaataaaccaaaataatagaagaacattaaataataaatttttattataatttttacaagaaattacaatgccttatttgataccactcttagtgcaacgacaaacaaattttttacacctagcaagatttttacctccttctaaaaac

SEQ ID NO: 64708 - DNA, 1794 bp, Arabidopsis thaliana landsberg
ctcaccactgaatttacacattatttttcctttcttgttccgtacattgttttcgtatcaacaaaaaagtataaattatggtaaaataattaatcgtagaacaacaaaggatagcaaacgataaccacataaatagtactgcgccgaacactttgtgtacaaatatctatatatgtaaagactcaaaagaaaagtaaaatcaagttttgaaaggagaacatgtaaataacattcaaaaaaaaaaaaagccaagtagaatgataagttctgaattatacttttaatatacttctagaatctaggatattctatttgtagtatatatgcaattttcaagtttgtgtttattggaccaaagaaccgtcggcaaatttttgtattacttatcaaaatatattttattttaattactataaaaataaatacaaaaaactaagatagatatacgatctttattttttctttttgcatatattagctattcgttggcggcaaaattctaattaatatgtatataattaattacaataaataataaatgtttgaacaaaaaagaaaaaaaagaaagaaagaaaggccaggaatgaagtatctttccatctcaactatagctatataaacccctcaatacttcaagcaaaagtcactaacaagaacaaacaaacacacacaactcataactataactatacattcatacatataacaataattcacttaaatcactcggaataatgcaaatctcatcttcatcgtcttcaaatttcttctcttctctttatgctgatgaaccggcactaatcacgttaacaattgttgtagtagtagtagtagtgttactatttaaatggtggttgcactggaaagagcaaagactacggctacctcctggctccatggggttgccttacatcggagagacactccgcctctacacagaaaatcccaattccttcttcgccactcgccaaaacaagtactattttcttctcctatgttgttacatacataaaatatgcatgaattattgatatattcacttaaggtttattgctcattgtatttttttaaccaatatattggatggtaaaaattaaacttatatattcgagcgaactatggaccgcaaagcaatacttttgttgttacaaaaaacgtaattttgaaaaaaatataaccaattcatggtagtctagtagttaaacggttcacattatcaatccaactaaagttagtccttacactatgattttaatcataacaatcactttttaaatgttttacacgatcaaaatttgcttttacacaaattccgaaaaatagtcttaagtgtgaaatatccgatccgcaggtacggggatatattcaagacgcacatattaggatgtccatgtgtgatgataagtagtccagaggcggctcgaatggtgttagtgagcaaagctcacttgttcaagccaacttatcctccaagcaaagagcgtatgattggaccagaggctcttttcttccaccaaggtccataccattctacccttaagcggctggtccagtcttctttcatgccttctgctctcagaccaaccgtctctcacatcgagctccttgtcctccaaaccctttcctcttggacgtcccaaaagtccatcaacaccctcgaatacatgaaacgagtatgtctctttgatctattttgggttatatgcatggatgctccttgaggcatgccaaaagaaatattgaccaaaaaactccaaattttgcgggcctcacttctttcaaagaaaatatgaa

SEQ ID NO: 64709 - DNA, 677 bp, Arabidopsis thaliana landsberg
taaattatttatagaatttggttctttcctatgcccaaacaaaatagcgtaaatagaaaacgcagacaatgaagtagttgaagcacgtgatgaacctaacacgttagtcagtctttttaaaatctcttaaaagttgtctcaactccatcataattattttaccaaacacgttcttctcctctctatcttctagtcctgataaccatctcattcattggtacaatacaaatttggatgattaaatatttagaagaaaaaattcgattcaattgtttatatcggttgagccaatctaattatacaatatatttatttattatgtttgatgaaatattatttatattcaagtttcttacaaaaactgaggacttatatattatatcattcattaacattatcgatttccacataattttagcacttttcaatatttaaaaacttacttcaaaaagaccaagacaaattcgtaaaaatagaaatgaaaaaaaaaaaaatcataaacaaaagatccatttatagttttatattagtttactggatctctcttattcatttatttaaatttttgggtggaaagaaatagaatcaaggacatttaggagtgcctttgctactgagcttgtcacgatagcaagcacattcatgcttattcccataagtgcctgaaggaacacact

SEQ ID NO: 64710 - DNA, 483 bp, Arabidopsis thaliana landsberg
ttttctgatatatcacttacttgatttggttcttatctgagaaaacaaataccatttgcttaatgtatatttgcacctcccttgtcaaaacgtttataaaggttcttctatataaaacatggtgtcagcagaatgctacaattcttgttccggctgatataatcatcattaagctcgggcatattattccatctaatactcgccttctcaaaaataatccccttaaaatctatcaggtttaacatacgcttaatattctgtcgaacatatcttcaataataactacttttaaatgtttagatataacaccactaaattatctttacttacaaaattaatctaaactaaatctccaataaaccctccatcctatactcctctcttacctataaaatcactcccagtaaccaaaccaacagactaattcttgtactctccctccacatccaaacagggatacactttaagcacccattactaaaa

SEQ ID NO: 64711 - DNA, 490 bp, Arabidopsis thaliana landsberg
  unsure (1)..(490): unsure at all n locations
catcgcgctcgacttcgaattcttcctgtatcgcctgccctttgaccgtatgtacgnatagctcttcgtattctcggagcgcatctggcgcacaatgcggtgcggtaaggaaatcttcgaatgcgcgccggcgccgatgccgagatagtcgccgaactgccagtaattcagattgtggcgcgcctgccggcccggctgcgcataggccgagacttcgtaatgcgtgtagccggcggtactggtcaggtcatgaatcatgtcctgcatttcggcactcgcatcggcgtcaggaacgaccggcgggaatttcgcgaaataggtgttcggttccagcgtcaggtgatacaacgacaggtgcggcggcgcaaagccgatcgccgtttcaatatcgtgctgagcttcttccagcgtctgcgacggcagcgcatacattaggtcgaggttgaagttatcgaaattggcgtgcgcaatatagaccgccgagcgcgct

SEQ ID NO: 64712 - DNA, 576 bp, Arabidopsis thaliana landsberg
  unsure (1)..(576): unsure at all n locations
ttttgcttcttattgctgtgatgctgcatttattatttaacagagaaccatcagttataatcaagagatgggatactcataaaaataaaatcctttgcaaatgtatctatcaaaacgttcgagtcaagatacttgccttttgtctttcagcagcctcctgatctgttctctctttccagctactctttcgtagttttatcggacgatttccaacatacttacctgtgtattcatatgaaatcagtggaccaaatcagaatgttcaacgacagtgattatagaacagaatcatataacaagttctgacaaaaacagtgagatgagatatcaagatgaagcaacacatcaaacagaaactaaaaacaaggtgcttaccattcatttcttttaaggctgctgctagatccgcaggatttaagaaactcacaaacccataacccttgggtttaccagtccgcttatctctaatgacctgtcatggtaaataagactcttatttttttgtacgagtttgaccacanaactaacactgaatacttatctttgtgattcgagtaagaatgatcccgatgatct

SEQ ID NO: 64713 - DNA, 567 bp, Arabidopsis thaliana landsberg
atgtcagttttctttggctcatcaatatgtgttatctttcaatatgatcttaattaataagtaatttgcttttgatcgtttggcaataaatcactaatattgtaaacacatgtcagtttatctataaagtttactcatactgatcatatttccaacaatgactcttattcactaatacatgtagaatctctaaactatttgtcaatttaattatatagttcataatactttatatctttctgccaagtttgttttgggcctaacaccaaaaagtttcacgttttggcccaataaaaacaactcacgttgtgacccaataaaaacaattcacgttgtggcccaataaaaatattcacgttctttaaagaaaaacataaattggaattgttgttcttactaaaacctttgtgacaacaattgaggttttccggaggaacagccattgactctctcgataactgtatccgtgttcttgttagaagatggaattggacccagatgatgttttcagagatgaagaccaagacccagaaaacgatttctttcaggtttttgaccttaatttct

SEQ ID NO: 64714 - DNA, 285 bp, Arabidopsis thaliana landsberg
cccaaaaatccaacgagcgagaccaacgaaaggggaagggcacgacggacagggcaaggaacagccagaagaggccgaagaagagacgaccaggggcagaaaccggagacgaggccccagaccccggccaacgacaagggagacgaaaacgacgagacgatgaatgggggatgaaaagcgagccacgagcaaaaaaaacacgcccaaagagtgaaaacaccgaccaaggaagagacaacgcaggaagaggacgaaccaaagaagaagacgagccgaaaggaacaa

SEQ ID NO: 64715 - DNA, 511 bp, Arabidopsis thaliana landsberg
  unsure (1)..(511): unsure at all n locations
cgctatacgaacctgcctgtgtaagaagcaagacaaaaaaaatgtttcaagcacatgaaacagaatcaaatttaagctcaagaaagaaaacaaggcaaaattaaccttgagggtattctcatctttagcccaacttctttccaagaaaatgtaatccgaaaaccacatcgaccaacctatgatctgtgaaagacttgtaatgtttcagtaaatcattaaagagagtaaactaaaaacaggaaaattcaacataagatcaaaagaactcactggaagatacttggcttctttcttcatgatggctaatgagcttgcaagacaacctacacgctgttatatgattaatcagagacagtgtttatatttctgcaaatttgaaaaatcatgtttcagtgaaagacaaaaacacctgagccatgacccatccaataagccaatcaatgtcacttcgatgattgcttaagacaagtgcgtgttctttccctgaaatctatatcangattaaaaagaa

SEQ ID NO: 64716 - DNA, 1338 bp, Arabidopsis thaliana landsberg
  unsure (1)..(1338): unsure at all n locations
cgcccgctgtataaatgaaacagttatacacgtacatttcgaagcacattcacttgagagataaaacaatttctccacactcactggtgattaggataagcatgtataactaacctgctccaccaagtttttctgcaagcttttcgatcattttaaaattctcaacactcttcaacgcccttccaccagtgatcacaacacgtgcacttccaagatcaggccgttctgtatcctgagttgaacgtcccacatatctagatttgctgacagagtctgcagtgaagaatagcaaaaccattcacaaaaaagaaccaccgacgaaaacacgaatacataagagaaacactaaacggaccgtcttcaaaatttgagagatcaatctgagagacagtagctttctttgactctgagtttgctgtaatcggggtgacaggaaaagatgtagatctaatagtcaacatacaaggacccgcaccagtataacgaactgtacacaaagcgtttcccgcataaataggcctgacacagataaaaatcttggtttcagttcacagttcaacgagaacgagagagagttggaatgtacctgataaactggtcagatcctaagattttgacaacatcagtaataggagaaacatctaaaagagcagcgacacggggtaatatattcttgccaaatgaactagaggaagcaagaatgtgtgagtaatctccttgttgccgaacaaagtcaaccaatttagcccaaggctcagctaaagagtactcaaatttatcagaatcagcaacaagtacctacagaaaaagtaccaacactgagaccacaaaaccaaaagaaagcaaatgaagagaagggagaatgttgtagcttacctcggaaacagaaggatgacaagaggcagcttgagaagcagcttcttgaagagaagaaccagaaccagccaataacaaagaaattgaagagctctcacctaatgaattagctgcaactactgtactcactgtctgaggtttgattgtaccactctcatgttctgctagaatcagagtgctaatctatatacaacaacaaaaatgtacacaacacaaaagtgttattgtgaattctcagcataacaacaacaaaatgattatctcaatatatatatatatatagaagcttcacaaattgaaaattttcaaaccaagtagaatgataaaattgaaatcaccaccacaaagaatgctcctttaccacttccgattcatttttaatatgaaaaaatcgaatgtggtcacgacgaanatgaatgatcgattccagcataaacaaaagatcgaactgaaggaaaatgg

SEQ ID NO: 64717 - DNA, 370 bp, Arabidopsis thaliana landsberg
cacattcatccatgaaatccacttttcgcagaaacccatttttctatattatccatgaaatcatgtacatttctttattatgaaataacgaatattgtaataaaaataaagttattaattttctaaagaatcttacctaaactactttttatttttgaaaactttataaatcaccaaggttatgccggtagttaaaccaaaataaagggaaaacgtagaaatatagggagaaacaagaccatttaaattgcaaggatttgaaccgatttcatgtgtatagctttttaacttcttgttcttgaccaaatattataggatctaaatgtaaggcggtctgagctaaccaccatcaactagaaaaacatacaca

SEQ ID NO: 64718 - DNA, 560 bp, Arabidopsis thaliana landsberg
  unsure (1)..(560): unsure at all n locations
ctaaccgacaaacattccaaccaaacgtgtagtaagtctcggcggacgacaanaacaccgggcactnatttagaggacaaaaccaccccaacgcgagccccacaggggacgccacagaccccacaagaaacagccacgcaagggccagcnggaaacctcccccgccacgctagccaacaaacgctagctttaacacaaattataccaatatcttttgccacttacatcaatgttttatactaatatggagacggttcataactgcttcaatgatgctacgataaccggtgatgaaatcattgatatattggcgtttcttcaatcagacgagtcggacaatccaagcggtataaacgagttagtatcggtggatgataagaagagaagacggacgatatcaaaccgggaatcggccaagagatcgaggatgaaaaagaagacacgttttgaagagttaactgaagaggcgaaccggtttaacataagaaatcaagagctgaaaaaccggttagctaatgtctgcaggtggggcaattttatatctagggagaataaccggt

SEQ ID NO: 64719 - DNA, 136 bp, Arabidopsis thaliana landsberg
attacgagggagacgttgggtttccgaaatagtgtaaaaataagttcttcgagtcattgcatacttgacccggacctgttctaaaaaagtcgaggcatttcgaattgtttgttgacacggacaaagtcagggaaaa

SEQ ID NO: 64720 - DNA, 1209 bp, Arabidopsis thaliana landsberg
agctaaagatgagtcaagatcatactagcccaaagagtccaagaggccaccctttgacagcagcaccaatcgcttcggtacgtaaagtcaaccctgctccacaatacatgaaaagagtacacatttgataagctattcgacagaaacaaagtgattgcttccatcaccctttaacatagaaaaagaagaagaacaaagcaattgtacacttatgccacagctgatagaatcacctgatataataaatatcccgcatgtgctgatcttagtgaaagagtacttgtctgcaagacagcctagagtcggatttgcaaagcccaaccccactccactaacaagagctaaccaacaaagcacaacatgcaattgaaatgtcaaaagtaacaaagtgaggcataagaggtcactagaagcatcacattaaagtgataagtaatcttcatggaaaattgaattttgatgcagtcaaccttgtcatcagactttaaaagatctagcctaaactttcatctcaagaatcgttagggaaaatgaggattacgtggaaaattggaaaggaaaaaaagggcaagagcaatgtgtaatgttacctagaggcaagaaattatctgaagcaaaactcagcaattccttgccaaaatataatctttgagctgaagctgaaatgcctccgtcaccaccaagctgtgaacacaaaaaaaaatctccacattcacaataaagtttgatcatttacatgaatccgattccattctccacacgaacttggaataagcatagaagaatacataaaatcgaatggaaattgaccagagaccttgtcggaaggttggcatgctctaatggatctggaaatccatcgtctaccacaggggtcttgacagcgacggaagacgacggagcggttccccggagacggtggttgacggagacatagaaaggggttttgggttgaagccagggtactagctatcgccatgggagtagagagaattagaatccaaaagtgagcagaagaatgatcaaagtttggctgcttagttctgcattactcagttctcaagtatctctctcagtttaaacaaactccggcttatcggaaccacttcctgtctagcttcccactaccactggctcctgttatttattaaatcttttaactcaaaaaatataggaatattcattttcaatttgaaccgagcacaatac

SEQ ID NO: 64721 - DNA, 521 bp, Arabidopsis thaliana landsberg
cgatgatccatcagaggtttgatcaagcacaatatctttcattaccatctcggtttcgtgactctgctttcgcattctgccacttcctccatcttgcttcctcatgcttcttcctcctcctgtcttcaattctttgatttgtttcaatgacgcctcaagcatagagtaggtatttggggtatcaagcatcaaaaacttttccttttccattattgcttctgcgatagctttgattctcaaacacataccttccaacttgagaaattcatccatcgaatcagctccctggtaaaagagatgagaacatcagttctttcaaaacggtttcaatctgatcaaagaatcaacattacaagtgggagactgaggaagataaatagctaagagaaattacctttgaaacttcacccgcagattcacggtgtgtgaaaacataatcctccaaagatttaatgcttttattcaacaagacaatagtttggcttcgttaagctttttaatattcgtatcttttgatgcgc

SEQ ID NO: 64722 - DNA, 564 bp, Arabidopsis thaliana landsberg
attttaataacgtaacctagtcgatttacatggtgaaaatgctataatggttagcaagtattcaaaaaagaggaagataaatatgtattaattatgataaatacttttcacccaaaaaagttcacgttaataatagttatattttttttttttgaagcatcaaatttgatcatttcatgatttcttttttcttttttaactcgtcaaattttgatcatttcagaaatttatatattttatttctattttgaaatatttaggacaaagtgggtgacattgttctaaattaaaggcttaaggataaaggagcgtgtgtcagtcgtgtgtgtgtttgacatgttgtgctttggttactttgatgataatatgtaattttgcagcatcaaagatacggagagctttaaacccttcctcaaaacaaaacaaagattttatggagagcttaaaacccaacaaaagttgcatcgagtctagattatggtttttgagggtatgaattaatcttctttctataacaaaataacctttattagaaaaaaaacgggggctggcgatttaattaaa

SEQ ID NO: 64723 - DNA, 397 bp, Arabidopsis thaliana landsberg
actacaaataattcgagaagcagtctgttcatttttttagactgaaggtgcgtagtttcgtgacttttcttgtgctataacagagttatttatgggagacagaaattgtctacaagacgaccaaacagaaattgtctgacgcatgccaagtttttttttttaccactgagagtgatcctgagggagtgctaacccttagttttagatggggaatatagctgatggtttgattggctcaagagaagttgttgtagataacagtaaacttggtgcttgagctaattaagatgcttagtgaacttctgtttctgagaacaagttgcatttggagacagtgactacgagtgttacagcttgatggagtttgttacatgatcatatctattggattcattct

SEQ ID NO: 64724 - DNA, 269 bp, Arabidopsis thaliana landsberg
  unsure (1)..(269): unsure at all n locations
agcaaatgtaaccgtttgtgcatgaatgaaggatgtactattactttatgacaactatctcgcaagaaaataacccgtgagtaaagtgttttgtgttgtggcaagtagatnnctctaaaccgcccgtagcagtgagcacattgcctcgagccaattgtcgtagagcttggtaacaagtctctagttggtaagtaactcatacagcagttagaagttcagtaggagcgatgagaatgacgagtcggactgactggtgacactcatacgtg

SEQ ID NO: 64725 - DNA, 1684 bp, Arabidopsis thaliana landsberg
caatcaaattcgaccatcgataacgatgaccatgaggttaagaaaacagaacaaaacagagaggcaattaaaagataaattacctctgcaaagaggaaatgagaggaaggagaaagataaaaggaaagtgagattgctccgaaaatttttcaaaatcgttccattggattctcaactccattaacgtcgaggtaaagctccacctcatattctctctttccccaaccattgattcttcttctttttttggtcactgttttgtttttgtttttcgttatgcacttctaattatacaaacttagaaacagaggaagagagattacctgtccctcgctctttcgttcacattataccgcccacgagtgttatatgacacgtgtcaattatgcacgagtgttatactgacacgtgtcaatatattgagatttgagagaggcaaaaacactttcttttaccgcaagaaactcagaaagccttaagaggctgttgtcagcacatgaactttttagtttcccataaattgaaagtttttgaatttcggcaacaacactaagctacttgatcattgaagggtatgagtaggaaaaaaaaaaaagaactcagatgatcaaatgaaataaatgtaagaacaagaagccattgtcttcgataatccttcttcgtcaattgagcttcagatcaaccacaagcccattactgaaagtagagaacccgtttaggaatctgctatgaacatcttcaagctactgactctgcggattctgttgtctactatctcacacggatgtgttcaaagagttcccttcagtgttgttgttcttgaagaaaaaagagtttcggtgtttcaggacttgagtagaagctctgaagcaagtctcttcagtgactccgacgctttaagaagatcggattccgaatgtcccgctgagacgtagagtttgattcccacaggtaaccggcatttatcaagaaatgatcttttagaactcacaaccaacaatgagtcttccttcagagcctgcatgcatctagtcatgtcaagaaacggggacagggtctagatttggttttgcaaagaaacaatgaacttacacggtcagccattttctcaagtagaagcaaatcatctttagctgaaccgctagatttctctaattttaagaaaacaataggtgattcccggttgcttgttaatgacatccccttgatatctgacaatcctgcgttgttcccagcatttctttttcaattagaggaagataacaaactaaatcaaactctaattgttgctagattagattaaaacttgaagatcaaacctttccataacagagcaacattttgcttcagcttaactaacatatcagggttttgatcaatgacatcaatggcggtgatagcagcacttgcaaggtatggtggcaaagaagcagagaacacatatcctgaactgctaagtctctgtgcatttgagcgtcccagagaaaagtttctattatcggtagttttttaattttgtttgtaattagttaatcagcatgatcgatgtttacctggtaatcgatgatgcgggcattcccagtgcaaaatccaccttctgtggctaatgcatggcccattgcagcagtcacaacatctatcttctcaaatctgttaaagacgaaccgccgtgaaattttagcat

SEQ ID NO: 64726 - DNA, 1174 bp, Arabidopsis thaliana landsberg
ctttcttgcgcggtttctcttcttcttcatcctctttaaaggagtaagccacatccttaacagatttagagcactttgttaaaagctccggtttctgatctgtgacgagaactgtgtcagctagcaaaagtgagaatttcttgttcttgctgcggctttctgactcacattccaagttctggaaaccaagagacacattaaatgccatcttcggtctcaatactttatcattctttgcatttatatttaatcctgactctcggaattccagaccgataccagtcccagcagatttagttagcttgtcaacgaactcaggggcattcttttcaacaacagaaagggcagcttgatagacagtgtttatctttcttcctgacctcaaagcatcaatagcagcctcatgtgccttgagaagaacctcatatgccttgctctggagagaagttgcatctattaggtaggtcctggcaacatttgagcaataactattatacctagcaccaacagcacatattatgatactcgctggatcataagtgagcagttcatcattgcttgcagcacttggtttgagatcaaacttgcctccgctttgaaatatcggagggtagcatatgtcaacattctctggcttcagtttcacactggccttagttggctcaagtatcgctttctcagtgagatccatcagggcagagtgggtgacgtctttctcctcatcaatggcactctcaagatttggaacaacaacatttttcatcacactgtaggctagatacgcagctttcttcacactcatgacctcagtatcgtctttaacagcaaatagatcagacagccccccagttatatctacgaactggaaatttgcattctttagcctctcagtccatgtctccagaagcttaccttcaggggcttcacgagcaatgtgtccaacaacttgtgaatcatttccatcaccccgggatagatcacggatggcacgaaatatggcatccatcagccctgttccatcatcacccttaggcttaacatgcatgataacatcaagcttcaactcatcatgtgcaggttttttcacaacttcaagtagagaagccttgttcctactacacaggaaatggatctgcttcttggtaaaaaccataattgtatctggaaactcata

SEQ ID NO: 64727 - DNA, 2919 bp, Arabidopsis thaliana landsberg
taggaaatgattccgagagatatgcttgtcttcctgtaaatataatcttcttcattaatataactgtggttgttcttttgctaccttccgcagattaattatgctgttgtatgcccggatattgatcctttaacttgtgctgctactgatttcttccagcagcttggaactggtgagtcaacgagtttatcttttgtgaaagaggttatgctcaaacatgataggaactggtttctgttaaaaaatgctaacaagttctgataatgtctcatcattttcttctaatgtaccctttgttgcatagtttatgaaacgtgcaggctgggaacacatttgccacagagcctgggaaatcaaatggaaaaggacgttgggagattatcctcatctggatttgttctgcttgattgccctcaatcaatgaagattgaaagcaataacacatcgcttctgggatctctcagcgattattttctatctttatcaaatgggtggaatgtgaatagctatctgaagtctttatcaaaagcgctgaaaggtctaaagcttggatcaggcctttacacaaaccaaaaagaaggatcaggaagtccttgtgtggtaagtatgagttagaaaatacatatgttaagtatttctatactcacttctaccaagtgtagctgttgatacttgttgactctacttttcttataggtagtgtacatagtgtgtccatttcctgacccttcggcagttttaagaacgatcgtcgaatcgtctatagcacttggatcagtaatacagtcagatagagacaggagatcaatactcaacagtcaagttgcaagggcgtttagtagttctactgctgttgacgaagcatcaatatctcacattccagtgctctcagggtttagtgtccccaaattagttctacaagtggtgtctgttgattcaattttccggataacaagtccaagctttaatgagcttgtcattctcaaggatactgctttttctgtatacaataaagctaggagaatttcacgaggaatgcctaatgatgcatttttctcatcatctttaccaagcagatcgtcttcagcgttgacaccaatgaactctatttcaggaatctggaaagactgcggtggttctcgaatgacaggttctacacatccaagagatggtgaaattgatgttagtttgagaacgagtggttgggatacctctacttcctggcagataccaagatctggaggattaagctgcgacccaaacagaaatggagatttttaccttaatgatgaaattttctatttatttgaaccacttttcattctttccgagcctggttctgtggagcgtggagtttcacctactttcaccagcttgggttctgagtcttccaagccaatacccgaggatggtggcagaggttctggacctggcatgaattcaatggaaggtataacatcgggatcaagctcccagggggatgtatcccagcttgaaggaaaggctattccaagtttacattgctgctacggttggacagaggactggagatggcttgtaagcatctggacggatgccaggggtgagttgcttgacacacatatatttccctttggtggaattagcagtagacaggatacaaaagggctgcagtgtcttttcgttcaagttctgcagcagggatgtcaaatactacaggcgtgctcctcccctgacaatggatctttcaaacccagggattttgtcattacacgcattgggaatttcttcgagcttgaataccaaggtaaattagcttcctttgcccttacagtcaattcttaatctgatatttcttcccgctcttattccagttgcacctgggaatataattctctagtattatatggtacataaccctggtattgttgtctgcttgcggctggtataacagagtggcaaaaggcaatttactcagctggaggtcctgagattaaaaagtggcctattcaactgcgacgttctgcgccttctggcatagccaccaacagcaacggatcttccttgcaacagcaggatctgagtctgattcaagagagagcctcatcaactagcacactctacagctctcattcaaaacaatccacctttgtgaaaggcagtatggggcaatccgctggaagaaagcagataatgggtgggcagaccatttctggtactccaaggggattgtttcagtgggttcacagcatcagttttgcttctatttcacttgaccattccctgcattttgttcttccagctgagttggtatccgctggtcagttttctgatttgttttcctttgttcccacaatttctctcatatctatgtcctgtatgatcaattataaattcttatttgatatggagctagacgctcacttacatggttatttgcacaattatgtaggtggtggccagagcagtactggtatgagttccgttaattacattgaaggtttcactcctgtcaagtctcttggttctaccgctttctcttacatgatgataccatcacccaacatgcgctttcttcacccaagtcctcttcagcttccgacatgtttaactgccgagtcacctccacttgctcacctccttcacagcaaaggctatgcaatccccttgtctactggatttgttgtttcaaaagctgtgccttccatgagaaaagactcaaggataaacgtgaaagaagaatggccatcagttctttctgtaagtctcatagactattatggtggttatgacaacgctcatgacaaaattcttcagggaatcgtgaagcagggaggagggaccaaagaaactagagattttgaggttgaaagccatcttatccttgagtcaattgcggcagaactccatgctctatcatggatgactgttagtccagca

SEQ ID NO: 64728 - DNA, 550 bp, Arabidopsis thaliana landsberg
ggcctgccgcccatgggaggcgtcacgctgtcggatgatcaactcgctgcggtggcgagttatgtctgggcaatcggacaccagaagaagctttagggtgctaaaggcgaaaccgttgtaagcttctcgacgcaacgattaagccgatcgtgcgttatagcgcgtaatgtgaggccaagcctccacccatccgctgcgggacggataagccccggtactcgaaagaggccggggctttctatcgcgctataaatatgcgcgcacgattgcggctcttgctccggcaggagtttgcgacttggctttatcaagcgctgcttttctcgcatcgaagtcgaggcggatcagcgaattcaaagcatcgtccggaatttcgtattcgccgcaatgcttgcattccacaatcagcccatcgaagttaccgggcgttgcattcgtagcttcggcgccggaaatgggacagttcattggagttcaccattctgaattgcacgtctttcttatgtggcgcgccgatgttcttgattcagccggttgccgccaggcattc

SEQ ID NO: 64729 - DNA, 444 bp, Arabidopsis thaliana landsberg
  unsure (1)..(444): unsure at all n locations
aagaaacaggaggagacacaaccccaccacccagccaagcgccgaaccacgaaaaccccaggttaggatacatacccaaccggcaaagaaaggggaaacccacaaccagggacacgacccgaaccccacaaacaagncagccgagaaaagccaccaccaccccaacaagggcaacgacaancgacccaacagcgcaccgccagaaangaacagaacngagaaagaccgaaaacccccggaacgaggangagaacggaaaaacccaccagacaaggaaccacgggaccaaagccaccccnggcgcagaaccaacaagccgaagaggcgcacgggcgaaaacccgacaaaccagcgcngacagagagaagcaggaggacccgccagggaagaaagaagccccncggacaacncggcagccgcaaagaaaccccgangngaaaacac

SEQ ID NO: 64730 - DNA, 1619 bp, Arabidopsis thaliana landsberg
attgattggggttttgttcgaagatttacatgtgattaaaatgctcatatttgttttgtactcgcctgattttgaaatataatagtgatgaggggtctttttaaaaatgtttgttgatattaataaagtctgtattttggttaaaataactatgaggttttagattttttttttttttttttttcctttttttttggaaatttagaacgattataggatcaagcgaaaagacttacagttttgtgttttggtagcagtatacaacaatacgtaaaatttttaggtagttgaaatgttataacaatgactaatttgatctatgcatgaaaattattcattaactcaaatatttttcattattatatgtcctatgcagccttgcaactttcacaatatttgaaccttaatttggtctttatcaaaaaaaaaaaaactaagttggtgggaaaactacagacttataaacatttttccacttatgcttttccaaactaagattattggttcgaatttgatgtctaaaagaaagaataaccacatttgaaattaaaaacagtttttttttttgctactccatatatgattaaaagtgaatgtgtatctgttcgtcgaattacatgtgttttctcaacattactattaactaaaatcgtgtagacaaatttgttttctttgttgatttaataagaaaaaggaaaaacgaagaaagatagaacaaaaagcagaaaacgcgtcagggcactcgagagaaagatgaagaggtagtgggagttaacgtcgtgtcgcttaaacggcagccagcttttgtcacggcgtcccgttacgtccctcaaacggcgttcatgtgttctatacacctatttttatgtatttattcaataaaataaattaataatttagtttcttcttgtattgtattttatttctacaaaacactataattcttttttgggaaaaatacaatacttctatttctagcgaatttcgtgttttgaacataaaatccatatatttaggcaggaggatcatatttgaatcgttcaaacgaatagagaaggatagttgcaccattttgtaatcattatttctccaaaataaatccaaatcctctagaagttaaattctgaaatcattttccatggaaaaaaatggctggagatgtgatgggaatatacacacatctatcactttcttgtagctaggatttcatatttgatgtagtactcaaataatttatacgattgctattattttgggaatccaaaaaggaatatatagattaggaggagcaatgatgaaaaatcttaggtgcaaatctattactctgtacctgtatgaggatatcatgatctttgacaaaaaaaataaaaatgaggatatcatgattatgatttgatgaattagcctcctatttgacatttttcgttaaaaaactgtacctaagaaaagataaataaattcgtaaaatatacactagtattaatcatacaagagagaaaagtctgttaccttttgcaagatcgcattttgtaatcgtttcatcaagttccgaaaccccaccgtttctcaaattccaagcccacttattatttactttatgtatatatatatatatagat

SEQ ID NO: 64731 - DNA, 249 bp, Arabidopsis thaliana landsberg
gtgagatctttaacgttctgcccttaattagtatcaacatgtggaaacagaagatttggttctgagaatgaaatgcatacgaaggagttcaatggaatatgattcttatcaatataatatagagtcgccctaacttgtagactctcaaatgactctgcaagaccgctaagttagcgggaaagaccgttaacaaaactccagtacaccgtttattggggttgattgattcggtacatcaaaattctgcga

SEQ ID NO: 64732 - DNA, 538 bp, Arabidopsis thaliana landsberg
  unsure (1)..(538): unsure at all n locations
cgatctgatcgccatccaggaagttcgggaagaccnttttgcgcctaaatagcngcngncnatnctgggaaagcactggncgtatgtttttaccgctgtcacccagggcggtcagggcaacggcgagcgactcgccttcgtctacgacacccgaaaagtgaggttcggcggactggcgggagagatggtgctgccgccgttcgagaaaaaggatcccgagagtggacagaccatttacgagccggtaaaacagctggcccgcacaccctatatctgcgggctggaggccggctggatccgttttcagctcaccaccgtgcatatnctttacggcaccagcgcggccgacgacccggacccgggttcgccgaaaaaaaagcggtcgccaccacgatggcgaaacgcgccttcgacaagtacgcgtggtcggagaatatcgggcctgctggagacttcaacatatacagcccgaaggacgagacctaccagcagatagaggccgccgggttcaccattcccgaagatctgaaaaaacttc

SEQ ID NO: 64733 - DNA, 458 bp, Arabidopsis thaliana landsberg
cggttaaaatgcctcatttttggcgccgtagggttcttaaatcgttcctgagaatttgatccgttcttatttgtgattcccccactctcttgcgattttcccagaaaaattgtcgttctaggttactcattaacttcaaaaggtctgtgtttttggcgagaaattggttgtggagcgttcgtcgctaattcaaataaaaaaatcactagggtttggagttctggaatttgggattaaccagtagttatgtacgagtcattacagtttcctcctttgtttgggtttcattaagatcacttaatggtttctggaacttgcattatgatttactagaatcaacttgttgtaggatccatataaaggactgtttattagtctgctgaacagtgtgaattcgatggatttgtcttctgatctacttgagatgaagattgttagaaacggggcttgaaaaagaa

SEQ ID NO: 64734 - DNA, 609 bp, Arabidopsis thaliana landsberg
tgcatttcacgtaaaaatgagggtctttagttttagaaaatattataaaaagagaacagtagtcatttttagttacagagggtctacccaaagacatttgaatactctctctcttatatggttctccccgtgtcaactcctcatttgttttcatattttaaataaattaaataattaaactaaataaaaagtattattattaaattttaaagacacacttaccaatagttaaccaatgcaaatgctctaatagatccacaaactatggaccatatctatagtagattcgtctacttctatttaagcgctaaaaggatcactggatatatgagacccatgtttcttattttgtacgagcaagtagctaatagctggatatggatttagggttcatctacatgatcacatccactaatatctggatatatatataatatcatgttatgaaaagtagtatgagcatacaatccacttagcaactagtttgaactacttgatacaacccccaatttcttatgttgctacgtctttttatatatcaactaggtttaaagtatcactgggtcggttgtagatttacaagacaaaataatcgaaatgatattcaat

SEQ ID NO: 64735 - DNA, 1441 bp, Arabidopsis thaliana landsberg
tataccacttaagatccgatgtgggataaaatcgctaatattaaagagatatctttgtgtttgttgttgatggtttttgtcttttggcgcatcaagattagtacttttggtttctctgtggagtgtatgcaacttctctaatcaatggtgttatgatcagaagagtgttttgattctggaagatatgtatatatggacagtgattatagtctacataagaatttgagcaaagaagcttgctctatttgaaatagagcggtacaagtttcttcaaggtttcaaacacacttgtgaagggatcaaactggactgactttcttaatccaagatctggaaactggttggtcagtgtttgctccatacctggcatggacatcatggctgctagctcagcatcagtcacttcacagtcctgtggtgtatcctttattttttccgggtcatagccaaattgtgccaagtagttcttgtactttgcgatgaactcaggtcctggatttggcgtccttgagtatacctaacatatcaaacacattaggtttatataagagatcagtgcaagagatatttctcaaactcatgagttctttctcttagaatcacctgaacaaagcccttgtctttggctccagaaacaagtgcgtagttgtcgtagtctgtggctatgacatcataaggcaacttggggataaaaggaatggtgggaaatcgtaggaaacacttctctttaatcatctcttgcttttctaagtcagtctcgcttttctcgaggtcttccgctcccacgcattgaactttccctctgattcctgttatatatccatcagggctgccatgaacacaaaatgtatctactctaatggctgattccttcatatcaaacgtgtatactccctgcaacagttgaaaggttctcacactatgttagcagaggatgtgttttcacaatttgtggacttgaagaaacaattacctgagtgcaatgacagtcttcttggccttgacctgcaaatccacgcttaagagaagctacttcaaaccatcttccagagtacctaacagggtcaaagttcttagcagtcatgcctctcatcatcatcatcatcattgattccgagtcaccatcagatggaagagtcagcttgttttctcccacagcagcagcactccctagttggcaaatgttctgataaccagatgagagatccaacgctataccctgccagaagaaactcagaaatttcagaccgcttgtggttgcaatcgaacatgcttatagcaatgtcggctccaacatacctggcctgcctgagagagaagcaaaatagctgcaaaccctgaaacaaaacacttcctcaaagcctggatttcaaagagattctccgagaaacattttaactcagcattcatcaaccaccccctggaagaacagcagcacttg

SEQ ID NO: 64736 - DNA, 162 bp, Arabidopsis thaliana landsberg
agccatgggcgacgaacactctctcatcccaaagtacctttttgatttctgggtctttatccgttttcccttttttacgcttaatctgattagggtttcttgttttcagtaatcaaattgttcaaagccatgatttttaccattttcgttgaaccattctgt

SEQ ID NO: 64737 - DNA, 559 bp, Arabidopsis thaliana landsberg
  unsure (1)..(559): unsure at all n locations
aaacgggattaacttggatttgcagggtataaaacgacatgtgcctaatacagnacaccngctttaacatagttgcaaatnnagaaaaacaaacatatattagnggtaattgataatttgacctttatttatcaatacagaaatattgtttttcgaaaattatttggatcacaagtagtcttaggtagatatggataaacatgttggattcttttggagttttgggtctagtttagcttaaattaataatattcgagaacgcatatcgaacttatataagaataatctgatcgttaatagcacacctaatctgtttttctaggtttcttgtcaattgtgaagacgcagatttctatttctagctatcacgaagagttcaagagtttcaagtggatcaagtactgtatctgtagtttatttctcgtttatgttttgtttattgtctaaaagttctacatctcttaattaatttgtatttacatcggttaacaatcgtgtatccataattttattatgccaaaatatgttacgtcagacgaactgtttctattatacagat

SEQ ID NO: 64738 - DNA, 1993 bp, Arabidopsis thaliana landsberg
ttaccgtttgttacatatacaaataaaatgtccataactttgcttattgttttggatctaaaccactttttctagctgggttacattgtactatgagacaaaatctaagcgtgagattagtttaaggggctcgacgttattaatcttcataaaatagatcaatgttttgatgcaaagattaatataataatttatgtatcttcgactttttaatcattatatttagaccagggtggccaccaaacttcattaaatatatatcttattctgtataatgattagtaccatttcccatcaatttaacggaattatgggttgaatctacagataagcacgttaatactatattataaagttccatacttattttggccaaggcacattactttgaaccaaagaacatataaagaaagacggttgattttaaattctcttaaaacatgatatgctacgttattcatcgacatgagaattgtcttgaacattgattaaatgattattatgaactattaagggacagggaagttttttaatgctcaactttgtcatggtactccttctattaaggcctatgacaataatatagtttatgaatcgaaactaagaatctagaatttatgcattttatgtatttttagatatatatttttatctttaaagctagataaatgtcgatatattataaatttataatgtgttatatgttaacaataaaagtaactagccattgaaaacaaaatatcgtttctgtatgtaattgtaaaaaaatgttggatttagataaagattgttgcttttaaaacctggaaaattaattaacattttagacagttttgtgtattataaacggtcagttaatacaacttaaatgatctaatagctatccatgttgtgtaaaagtcataattgtatgggactaattcttttgccagtcaggaagtaacactatttttgttaagctaattttaaatctgatttaaaagaaataaatcaacgtatatatgaatgaatacaaattgttttcaaatatagaaacaaaataaatcattcttcattgtgtgtcttttgacgcaaatgttttttgaagcaaatcaatcttgtaagtctccttcatacttcaactctcacccatttatcgtacttaaatttcaataaaagcacaaataaataacaatcatcaaaccaataaactaatttttttttaaactaataatatggattctcaaaaaaaaaataaaaaaaaaataaaaaaaataatagtaattaaaattctcaaatttcgaaaataacaaaaataaaaaattctcaccaagctcttggacgggagacaaggatattatagtcagtttcgcaagaagacgaaggtgtgggaatcatgcagtgctgcacaattcgaaattcaaaaaagtgggttgcatgttcttgaaccggcgttggtcgagtgatgacaaaattggaccaattggtaaccggaagaaagaacaattgaataatcatatgattataatctgttctaagacaattctaaattcttcagaataccatatttttaagttttttgtaagaatatcattattagcaataatactctctatactgtacatacttcaaaatttatgttatcctttcatatttttttgagcaaaattttctaaattatccttatctctcacaagtcacaagaagaaaactaaactatcaaaccacaaaaaataattggtttttgttgtgtaacctaatttattcaacaaaaatcttctagcataaaatatatttaaaattatcaaatgatttctgtttcatataacatttaaaattaagatttccatcttaacaataaaaattatcttctgcattcaatcaatcaacctaagtcaatggctaatattgactcttaaagagcttatattttaaatgggccttaaatccgaagcataagcccaataaagctttgaatcatcttcttcgatagtatcacatcctttttttttct

SEQ ID NO: 64739 - DNA, 316 bp, Arabidopsis thaliana landsberg
gagcgaacaacggagaccagcgctcatcatcatcattgattcatttgtccttcagatccatatttggtgatgggttgcttattataggtatctgaaaccttgtcgagaagacaatttatgtgagaccaatggcatgcataatgaaacttacatttttgtcagtgtctcggagcacatgtatagggttagatgatatgtactatggctgaaaaacctaatatctccaagctatatgggctaccttaagaaccatctgactaaattgcaaaaaccaaattcttctaaacagaagaatcacatgcactctatctaggta

SEQ ID NO: 64740 - DNA, 1581 bp, Arabidopsis thaliana landsberg
ggaaatgatcagagaacatggcaatgcatcaacttatttggtctgttggattgatacgcagagacattaaattagcttctaattctcaactccttggactaaaacatcaagattagatagcaccaacagcggatgcaaccaaccgcataacaatcggttccgcactacaaatactgaactaggattcacttcacaatcatcttcaagaggttaattcatcacactatgctatacttttatacttatccaagctaaaaacaaactcttcttctcaacatcaatatcctcattgttaacccaactagctttaactacacaatcacaaacacttaaactagttaagaaatcattcatttaggatactaaaaacaggaatttatcaacaacatctcagagctgagaacttcaggaactcaatgaaactacaaaagcaatcagcttcatacctaatgcagagatcagtgacatcaagagatagttgagcatgccaatcaggtttctgaatcaaccaaacagctctatcgtctttactttggtaaaaccctaatttcctcagccacgcttcgatacaaggtaagctatgcgaatacagtggcttgttcttctctggtagcttcttcagccattcgtcctccgtatctgacacctcctccgcgtctgaagattttgaagatactagagttagaggcttcctccgaattgtggaagaagaagaagaagcgaaactacgacatctgggagaaatcgaggcttttgagctcaaaatgtgaagaaatttcgcagggattgatgattgtgcacatggaaatagagcacttgaaggaacaaattcaaatgcagaaacacagttcatgattacgagaattttctccgagaaaattcctgattttcccaggaaaattcttgcagaaaggaaaaatctgaaccggaggaagttttcgtaatctttgttctatcttcaattttgccacgtcaccaaattaaaactcttgttgggccattaatggccttatgatgtagtagtaagcaagacccaataaattgacaatctaatgacgtggcaatatgtttcccgccaaaaacataacctcgtagctcactccctcctctcttcttcaacctcaaaaccaaaatcgaatcttctctctctctgcttcatttcaatggctggagatttgttatacgccaaaacgcagcgttttgtgcttttgatagatcttaatccgcttctgatcaaacccaattcggagcaatacctagccgtcgtgatctccgccgccgagaagcttctcttatttcctcctttatctgcttctctcttctctttcaaattcttcttttcttctctttcttctctcttatcatcctcaaagctctcgtcactctcaatttcatcttctccgctttcatttgaccttcctaaccctacactcgtctctctcaaacgcgccatcgacgcggttaaaggatatgaacttcgatctagctccacggtggcgacggcgcatcgcctcgtggggttaatgttgcggcgaatttgcgacagattgattctgacttagatccatcctgaagagtcga

SEQ ID NO: 64741 - DNA, 352 bp, Arabidopsis thaliana landsberg
atttcaaatgtacttacatttacacgaaaacacacatatataattgcaaaaaaaaaaaaaaaaggattctataaatcaatgtggttggtaggtggattgccatatatttatataatatgcataaaataaataaattaaagggtgcactcatctctaatgagaattttgatcatattagacattaattaatggctgacgaccgttaatcaattacccctaaactataaaaaggagcaagtaagacaaactagaaaaaggttgaaaatcaattaatggttaattgacatattaaaacaaagaaagaacataaacggcttatacctagcaatgacatctacttgtgaccctaatt

SEQ ID NO: 64742 - DNA, 529 bp, Arabidopsis thaliana landsberg
taggccgtaagttataaaccctaaagatagatggtcggctgaatttggttgagtctgaaccttgtatcgtgaaaacaaattgacgcccttctaaatcaagcagctcttgaggaattttgtcggaacgattaaactgcatcaattgacaaataaataaacattagtataaatttaaaagttattttcaaatagtggagtttagaagattgacctgaacttgttgctcgagcaattcatatgcggatttgtgaatgagcttgatgacatcctgatcgaaaagaagaaatgatgcttccccagtatggtcaagaactgtaacttgcaccctgaacctaaaacataatagcgaattctagtattaaattaaatacttatgatagaagatagtcatataagcaaacatgactctaacatgataacctggtgcttgtagtagtaacaaatgtgtcacatttttcacattcatattttccagcttctatttcttcagtttcaagggttgaataaggagatactcttttgaaacata

SEQ ID NO: 64743 - DNA, 415 bp, Arabidopsis thaliana landsberg
ccccatgtacccaatagctcatgtcacgtatgcatttcggagccatagcctctcatatcttgaatcaaccaaaagaaattatgagaacacatggatctattaaaactctattcgacttcttacatgaagcattccaactgtacacggccggtacgtcagctagttgctttacttgcaagttgcaactaatttttgtctccggattacgactttgcgactcatttgcatctataaaatctaattttttaattgttttgtcactgaaaagtcaataaagtcgacctttttgtttttcttgtaggccggacgatggtttcacaccacaacgaccgaaacgcccatgcataatacccacgtgttattacaaagactggtgagacatgacatagcatttttgcaccttaagtactttttt

SEQ ID NO: 64744 - DNA, 294 bp, Arabidopsis thaliana landsberg
  unsure (1)..(294): unsure at all n locations
tttttgaatctttctacataataaaaatgttgaaaatggttattaactattaagtaaataatattccatgtatatatcatggcgaggttagaaatcttttataactatcttaaatacaattaagaacaaatttgtatgtgtgcaagtcaaatattttatatacaattaaaaaagaatatccatgtataagttacggcgaaaccacaaattttcatattatatataggaaaaaatgntattgcatgcgccaactttcaaattgggggcgaatatgacatgaacttttcagtcggt

SEQ ID NO: 64745 - DNA, 351 bp, Arabidopsis thaliana landsberg
  unsure (1)..(351): unsure at all n locations
cacgaagcggaccgagcatccacaccgaatgcgagaaggattgcaataggaggccgagcgagaccagaagccgaaagggcgagtaacaaccccgaacccgcaaggcccccgggacaacaagaacaagaaaccgagccgcnacangcaggggccgagcgcaacacggacggccagagaaacgccgaaaccggccgaggcggccacgggcgagagcggccaccagaccgggaaacaaagncgagnaacaaccacagaaagggacggcggaagaagaggaggaaacggccgagaaacccaaaagaaacgagcgaagcgggccggacaggagaccgaaggaacgaaccggagacg

SEQ ID NO: 64746 - DNA, 1862 bp, Arabidopsis thaliana landsberg
accttctgtatcttctttttctcctcttcttctctttccagatcacgcagatactcctgtacaacagttaaatttagccgagtctggaatgggaagatagttcctgataaatgaaacaacctgaaagatttctagctgatcaattttctcgagacgcgaacatctttcatccacttctaagcggtcctgaactttgcgccattgactatttggctgaatacggaaaatattaagtcagaatgaactaccacaaaatagtatggaaaaataaaatttaaaaagcgggacaatcaccttgatgaaattgcaagattccaaaaatcttttgtattcaattatgttccgcttgcgatcctcaagagctttcacccgctccttataaaattaacaacattacgaataacggaacccaaattaaagttaatgccaaaactttgaacaaacaataaatttgatatttggtcctcgcaaatataaagagtaaggacacacgttgtaatgaagttcactattcaagagatggtacacacttggctaaaacagatgtgaagtttcaaatgatgatgaagttacaagaattaagaaaaagtcaaatgactactctgagcaaaattttccaatggaaaactaatgtcaaaaatacatgcatatagagaagaaatgggacaaacaaaaatacagttacttttcaaacaacacaactcattaatgtatacatcatttaataccttctcttttagctcactgacatgatcttcaaaaatattacgacggtctttttctcgttcaagagctttgaaacgctcatcgtcttcaaacattgtcacagtcttactggatttaaaaggaaaattatatcacaaagaaattgcagtaattctcgtagagaaaaagaaaaagtattggaatcagaattttctggaaaacaaaacctccaccgagtagaaggagtaagctccacgcattcctggtaaaaaaaaaagacaaagtccaagataaagataagacgcatgctgatgaatttctctactttaaaatttcctaaaaatgaaaaggagatatatcatggagcagcagatctgcaacttacctctaacatccttttaaaatcttcatacagttttttctgtctggctagcctttcctcctcagctgctcgtttcgtttggagtaagaactgaatcacaacaaaacaaagaccaacaaaacacaattaacatatgtgatcagatgtacctcttaagcatcactgttcaaacctggagaagaatgtgtatgtactatatctaaacatctgaaatttctttaattctcgtctgataaattctcttgctagttttagggtataagataatagaatgacctcattgaaggcttgcttccgctctccaagtgtcctcagagcaccgtatcttttgtcattaataatttctctcatggcctgtgacagaaaccatctgaaacttcagaaacatgctcaagaacagttaatagtgaaagttatactacctgttcccatgtccagtcagatccaactttggcggatttcaaaagtgatttgaagacatccacagcttcctatatagtgaagtaaaattaattatgcacacagataagaccagaaatatgctcagacataaaaccaatcttgtatcggataaatcaatcataccaatttattgttaaaggaaaaactctcttgatgaatttgtttttcttctgtttggctctcaaccttttcactttcaaccataggtttttggctttcttttggtccactcccactaccttgctagagagcagatcaacaattatgataaacggatacagaagaaatgcatgctaacaagaaatgctcatcg

SEQ ID NO: 64747 - DNA, 185 bp, Arabidopsis thaliana landsberg
  unsure (1)..(185): unsure at all n locations
aaagaaacanaagaaggagnnaaaagcagagacanngannngnnaaaaacgaagaagaagaaacnnccnnncnnnncnagggaaaaaggaaaagncgagagcgaaacgaagaagcgagccaaaacaaaaaaacaacgaaaaggagagaaaggggangnggcaacggcnctccgaagcaaaaaggc

SEQ ID NO: 64748 - DNA, 894 bp, Arabidopsis thaliana landsberg
cagaggtaaattagtgatgtacatatcagcaagaagatatcattattagctctcaatattgttttcatctgtctcacttgtcgcaacaaaatctgtttgttcgttgtataatcagttaatgattatacaattctcatattacaacttgtactcctcaatatgattttatacatgatttggtccatatttgggttcaatgttgaattttattctcttcactccatgcttagcttcagtgatttgatttgatttgttgtgcttgtcacattgtttgtttatattctctacacctgtagagcgggattagcaattcgacagactttagtctatttccaaaatgattgtgttttttacatgaagagctaggttaattaatatggtaaaactcgaacctttaaactctatccgtcatttagagaacatttgttagctgtcttgactttgccaggctttcttagtctggctcatacttttgttgagaaaaacatggctatttgtttctgcatttggaagggtcaacagaatatttttgaagtatggtctttttagtatagatcttagggactttttttgggtcaaagtctaagatagcttcaagttgaagaaagttagtgagcatctagtccaagacattagctagtgtttaatttttgtttgacccgttattaccgttagttgttggtacaccacacgcaagattgcgtagtttcattggctcaagttgggttgttatgttaaaatattgtcattagtataatgaagctttattgttaattagtctaatatttgtaccattaatagagtccagcctgtaaagagggaaaaacggcgactgcatcagatactggtggcattcccttggataaacaaacaatactttaaacttggattacc

SEQ ID NO: 64749 - DNA, 692 bp, Arabidopsis thaliana landsberg
tatttctattacgtcatttatagaaaacgtttcatctaattgtggaatcatttaattattatatatatactactgtttacagaaataaaataatgtatttacattttctagtctttcttgtttcgttttgaactatgtttattttttttttttatctaattgtagaataatataattattacgtatattttatagaatgtttattttaatattattttgaactatatttagtctgttcatgtggatgttataagctatcaattatcattatggaaattcttgttgtcctctttttaaaatattagttgataattataaacactaatattaaacttttagtattaagttgtgagagtgtggtccaagttaaattttatttttagtgcttaattaataattatagagagtaataaaagttctgaaactgtctttatgaaaaacaaatatgacaaaaattctttttgtttttaaatttaacatgagattacttacaaaataacttctgaatttattagtatataataaaaaagtgattcttcaggactatttattacatcaccaaattttgcccgttattttaatttcaacctttttaggggcctccccacggctagtcaaaattgaaccagtttttcaacaaatatatcccgtttactgagctaaaccggttttataattcgaaaacatgaaga

SEQ ID NO: 64750 - DNA, 1188 bp, Arabidopsis thaliana landsberg
aagagtgttttcagttgattgtatagtgagaatctttgtttgtagttagaaccagaaactaaaaggaatgacatcagttgttttctaggttcttatcctctttgtttcgtataatcaaatgtgggattgcattctctgatctttgtagaagagtctttgagttagaagtaatgatggcatgagagagtgttgaggaattagtttatgtgtcaatgtggatggttcctttgctgcaactcttttttgtagtaataatatgagtatatgatgtgggcagtagtattgtggtaattcttctcaagttgttagcattttgatttactgagataaggtcaggagttgtagtggactcataagattatgtaccaaatgttgttacttccaatgtgataagctaagctatgaccaatccatgaggaatattgttccagcctttttgggtctcattctctctctccccggtcgcggtttacggattggttttttgcttgtttgatttcgattggataagttccggttaacctgattgaaccggttttaaaatgttgtaatccgataattatgactcaagtctaatgaaatctctgaaatgtgtaagatcaaaagtttataaacgcagaaaactcaacttgagcttgttggttacagtaacgagatcgacaaggaaaaaaaatgtacgaaaataatctcttaacgctctcttcatgcaccatgaatctcaatttcgctttctccccattccttgtctctcagagacaaccattctcttcccacaagcgtaatcttcacactctcgttgctgtttctgctaattccgacaacctcgccggtgaagataacggcggaatttcggcggcaaataaaggttctgggactacagcgagaggaaggagattactcaaggttagagaagagaagcgaaaacgcgactacgatcgtcttcacgattacccatcttgggccaagtacttgtttctttccttttcttttgcactccaggtgtttgtgtttttgcctaagtcacgagaaagtgtgaacctttttttggtgaatgataaatgcagggtactggaaagtgcgtgtaaagatgatgaagagcttcgagctgttcttggtgatagcataggaaatcctgagctcatgagaaagaaggtaatcgttgggtcgaattcactaaaaagaattctc

SEQ ID NO: 64751 - DNA, 564 bp, Arabidopsis thaliana landsberg
taaaagcctggttattagtgcacaattgattaaattagaaatttaaaagcaaaaaacaacactgaaatatgacattcaccaacaagaagatgtcacgacatacctttggaccttgagacaggttcaacggcggatagttctttaccaccgaccgaacttttgaagccagctaggtccattgctgaatattatttaaagattattgcgcactctattaggtttgctatcaataaacatacattaatcggatgagtatttggtctaaatactatattattgtggggattattaacaattaccttctgggtaacacaacagaagtgcacagaaagacagaacttgagggtctccactgcggctgctggtgtacatttggatttctccactaatggtttaaaaacctgaaaataaaacgaaaaaattgtaaactcagagacatacacagatgaggcaaagaatccaattgggacacagacttatttacctcatcgatcatgggaagaaagtcgccggctggttggtaaagaacggatggcttatcctaaaaaccaaaagtaacatttt

SEQ ID NO: 64752 - DNA, 1556 bp, Arabidopsis thaliana landsberg
tctatgacgtatgaaggttgatagtaatacatcatcctcttcatccctttttcttgtgccatagccgtcatttcattgtctcgtctctcttcctccgtagccgccgcctcttctccgccaccttcctctccattttcctctccctccttcttcttctcttcttccttttcctctccggtctctggtggtttttcattgccttcaccgctctcctccttcttttcttcctccgcggccgcgggggcttcaggttccggttcaggttggggtacgattcgggcttgctttttggtccgacggtagacgtaatccacaagcttctcagcgtccattgtcccagtcactattacttttcccgtggtgtgctctgtcacagttgtttggacccctaaccaacaatattagttagtcctttaagctcaatattaattaccactaaaaaaaaatagaaacttcgcaaaatctcattgtcatcaacaaatttagcttaaacatgcatgtgacgtaatgcataacgagatatatagtaacttcttctttttgacatgatatataatgaatttttaggtgacatctataccaaatgatatattattttaatatggatgcgtatgtttaattaaaaacggtgggaaatatatattattatttttatttaacgattattgcgatacatgcagaacaacaaattataaaacaaaataccatattcaatataaccaaaaacttttaaccattcttaaaattatttacattgaaaaagagtattttggttttgactagatccacaaatgtatgtatgcatgtacctctcattttgagaatcttcttcttgagctggtcagcacaagcttggcagtgcatgttaacgctgagctcgacggtggtgaggccgccggagacctgagaggttatgatcggtggcagaggctctccctcagctgccggaagcggcgagaggactttggccattcttttagtcttcttcttgattttgttgcacactgcttgtggatccaacactccctttatcgtcacttggttctcattcatatccatcaccacttcttctacacctagacattttttaattaaattatttatttcccttttgaactttataaattaatattaggtagttgggattgtgagaatgaagctattggtttttatatttttaaaagagaattttgttttgttaattaaaagtgttgaacaattattcttagcagaatctaatcctctatccatttatatattcttttacctctaatttttagaatagatctttcaatcttcttagcgcatccaacacaatgcaagtcgacgtagagtatgaagggtggaggtggtggtggtggttgcggctcctcctcctcctcctttggtttctcctcctcagccgccactttcttctcctccgctacatctttcttcttctcctcctcctcggcggggacggcctctggagcagaggctgcctcctttgcctcctaataatgaaaagttgaaaacatcaatcaccaattagttataaataggtatataatttgttg

SEQ ID NO: 64753 - DNA, 1605 bp, Arabidopsis thaliana landsberg
tccctttttggagctggcaccttttttctttttgtctctactttcttatacgattgtttcaagaaagaatcaacaagtgttgcgttccacacattttgagcaacagcttccacaatcggtatgctaactgaatctttgactctttatggattattgctttcttgagttgggctactagtagttgtctcattcatagccatgtccaatgattagtccctttcctttttcgtgcagtattgtattcctgtaaagttcccttggcttaaactgcaagagcatgcctcttgataccaaacagcagaaatggttgccattaggcttaaatcctcaagcttgtgtccaggacaaggcgactgagtatttccgtcctggaattccttttccggaactcggtaaagtttatgcagctgagcatcagtttcgctatttgcagccaccgttccaagccttattgtctagatatgatcagcagtcttgtggaaaacaagtttcatgtttgaatgggcgatctagcaacggtgctgctccagagggggcactcaagtcttctcggaaaagatttctagtattcgatcagtcgggagagcagactcgtttgttacaatgtggatttcctctgcggtttccttcttctatggatgcagagcgagggaacattctcggtgccctacacccagagaaagggtttagtaaagatcatgccattcaagaaaagatattgcaacatgaagatcatgaaaatggcgaagaagactcggaaatgcacgaagacactgaggaaatcaacgcgttactgtattctgatgatgacgataatgatgattgggaaagtgatgatgaagtaatgagcactggtcactctccattcacagttgaacaacaagcgtgcaacataacaacagaagagctggatgaaactgaaaagcactgttgatggtccacttcttaaaagacagaagctactggaccattcgtacagagactcatcaccatcccttgtgggaaccactaaagtcaaaggcttatcagatggaaaccttcctgaatcaaacatttcaagcaaacaagaaacgggttctggtttgagcgacgagcagtcaagaaaagacaagattcacaccgctctgagaatcctggagagtgtagttccaggggcaaagggaaaagaagctcttttactactagacgaagccattgattacctcaagttgctgaagcaaagcttaaactcatcaaagggtttgaataaccattggtgaaaaacctacaaccccttttgtcctattgataaggcatgtttggttggttaaagagaagacatgggacaaaagataatcaatgaggtaaaggactgatgaagaagattctctcaaattcattaacgtgggtttgaaacaattacaacacgcctggtgaccctagtgggaccgtatccactgttcatctagctggatcaatagtggtttacttttggatttggcatgctctctcaaaaaagaacaaaaaaaaagtcactttcttctgtgcttggagtggaagaaaagtgaaagaagggaaaaaagcaaagtcttggtgctcattgatcgttaataattatctttactc

SEQ ID NO: 64754 - DNA, 647 bp, Arabidopsis thaliana landsberg
tctactacttgccatcttaaaatcttttttttcaacattattaaaacttactgttacaggattattcaatttttttgctatactaaataaaaagtcattcgaacctgtaagttgttataaaacggtggagaaatactaacatcatggttttggccaaagcaagtccaagacatgttctttctcccatcccaaatgctagaaaactgtttgcttttgcttcctcctttatttaatttaagttaattaagtaaaaccaaaagcatttaaacaaaggaactgtaaatttcaatatatttactttaaattgtgttgtattatacctcaaaccttaaagggttgaacttatgaggttcactgtatacagtaagatcaagatgaatggatcttgcgtcaatatttatattccaccctttatttatcttacatcctttcatatgagaaaacaaaatgtatttaagtcagagatcatttattaaaacaaattcaagaagaaactaatattttcaagataattaattaaagcaaaccttccattttacaatcttgaaggactaatcttgggaaccaaagcacagccgacgccattctcggagattcttgcaccatctattttcaaaattgtcatgtacatgttagcattttatttt

SEQ ID NO: 64755 - DNA, 616 bp, Arabidopsis thaliana landsberg
aaattttgcgattcctaggattttctaaacggacgaatagacttggaacagcaacattgtgagtgaaaatagtgaaaatagcaaaaaaaacgtgcaagatagcatacaccgacctatttcgctacgaagtccttctcatgacacaaacattattgtattacacacgaagtagcatacgttggattcgcacataatcgaaagaaaaaaaaaaaatcaaaacgtaaaaggtgtttctaggattttaatggaatcaaaacaaacaaaatgagatgaaaaaataagaaaaaattattaagaatttagttgtatatatctaatacattcatctccttttttttttttttttttggctcaacttcaaatactcattcatctcctttttaagaatttcaaatgattaaaacaaattttcatatttttgatcgatcaagttaaatgtgactcatgaaaaagaaaataaaatttgaaaaaggacatgaaaatttgtaaacaaagaaaataacaggacatgaaaaagaggctatcgtgagaaaaagataagactaaccttgacaaagatgtaaataagtaaaattttgtcaaaaagtatcactagatagtttaattagtggggagt

SEQ ID NO: 64756 - DNA, 290 bp, Arabidopsis thaliana landsberg
  unsure (1)..(290): unsure at all n locations
gaccgtgaggccaaacgggttatgcgacacnnnnnnnnnnnnnnnnnnnnnngccctccggggaaagaagcaggacaagggaacaggaccacggacggggggacgaccccaaacncggacctacaagaaccatcacgggcctcgagagcacacaggactggccggcgacccacaagcgcgacagggaaaacagagctgccggacgcccaagagcgagacgcagtaagaaccacaagccaggggaacccgcaccaaggaagccgccaacgggcggggagaggcggcctgcg

SEQ ID NO: 64757 - DNA, 504 bp, Arabidopsis thaliana landsberg
gacggatcttcatctaccgtaaccgcagtcttcgacaatatcagtagagcttatttgcttgctttctccttctactcttgagttttaagatgctttgttacctccaagacgcttctatctcagtggaaagatcagtcttgttcctttctcagaatcgctgtaaacaggttttgtcttgacactttactttcttcactcttatttgactctaatgtcacattacctacactgtgagtcaccttagcaggatttgaactctgaatacttaagttcatgatattatcaatttaatcaagactcacgagtgtcatctttgacctcagttaataatattaagaaaacaagattctagctgtccactatttcacgttcttccagagagaaaacgctttttaaagattaataataaagcatgataagtcatagactatgactcatagtttatattaactgattcttgattatgtttcagctccctcttcactttaagcaacaatggcagca

SEQ ID NO: 64758 - DNA, 268 bp, Arabidopsis thaliana landsberg
tcgccggccgctatgccgggcgcgtcgacagctgggacgtggtcaacgagcagatcggcgatgacggcaaataccgcgacaccacctgggtgcgcggcatcggcgacggcgacgagttgatgcggctggccttcggcaatgccgcgcggtacgcgccgaacacggagctgtactacaacgacttcaacgcctggcggccagcgaaggtcgccggcatcgtgcgcatggtgaagatgctcaaggcgcacggaatccgcatcgatggcgt

SEQ ID NO: 64759 - DNA, 1969 bp, Arabidopsis thaliana landsberg
tttcagaatgtaattagcaattagctttcatttaaaccttaattattaggaggctggctgatgcgatgtgggcgtgtgtttgtcaaagacgcgtttctttagacttaaatagtcaaactacattaagtaagaatttgattaacatgcaatcagtttggagtaagaaaattggaattcaccgacattatatgcttcggactctatacatattcgtatactaactgatcttagattccattataatattatatgataatgagtgtccacatctgatcaaatcattttatattcgtgtcgcatgtagactgtagtctctaaaacagtgtttagaatcactcattttaattgccatgttcagaatcacaatctcatcagaaaaaatgatacgccaggatgcataaataaaatttgaaatcttattcgaaagaaaaaaaaaacagaaaacgatcattcacatacattttttttgttttataatcagtataatcagtattatacttgatcgaatcaatgaagaaagtcgttaaaaaaaaaatcagtgttagtggaagattatttttttttgttccataaaaaccatcctttgaaaacagaaattttcgataaaatttcaatttatctctttttcagattataaactagaaaaatataataagtagagaaataaagctatactattaaaaaaaaaagtaatacatattccacgtcaataatttggtggggccaaatctattgctgcgctggatttaaggcaatttttagttcgaagttcaaaacaaaggcgaaggcgaagcggagagactccaccaattttgctttctttttcttcaaagattttctcgggaaacaaagtctgacattcctggcaatgaaaaagggaggtgggagaaataaaggttagtcctttttcccggcaaattcttctttctctttccgtgttttcgttttgtgtaacggcggattatgctaattgtcaacgccgtcactgccttggattccacgttttatttcgataaaccctttctcccttgccggatccttgttcctcacgttacggctctggtcttgtccctaggtttccctcaagatgacgaaagctcgatctcgcttcgtcaggtaatatattagggtttttactcattctcaatttaaggacttaaaaaaaaccaagatttcactttctttcaaaatttcgtagctgatggttaatgaaggactcattccatctcttgaagatgaggtgaaacgaagaggtgttatcaatcagctacgaaaggtacattcagttttgtttcttgagtagttggacagtgattactgatgtctctgagtttctttctaatgaacagatagttgtgagatgggttaagaatgttgcctggcaacaccgtcttccacaaaatcagattgacgccaccaacgccaccattttaccttatggttcttatggtcttggggtgagatttctctttcacttgtcttctttttcaaaatctttatatatattgttctagtaaacgactctataatgctgaaacttttagctaactcttgttgtctttcattgtcatccaggtttatggttctgaatcagacattgacgctctctgcattggtcctttctttgcctctattgctgtgagttttccttgtttcgttgaatgatctgattcacatttgtttttgtttcccgtgaagttgagattcttctcttattggtacaggaggattttttcatctccttgcgtgatatgttgaaaagcagacgagaagtttccgagcttcattgtgttaaagatgcaaaagttcctctcatccgctttaagtttgatgggatcttggttgatcttccatatgctcagcttagagtattatccattccaaacgttcgttttcaaaactttctatagttctagttgctttacttagagacactaaaatgattttgatattaactgcgagaacttca

SEQ ID NO: 64760 - DNA, 586 bp, Arabidopsis thaliana landsberg
gtataattgtgattacggatctattgcaacacgaacatgttataaaatacaaccatattcaaaagtcatttgttacgttttaaaaggaaaatccaatttcctatgaatggtttaaatagaaccaaaatataatctcgtcctatgttgaacttcgaagacgtcaatgcatgaactattattctataatttggcatctaccgagaatattattggttggttgttgtttattttccctaaatagaaaattcttctaattatagacgacaagaaaatgcttttttctttttattattcatgagagtaaaaccactagactacttgaaaacttcttcttgttttgagtgtttttttttccaataatagcattccattattctagtattattcaactatttatttagcatttagatgagtgactgccacttcttatctgttctttttttgtgccacactttttttatctgttaagagggtaaataaatcatcatattatttgtgcacctaagataaaaaaaaaatgcctcccatattttacaacattggaaatttttatcttgtaaacacatagagtcatagcgatcgtgga

SEQ ID NO: 64761 - DNA, 430 bp, Arabidopsis thaliana landsberg
cttgaacaaaattcttttctttttcctagattttcttatttgtttatattctctctttttttgttagtgacggtggggaaataatatcatttttatataaactaaaaggtttttacaaaaattaaagtaacaatttgttttttttaaataatttttgttttgaggcccacccatgacccaacagtgatcacacacacacacacacacctccctactcattcctcaacgcgtccaaacttatgcgcgcacgttaccccagactcttaccgacgctaaaatacgcagatattccttatcctccacctcttggcggaatatatatctttttggttctttttaagcctttttgttgttaatcccagtttttttttgttttaattaattaaccatttaaccccatttttgatctttctagttttttaaaagcagg

SEQ ID NO: 64762 - DNA, 528 bp, Arabidopsis thaliana landsberg
  unsure (1)..(528): unsure at all n locations
ggcttgatgtcacagcagcctgggctcaagaaccgcagcaatcgtcgttcacggcgcttatctaaagtacttcgaggncaaagccgncacgttggtgccgcttgtagtcgccaagcgcgcgacggcatcagtcaagaccgacacggtcgtcgtcacattgcagaacaagcagtcggtagcggtctgctatatcgccttcgccaattgggcattcatgaaccgctcgtcgctcgatacaccgacgctttgcgaagttcgcgagggatcggccacggctgcaaatcctccgcctccagggacgacgccctaagttacgtcgatgcttccctgaggcgcgagcttcaaaatcgagaaatgtcccaagcttcagaggcgacagccggttggccaaatgatcgaggctgaccgcggtgcgcatgaaggtgcgtttcgcgcttcaaaaccttgcggctgaacgtgccgagcaggactgatatgggatcgaggctattcatgagcttncgataaactgggaagcccaaagcattt

SEQ ID NO: 64763 - DNA, 1908 bp, Arabidopsis thaliana landsberg
atccaaagctgtatgtataaccccacatatcccaaacacacaacaaatcaacatcattgtctttatctgcaacacacatccttttgaagcggaattctaatttacctggcaaatacacctctgcttcgaaaggccttaagactcctcttgtcttgatcttgtcttcaattaacagctgcaacacacaacatcataaaacaaacgcttaaaactttcattttagagaaatatagacaggaaaaagtggtgatcaaagtcttagtaaggaccagagctccaatggctgcagggatcccaacagtcttggccatagcggttgttgtttgcccattcttgatgtccccgaattccaaaagagtcgcagtgtgcttctctatacgtttgctttcaaggaattccacttctacttcgtgatgcaaaagcaccatgtcctgaaaacataatgcaaaagattgtccaaagtttatgtcagtaagtaacaccaaatacaagtgagagaagaaaactaatgctttcacatgaaacagagacctgttcatttccggaataagctagtttctcttccattaggtaacaagttgcatcaaatacgcttttacacagtgatggaacctccctctcttcgttgaaccccaagaatctaagacaccacaaaagaattggggttaggagtttcgtagaagaattggaatcacactgcaacattcagattatatatcttcatggagaagcttacacaattgttttggcagctttggctgcagtctccttggaatgtccaagcttgataattctcttgcttatctcttcttctcccgctaggggctctgattcattgtcggcatccttatttagaatgttacttaaaagagcaccaaacgtaatcctctttccagtggagagtacttgatttgcttcactgtcaaagaatccaagtttcgaaagtgttgccattatcatactaaaccctgtacaagccaaaagaaaacaagtgttaagccttcagaatatgagaagtgagtcgtgagttgtgattatggaattcatgccttcatatctgagtgttccacgaaatatcgttgttgcttcgctctcgatgccataatgttccccgtaaaccaaggagtcacgatttggaagacactccaatgcaaaagctggaagattaggtactcggaatcttgccgcggaatcatagagattcttccctgcgatttacattgctcggttaaacaaaaatgatgtgtagtgaagctaaactactccaacctctcctgcatgtagacatattttgtttttcataccatcaacatgtattatgtcgccgttgcttttgtatttggcggggttttgaccagctcgaattgctccagcagggttccagctgaaaataccgagatgtaattgagtaagcgaaattctgaaaggatgtctaaatgagttaaacaaaacaaaatatgttaatggcgtaaaggactaccgtacctaaatttatatgctaatggattatttgctgcagcaggagagggaagccctccacaataagaggtaaaagacttcactttcccttttttgatatgagcatcgttgatcattttcatcgccatcatgtgatctgaaagattcattgtaggatcaccttctcagttatccgggaaatattttgaagataaatgcacttaagttaaatcaagtgaacaaatgatcttaagagatactatgttgtgagatatcataccgattccagggtccagtcccatttcgcctagaatcgttatcccagcactcttagccttctcatgtaacatggacgtttcatcatcaacatagctagcagtgacgagatgctttttcagctgagtgaatcagaaagaagaaacagagacatttaggaaccggaaactactg

SEQ ID NO: 64764 - DNA, 414 bp, Arabidopsis thaliana landsberg
cctatccatatacacccaacaaactagcgcagtggagatattggatttctgtttctagccgaccagcgagtgcacttatcatagggagggtccaaacccctgacttaattacacaaaatgaactaacattatgcttgcattgaaaatcaaccctgatttaatacattgccctgatgtatacaaattgttgagtaccgagacgagatattcactagggttcctagtgatgaaaccactaggctaagaccgatcctcagaggaccctgcacgctgctatagagaacgaatccttgatcccgacattgtatatgacccagactccgaaaagagaggagaactacgcgaattgaatgatccatggcgacagggatactaaactgcgacgactagcaaaacgtgggtgctgatgttgat

SEQ ID NO: 64765 - DNA, 375 bp, Arabidopsis thaliana landsberg
cgcgtactgataaggtaccgagccgccgccgacacaacgttatttccgcgggccggtgctgtggtggttttacggccgcagatggagtgccgacccgtaggtgatgccggccggctttaaccgacatcccgaaccgatgacggtggccggtaccacctacgactacaccgacaccatggagccgtccggccagcactggctgtttgcgctggacacgcccatcgacgccccgcccgacgcgcatctgaacgccggactgacgctgatacggcacaaggccgtggaccagctgactcgctaccgcgtgcgcttgaggccacagcatgagctgtcgccgcgcctgaaaggcaacgagcgctttctcgggctggagct

SEQ ID NO: 64766 - DNA, 545 bp, Arabidopsis thaliana landsberg
ttttttaccatccgcccacttcacctgcacaagtttccaaatacaatttaacatcctctccatttgtttttttcaatgactaaaagttgaagctaagatttgatggtttgcttacttgctgattcatgaaaaccggattcttgatctctggatatatcccaaccactctaggtgcatccagtgctatcgaaatatactcgtcgaaggtaataatcgggaatttaccattgtattgttgatccctgaaaggatacctctgctttgcaccaagtgttttcagctctttgagagtaaaatcaactgttcttggaatgttcaatctcatcgtcaaaatttgaaaaaaatgaaactatatcaaaacaaatgataatggaatgtttttagctaccagtgaagaagccggtcatgttcattccttggacttcataagtcctcttacggtctgcaaactccttatggtctgcaacatcggttgtatcatcgagattacatcgtggtgacatataagaacaccgtctttggaagacaaaatatcggtttctata

SEQ ID NO: 64767 - DNA, 593 bp, Arabidopsis thaliana landsberg
acggtctactctatcaactatccgcaattaactttaaaactgttggacttatagtttaatactattgttataggcacgaaggtataaaatccaaattgatctccataggtagtcgacatattctataattttcctgaacaggaaaccattcatatacagatgttggatcacataaaaagaccttgctcctaataaaatgggatggctaatagtaaagagttggtatgcattacgtaaaccatgtttttctagatagaagcttctaatcctaattaattttagtttatttcatacaattaattttatgaatatattgacccacgtttagttaaaatttaaagagaagatggaatgttaatgcatgtaaatgtgaaagcaattatctgaagttatattttatgaaagaaaaccaagctaatagggaacataaagttatatttaagattttaagaaccttcaaaatcatattataagcaatttggtttcctccaaagtggagaacacaagtgcttcgatgattattaatattactttattgctcatcttttctctatgtgcttagcaaaagaaacatgctgtttgtttaaagacaa

SEQ ID NO: 64768 - DNA, 424 bp, Arabidopsis thaliana landsberg
  unsure (1)..(424): unsure at all n locations
ggactgggaacgccggtgggcatgatggcatcgccgagcacgngtgntgaatatataaccaagaccggcngcaacaggagcgtgcgactgataaggaccnactgccgcctggcaacccgaaacaccaaaactcgcgcgcagtctcaggttgcttacggcatccacatcggccataaaggcttcacgttttatgattcacgctgcagccaccgcgggaaagaatccccatttgttgtttacgccaaacttgctgcttccatctgcacgggcggtaaggttcaggaaatatttgttcttataactataggtgatcctccccaggtaagagatcacggtcgcttattgatctgcctgtacttactgaaacaatcttcgcaagctgcagcgcttcaatgggagcggcatcattgatgaagccataacc

SEQ ID NO: 64769 - DNA, 518 bp, Arabidopsis thaliana landsberg
  unsure (1)..(518): unsure at all n locations
gggggaggaaaaacatggggaaaatcatctacacttnataactcaagctgaaagcccagtttttcagccgccggtttataagatattaggaggaagaccccctctggatgatggaacaggaacaacctacataaggtagactactgtaagtaacttttaaattcaaaaagatccacctgatttgcaataggaacttttcttacttggaggttagcatgagaaacacgtttagagaccaattcaaagaaaactgcatcatttccttggctcttataacaatttctcagaccattttggtatctactgagctctgattcaacctcaggggataaaaccagagtattgggcaaatgttcgattgggattatcaatatgtgatcttcgactagcgaacctttgggtagagcacattaaaaacttttccctacactgacgattaaatgtgactccacacttcggcttgatagacaaaccagcattcttttgatctgagaaaagcaatttgatttgacattact

SEQ ID NO: 64770 - DNA, 1582 bp, Arabidopsis thaliana landsberg
aacactgaggttgcttccctaaatcttatgttttaatgcttttatcaggtcacagatgcatgcaatacctgttttgcgcagaggcagacattcactcaacaggttttagccggtgttctgaatcaactggtatataacaatctccatcgtactgagtatttcttctattcatgttttgatttcttttcttcttctggacattttttctcattggcgagtttttggctgcaggtccagcaaattccactgccaatgttattcatgcgtacagttttacaagctattggtgcttttccagctctggtaacaaacttatcacatctcttttttcaatcccaatttaatattctctgaataatctctttaacttgatattctaatagtcggacttcatcctgtagattctttctcgtctcgttagcaaacaggtcagtattggtcttgaaacgttatattctctctattgtccattcttataattgactgtgtgttggaaataaaacggtggctctctctatgtgtatgcctcagatatggaaatatccgaaactgtgggttgggtttttgaaatgcacacagacaacacagcctcaatcatataaggtcttactacaggtgcgattatttaatctcttccacaattgttaaattacctgttctcatctatcggaaagcggttttatcactgacattcctttcatttagcttcctccacttcaactgggaaacgcattgactaaaatcccggccttaagagctccgctaaccgcacatgccagccagccagagattcaatcttcacttccaaggtaacctttcctctttcaaatttccatgaattccagttctaaacaaacaacttcagctatttgaaatccatttgctgatcacggagatatgaaacatgtttgttggtaggtctacattggctgttcttggacttgtccctgattctcaaggaacacaaacaagccaagtgcaagcgaatgagacacaaacgagtcaggaacagcagcaacaacaagcaagcgagccacagcaaacgagccagtctcagcaagtttctgtaccattgagccactcccaagtagatcaccaggaacccagtcaggtagttgccagtcagtctcaaagcagtcccatagggaccgtccagtcagcaatgagtcagtctcagaacagtcccatagatacgggccggtctgaaatgagtcagtctcagaacagtcccatagatacgggccggtctgaaatgagtcaacctcagaacagtcccatagatacgggaagatctgaaatgagtgaatctcagagcagtcctattggtcagtcacaaagcagtcctattggtactggccagtctgaaatgagtcaaacccctcaagtgtcggactcgagtgctccagaaccaacaagccatactcggacatcagatcctcaagcgtcaagccagacactacgagatgatgatgagaagatagacgacacagcaacctcccaaaacgccgtgacagaaatcgagaaatcaaaagaatcaaaagaagaagaagaagaagaagaagcagagtgagtgtgccattat

SEQ ID NO: 64771 - DNA, 564 bp, Arabidopsis thaliana landsberg
  unsure (1)..(564): unsure at all n locations
aacgactggcttagaaaactctatgaagaactggaaaagcagagacttagcttaccagagaggtactttcagattgtgattcatgaataagttctcccttttttgagtttcagtgttaaattctgcgttagatcataatcgtttagtctcattttaatgtagactcaatgaagacgagcttcatagattctatagggtgtcaaatggagacttcacatccttactatcttcgataaaaaagacaattcattggagggagacttacagaatcctatctgaagaagaacttgagacatggtcaagtttactcttttggcatggatatgacaagaaccaacggccttgcctcattgttcgtttggggcttgcttttctaaagttgccatctcatgagagacctcgtttcgctcaggcaatcagtacgtatccttagtggctctactacattttncaatattttatttgctacggtatcattttaattttgcactatatttattggttcagtatctcaggtagagcatggtgctttgcatcttctgacccctgagaattcagaactta

SEQ ID NO: 64772 - DNA, 603 bp, Arabidopsis thaliana landsberg
atatatgatgtcattcggttttctataatagaattaaactctataacaaattattgtataatctaatcttatttcaacaaaacttctttaaccactttttttctttccaaactttctatgggaagttttagaataaaaagtaagatgaagaatttattcataaaaactgtggtgaatccaaattaaaactttaaaaataaagaaaacaaaaatgcgacgtaaaaacaactttaagaacctaaaaaatatttaaaaaaaacaagtcaaaactatatttattccatactggtttgtatctatcatagcctctcttccacggacatgctcacaaaaacgtcttgtgttcccaaatgttaaattttggtaagtgccttgacgaatatgttcatccaaattagaagtttatttcataacatcccaaacgttattcttttttgaggccctttttttggttgcctcatttctctttggtatattatatccaaaagtttactggtagcaaccatgtttgggctttcttctttttgggccagatttctctcagatctggttttctatatgattttctgaaggttcatgagaccttaaagggtgcgtaatgct

SEQ ID NO: 64773 - DNA, 595 bp, Arabidopsis thaliana landsberg
acaatacgaagagctgtatgaaaagatcctagcatttggaattttttgagaaccactggtttaagctatcaggttgttgtctcctgtcaggagggtaaggaagaagctggccacctctattacaaagcctgcctggtctgctttccagggattttgtaactcccagtctctcaaaagcaacagtaaggagaggtcttgaactttagctaggcaaatctaattgcaacatagttgctttcctgagaaacatgttacgttactgtttctctttcataaacaaactgttaagtaacataatatttaaaggaaaggaaaagagaaaaagaaaacaatcccacccccccccacccccaagatttgcttctctatatatccaattagagaacgacacagtctggaatcttctcaagaaatcagccatattctaaaagatttcacatgaaagtcacttcaggagaaataagtggagagatgcacttgatggcagatttgtggagtcaaggtcattattaactgttatttattggtctctggaaacatgtatactaccattcccctatattctatttgtgctaacgtttaatatcattggtca

SEQ ID NO: 64774 - DNA, 536 bp, Arabidopsis thaliana landsberg
acgggccttccccctggttggctttttctttgctggtatcaacctgtacccaattcctgtgccaaaccattgatgtgattttcaggcatgcgatgactcctcctagtaaattatcaatccaaaagaggtgtagctgaccacctttccgaattgagggtcgcccgtgtggattgttcccttaatcccaagagtttgataaactccactatacttactgcacattgacccaaatccctccaaaactcagtcccacatcttcattcctagcatgctgaggagacgaaggtcaaggagtgacatacagtacgacagacggacagacaccccctaatgcaaaaatctcagtgatttttcaggtatttttattgtctgccttgtccccaactagacttttgattgtttttctttgtattaatttttcagtaacgagaaaatgtcatttttttaagaaatatatttgagaattaatcagaaacgttccttagacttttacagatccatgatgccaaattgtcagatttcttttaagtataaca

SEQ ID NO: 64775 - DNA, 393 bp, Arabidopsis thaliana landsberg
acaaaaacccgtcacacgctacatccttctctccaaaactgaaaactcatccttttcaacgaccaaaaactcagggggcccagtggaactataaatccttattcttcttaccccatctccgcccacttctacagactcaaatcatcatcatcctcacaccattatctcccaacactcaatctaataaccaacatactctctccaaaaatcatacataccatataactatctacattttgctccattagaatctaccaaaatgctcaatctctgatcttacttcttctacacctaaatctaacaaacctctactctatccaaaacctccaaaatcttttctctcaaaactaatttatcaaaccaaacaaacatgcttccattcaaacaccctgc

SEQ ID NO: 64776 - DNA, 539 bp, Arabidopsis thaliana landsberg
  unsure (1)..(539): unsure at all n locations
aaagcgaaaaattctacacaacactttttgttcaatcgttagcngngccaaattaacatttattcaagaccctcggtaaaagtgacaaatattaaacttttgctcacttctaagacctaatatatataataattaacatatgattcggccttcatcagttgaagggacgtgaacaaaagtaggagtgctgaagtaaaatatgtgattctaaatgatgaacgcataagaactgtttatttgatattataggtaaagaatatacgaggaatattcgtttgtaattccatatcaacatgtcataatcagtccattaaaagtttttttatttccttcttcaaattgctaaaatattttttagagcccttttctctagcaatattgctttgcaaatgaccacaagataaattacctgctaaaatatagctttgcaaatggtaagtgcattgtgattgtacatgactatttgactcaacaaacaatatcatattatgtgaacggattttaacaccaatgaaggatatgaaaatcctctacaaaaa

SEQ ID NO: 64777 - DNA, 1400 bp, Arabidopsis thaliana landsberg
tccttctttcaactgaaattattcctctgtgcctccgtaccatggaaatggggagtgagctgtcaaaaacagtaagtcttttaatttaccgttacattttcatgttcatatggtaccttctttaagtttcttgacagtcttaaaattcgttttagatgcacatttgttagtgattttatttctaacttttttggcatttgaaatcgttaataatgataagccaaatcctaactttcaaaatcatattaagaaatgagtctcagtttttcttgttactgtttctcttaagtgtatgaatgtattacctaaaatgataatccaaatcctaacttttaaagtcctaaaagaaaatgagtctcgtttcttcatttaactgtttctcttaagcccaaaaattactcattctgagtttttttatatatcctaggctgggattgtaaagtttccatagaaccagttctgcgccaatgaaatggtgtctacattgaaactcattgaaagtgtgcaaccccttgcttacgtattaacataatgttaatgacaggtggcaacatttattgttcaaaagatactgttggatgatgtggggatggattacatctgcacaacagcagagcggttttttgcagttggtcgagtgttgggaaatatggttcagtcacttgtggagcagccttctccgcgccttttgaagcatatcattcgttgctatctccgtttatcagacaacccaaggttgatttagcccaaaacaaacttactcagaaatgacttttcgtagtttatcatgtgtttggctttcttatgcttaagcttttgtgttaattagggcttgtgctgcactcgcaagctgtctccctgactcgctacgagatggatcctttagcaattgtcttcgcgtaagtcatcgtcatcttttgacttggtttttgatattgtttgtgtaagagatgattcagttgaaaacttgttgtgtacttcttttcaggaggatccaactgcaagaaggtggctgcaacagttggtgcacaatgttggagttggtcgcgtcccaacacatcaaggtggaggatttgagcacatgctttgagctgaatccatctcaaacccatccatggagtgtgtttcttctgtttttgtttctaattatacatgtgctttttaatgccttaacttagatgatgggttataggctttttagtctgtttgaaattcttattgtaattatttttaagctctagaaccaatcccccagaatgcataagtcttgggataataaaagattggttacaaaagaaatattatagagtttgtattatcatgttgaacggtaacaatttttaatccagcaaaagctttagcggtatgttggagtctaatcgtacttaataaaggttcaa

SEQ ID NO: 64778 - DNA, 2057 bp, Arabidopsis thaliana landsberg
tcgcaagtatccctgcacctacctaatcaagaaaaggattaaagtttagcagaaaacaaacttgattccttgcatagtttcaacaagaatatggagagagttatgagaaagtagacacacttacggtagtgccagcaaccaagaaaattgcactggacaaacttcctgaaaatttctaaaacttaaaaaccaaaaatttctatccaaatttgggtattcacatgcaaaatggtaacagtctttgtaccggattctcgcttcaatgttgattgattcaggttagagaagagcctctcaaatacgacaatcttttcttcctcatcttcttcttcttcttctgttgttacttgtgtttctctgcgttcatcagacactctctgaggcaaacacttgaagaatcttggggtctgagttcttatgaatgggtttgatttgaaaccaaaacaagatgaggaaatatgagatcttggtaaataaaaagggagaggtccattgaaactaatgggtttcgttggaactgaaaaggtgggtaatctaagaagacaagtgtagcttagagacacagacatgtctgtgtttgtctgagatcagacactagctatgaaaagcctatgatcagtcttctggtttgttttctgcgacttccgacagtcaaaagattgtgttagagagagcttagcttccagattaacatgtgtggctgtcttatttttgaagttttatttcccaattaaatttaaaatcaatgcattttatgcttctattttgcttttagaaaatactatttgcatcaatgatacaaaagttgtatgcaagtaaaagaatagcaatgcaaacataaagtataatctacaatttactctataaaaataatttttatttattttgagtttatggtttcttaagatatcatgtgataaatcaaattaaatgttacataatacatgctgtcaaaattaaataattgttacataaaacttgttaaatgaaaagcaaaataaaatataagatctccttattaaattaaaaaagagtgggagaaaaaaggtccaattgcgtatgatttgggtccgacaaggacgggtcagaaaacagagaccaatttctaactagaaaaaaacagatccaaaggaatttattttttttccttttcttgtcgtgtttgatggaatcaacatatatatttgttaatttgattttctcttgttatttattccagagagaacggaagcaagcaacacaaatttcaaaattagggtttttatcttcttccccttgactttggaagctgctattcctctgtaaaacaatagcatgaagaagaagctccagacacgttttccagcggtatgaaacattacttttcactgttttatagtttgttatgttcttcttcttatggagataaccatgaactctgttttgtgagttgtgagagtagttaggttcaacttttgctatgatttcaggtttacttcttcagggttccatggtccttgtcttcattaggtttttaaatttatctttgtgaatgtatctttggacttggagggctcttttgttcatggctagatataaataaactgcagagatatcttgtttagggctaatcaaagatgttgatatctacataagaaatttcttagtgtctgagtctgattttgtatgtgttgatatgttcaaaatttgtttcacacaaggattaagaagattatgcaaactgatgaggaagttggcaaaatagcaatggcagtccctcttcttgtttgtaagtgatgtgatgtttttgattttcttactcaaacgttgttcatatgttagcttgtgtcacatgtagttgatctgttctggttttgaatttaacttttcagctaaagctttggagctgtttttacaagacttgtgtcatcacacgtatgatgtaactctaagccgaggtgctaaaactgtcaacgcctttcatttgtaagtgcgaatctcatctttggattttgcttatataaacccaactgttttctttgcttcttcaataacttttctattcttttttccaggaa

SEQ ID NO: 64779 - DNA, 471 bp, Arabidopsis thaliana landsberg
caagaaagatctagggcatggctcaacaatgagcatcgctgactccgctgaagaactattcacttgctgcattgcccacacaagcgtgtcttcatcacctttaagtagctagaataccagcatcattacacatgctgcaagatagctacatagagcgaagatgtaaaaatactagagggtaaagaaatttgacttacgatgctcaaattcggactagctagaggactacgtcgaatacaaagagtagcagctaacgccatcctctgcattggggcaacattattggagaagatatcccgcaaactcgggtctaagaactgagaatactttccaacatctagaatggggtgggcctgtatatgaacatcagacatacttggttccaataagagtacagaaaaagcctgggttagacttaaacggggagcagttgcacaaacccacaggacaagactctcttgcccctgggga

SEQ ID NO: 64780 - DNA, 372 bp, Arabidopsis thaliana landsberg
aacttagatactaacaatcatttacaaatttatcaactcagtgaactatgcttggaactacggcatcttcaatcaaaattccatatcctcacatcttgtaactcaaacgcacgaaaagctcaccgactatacactcacaccttattcagatcatacaaaacactctctccacattgaacatcaacataaatacctgggcatctaactactatagctccttctctaccataactccattaatatgagaaaataaataagagtgatcacgatctacaccaaatatcattacatactaatcgctttatccattaaaactaccactgaatagacccaattatttgtagaccaatgaatcatcataaacccatattc

SEQ ID NO: 64781 - DNA, 385 bp, Arabidopsis thaliana landsberg
  unsure (1)..(385): unsure at all n locations
gaagggctttgtacatgaacaacacttcagaaacctctgtcaacaccaacaagaagaaangaaaacgagaatgctagcccgaaagcacccacattcacccactagtcccgctggataaatcacgacgaaacccgcgcacctggaggggcaaacatatcacgcaacccattcaatacgaaaataatttctgagagagggaatgtttgagttcaaaacaacatacaaaggatgacgcaatacctgaggtaggctagccaatagggacatctaccgcggcaaggaaaagcataatgaggatatctgatcatctacatccaaaaacatcactcaagtaacacacaagggggtatacagctaggtgcatataacatcatcaaccacctag

SEQ ID NO: 64782 - DNA, 669 bp, Arabidopsis thaliana landsberg
tctgttataaatgagatgattatccatcacattacttctctttcaaaaaaatggatagttatccaaagttcattattatccctcatcattttacattatctacttaaatcctaagcagcttcctacccaaacaatggtagttatcatatcctaaaggctaaatgtctagcttatcttaaactccctatatatacgatgatggacaagaagtgagtaagatagacgaggaaaaggtgaacaaaagggcttacgatctacggatgatgaaccaaaatatttttcttttatgcccaaacaaagaaaaactatttttttacgatttgcttttcctttactcgataaaataaaagtatgacagtttaacatttattgctctttatgcaagtatgcaaccaatcataccataagttgcaatcaatatctcacttcaaatctccataccacaaatgagcccaagaatgttatatgatcgatcacctaaaatattttaaaacaagttttaagtcgtgtcctacatctatatgtgttttttttttccttttattagaagtcaaacaaacaataaaaaatagtagtttaatgattgaaaaaacttgagaacatgctctgatgtataaatttttagtcaaactcttccctctaccgccctaaatatttcttctctttctg

SEQ ID NO: 64783 - DNA, 595 bp, Arabidopsis thaliana landsberg
cgtacccgaggccgcagtcaacacgcttttcactcccttcacgcgctttgcagactcgtccacccgacggtaccagggcacagggctgggactttccatctgcaagagtctggcggaattgatggacggagcggtcgggtttcacgccaacccagaccgatcaggaagtgtgttttggatctccgccaaactggcgcgcgtcgaccgaccaccgctcaaactaccgagaagcatgaaaccgacagttccggaattgcccaccgtcgacacctccgccctgcttcaaaaagttgcgctaaagaaacacatcctgttggtggaagacaacaaggtcaatcaaacaatcatgctcaagcttctggcgactctcgggtttcagagagtagatgccgcctgggatggcgcggaggctgtgcgcatggtgaagcaaaagcctttggcgtatcacatgattctgatggatattaatatgccggtgatggatggtctgatggcgaccgaactgattcgacagatgagagttgatgtgcccatcattgcgttgaccgggaatgctttgaaaggcgatgcccagacgtaccttgccaaaggaatg

SEQ ID NO: 64784 - DNA, 469 bp, Arabidopsis thaliana landsberg
  unsure (1)..(469): unsure at all n locations
caccataaactcttagttttagtattcatattaaataatcagtatacnaagngatccttaattgcaagcaataaattgctaaagcaaaacatacaatgaaaaacatagaaaaaataacaacagataaatcaaagcatggagaactaagagcgtcaagtgcgtcagccattctcagtgcaaaccctatatggtttggggaaaatttgagaaacaaattggggtttttttgccctagtaactgatttggggtttctttcttttgataactttaattacgatttgtttttaaaatttattacaaacgataaacagcttgatagctctttcaatatggttatggccttatgggtagaaccggggcaactagatatggaaaatatggagaaatctttagatttttactgccaaagggttgtctgattaaaatgaattcnggaattgcgttttacatttctaaaatgatgagaag

SEQ ID NO: 64785 - DNA, 1630 bp, Arabidopsis thaliana landsberg
gctagagagccgggcattgtacaggcttaagcagaacatgaacagccatggacttcatgcttatgctgatttgcttgtctagctcatggagatattggtttcttctattataatgatgtgtatacaaaatatacttttgttgatattatgaggaatagtgtttcttggataagagttttgccgttaaaactttgtttattgtggtagttaaggaaaaagagggattaccacattttcataatttgtttatctctgctttctgtgcaattgtgcatatctgttttagttcttgtaatcaaatttctctgaaggcaactagaaaaaggtctttgtagtttagctattcatttgcatttgtgtacaggttcaacaacaaaaagttacacttcacagagtctgaccaagccaactgattcacaataatatcattctatgaacacaataaaaactaagccatgtatgatttgctattgttttcaaaggttagacgacctgcattggctagtactgagctctaccaccaaataacactcgcttggtttgctattgtttcttgtactctcaaaattgaaactatgagattattagcatatgggacgatatttttaactggatcagagattcttatgtatggcggcattaagtttcaaatgtcacaaagcaatagcaaaccatacatgccacatggttagtaaatcaatgtaaccatcaaatatgacctttccaaaggactacttatcatctagtactagttataagcaaaacttaattaccaccaattttcatgtgtgaacgcgttgatatatatcgaccaaccatgatatttctcgtcattgtgcctctcaaagtgtatgtgtattacgttatcggaataattctttggaaaatcaggaaccacacgtgtagataatcttataaggtccatgtctatataccctagaagctactgtcttccatagtatccaccgcgtttgttctaatactaacaaatcaagagatacatataaattaaactataatatgtttttcaaaagtcttaaagttaaaattgaaatttgataggtaaaatctagggaaaacgtgtaaaaaggtaggggtcgtacgaatctaataaattgcaaagaagaagacatttcagaagtgggggctcggcttacacggacaaccactcacgttcaggtgcatgccaatgcggcaatgccttaccattaataagtatagctcaatattgaattttatacaatgttagaggtcgaccaaaatccaaaataaatgttgaattttaatcgactgtggatcaccaatcaccatgttttgtttttttcccttgcgacataacataacactgtaagtcttccttttttcaatagtgtcagttgtttgattttttttcctcagagtgatacatatatggtttgctttgcatagtaaatatactatttgatgagttgttttctcttttttttgtttgtcatatatgtgatgagcttgtttttgtttgtcatatatgtgatgagtttttttttttgtgtggtaaaaactaagaatgcagttttgcttttgcactaatgttaacattatatatatatatatatatctatatatatatatatgttgagatatatactat

SEQ ID NO: 64786 - DNA, 2084 bp, Arabidopsis thaliana landsberg
taataacccatgaacaatgcttccataagtaactggtctagtaaagatctctctccttcaaaactggctaattctgataaagcttcttctagctttccaattcgacaaagagctcttatgtaaattgagtaggccacagtgacagggaaacctatcttgccgagagaatccaaacaactttttgcatccttcgtgttaccaacttcacataagcatcccaagtagtcttggactagttctctatctgggacaaaacctgaacgaatcatctcccggaatgttctggtggcttcttcaacgtttctgcctttcttctcacaaagaactgtgattaaacacttgaaagtcgaagagctcgggatcagacccatatctttcatttccttgaacgttctaatagcaatgttggtaagaccggttctaccatactgcattatcatgattgcccaagtatcttgtgttatcaagcagccttgtcttctcatctcgtaaaacagacttctcatctgcttaaaatctttcccacagcctgcaactttgatgctcatgttgtatgcctctgaattgtgcttatagccatttctctttcccacccatgaaaagaaacgtaaaactgcgttgccttgtatcttggcatgacgtagaacctcaactaccagttctggtgtgaactggactgtcgatttttctagagcttcttgtgttctctcccaatctcgggaggatgataacacccgacaaatttcttgcacatccattttatcaacagcagataaagctggtggaagagctgactgctgcactagttgtggacaattatagtcatcaacaagctcttcttcttgactaaattctgctttgccagatccgtttagttcatcacaataggaattggatcttttctggatttctttgataagatgaatcttctccttttcaccatttttctccatactagagataacccaagaaaagatatcatctctaataactatcttggaggcgtgcatttgattaaatatcttaatgatctcatcatatcttgatgatctacagagctctttcacaaatatcgaatacgatttccatgtaggtttgatgcctttttcctccatgctgctaaacaccttccatgcctctgctactcggttttggcccaaatgaccagcaaccacggctgtgatagcaacgctgtcaggctcaatcccgttctctatcatctcattgaataagttgcaacccttttcaaactgtttcaacttgaagaggtgttgcataatctcagtgtatgtagaaactctaggtggacgccctgattttttaataacctcaaactgttcaagtgcttgtgaaacatcgattttgcctgagatacccactgatgatgataccatagacattagagtcatccagtttccttctcttcattatatcaacaatctctagagcatctaccattctattggctctacaaagtccttttaccaaaatctcaaaatacttagagtcaaggcacatttccttgttcttaagctcgcggatcagttccagagcttcttttatcttaccggaaacacaaaaactcttgagcaaataaccaaaagcgtcatgttctgatatctcacatatcctaaccatgtcatctgcaatggactggactacatcaactttctctgatttcgctatgcaatccagtaacatcttgtacgttcttaatccaaaagtgatacctttttccatcatttccttatagaattcaagcgcaagatcacctctaccagcaatacatagagacctaatcatgatattgtaagccgtagcatcgagttcgaatccacttttcctcatcttctcaaaaactagcagaccttttccaatcttttttgccttcccgtacactgagataagaatggtccatgtcctgatatccttatcacaaccattcttttccattttactcaccaattcatctaccatatggagatttgtcgcttctccagctatgctaagcatggtattgtaaattccaactctatgcgaaaacccatccttttgtttaacccaattaaggaacctcatagcca

SEQ ID NO: 64787 - DNA, 751 bp, Arabidopsis thaliana landsberg
tttctaacgaggcctttaccgtctagaggaaggagcgacgtaatcgcataaagcatgccgccgatttccgattcgagcagttcctgtattatggccgcgccaaggtcggggcgcatattgacaaagaacaccgcgtcgtcccgccggatgccacgataattgagggcaatggcagacggaatgcgatcgtcggtgaggcctttggcataactctggtcgagatgggtggagagatattcagtacgcggcgcatcggcgtcggcaagggctttccatgcggttttgaggttggccggggttgccgtcatgtcgagcgtcagggcgcgaccggtgaggcttgcaagctgcacatgctcggcgcctgccacgtcatcaagaaattcggtgaggtagataaggccgttctggggcgcagcatcgacgccgtcggtgatgccgtgaacgaaaaccttgagcccttcatggcttaaaagggccgccagcacagccagatggttctggtgaccggcgacgccgtccggcgacatcatgccgacaagatggaccgcgccgccaagcgggcgcacgcgctgcacaagcttttgcagggtgggattggcgggaagacctgggattccttcggtctggatcgcccggttgacacgttatcagattttgctcgaaccgggcggcctgcgcccatcgtcattgtagccagcctgatcgttgccaggacggcccggcgcaccgcccacagcttcgtctgcgcctg

SEQ ID NO: 64788 - DNA, 600 bp, Arabidopsis thaliana landsberg
  unsure (1)..(600): unsure at all n locations
actctacattgaaaaataaatcaatgaaagttgttttagaactatacatctantaagaaaagnngttattgaactatacatggatttttatagatattttaaattgcaagacaaataatacgagtttctatagttttgagcttagtctgaactagtgaacttcaatctaaattttatccagatattgcaaaaactaacaaagacaaaactgtggtatccgtgaaatcgtctagatttgtagtttggtaagatcgtaagaaaaacaaaaaaaaaagctcaaggatttgaaatgttatgacaaaaaaagaagtgtgattgtagctgattgaaacgtaatatccacgcgccataaatgccttacatatttattttcagcctatctatttaactcacgatcgggacttgtcgactcaacaactccttttaagctctcttatttttagattttttcccccttctttatatgatcattttcttttacatttattcttcttttcgatcgttgaataattcttggtgaatcaattctttttttaattttttgcaaacatttatgaatattcctactaattctcttgggatggggagggaaaaaaaaaa

SEQ ID NO: 64789 - DNA, 1268 bp, Arabidopsis thaliana landsberg
  unsure (1)..(1268): unsure at all n locations
ttttcagctttttgacgaattgtttagaggaatctttttaattacaacttgacgataaaggttacaatctgtgggaggagaaaaaaacaaaaataaaatagaaaataatagttattccgaagaaagaggaatgtgtttggtttggtatcatgattatgtctaatgaagaaaacacaaaagactattactactgactcgagcaaaaaaaaagtattttggaaatgctactttaattaaactaagcagaacctctcaatcttatttatcatttttacacttttcctcaccaccagaacctaactacttttttggcttgcgatcagtggaaatgaactacaagtagtaatatctcttcttcaacgatattcgcatcatctccttaaattggaagctaactcattcaagttttagttgtttcaatcatggccttagtgttgggcttcttcctttggtgtatcttattgactagtttcatttgggctttttggggcatcttattgtgcgcaacacaaaataactatgttaaatgaaagattaaaataaaatttatttgaacgctaggaaatttgaccggagcttttatgggaatatatatatattacaaaatctaattcattttgctttaattggtatatatatattacaaaatctaattcattttgctttaattggtatatatatatatatatttaagttttcttaactagacaagttggaatgttggtccacgcaatcctttgctataactatataataatatagtttttaaaaagttttgatttaagaatatcttaacaaatcatatttatatttcaccaaatgctaatattagtttatatggaataaaatctcatagggaagaataggaaattgactggaacttttgagggaaaatatatatttcagattttttctttattttacttactttaattgctttatccatctattttagttttgtaaaattagataattaagttgacaaatgttgatccacgccacaccatctttattccaaatatttgaatcagattctcttttaaaacaatctttataagatggcgtggttccaacatgttaaattatatagcttcatgcataaatctattcacaaagatccagaagccatacctctccatggccatggattccaaagaatgttcattgttgccttttgagttatttgaagacatactntgtagggttccaactaaatctcttttacgactcaaagttgacgtgcaaacgatggctcgctcttttcaacg

SEQ ID NO: 64790 - DNA, 739 bp, Arabidopsis thaliana landsberg
aaaaaatatagaatatacttattatatttaagtattatgttttttttatctcaatcaggttaagagataatatttctacctgtttttcagaaaagaactacaactcttttactatgctggacttccattttgctaagagtgttttgaaatctagacacggtttacagatatctgcgtctatgtacatctctgtgaagctagcagtccaatgtctacttgttcatttgatatatatatttagcttgacagaaatacttatagccaagaatttatttatttgaaaaaagagaacattaaattttatagaaaataaaaattggagattattatcgaagaaaattattattttttttgttttttctttcttgaatgtacaaaaatgaagagaaaaaaaaaaactataagttttcccatatcattttatatatatataacaagggttacaaattggtacaacagtagaggactctactgacataactcgataacccaaaagatcttgataatctcattattaacaacttaaaagtaacaagtaacctaatcttcaagttctgtttcagacttaaaagcctcaacatattgaacatccaacggatatgatcttaccagacagatgaccaaagctctcattcgattattctattaccttggctgcattcattagacctgtaaaacgaagcagcagtatcaccaaaaaattgctgacaaaatctttttagagggcacgttactaaat

SEQ ID NO: 64791 - DNA, 1565 bp, Arabidopsis thaliana landsberg
tgtttctcgcgcacacgtgcttttagaagatggaaatttgtattgtttcgctcttgccctgaagcgtcgcgaaggaaccctacgtcctgccttcctagctttggccataatctcaaaatcacacctgtacaaatcctcatcaaattagcaaaagaactccacataaaagtttgtaacaatacaagtagatatctcttcatggaaactacatatatttttccagttcaccattcagcatacaacatgattagtagtagcatcccacactctgatttgggaactatttcatgataatgctttacatatgcatctataaaagatatttcacaacctcatagcaaacaaagagggaggttcgaataaacatgttgaattcatacatccctggaattgcatgatcaacaaacaatgctaatctatgaaacttaaatcaaatcaaggaactcataccgaaacgaaaagagatcaaacaaacgaagtaatgtacctcactagcttggaagcctagaaaagtgattcaaactcacaagataactaacacaatgacaaaaccaaatcgacaagttatggaaagcaaacagatggagaatcaatgtatagagataccaagaataaaaactggtgagacaaagtctcgcatcaaatcaaatacagttaataagattacataaaagaaaataaaaaaataacaaaagatgtgcagacatgttacaagacaaccaaaaggaacatgcttcacagaacaactcacgcgacatgacagtgaatcaattattaaacaaacaaaggagaaaccttagaatctaatctaatccacatggaacaaagacctttgacacatctcagatccatagaaatttatataaaaatgttagcataaatgtataagaaagaacgaaatgctctcgataaccctagaattcaaaaacataagaatacacagatggattctgacaagttcaattatacaattcaacaaattttcaatgactcatgaacctaaccagaaatcggaaaagtcatagctacacaaaattcagtttttccagcggcgcacaagttcgaattacatcaatatctcgataatctaacacggacccactaaaatccgtaagaaaaaaacactaacccagatcgcaaattagacgaataagagtagaaacgaagacagagaagacgaacacgcaataaagacttcacctttagggattgaaatgaaaaagattagggtttcaagacacagcgtaagaagacgaataggcttgaatcgagggagggagcgagaccgagagaggtaaggtattcaaaggaagagagggaaggaggaagacgagtgggactgcgagattcgcgtggaagcgtctccactgctccaccaagctctggtatcggagtttctctttccttcacgtcaagtaaaaacgtcacgcgtccttacaatacgtaagactgacgcgcgtgcttattgttttaaaggccctctaaaagtccctaatgggcctggccacgaattagacatatacttatccatagttaacatttgatattggacagatcaatatatg

SEQ ID NO: 64792 - DNA, 3098 bp, Arabidopsis thaliana landsberg
aaaaacgaagagatcttttattacaatgattaataattttatcaactttcttttaaagacagctcagctccactgatcggctcatgctccactctctctttcatttttatcagtttctcatttctctctcagtcgcatataaatttgaaacgccgattcgtttttgctctttaagctttcttcttgatttcgacggtgtctctcaatctccgtcaagcttgacgaatttcaggtgtgatttgcttctcttcttcttcgctttctggacttgtggattttggtttttgattgatttgttctgcttttttttttttggttgaatcttcgctttttctcatgatttttttttggctgttgcatgattttggttttgttagagtcgaatttttgcagatttttgctttgatttgatttttgttgttgttgttgtttctggtttggtgatacacgaattttgatttgttcttccagatgatagttcaattctgtggtagctgctgattctaattatgtgatatatgttattagaattgagaaaaatgcagttatttgtgatttctcatagcttatgatgaattgttataattgcaggagctatatataccatggcgctcttgtctcaagcaggaggatcatacactgttgttccttctggagtttgttcaaagactggaactaaagctgttgtttctggtggcgtgaggaatttggatgttttgaggatgaaagaagcttttggtagctccaactctaggagtctatctaccaaatcaatgcttctccattctgttaagaggagtaagagagggcatcaattgattgttgcggcaagtcctccaacggaagaggctgtagttgcaactgagccgttgacgagagaggatctcattgcctatcttgcctctggatgcaaaacaaaggacaaatataggtacagtttgatgcttatatgttctgttaaaatgctacttagtgtttgtaattgtgacatatttctttgtttgtgctcttttacggtgttggtattgtttgaattcatccagattgtttgtctattggagaaatattctgttttgctaacttaacattgtgagttttcagaataggtacagaacatgagaaatttggttttgaggtcaatactttgcgccctatgaagtatgatcaaatagccgagcttcttaatggtatcgctgaaagatttgaatgggaaaaagtaatggaaggtgagaagaacattggcctgaagcaggttaacattctcctgtgtttcatcttttgagccgtttattatttatatacattttcagcctgtagaacatgttagcttcatatacaacacaatgatcggtatattataaggtttcagtcttttttttttttttgctgtagataactcgttctgtccttttgttgaccagggaaagcaaagcatttcacttgaacctgggggtcagttcgagcttagtggtgcacctcttgagactttgcatcaaacttgtgctgaagtcaattcacatctttatcaggtaatttcaaagataattattgccaatgctctcaccctaaaacgtgacaaataaccaactatctacggatgtcacaggtaaaagcagttgctgaggaaatgggaattggtttcttaggaatcggcttccagcccaaatggcgtcgggaggatatacccatcatgccaaaggtatgacgctttctctattcttaagattgaagaaagttaacatctgtttgtttctaattcagataatattatctgattctacatagccaacgttcggattatttcttggtgtttgtgttaagttttcctatgacgagtcaggcagtaagatttgacatagtgtaatgtgttctgtgcaggggagatacgacattatgagaaactacatgccgaaagttggtacccttggtcttgatatgatgctccgaacgtgtactgttcaggttagattaatattctgactttgcgccttttcataatttccttcaactaaactttccagttctcatcaataatcttattttgaaacttatagaaactgcattacttgcaatcttgacaggttaatctggattttagctcagaagctgatatgatcaggaagtttcgtgctggtcttgctttacaacctgtgagaagctcgatctctttgtggcataaccagaaacttttattaacgattttgactaaccattgcctcactattatccaaattcaacagatagcaacggctctatttgcgaattccccttttacagaaggaaagccaaacggattcatcagcatgagaaggtctctagattcagcagttatgatccccgatatcttatacaatgagcttccctcccaccttataactctggtatgtcttgacagccacatatggacagacactgaccaggaccgcacaggaatgctaccatttggtttcgatgactgttttgggtgactatcgatggttaatctatgaaaaacaattacattacattggttgttttggtatgagaagcttctcaaaaaccaatgactctgtctcgcattcttgatgagttattggaaaattgatatgtgctattctgtggattttcttacatatgtttgtgttcaagatagaaagatgctttggatctttatccttctcttgaaacagcatggctaatcttaatttttttgctctcttttgttcttatctggtataggtttgagcagtatgttgactacgcactcgatgtccctatgtactttgcctacagaaagaacaaatacatcgactgtactggaatgacatttcgggtcaaaatctatccttaatcttttctgttaggttctataactgtttcattgcaaggaattggcaaattgaaaaccatgggatcttcttgagttatatctaatctcataatattcttcatgctgcagcaattcttggctggaaaacttccctgtctccctggtgaactgccttcatataatgattgggaaaaccatctgacaacaattattcccagaggttaatcattctgcctcaagagtctaacaatcagcctatgactttcattccctgtcttatgttgaagtc

SEQ ID NO: 64793 - DNA, 281 bp, Arabidopsis thaliana landsberg
gacgcacgtcgttcttgccatggttgtttgtcttttttcacctacttttgtccaaaccgataggacaccgtgaaaggttctgaccagggagcacgcagacccctagagcgcgctgttcttgcttcaaaaacatctgcatacagtgggagaacgcctcatggttatacctaaacctgtgggtcctagagcagaccccgcgatagctacaaggcgtggcgttttaagtataaaaggtaacgcttgaccttgggaaggcgctggccccgcgggttctgataact

SEQ ID NO: 64794 - DNA, 1311 bp, Arabidopsis thaliana landsberg
taaactcaattcaccattctacggatgacctatgatatgagagagcattgaatggctttagtaacaaactctaaaaagatgaatcttgaccaaatgtgcaatgctcatactaaattcctccaagtcttataaacattagatattttatattttaggataccaaaatatgtcatataaagaaaaatttgatatacatattgatcgtgcttcaaaaagacaccaaaagagcttctctctctcttaacctctcgtttcgccattatctcttacactgttactctctctctctcttcttcttcttcttctgcatctcatcgacatcatcctttcccatggctgatgcatacgagccttatcatgttcttcaacaaagccggcgagacaaacttcgtattccatctctcgattcccacttccactttcaccctcctcctcctccttcctccggcggcggaggtggcgtctttcctctcgctgattccgatttcctcgcagccggtggctttcactccaacaacaacaacaaccacatatctaaccctagctacagtaatttcatgggatttctcggtggcccttcttcttcttcatccaccgcagtcgccgtcgccggagatcattcctttaacgccggactttcttccggagacgttcttgtcttcaaacccgagcctctatctctatctttgtcctctcaccctagactcgcttacgatctagtcgttcccggtgttgttaactccggattctgtagatctgccggtgaagccaacgccgccgccgtcaccatcgcgtctagaagctctggtcctctcggacctttcacgggctacgcgtcgattcttaaaggatcaaggttcttgaaaccagcacagatgcttcttgatgagttttgtaatgtgggtcgtgggatttacaccgacaaagtcatcgacgacgatgattcttctctgctttttgatccgacggttgagaatctctgcggtgtttctgatggcggcggaggagataatggaaagaaaaaatcaaaactcatctccatgctcgacgaggtatacaataacatgatcaattctaatctctttaaattatttaaatctgtaaattttctttaattattgtctatactttcttacaagtatgtgaattattgtgttaaatgttcacagtttttggtcggtgtcctttggaattggagacaaaatgtgttaaatgatatgtcccttaaaaagatcttccttggaaaatgaaactcctataaaagccattttaaaattatatgatattttatttaattcattataggccata

SEQ ID NO: 64795 - DNA, 554 bp, Arabidopsis thaliana landsberg
gctttcttgatgaagaataagcatgagatcgatttagtgattttggatttccatatgcccgatgtgaatgggggggacgctctcaatatcattggtaaacagatggatttacccgtagtaagtaagtatatatcccttattaattataccaatattttttattgtattcttctcgatatatataacgtaacgtagtaagacattctctaatctttgatatgatccaatgtgaaattattcatgtcaagtcatgtctcatgaatacaagaaggaaacggtgatggaatcgattaagtacggtgcgtgtgactttcttgtgaagccggtgagcaaagaggtcattgcagttctatggcgacatgtttatcgaaaaaggatgtcaaaatctggtttacataaaccgggtgaatcaagtacggttgaatcagatccgggcgaataccacgatttatagcaagacaatctttatgagagcaacgaagaaagcttcaaaacacttgcgacacaagaagagaactttccaccaaaaaccgcgttgcaatggactctgaact

SEQ ID NO: 64796 - DNA, 512 bp, Arabidopsis thaliana landsberg
atttcagttttaaaatagaaacaattactggtggttgagagaatttcttgatgttaaatatgtgtggtggtgtgttgtctcttcatgtgcatagtgcgttttaagccaatttatttgttaatttgtgctactacaacatgttttattttaaaatgcaaacattattatttaatttcaggtgggtacatatataagtcaagtttcttgttggacgaatctgatgaatatttacttccaaagtagtaacaatattataagcttccaaaatagatctctacacttttaaaaaaccaaactttatgcaaatccaactcacactaaacattcgaagtaaacaacaaaacctaaaactataacgcggtagcattaattacaagatgaaagagtgaactgacttcgaccaagtttagctcacttgttgccgcatcggaaaccaaggtcccaggttcttgccggtgtcttgtgatcgatgatggtccccaaaactttttgagttcaattttctcctttcc

SEQ ID NO: 64797 - DNA, 439 bp, Arabidopsis thaliana landsberg
  unsure (1)..(439): unsure at all n locations
taaccattagatcaacagagctaatcaacccacaagattcattctagcaggggcaaaacagaacgctcaggacacgttaagnccaanacgcccaggcacactcaggcgaacaagagcccacaagtactggaaccacgcggngaggacgacaaacccctgagcacctcatgtttctataggagagtaccggtgggctaaggagagaaaatcgccgtcttcaatagaacagcgtgcaataagataaaggtcgctacctctttctgctaaagcgaaccttcatatagttcccactagaaggcctcaagaggaaataacaaactcttgggaagagccagcagcttccaactagcacggggactaggggcacaacaaatatgatgctgagatcaaaagagggttaagagccatgagaactacaatgcgctctctgagcagtcaa

SEQ ID NO: 64798 - DNA, 220 bp, Arabidopsis thaliana landsberg
gggccgaagaaaaccggaagcacttaaaaaaaaaaaaagctttcgacacacagaggggacgcccaccacgggggggcccaggaagaaacaccccaaaaaccccacagggaaaagaaaaacagaggaagccgaccggccaaaacaccaacgacagccaggaaccgcgccgcggcacaccagaacgggcgcccgccaagagaaacgccacggagacgaaacg

SEQ ID NO: 64799 - DNA, 380 bp, Arabidopsis thaliana landsberg
ccggttatttcttcctaacttgacgcccccttttcttctattcgcccacaagcctggcagtcagtctttctcataacagtctcttttttccttgttaacgaaaccctaaagaaataaaaaagcttcagaatgggacaaccagaaccgagggtcttctacagaccaaacgtgaagacatacttcttggcaagtcttggacaggcaattggaccactttcttgtcccataaacagacaggcaaaagcttgcctgcaatcaacccaaaaggaagctcctttgcaagaagatacgagacgtttggagagaccagatatgcatacttggtgaataccccaacgtgtcgatagaaggcctcaggactcaaaacggcattggaggag

SEQ ID NO: 64800 - DNA, 512 bp, Arabidopsis thaliana landsberg
taaaacctatcaatgtctatagtagtctagactccagttgtatcggatttttcagataacttttccacaatggatggaaagggaataatttgtaaagtaaattatgagcacaggtttaaataatttcggccgtatggcccaaaattggattgtgtgagacatgtcggttatttggcattttgggttggatagtggtaagtaatatgcccataggcccaaaaggcccactagcaatgaattaaagcctattacactttgttttccataattctcctcattgtttatttgttttagtagtatttctcaaacaatttaatgagttgtttttcatcttaagaaaaaaacaatttgcaaagcaatacacatactgaaaagaaaatcaaagcacgtaataaccatatcgaaaaaacattagaggaaatttaaaaagataaatcccatcaaaatgaatgtttagaccaaaacagtggacttgggatacaaaaacaattttattgacaatgcgataaaaa

SEQ ID NO: 64801 - DNA, 359 bp, Arabidopsis thaliana landsberg
ggagatgaactgataatagctatatacaaaaaaaatttttttttgaacccatgtgatcattatgcaatatgtgggggtaagatctttaccattaaacaagtcggatcggtctggactagataaactgaagttaagcttggatcacagacaaacttcactgctagatttggatttgcttaccccagggtaaaaatgtaatcctagacacaaagacacgacttgtttaagcgtgaacaccgcctgtgacgcataatgtgaaatatgaatctcccacgtgtgagagaggcttgtaccgaacgtgcctgcgcccttggagtatgggcctcattgttatcccctttaggaggccacccttgaca

SEQ ID NO: 64802 - DNA, 1731 bp, Arabidopsis thaliana landsberg
taaatcttcttatgttgtacttggacctgattacgaaccgcaggtgagctttcttgcttttgaagccattcaaacccggtttgtatatgtttgaaattcgatgtgattactattgtgcagataactgattttggattggccaaatggttgcctaacaaatggactcaccatgcggttataccggttgaaggaacgtttggttatctagctccagagtccttaatgcaaggaaccatcgacgagaaaaccgacatctacgcattcggcattctccttctagagatcataactggtcgaagtccggttaatcccactcagaaacacattctcttatgggtataattctattatctagtcatacctatacttgtttgccttcttagacacgaaaggaaaccttctggtggtttcctcattggctttttttaccactacaggttatattgtcatataaccagttttgcttgttaaatctactttattttaatgtagtaatcgacagttgattgttaaatttcataggtttccaattcaaatatgataaaaatgttgattggttcatatattttagggtttcatctcttttcttattttagattagtaattcctctcgttgatcgttatattgatggaaaacaaaatgaacaggcaaagccggcgatggagacaggtaacacaagtgagttggttgatccgaaattgcaagataagtacgacgaccaacagatgaacaagctagtccttacagcttcacattgtgttcaacaatctccgatattacgaccaaccatgactcaggttggttacatagatatattcgataccagtcgtattatttagaattaaacggtccaaaaccgaattccaatggttttgattttttaatgtgtaattaaaggtattggagttgcttacaaatgggaacgaggctgagattgcaaagagctggagaatgcctaaggatatgactaatgacgatgatgataataatgaatgggatgattattctatgattttcggatatgatgttccttcagattcttctttttaatatttttgtttatatctaatatttactgagtgcttttgtttaggtttttctttttcattcttttatatgttatgagatctttaacgttatgtatcaagaattcacaactaatagaaataagttactttatcagttaacaaaaaaaagctacttaatcaaattttaaacatagaccgtttggattatttcctttttatcagttgacaaagtttatttcatttgaaagttacaaagtacataatttaatgaaaaaatcttgttctaattttattcgagacgtatactatttctccaacagcaatggttcaaatttcttaagaactaatgagagtactcagaagatcaatgaacagagttagccaaaacgaaccataacataattctcctagattaagaaacaaatttattatgtcttcgtgttgtgatgtgtgtgcgtgtatagaataagatacataaatttgtcgttatcgataaaaatgattttcatgaaaaataaaagcagtagcactttagttcatcaataagaaaagaaagcaataggatggatctaaatcgtgacagtttttttttggtggaatttgtaaaaacatatagtccaataataaaagaaagcaatagtatggagctaaatcgtgacagttttgtcgtgatttataataatatctactaaaggaaatatc

SEQ ID NO: 64803 - DNA, 450 bp, Arabidopsis thaliana landsberg
ccggggatcgcgatgccctggaatatttttaaaataagtcatttctcattaagataaaggggggaaccttaaaacggggttatcaaaatttgacaaattattaagaaagactctgttttcgaacatacctctcgagccatgaaacgatttcttgcaatgaagaatcgcactttgaatcccatcttgttgaacttgtaatgactcgtcgactctgttcgccggagacattcctccgatcgccgcagaagctgaccgactcttcccaagttgactactgacacttttcatgcccgacggaatattattcctttgtttctccctcgccgccggtgatgacgtcggagatgtaatcgtcgacgatgactgcttcttcgttgatttagtgtacaaaggttttatgagactgaagaatctttttgaacagagtcgtagacatcgtgtcgcctgttt

SEQ ID NO: 64804 - DNA, 568 bp, Arabidopsis thaliana landsberg
aacgcgagatgatatcaaaactctttcttaaacttcaaggaaacaaattttacaaacttgattggggggacaattatttggggaagaataaaaaccaataactctgtcaaaaattgcaaaacattcaattcgtgtattcacacttatgaaaaactccacgaacaaagctaacaaagttgctttactttttagttacgtcaatttaagttgatactatatatttttaaaaatatatattcgtatagttagttgatatattcgtatactaacttgatctcactcacctcgaacattatcggttttggtgggatttgaaagtgaatagagatgaatgagatcatgaactttattttacaaaaatcagagtaagaataacaaaatttggtaacgggtacatatgattagttaccgattaaagagattgacgtgtcaactatattatcaataggaatattcgtaattttttacccaagtttcagttcagtgctttttgataattcttttttaataactagtgagaacaatccttttgatttggtcaaaagatgccaataaaacaattaacact

SEQ ID NO: 64805 - DNA, 525 bp, Arabidopsis thaliana landsberg
tatatatggtctcaagtgaaagcaatggaacagcttctcgattatattctttttagctttcacatttggttttaagtacataattaagacatacatgaactacatatataatatatattttaactaaaaaaattgagtgtgatataggttggtttagtatataagctatactttacctaaagtaaaatcagagctcacttttgtgtgtgtgtgtgtttgtttttgttagtcattgagatttttaataaagggagattcatttgagatgattgcttctatagtttagagaaaatttgcaaaacaaaaagagtatacttaactatatattgtcgtttcaggtaaaacgatgcaaaaagtcagcctagaaattaacgaagttacatgaccatgaccaacatatgaaaactgcattgtttaacatatctctgaaaagattatgtttttggtcgtattaaaataacaaaaacgaaataaaaaaaatctcagatgtgaaaatcaactaaagaggagcttggagaagaaaaa

SEQ ID NO: 64806 - DNA, 585 bp, Arabidopsis thaliana landsberg
tatgtaacttttaattgaaaatctgttggtcatttgtagtttgaatttttatcttcaaattgtgttaataggattgtctttcagatttggcaagtgtgtttcttcacttaagaaataaataaagcttgtatcatatctcaaccttacttgcctttcaagccatctttccaaaaataattaatttcctaaaactgtttaaaatggttgccttcctttaaagctcatatcatcatctatcaacaacttccaaaacttttcatcttttgatgaacatcatcaacaccggaacagttgataatgtcgaattctcgatccaaaacctaatcaagagttggtgcagacgacggaaatggaggcaactctgcaacttctccccaaaacaacaacaagaagaactcatctctatcaaccaacaatggagaatcactttatcaaacttcctagagtcataccaagttcaccttttcaccatcttcttgctctctcttgacatcatcttaacgtccctcgaattatcttcttctctgctatcctgcacatcagtcaagaaaaccgaaaccgaaaatgaatggtttcgttggggag

SEQ ID NO: 64807 - DNA, 274 bp, Arabidopsis thaliana landsberg
  unsure (1)..(274): unsure at all n locations
caagagaacaggttctacgacggaggacaacccaaagcggaccacggccctagaccncgcagcccagacaccagcaggcgcgggaccccaacgcccgggctgcccaccaccgagtagggcggcacccggctcacaacctacatcccagcacgctggaggttatccgaaccagaccccgacaggagcccaaagacaacgaccacacacgacaatatacacacgcaaggtgaaacatgacgagccacgcaggctcgcacggaaaccaggcgacaca

SEQ ID NO: 64808 - DNA, 471 bp, Arabidopsis thaliana landsberg
  unsure (1)..(471): unsure at all n locations
ccccactaatatgagcaagggcgcttttcccgattgtatatttcgggaaagcagggccggggttgcactactggggtcctggacgagaatttcgcgagtgattcaggcgtccatacggtttaatttcgccatacaaaataaacaggattgaatttccgcttggtgaggcattaaaagctcccggccgaaatagaaatgtatatgaaaaaattannnnnnnnnnnnnnnnnnnnnnnnnnnnnnnnnnnnnnnnnnnnnnnnnnnnnnnnnnnnnnnnnnnnnnnnnnnnnnnnnnnnnnnnnnnnnnnnnnnnnnnnnnnnnnnnnnnnnnnnnnnnnnnnnnnnnnnnnnnnnnnnnnnnnnnnnnnnnnnnnnnnnnnnnnnnnnnnnnnnnnnnnnnnnnnnnnnnnnnnnnnnnnnnnnnnnnnnnnnnnnnnnnnnnnnnnnnnnnnnnnnnnnnnnnnnnnnnnn

SEQ ID NO: 64809 - DNA, 1454 bp, Arabidopsis thaliana landsberg
tctttatataagtatgtttgtgcaaaaggagatcatatagaaagtgttggaattaagacgaatacaagataaaatttgttaccatttaccaacgtcaacgtgttagtgaaatatttcaaaagatgtatagccggtaaaaattgtgattaaccggtgggtataaatggattcaggtgaagaacacaagaacaaatgctgcagtaactgtgagaatagtggaccaatgcagcaacggaggcttggatttggatgtagcaatgttcaatcaaatagacaccgatggttttggctatcaacaaggccatctcattgttgactaccaatttgtcgactgtggcaatgagctcattgggcagcctgattccagaaacatgcttgtttcggccattgatcgcgtttgatattatgtaatgattttgaggtcaatatcgatcggtctacataaaaataataaagaccgctatatatgtattgtcgagggatatatgtttcgtatcaataaggaaattttaaatattattatcattcgatacgtactactttagtaaaatgaaaaaacttcaaccgccatggaacgtgtaacaaacgacttgaaacacctagcaagaatagtaagtacattgaatattcaaaggaaagccaaagaaaatcatacgtacacaacgtgctccaagcgttttgttaggctaatctagtcatttcatagtatataattttctataaataaagtttcatcaattctttattttatctaccacaaagttaaactaaaaaacaaataacaacatatagaaagaaatgtcaagacttagcttatgtgtgtttgtgttgctatgtgcgtttgcggccaaagcagccgctcaatccgcacctaacgtttgagcaacttaccatatttacaatcctgcacaaaacaactgggatctctaccgagtaagtgtgtattgctcgcggtcgtgattcttgcgatagatgtttaagggtaagttcttttatctatttcaaaaatcacgtttctgaacgctcttttcatatacaaatttattgaatgtgtgcatatgtcccctcgaacgcaggtgacgaatactgcgaccggaacgcaagcgactgtgagaatcgtggatcagtgtagtaacggtgatttggacttagaggagggtgttttcagacagcttgatactaacggtcagggaaacgctcgtggtcacttaatagtcaactacgagtttctcaactgctaaagattaatgaattctagttcatctccatattattgacctgtaaactctaactaataattttaataagagaaaataaatgtctcgagttttatcttttcatatcaatgaaaataaacacaattaaatgtagtgcgtttggaaagttgggaaggaataaaatgataatcggattttatataaaaaagttaacgaaattgcacacacacatagatt

SEQ ID NO: 64810 - DNA, 1384 bp, Arabidopsis thaliana landsberg
aatgaaatatatctatgtatttaggtgacttcagtatatgtttctaatttatcgcaaaaattaaatttaaagaaaaacggatgaactcaaaaaaatcatgtggatataagttaattttgataaatgatacttttaagttaattcccaaaagaaaaatattaactaagattttgcgtatttttttttgtcacaaggaaattaattaagttatttgtagtcaagagaatataaagatgagctgaatcatttgaatagatgaaatttaacacaaatgttttgttaaaattagaggaagtatattaaaataaatttaaataatataatagtattggaaaaaattggagtgtaagtgtgtaacattataatagaaacatatttaaaacaattttgtaattacaacgatagctacttttcaactccttcgggacctcttgaattaatgttacacctcaagaacacgtaattgaatttgtttttatgtgacggtgcgagagcaatcatgagaagaaaataacattatgtctatattttgttttattttcacttagagagtttaaaaacgagaatatgatgagaatgaccagactttatgttattttcataaggttgtgttcataaacggctaaactcggttttttaaagaaactaataatctgatatttttatagtaaagacacatatttagcactagccactatattatatggttttgtagtcttactgtttattgaataatttagaacactgtatattttttgtttgatgttaaatgattaaatatgttaatatcaacttaatatgaacttaactaaaagactcgatcatataatgcaatgcacacacatgaataattatataaaggtgatatcgaagggcgttacaagagaatggaggaaagatttgagaagatttagaccaatcatagatgatatgggttagttactcagttaccaatatctggtcccatgtataatgacataatatttgtaattagtatcttattgccactttttcatatatatatatatatatatatatttgttcaagtttatctcctccgtatttgaaagatcctttttgttgttgcaagaatctaaaagcaaacaaaagaaagagtaaagcagtcgtaggatacagattaaagcaagagtaatgttaatctttaacaaacaaaagaaagagtaatgtaagttaatttgagtatattaaaaaaaaaatgcaagagtaaatgttcttgatcattcataattctaaaagcacgagggtaatgttatcggcaatcctaatcacctttgttaaggatatagtagtggtgacacgaacacaaataaatataactttgtaaccgatataagaatcggtgaccattattttttattccctt

SEQ ID NO: 64811 - DNA, 200 bp, Arabidopsis thaliana landsberg
gagcacggagagtatcgggaggaggtatcaatttcaggcggcggcggcggagggataatcgatgtcttgaacgcagttccatccttcctagcggtatacggacattgcaacatctgtggctcaggacaatgcatctaccaaccctcaagggtgatcttactattacttacttggggtatggaatcatcaattaatttccc

SEQ ID NO: 64812 - DNA, 284 bp, Arabidopsis thaliana landsberg
acccttcccccccaacccccccatatcattggactgtacccatatatccacaccgctcaacaacacaataacacttgaaccactgtaatacatcccaaattcataacataactcacacgcatactacaacaaactcccgaaccaaactgtaaccaaaactacaaccccaggtcaaacttaacacatacaaacattaacaacccaaaaatactcccagtccacaccaatagacacaatgactatgactttaaaaactggaataggagagataccaacaattaaat

SEQ ID NO: 64813 - DNA, 342 bp, Arabidopsis thaliana landsberg
gcacctccactatcggcaccaacagcatctccactatcggcagttgctgcacttccactctccccagctgttccagcagaagaggaatcaccacccattgaactttctcctccggcagaaccatcagttgtacttccactagggccaccagcagtgcttccactgccatcatcacttggatatgatggactacctgccgagcttccactatcaccagtggtgtctccatagcttccatccgtccgtaggactcccagtgtcggcggagggagaaccgctgtcagagcctagacttccactatcacctctgcttccaaggccagagcttccacctccaagaag

SEQ ID NO: 64814 - DNA, 433 bp, Arabidopsis thaliana landsberg
gtggatatctgccgacactcgcagtgttaatcaacctactttacacttacctgtatcaacccacaagccgagcatgggaataacaattgcgtctaactatcggaacaaacgacctacttgatgccggatatctttactgatcctctcaagacctagggatgacacatgcgtctgaaccacatatctacgtatgtagaatgaaatacataattaaccatatactatacactcactaatgaataccaacatttcaaaattgaatgcttaacacggaatatactcctatattatatatctccccacatcatgcacagcaccaactgtcacataacccaccggttaaatgtggacatatctaatgcatcaacccggacaaagccaatgttatctgtgcatacaactatatgcgatcgtgcgtcacaacatacttcat

SEQ ID NO: 64815 - DNA, 605 bp, Arabidopsis thaliana landsberg
  unsure (1)..(605): unsure at all n locations
ttatatatgagtactaatcaaataacgtggcctaaaaatcttctaactagctggaattgttataagtttaaattttgacttttaaaatttaatctagaagcattgactgtaagtctgtatatatgtgtaatctatttcaaaaaatcaaaaacaattcacactatagcatggcctatataggtcaacagttgagtaggtaggttttggaccgcttatacgaatcacatttttaacataatttttgaaaacgtgatttcttaacgagtattatgtaaatactttacgagctttttttttttgtaacatttttacacggaatatttttgtttctctttttttttttgggtaaaagttttgtttctttatttaatattggtaaaatcaatgttaggtagacttagtatttagggcttaattatggtttatatgacttagatcggtcaaagaaggaaaatgtcatataatcgtttcaacctctgaagaaaaaaatgaaaagccataagaagaagaacaaaatcatttgaaatcgtcattgtctcgtgatcttgtagtcttgttgacatagacattttaatatanggaaatttgatgttttgataaaaaca

SEQ ID NO: 64816 - DNA, 493 bp, Arabidopsis thaliana landsberg
ttgtgatcgactattaacattgtaaatgtaaaccaagtgaccattacttgtttcaccaagtataatttaatatgttagaatacatcaaagagttgatcacttgttttcaacacgtaccaaccttagttttatgcaagggctaggattaacaccttttgaacaatatttgatgaagagagatatcatgtttgataaacaatatggaaaactaaaaactttttcataattaaagatgggtaagctaggtgatgctaatatatctgcatatataaaattgcataatttagaaaaattatggatttatagaatcgcaaaatcaaaaatcgaaataaaaagttgaatactaaactcaggcaaaaaagatgaatttggataaactaaacaaaattaaataattgatgttttggttttataccatatcaaatctgagaaagatacaaatagatagagatgaaagtgattttcacattaagctgtggattatgtttacaac

SEQ ID NO: 64817 - DNA, 534 bp, Arabidopsis thaliana landsberg
agttacctgctgagccacctcaccagctaacttttatctctcttctgttccacaagcctgaccttcattgttttattccactgatcctgttctcctgacctccctgctactctaggttttggatccatcttccctacaccctagttaaatctgacagtattcactttcttttcctccttgacagattttcttccttcaacttagtgacgtcacatcttgcttgctttctatttctttttctatttctctggtgatctttatttagattccatcacaacctcttcatccactacctggcagctaaacaatagaagttcttagaatagtcataaactctcctcttgcttgacatgtgtattaaaaaaacaacttggtatatttgctgcatgcttgctgtccatcagatacaatttgaggaataaaataaatacaaagtttgaaaagcagatcttgacatccagcagttgagctgacacaccttccagggccatgctcacctcctgctgagcatgctaaatcttcctatcattatac

SEQ ID NO: 64818 - DNA, 1520 bp, Arabidopsis thaliana landsberg
cttgatctcatttatacaaaaatggagaagttcttatgttcttgtaaccaaaatttataatttaattcaaggtgtggattctggataagactaaatctgtgtaacttgggttactgatataggttgaatgcacatggatcttcctcatataaagactatataatatacttaaatcgttgacatagaatctcatagaacttttcaaaggggaaaagaatcttagtgatcctccaattaataattcaattatactttgctcatattgatcggtttagccatcatggcttttcagagacttcaattttggatgacaacttgttgatccgaaaggcagcaatgcagagagtgatattaccaaacaccgttagtgctgcctgaagagcgaccaacacctgataatgcagtccaacaattacaccattaagtaggagtgaagaagcaaacgaaacatatcacagacttatagctaaaagttggagtcaagagtttcttgacctcaagagattcatcgttgtagaagaaatgccatgtgcatgcacagagagctccaccaagcaaaggtacctgattaagaacaaccaaaaagctcagaaaaatgaaatcatgtaatctaggaaaacggcttagagctttctcaccattccccatgagagacctttccaagactcataaccctttctttctccatacttccataccaatgccatcgccgtaatcctttagtaaaaacaacaccagaattagaaagacattacatttttcttgtttgttagctccaactgcatttcaaaccataatgagagaagcttaatctacattgtgagtgaaagatcgagactttatatgtagatgaagcttctctcataatgatatcaaaaactcgaaaaacccacaacatcaaatactctcttgtgtcactatagatcaaatgtcaaatgttttctaagtgagaatttcaatcaataaagcaaaggaagaagaagagaaccattcgacaacgctggaaacatgaacggcccaagtgggtaaagacaacgcattggacggttcgcttagctgaagagaatccaccaccgccgccaaagcagtagcatctggtcccgccgtgatgaaagcagccgcaaccaaactggttccgataagacccgacagcgcaaccgggtcatgaattaaactgcggcttcggatccgaattacaggttcgttagaggtggtgagagaagaagctggacggctctcagaatgaattcgccggaaattgggtttggcgcagcagaaaagaacggtggctgttgaagcaatcgccatggctgagatttttctccaatttccaattcccaagttctggtttaattttaaaccggtttgctgttgaaccgtcttttatcattttcacaaacaaaattaaactaatcggtttattaacaaattctggtttttctaattacttcccatctttgaagttgaagatttaaatataaagacaaaatggagattagtacattaataatctcaaattc

SEQ ID NO: 64819 - DNA, 1716 bp, Arabidopsis thaliana landsberg
ttgtcttctaattcagatccaggtgaaatcaggaatttgggcagattcgctgagccgtggactgattgatctcaatataactgctcgtaagtcgttacttcctcttctatcgagaactctctcatttgatctgcactataagaaaaaaatgttttattttctcattagatgcagtcaaacccacaaggtttagttgttcgattacattccaactatttttcaaacagtacattctacaaatcaaaattcttagctcacataaagttccagtaccatgtagcttgtttgcatggtgtcacgacaaataaattgttgggttttagtttctaagttcgattttagtcctgattatttttttccctgtaaccagccaaaaaagcttctctagctgatgtgggcgttgtgggggatctgagcaatgaagatgggaacaaagcatctgctgcatcgtactactcaggctggtccatgggtgcaggatccgggcttggtaaaactggcctatacagtacacagcagcagcagcaacaacaacaacaacaacaagcacctgatatctcagacgatttcttctccagcctcagtaaccaaaggtaccaatctggtggctttaagcagtgaaattgtctgtgatttggtgttgagatgaaaaggcatatcaagtttgattctacattccatactggaaatgtaagtttttttaatgggtttgttgttcttgcacttcattcatgggacaatctggtcggtgactgatgtgccattgttgttgtggcgtttactttgggtttaaatgagagagagaagaattgtctttatgttttttttgataagagagtacttttattattggtttaaagtttcgatttgttcatagaacaaaagtatatgtatctcttcccactcaacaaatattttttttatcgcgtgtgattcttaatccgaaagagactccaactttcttctcagttgttttattcacattcatattgaccaagttcattcttagtgattatgttaacactaatcttatcttacacaatttagttctccggtcacgaatgattaaaatatagaatagtcttatctacaaagaaaatgagtagttgtgacaaaaaaaaatagtccaacaccaaaataaaaaatgtcatctcttcactggtttcccaatatcttcatcgttgtcgtcgtcttcttctccttgagaagttcacaagttgtactagaagaagaagaatccacagtcgttggatacggctacgtcgttagatcagtgggcgttgattctaaccggcaagttttgacggcgaagcttgatctgataaaaccatcgtccgtttacgcaccagatattaaatcgcttaatcttcatgtcaggtcattataatctcctctctcaaaccaatctccaaaaaaactaaatttagcaagtttttcaaactaatttaaaatgtgcgattatataggaaagttttcgccattatgattatgtatatatatgtgcagcttggagacaagtgagcgtttgagaatcagaatcacagactctagtcaacaaagatgggagataccggaaaccgttattcctcgtgccggaaaccactctcctcgccgtttctcaacggaggaagacggaggaaactctccggagaacaatttcttagcagatccctcatcggacttggttttcactctccacaacacgacgccgtttgg

SEQ ID NO: 64820 - DNA, 1509 bp, Arabidopsis thaliana landsberg
gacgaaccttattaggttcgggatatatattacatgttctcgcgtacgtgtttatgtatgggtatggggtgtgttgactaagcatgcatgtgtgccaagtagataaacaagcatatgaaccttctagagttgggaaaactgtgagattgcacggtttcacggcagattaatcggaagttaatgaaattgtaatatgttctttatgatttgatcgtttgataattctgcaagtcaataattatttcttagttcaagcataacatgtgacaaatgattttcacttttaacctggtaaaatttcggcttctttcttcttaggcttcaaatgattttggcgggtaactgacaacaaaaatgtttgacaaaaaaaaaacaactgtttacataatgttttctgtcttctatagaatctttattaccatcaaaggaatctcaaaactgtgatctccattgaatttgatatcggagtgtgatttcttcaatcaggcgttgttagatcgagaagcagcagccgcagccgcagccgctttcttattctccctcttcttcttgtttttaagagcgttcttgctcatctctctgtattaacaccagaggagtctccatcaacataagagcgacaattcttgagatttatgtatgtattacaagatagagacttaccctgttgggcttattccaagtaactgcaatttcaaataataaaaactatcagagacataatgatatgtgatgccaaatgttcaatcgaaaacggtagtagcagtgtatatttaaggccatatggttatggacacgcatatttaagggctcattgagagaaacttgagttattttcgttttttgtttcaagtatgagacagaatcatgactgtatggttaataattagtaatttgatatcacgggagattattgaaaagttgttgagttacctcggcttgaacagcagctgcatgcttagcatgcggaggtcgatatgcggccggtttctgtgcaataggattgggggcaatagttttcttctgagctgatccttgtcctaagatagataagtagaaattggttaagaacatgataagttaacaaaaatatctcataattagagacagtttcaagcatttgaaccaagaatttccgaccttgcgatttgccctcgccgagtttcaatgattcaactgacttgataagttcactgatgtcaccgaacctctctggagactctggtttccattcagcctgcaggtaaaaatcatagcactccagtaagacaattataataatcaatgtatgcttttcaaagctgtttaagagacacatacctgatacagcctctcaaacatcttcttataataacgctttccgtcgtagttgaagattttcatccttcagtcgggacaaagacgaaagatatagaacacaacattaaaccaaggagaaaaaaagaataatccatctctgactggttggtcataagtcaaagtgatggattaaataggcgggtatgaaac

SEQ ID NO: 64821 - DNA, 1377 bp, Arabidopsis thaliana landsberg
taattatctgaatgtggtatgtttttataacgaggcattgtaaatggcggatggagtttctagtagagagcatcagctatccatcagttccaactgagcgagcagaggacgcaaagccttttgctccaatggtggtcactgtaagttcattcatcaaactcgttctctgaaacttttccacttgtatatgcattataaacaacgctagttaagtaaggtcagataagcctcctgattccctcctctcttatagatacttaacttttattttgagacaccatgattttttgttttggttttcctacgtcggtccagtggtcaatcaatcttgtgtactgcgcaggggaatatggatgatgatggtttgggtcctgtttcttggtgggattcttatgaacaggttgatcaagaagagtgagtgaccgaaacaggtgggattcttatgaacaggttgatcaagaagggtgagagaccgagacttagtctaggcattgtcagatgaaattttaacagatgatgatcaagccagttttgatgaaaacttaaaatttattttaaactatgcacgggttttcactaagatagggacgttcaattttgtttatctgtaatgtaaaaaggcaatgacacaaattaggaagattaaaaaccaaaaaaaaatcgataaattacaagagttgtgatggatgatggagttgggtgaggagttgatgtatgtcaggagcatgttgatcatctgcacggatgcgatcaggttgaatccaacggccgtcagtgttcctcaccatccctttgtttgcgtcttggcgccaataaggagggaccatgaaatggtctttcaaaaaatcagatgctttgttcactaacgctggatctctcccacttgataacacaaatctctgtcctttcccatgatacctatgtttttttaaacaataatccagattcatcaactcatactaatactattatgctctaaacgacaaatttatttcctagtagttttcgataattaaattctctccaacctacccatgaaagaaagaagtgccacgtaaatcagattactaaatgaccccattattctccattcggcatttgatgaggcaataatgtttaccaaatttttgaaaatcgtattaataaagaaatggtgttggaaaatgtggacattgagatctgtctcctcaatggcttttgacttgtcaaaatattagctggaaatcttaaaattactttttaaagtaaaaaagtaatgaacagaagaatgactgacccgtcaaggagatggaggagagcttccaagttatgagccgcagatagatcaacggtgggctcaaggaacggagacttttgatgatccaacggcagcatttc

SEQ ID NO: 64822 - DNA, 451 bp, Arabidopsis thaliana landsberg
ggttaaaacttgcctccaaaagcttatcatcagaaataactttgtcacacacgtaagctactaccgcagatcccgcaagggcaccgataatgtatgtagctcttgacatccttaacctgaagtacatagatatatcaaacataatcaagccacacaaaaggagaaaacgaacttatatcagattatagctatagtgtatagtgggattgaaatgaagtttcaaggcatattcaaccctaatcaagccaatacaatcacataaaaccattagataattaagctgctgaatcaaacaattcaattcaattatagaagacacaaatcaataaaagcatctgaatggtgaattttttcacacaatcgataaaaaagccgatctaagaaactcactgctaccaacaaatctcgttttattcttcctaatcgcgctaaataacatatcatctgctag

SEQ ID NO: 64823 - DNA, 1907 bp, Arabidopsis thaliana landsberg
gacagcatcaacaaatttatcaaatagatctgatagaatcggtatttcacaaaacaagcatcgattcgagaagagtgatttacctgaatcgatttcacagacacggagaggcgcaggaaattttcgagaagaatctcgttggtagatttttagggaggaatagaagaaatagcgatttacgtttctcgtcaaacttgaaatgacccaaaaggggtttccgattgtggtgtacaaatattgggccattatgggcccatttcgtttatgagattttactccgaattgggccacacttgactattggcccatcttaatacaaatcatttctttgggttaatgaagataaaactttttatgagattttataccagattgggccatacatgactattggccaagctaaaacaaatcatttcttttggggttaatgaagataaatctttttaaacggattaaattttcttaaaacaaagcttagaatatatacagtcaaaaatctataaattaatattcaataaattaatatctcattaaattaataattttcttccgttctcaaattgatattttagcccaaatattgtctctataaattaataaacatgataatttatagaggttttactgattaaattacaattgctatttcaatttgtaaaaatattaagagttccttttgaatgactttgctcaaaacgaggttttagaaagtgctaaagcctaaagcttcaaatgcacataacaccaatatttattctgcacgcataagatttctaaaatgatttcagttgtttttcttattgcgttttaaaaacttacagtctatttataaagtgaaacatctataaagaagaagaagacaaacacgtatttattgttaatatttttttttgttgttgagtaccatattaacctagaagttggaaccgggcataatttttgcatgtggccatttttcatgtgatttacctatcagtaaatttttgcataaccgttacatcgttgcagcaggattgaagaagggatcatgtgaaagataactgtttctgactttctgtcaaagaaacttaatcttaaggtcgaaactatattgtatcataggttatgtatacatagacacatgatagtttgttgcataacatattttaatttcttttagaaaaacataaaaccatgatcatcaaataaaacaaaacatttttgtctcattaagtaaatgcaaaattgtttagttctgttttatatgtgaatgttagatacagaatgatttctttttcaagcacaaaaacattttttgcaattagtaattagcaaacaaaataagaaagatacaattcaattgcattattgtacccttttcttctctttgcattattgtaccacttttttttctcaacattattgtaccctttatttttctgtgcattgtactaatattttttccccaaattaaccaatcagtgtcttaatataacagtacgtccaagaataattaatataaagcattggtagttcattacgtaattgacttgattttagtattggtgtaaaaatagctatcactgaagagtggtcctaaatattataggacaagcgtgtgtgtgtctataattcctccgacttctctatggttttcaaactaatatttccaaatgatcaattcatgagtttttttctgttaaaatatatacaatctctacatatctattaaaactttggacgataaaatcttgagaacacatgctgcacatatagatatcgttatgtatctctcagaccaaacactttgcgcttttagcgagctagtacgtaaaagaaataaagtaaagaaagtagcacataaattactcgtatacgtatcaacgagatcaaacgtttgataaagcaacattaaacgctagaaggaa

SEQ ID NO: 64824 - DNA, 577 bp, Arabidopsis thaliana landsberg
ataaaatttatgtaacactgaaatttatatcataataattttatacataaacataatcagtgaaattttttcagtacaaaattgtgttgaaagtgagttttccaaagctcataggctagtggatactaatatttaagaaaaagaaaaaaaaaaagatatgtggtcggctttcttccaccgcaacgaagttgattgactctgagaaatctctttttttttttgcctaattatgattattcctttgtgtatctgacgtctcagacaaattatttgaagccaaaatatttgtttctttacgaactatccagttgtgttgtgtcgtaaactgccacttcttcttctttctcagacaaattatttgaagccaaaatatttgtttctttacggtcatcaaatcaaccggatcattttttggtttatcttccttgtcctatcttcgaatttggattttaatctttttggtaaacgccattaaattttgtgtttcttgacgacaacgacttgtcaacctttctttgctggcaacacctacctttggcatgtctgtataatcctagttttctccaaaaacgttttg

SEQ ID NO: 64825 - DNA, 369 bp, Arabidopsis thaliana landsberg
  unsure (1)..(369): unsure at all n locations
gggaaggagcctgaagcgatcaacacaacagaaatttggactttcggacgtgaaactccggcataagccctcaagtgacgacttccggcatttggactatttcataattcctaataaacatgaannnnnnnnnnnnnnnnnnnnnnnnnnnnnnnnnnnnnncgtatctgtacccatcagtccttgggatcatcgatgagtgaacctgacaagatgaaattactctatacagctcgcggagggggagataccatggaccacctatcaaagcctaccatatgatagaatcgaataacgtattgcaatatacgtacatgctggggccttttgtagaacatacaggactaccttttgaaacatgtacatttg

SEQ ID NO: 64826 - DNA, 614 bp, Arabidopsis thaliana landsberg
tgggctcggatatggctttttctgttttgaaacagtcgaaggtgagacaagcgttttcaccgttgacgataccaacgtttatggtgatttaaccctttgtgaccagggtttaacgactaccacgaccacgactaccacaactgaagcgccggtaacaacgaccaccacaactacaaccacaactgaagcgccggtaacaactactacgaccaccacgactactaccgaagcaccagtaacgaccaccacaactactacgaccacaactgaggctccggtaacgacaacaacgaccacaacaacgaccacatcaggttttgttgaatatactattactagtaactcatacctgaattcaacgctcgcatgtgctggttatgatgtagacccgaccaccacggtatatacaccggataatggcgcccctgatacggtaactatcttctacacagactttggcgttacgccatttgcgggagatgatggctattacgcatgggagcaggcctccaacccgggtgcaggaaggtgaacaggtacggtagctgcaagcggtaataccggtgaccttcactttgtccttataattaccatgagctggacagatagctgaa

SEQ ID NO: 64827 - DNA, 1482 bp, Arabidopsis thaliana landsberg
tctaatgacaaggaaggagattggatgcttgttggcgatgttccgtgggggtatgcatacatatgttcttatgcttttgatgctttgtcccgtgtaagcgtcaaattctgaagtttgaacctgagttttacttgtgtctaggatgtttattggttcagtgagaaggctccggataatgaaaacatcggaggctactggtaaaggtacatttactgattcgatcaaatcctgatatctgtattaaaatcattgttttgtcgttgtgaccgtgtttgtgtgatccttgtttacagctcagatgatattatgaagcaaataataatctacgaagaaccctttatgtttgaagcagtaataagacagatcacagatcaaagagaagacaaaaacattgtaagaagcttcttcttcttctctcccctttacagtttcttttttggctctgccatttttcttttagttagttatatgttctctttgtaaatcacactttaaaaatctataagaaaaccctttcttgcacaaaaacaaaacggttcagagcaatgcacaaagttaatatgatcatgtaaaacaaaggaaacttattctacatggaaaaattaaatcaaaagatacatatctctctctctttctctctttcttctacatacagaacacgaatcgaacgaatcagtttatcggcctcttttgattcttaaatctcatactaaagaaggccatttacaggtgaagtactaaaaaccgatgaatgtttctcggccaagctacgactagtgttctcttcattactattacttttcctcctcggtttagcctctccgagcatcgatatcacatctctcatcgaaggtctgtctttcgggagctttgtagtgcagagaagagcaatctgtagaactaaaagcatctcttcttgcacatatctgcagtttcctacgttaggatctaatgcttcttctagtgatatgttgtctcttatcttccttctcacccactccacaatgtctactgattctccaaactccggttccaatggtcttcttccggttaacagctccaatagtacgacgccgtagctgtatatgtctatcttctcatccaccttcaaagtgtatccatactctgcaaatgatcaaccatatgttgttagactaaaccggattgtaatcaatttagtaatcggtatggtatttaaaccttaccgggagcaatgtaaccgtaagaaccggcgaccattgaaacggtttctttcttcctcgccatcatcctggcgaggccaaaatcggcgattctggcgtcgagattcgcgtcgagcaagatattgttggatttgatgtctctgtgaatcaccggaggatgacaatcatggtggaggtaagcgaggccgtgagctacaccaaacaaaatgttgtaacgcgaaacccaatcaacgagaagtctcccggcggcgtttttgccgtgaaaagcatcaacagggtt

SEQ ID NO: 64828 - DNA, 1681 bp, Arabidopsis thaliana landsberg
aaattgagaggaccatttgaaggaataataacagggttgaattcgttaaccgtttttaagctcccaatgaaagaggattcaccactgtaaacctcatcgatgttgaaatccttggccagctcagtcacaatctttgactctgcatgtccaccctggtccctctttggcggcattgtatagtatgggattttacctgcataaccattcatattagagacaatgatgagttaagaaactggttttcaaaaatgcttttacgcttcaagtttacgaggaacaaaaaaagatccgcaccttcattccagtcatgcaaaacaattctggcagcagcatcaatatccacaagaccaccctttttaagtttaccccttacagtggcgactttgtaaaggaaatcatcaactgcctcgaagctcgggattttgtagagagtcaccagcatatctttaggacaaagcttgagaatttccttcactatttttttcacaaagcagaagatttccaagttaggtcactcagattataacctttaaaagacaaagcacaaaaataagtgtgattctatcttgagcttatatccaattacctggactaactgggtcatccaacttctcgattcttttacaatttcggagagctatggaagcatcatttcctgatgatttcaacatcacaactccaggacaatccagcaacttcacgtttttgtccaagtgaacctcttgcagagatctagtcagtccaggagtggcaccaacattgacaacatgcgctctcttcagactgttaataagactactcttgccgacattaggcagtccaataataccaactgtgatagatttttttaactgccaaagaacaacaaaggaagatttaattgaaactgaatgatataacttgatgctaaggtaggatgattaaagtttaaactatggaaccaacctcatgacttcttgagtagttcttcaacaatttgataagagtgtctgctccaagacaatcactcgtctgcaacatattgcttggttttgatgccttagatgatttccaacccaagtttgatctctgttcctgggtgctacacttgaaggcaacagctggaaattcttccctaaggtacataagccatttctcagcagcctctcggggaacaagatctggagagagtgaatcagttacaaaaattaattacaccacccagagtaaacaaacaacttattacgtccacgagtaaagactgaatatatgaacttaccaatcttgttcagcagcaacacaagatgcttattgggaccggcttgcatcaccatcctctccatgtcagtacaacgagtgccaagaggatcacgggcatcaagaacctccaaaatgacatcagacaattcaatgactttaactagctccttgtagaaagccctctccgagttatctgtgaaacaaaagacattagtgcatgtaaaggcagagagaaagcacataaacgcgtggagaaggtatccaaaacaactcacctcgaacattgacaactttaggtaagtcttctatggtctctccttctgtcttggtatcctcatcatcaaccaaaccaagtttcctctttttggcctgaatagatttattaggagagatcagaacacaagcaccactccaaaatacgagtaaatcaaacagcaagact

SEQ ID NO: 64829 - DNA, 1485 bp, Arabidopsis thaliana landsberg
tggttacggagcaggaggtggagctggagagggatacggtggtggtgctggagctggtggacatggtggtgttggaggaggcggtggtggttccggaggtggaggaggaggaggtggaggttttgctgctgcttctggatacggtcacggtgggggtgctgttggtggtgaaggaatgctttgctattgtccatgaaaaattatttatatggagtgtaacggcaattgagtgaagtgtcatatctcgtaagggactatatagtttcacgatttatatgtggcaataaatagagtaatccttcgtataataagccgtagaaaggcggctattgttgaagtttttaaattgtaccacgaccaatattgttgtaagctactactacgtgtgtatcaagtttttataaatggaaatcatagttgttcctacgcgtgacgtagaatctatattaaataaattttacggagtatgcaaagtaaggtacatgagtgaattaggacacatacaactttgatttggtacatgacaacaagtgacaatatgaagaacattaaaaacatcaataatgcccaaaggtttaattgacattaatttaattgggccgaacttaattttccaatagtttcaacctctataataaacactcttaatattatttacactaaaaggcccaaaggttatagaaaattagagccgacccataaaaccgataataaagaatcagatccgacccgataaaggtaagcagtgtagcgtcgcatcatacactctttcggttcccgacgaatcgctgcttttttctctctctctctctccgtcgctgaaaaatgtcggcaagacctgaaggaagtccgccggaggttacgctcgagacctccatgggtcctttcaccgtcgaggtttctctctctcactttttcgcttatcggatcaacgataacacattccggccatgacattcatatatagagcttacacgaacttgagatctagatttcattctctataattctacattccaattgtatttttctcgaatcgagcttaaactttaggattttagaacggggttttagggtttacaatgttttgatctgtgtgtcaatttttactcagatgtattacaaacactccccgagaacttgccggaacttccttgagctatcccggagaggttactatgacaacgttctgtttcacagaatcgtcaaggtatgttttctgtgtgtttcagtctacttttcgttgtacttaagatcatcattgtgatgaagttttaaggaaattgttttgctttgctattgatctgtttcaggatttcattgtgcaaggtggggatcctacaggaactggaagaggtggtgaatccatttatgggtacgttatcatccgttttctttaatcaatgctagctttgctcgttgattctttgtcagtaatcaaacttgaatatggggacacaagcaagctctgatgtagttagtttt

SEQ ID NO: 64830 - DNA, 1502 bp, Arabidopsis thaliana landsberg
gaagtcgaaggagctaattggtactcatgaaggtgttttaaccttttacatgtaattcaatggatcgtggggaagcgggtgtgctagtagtctacgcgccgccgcacttagagtgggagcgcgtctcagcgagggcttacagtgaatgacccggttcaagaacactcctgtgaacggcggatcgcattcttgggtcgcatccgcgtgaacgtagacattgtaaagattcttggagattccgtcgaagaacatctcccaaagaggcgcgaacggaagaggcgacgtcgttaagtacataaaagctattttccgggtcgaaccgggaggtagattcgggttaacccgagaagatagtcgaagaagagggtcgtcttctttgggaatcggctgtcgaatccgaaccgccggagaagaagaagaagagtcggggacatttcgagagtaaagagagaagacggaaagagagcggaaaccaaactccggcgagataacgcaggtgagttctcgctggactgtgaagataacagccactggaagacataaaaataaagcgcagaggagaggaaacaacgtcggagatatcatctctcactccaccggaggattagaagaaatcagtgactagactacttttgctttttagagagagaaagaaagtgttctattattatcaacgacatttggtttctagagtgagagagtgggatttggtgcaacttgttgtatcttattattacgttaagaaattatatatttaattcgagtacactaattatagaaatatataattcaatggcatttcatatttggaattttacatctttatatagaaaagtattcgtcttctctcgagttgtcatttaatatacataacgttcttagttttatttggccactaattctaataattttgatcactgtactgtttatccgaaaagagtatatatgaattgaattctatttggttatcatttcttgtactttatcagtttgtcataaatctgactaaatcataggccacacataatgtgattgtgtatgtataaagaatttattcgtttgattagtgtgttcaaagctaacattaaaggaaggagtcataaaaatattcgatttacgtggagggttcttagtcttacacgtggattgatggaaaccgttggatggtaagctttctaatgacatcacgtggctgcgtgaattttcgtaatcgatccgttttaggaaacgtttccgtctcgaaggcaacagctttgttggatacgagtttctctgtacggtggtccacgtggtcgacatgcaatagatttgggcctttaaaaatctgagtttttgggcctttcactaacgacgagaaaccttaaggtggttttcattttgagtttttgagttcagacttgaaaagttttaggacgatgggtcttcggtaatgttttagacctttactttatttgtcagcaccgagatcttattttagtttgtcaattcactgatttaatatt

SEQ ID NO: 64831 - DNA, 764 bp, Arabidopsis thaliana landsberg
gtgataatacatcaatatcttttgtttcattttcataatattgtttaacaattttggcagtcctggtcagtcgattggagttagttcaatacttcttgggcttattcttctgggtcgcgccgcgttcgtgtttccactttccttcttgtccaatttaacaaagtcttcaccggatgagaaaatagacttaaagaaacaagtaaccatttggtgggctggtctgatgcgtggtgcagtgtcaatggctcttgcttataaccaggttttgatccgtgaactacaagaaacaaagataaaaaagtgatctttgggttttaataagttcccatgacttaatctcttctctctgttacatcatagttcacaacttcaggacacaccaaggttcttgggaacgctatcatgatcaccagtaccatcactgttgttcttttcagtactgtggtacgtttcaacactttgttcaaaccggtttgcttcctactgaagtcaaatcgggtttagcctatccaacacgtaacctaatctctaaccttttttgcaggtgtttggattgctaaccaaaccgttagtcaaacatttgcagccttcatcaaaacagtcctccacgaccgcgctgcagatcacactaagatcttctttccacgatccgatccttcatgagccgttgctcagtacccaaggccagtcagaatacgaccctgacaacatgtagcttcagatgtctggaatctcgtcaggccatcatatactgaggaatcgta

SEQ ID NO: 64832 - DNA, 1096 bp, Arabidopsis thaliana landsberg
  unsure (1)..(1096): unsure at all n locations
aaagcatgaggaaggagaaacttgagataaactgatatgttattaacaatgaagactacataacgagaggggtatgatccattccccaacgcaaaagcaaaaaaagttcatcacccaaaagattcaattaaattgccttaaaaccctaatcaaatcaccaaccatcaacaaaaacatcatcagatagatcacatctccagatttaactatgcaggtaggcactcaaactagagaagctcataaagctgatctaattgacaatgcagtgaagttgattgaaattaccaattcaaaatgggcaaatcagagagtcctagtaagctaacaaaaagagcggattccatactctaattcatagagcgaagcaagaatcaaacttggggatgctacaaggaagattatacacaagaggaaaagactctaacaccaagtaccagctaacatactgaagaattttcgaggaaagcaagatatatctcaatagaattatgacggagagagggagatagataagaacctcttcccagtcacttgtcgcacgcgagtagagatgtctccagaaccgccattgatacgatccttaacgaccttcctgcttccagactcagcctccaatttatcagcatacatctttatccccttggatgaaaaatacagaaatttgtcctaaccctaaattaggaaaactcacaaacgaaaaagttgtgtggactataagcagctctcaggttagagatgcaaatagaaatcctagaatcttaccagaaatcacaaatacggaagagaagatttttttttaaacaatccattaatgtagaaagatacggattttgcatacgatgcctttggcttctccaggatataggttgctagagagtattcggataattaacatccaatcaaagtaacgggtcgggtcgggtcgagaatcaaaattatgcgttcagatcaaaaaaaaaaataaccggtttgactgttaaccagaggggatgggtcgattcaaaagacgaaatgcgtcccgacttttttttttttacgcggctaagctaaancatttatattttttttttttgttttcacgcggataaatttctgt

SEQ ID NO: 64833 - DNA, 514 bp, Arabidopsis thaliana landsberg
aacgtctattgaaagttccatccattggaggtaaagtagcatccgtggatttcgatttcaactcaaggtattcattaaagcgctgataaaaatatttcatcagtatgagttgacaaattacctgcaacaattatacaaagcagaataaaactggtattacctgcaaaaccgggttaggagtaagatcaggctttagtactttctcttccgcagaaggtgcaaggtcaagcatcttaaccaaattatctgctactgcttgttgttgttcatctggctttcatgatgaaggaagcttgttgaaagaaggaaatggaaactcgcggacatcctcggcgaaaggtagcacattgaagtaaaacgaatcaggctgcgaaaaaggtaaatgatcatcaaatagtcagattcggatagaaatttttctttcagaagataacactttttaacttacagtatcatctcttttagacacatttggagttaggacccccacaaccacattgccttgtcatttttc

SEQ ID NO: 64834 - DNA, 1179 bp, Arabidopsis thaliana landsberg
gttcattttcctttgaaaccaattctgcagtggtttcttctaatcatttttcattcgaatccagttttgtctgttttggatgttgtgtctcagagagttgctggatagttttctctttagagacaatctccaaggatagtttacgaacagcctccgctatctcattgtgtctctcttctttaatagcaagttcttcactgtgttcctcgagtagtaacttgattgattcattgtgaccactccgttcctgaatcagcctttccatgtcctccaactccttaccttttgattcaatccgttgaactgtctccttcaactcgttatttagtgagttaaccaactcaaggtccaaactaagtccgtccaactctttctttttagaaacaagttccgaggaccgtatatcaagcagcttctgctgcaaagctagttcttcttccaccaactcaatcgtcttcccatactctgcaattttatcgagaaccgctgtaagctctttcctctttctttctatttcctctgccaattctctactgcgagtttgactcttttccagatgctccatcactacgttgacctcaccacgatgcctctcaagatcaatatccatctgctctaattgtttccccttcaattccacctcaccctgagtctttattagttctaaggaccgtctctcaaacagcttctcacattctgcaattttatccataaccaatgtgagatctttagtctttctctctatttcctctttcaattttctcctgtgagtttgagtcctacccaaattcttcttctctgcgttgacatcaacacaatatttctcaagatcaatcttcatctggtctaactgcttctcttttaattcaacttcaccctgagtctttataagttccaaggaccgtgtctcaatccgcttatcacaatcaacaattttattcataaccaatgtgagatctttcgtctttctctctatctcttcttccaactctctcctgccattgtcagtcctatgcaaatgctccttctcttccttaacctcaacgcgatatctctcaagatcagtcaccatctgtcttaactcttcccccttcaaatcaagatcaacctgactctttctcaacaactccacaatctcactaagttgacctctctttgacctttcctctacactacact

SEQ ID NO: 64835 - DNA, 517 bp, Arabidopsis thaliana landsberg
cttgtaaacccgaagaaccctaattttacagttctatcgaattggacttcacggtttcaaatttcaacagatctagctcatggacctcggttacatgggcaacaaaaccggattaaagatcgaaaacctagttcacaatcacatcaagagctcggcggtgatcgtgacggagccagatttcaacgctaagatctgtcacttcggaactgcgcagctttgcggcgaaacagatgaaatgtcactggagagagacgaatcgagaaattcaaggcgatctgatagcagagcgatcagattcgaaggagttagaggttacatgtcgccggaatttcaaaatttgggaatcgctactcagaaatcggatgtttacgctttcggagttatgatgctggagcttctctcaggcgaggagccgttgaagtacaggtatgataaagccacaggagatttcgagcggacgtcggtgattgaaacggcgagagcggcgatcgaagatggagatggtgatagagatgga

SEQ ID NO: 64836 - DNA, 304 bp, Arabidopsis thaliana landsberg
acgcctgggcggccaaaggccagaaaccccgggggaaaaagaaaggaccccacaagcgccaaatgcggagggcaaaaggaacacacaggcacagacaggcaagggaagaaggggaaccggaaacaaaaagccaaagaaccgataacctgtaaggaaaaaaaaaaaataccaggaaagaagagagcaaacaaaggaaaccggagaacacatcaaaaaaaggggcggcccaaacaaaaccccaacaaaagaacggacctcgaacagacagacccccaagagaagaccacgggacaaaaaacagggg

SEQ ID NO: 64837 - DNA, 1274 bp, Arabidopsis thaliana landsberg
aaagcagcaggacctgcagagtgaaatgacgtgccaaattccattcagtcatttaccaattgatggtacccttaatagtatatagtccattgtggttttacgattaataatgatccattaccaataacttagacgtcaagtaactgtttaatgtggtctctgtttgtcatacttaatgaatttggtttctccaccacatttaattctggggattagtaaggcatatgaacatttcaattaaagctttcttctcttctctgttgccttggtaccccatcagaattgcttccgacaagagacataaataccacaacaaacatttatctgaccgatcatgaatcaacagatgagaaccaaaattgaacatgatcctctcctttgacacgtgaccttggcacatcatactttctaatgctgggtctctctggtgttatttttttagatccagagacagactagtttccttcaccatcccaaagtaagtagatctactctagaccattgatacaatgtggagttcgttttgttaaaagcccccaatacctttggcattttaatgaattcgcttcttttggggcaaaagaatgtgtatgtaccccggggcctagcctaatcaacccaatatgacttattgggttttcaggccttcttaagtctcaattccaccaaatggtggggatttaagagggcggatcatggatttggtttacgggttgatggcatataagttctcatttgctctctggtacagaaaagctgatgcttccaccctacactcagacgatgaaaactattacaatcaggaatagaccagtttttttttctatctttaagaggagaccaagagggccttaccagccaggatgaacaacaaatctacctctggttagtgcccaatttacctgctcaaacagacacattcagaatctccccaatgatatttcttctgtggcccaacagttaaaatttgcagacttccttaccttgtcggttccaagagaatttgtgacaacatgagtgacatgttcatccacctgggttgtgcagacagcaccaaactgctcagcagtttgccacaggggatgcaagtgcggtttggcttcacccactgggattatccgactaaatacaatcctacaaccagccaatatctttcgttgctcagaagctaaaatatttctcacatcaacttcatctaatgaagtgtgcgagaagaaattttgatgtattttctcaataacctgcacagtgaaacatggatgatgctggatcca

SEQ ID NO: 64838 - DNA, 1439 bp, Arabidopsis thaliana landsberg
taattaagaatatagtaaattactttatccaacgaacattattaagatttcttagttaaaagatgatgtggggtttaatgttattatattataatttgacaaaaaaaaaagttttaaaattctactttgctaacagagaaactcttgatggatattaatattttccatgggaatgacattttttttatttcttgatggatattaatattttccaaatctatacataactccatataacaattgctctacagttactattttaaaaaagaaaatttataactatatattataacagcaaatatgtatgttttaaaatgaatttttgttaatttttattttggtatataaatgtgagtatttatttttcttttttgttaatatatatcaaactgtttttgaaaaaatgttgtgcatatcacttttacaaagatgaggacacacgatgacaacataagcatcggacagaaaataagtataatcaacttgcttcagtacgctagatttagcagaagcagaaaataccataaccaaatagtactgaggaaggttttttttcgttttgagaggttctagtttggtccatgcccttgcgagtttctttgaaaaagtttgctggatgttgcgaatgcgaaatataaccaaaactagtttggattttctgttggtatttttccacaaaatataaatattgagaaataaaatgaaattcatatgtcgcaacttaatctcttaacaacactatattttagtcgatcgagtccttttttatgtagtggaaaaagatctatacaaatcccacgggtaaattacgtttaaaacatatatcaaagtttacattaaaaaattaggttcaacatgtccacaagcaagttcaatatccaaaaagatcataatcattctcctataaccttaactcaatctatttttttaatttataataattaattatacgattagaattgtgacattgatattgcaatttgactatgaccagactcaccagacaataatcgacaagtgtccacctcacagattcgattctgttaattctttcttatgatcctttaattaaatgtatgaagaactaaaccatatctttgattgaagaattggtcactatgcgtatcagatatgttacatcttattagtcaccaaatctctagaatcttttgctttcatacctgtagctaaaatatcaatggcaatgacaattaattaagcttacaactggatcgtgttaaaaaaaaaaaaacatagaagctcgcaattggattccctctaaactatcgtaagtttttgacatgataaagcttaccgttaacttctcaagagtagtttttgattgatttccgaaaactgagcagcggatactccactttgcgtttggaagcttcttaaaagctaaatccgattcttcagtctagtaacaaagttagtta

SEQ ID NO: 64839 - DNA, 468 bp, Arabidopsis thaliana landsberg
cctttcctcgaaatggatccggcccaacactacttatgctttcgggaccagcttcacgttctcaaagttcagaagtgtaagcgagaccggcttcacacaattctttcgcctttgatgtttctttcttgcccagaaagtattccgccattaatattttgatctcgggaaggccaagatcatcgtggatcacatgtccagcggagacggccttctgaaaatagaaaagcgcgtcgtatatcgtttgatctccatgtatagggatcaaattccgctttgagaatgcaaatctcagggatgtcatttaccggaggtgcatatcacatataacgagcttatacgtctaaccctaccacaaggatggcctggtgagtgttcctcctttgtaaccggagtctctcacatgcggtcgacacaacattgaaagatttgacaacaccggcgcacatagtgttcgcgcttacaatgaga

SEQ ID NO: 64840 - DNA, 1332 bp, Arabidopsis thaliana landsberg
  unsure (1)..(1332): unsure at all n locations
aagagcttccgcatggtttttataataaaattatatatttgataaaaacatatttgtttaactgttatcacttaaacaatgaaaagtgtttgtataattacatttgatttctaatatagttgggttttagactggttgaaagttcattccttttgcattgcaacgggttatactactcccaagtaaaatgctgggcctgggctgaatgaccgaatgctatcttatatgtactacaattattattttttctaaaaatttaaaactagaatatcatttatcaaaaaagtaaaaaaatatgaaaacctatacaaagccaaaaccaaaaaaagaaacacacacacacacctacacgtttctttatattcgttcgtacatttgactagtcggaaaactacacgttcagtatgctgacttttctaataaattaaatcaagtggacggtaatattcaatacgtgcgtgtctcactgttttttttttttttttttttggctccactagtttgattaatacgtacgtacctaaagttaggcagactgagttgtttggtaaatcaactaataatatcttaacatacaataaacctaatatatttataacttgtagtatcatatttttgtgaagattctaccgtagaggtttggaccgggtggtgcaattcttcctagttactttgtgtgaaaaggaaaactacgaatagtgatggtaactgcacaaaacattaagcagcctgcataaagtatatttatttgtcgtaacgattacaattgtaattttgtaacagaaagaaacattataattggcgcaaaatttattaaaccaaaaaaaaaaaaaaaaaatggtgcaaaactttaaaaaagtaaagtatttctaatttgatgatatataagatatagtactctccagatctctccatttattgtcaattaagtaaaattttaagttgaaaacttatcttccgtaaataaacaaatgtgattggtacgaattaataaagcaagccaaaaaaatacatgcacaacttttaattgttaccaagtgacagtacgtacagtagttatgtggtcaactggtcattgctatgttgatgggggacatattacttttgatttctgctgaacacatttctgtggttattagaatgtttacatagcaatcatatataatctgtggacttaaaacttttatcaaatttatttatttatttaaattcatcggctttagttttggtttgattgaggtctctcatataccacantcatatatatatatatatatatatatatatatatatatccaaaaatatagtattggatatatcataaaaataaat

SEQ ID NO: 64841 - DNA, 421 bp, Arabidopsis thaliana landsberg
taaccgcgttgccttggagggcaacaggaaggtgaaggtccagcttctctcgggcgagattcagaggatgtcgcgcggtactctggcccgcccgatggtgcaggcggatgcgttgcggatcaccgaaatgtatcccgtgccggctgctatgacggcgcgttggatcggagatgatccagcagatcggacatccgtgttcacctgatcttgcgtatcaccgagggtgagatgaccggcgtgaagtcggtcgagttcatcggccaccatgccttctagtactattgattggaggacggtatcaggacgcatgaggcgatactggctgagctttgtgttcttcggagacggctacgatccggatcgcgtagaggccgaccgcgatctggttcggcgtttgtatctgaagaatggctatgcctac

SEQ ID NO: 64842 - DNA, 569 bp, Arabidopsis thaliana landsberg
cgtgattttttttctctctagctgtttcatgtttacattgccttttacatagtatcttttttgttctggtggatattattaacggattaatggattgtagcagcgcttacttccacgttcttttagcaaatctatgatcaatagtaaaagcatgaacaaaatatacaactatataaaatttgactcagcaatcagagcaccaccccagcatgagataacgtttgcgaatcagggcatatctttaaaaaagaagtaacctgacttgttcaagcaaaccgatttatgttttgtatttaaacacctcactgaatatcagattaggtcacgaccatcccttaacctaacttaaaactaaactgctaaaaaaaattagtactaagttagtgtagaccatcccttcacctagtttaatatgattcgatcaatgtcatgagttttcttaccttggtttgtcagattgagttgattttggttcataataacttgacgggttcattggattttatatccccggtaacctaaccccctacctatatatttcccccactaaacttattaaccggaataaa

SEQ ID NO: 64843 - DNA, 512 bp, Arabidopsis thaliana landsberg
  unsure (1)..(512): unsure at all n locations
nnnnnnnnnnnnnnnnnnnnnnnnnnnnnnnnnnnnnnnnnnnnnnnnnnnnnnnnnnnnnnnnnnnnnnnnnnnnnnnnnnnnnnnnnnnnnnnnnnnnnnnnnnnnnnnnnnnnnnnnnnnnnnnnnnnnnnnnnnnnnnnnnnnnnnnnnnnnnnnnnnnnnnnnnnnnnnnnnnnnnnnnnnnnnnnnnnnnnnnnnnnnnnnnnnnnnnnnnnnnnnnnnnnnnnnnnnnnnnnnnnnnnnnnnnnnnnnnnnnnnnnnnnnnnnnnnnnnnnnnnnnnnnnnnnnnnnnnnnnnnnnnnnnnnnnnnnnnnnnnnnnnnnnnnnnnnnnnnnnnnnnnnnnnnnnnnnnnnnnnnnnnnnnnnnnnnnnnnnnnnnnnnnnnnnnnnnnnnnnnnnnnnnnnnnnnnnnnnnncccaaatccagacctataagcacttattagggcaccttcgagaactgggctatatgacggacccaaaaagacctgtacatagagcacaccgga

SEQ ID NO: 64844 - DNA, 1515 bp, Arabidopsis thaliana landsberg
ttcacaggtcaagtgccagagtctgtgtctttggcttctgcattggagcaagttgagatagtcaacaattccttttctggtgaaatcccacatggtcttggattggttaagagcttgtataagttttctgcttcacaaaaccggtttagtggagagttaccgccgaatttttgcgactcaacctgtccttagtattgtaaacatctctcacaataggctcttaggaaagatcccagaactgaaaaactgcaagaagcttgtctctttgtctctagcaggcaatgcattcaccggagaaatcccgccatcacttgctgatttacatgttctgacctatcttgatctatctgataatagtcttactggtttgatccctcaaggcttacagaacctaaagcttgctctttttaacgtgtcattcaatggattatcaggtgaggtacctcactctctggtctccgggttaccagcttcctttctgcaaggaaatcctgagctttgtggacccggtttacccaattcttgctcctctgatcggtctaacttccataaaaaaggtggtaaagcgttggtgttatctttgatatgtttagcacttgctattgccactttccatgcggtgttatatcgttattctcgaaagaaagtgcaattcaagagtacttggcgctcggagttttattttcccctcaagttaactgagcatgagttgatgaaagtggtgaatgaaagttgtccttccggaagtgaagtatacgttctcagtttatctagtggggagttattagctgtgaagaagcttgtgaattctaagaatatatcctcgaaatctctgaaagctcaagtgagaaccatagcaaagatacggcataagaacattactcgaattcttgggttttgcttcaaagacgagatgatcttcttgatctatgaattcacacaaaatggtagcttacatgatatgctatcgagagctggcgaccaactgccgtggagtattaggttgaagatagcactaggtgttgctcatgcattggcttacattagcaaagactatgtgccacacttactccataggaacctaaaatcagcaaacattttcttggacaaagatttcgaacccaagctctctgattttgctcttgaccatatcgttggagaaactgcttttcagtctctggtacatgcaaacaccaactcctgctatactgcaccaggtaaatatctaggacgactgaatttttctgtacatgcaaacctttagtgaaatttttttccttgatgtgattcagaaaaccattacagcaagaaagcaacagaagatatggatgtttacagttttggtgttgtattactagaacttgtaacgggacaaagcgcagagaaagcagaagaaggctcttctggggagtcccttgacatagtgaagcaggtcaggaggaagataaacctgacagatggagctgcacaagttcttgaccaaagatcttgttcgaatcttgcaatcagacatgc

SEQ ID NO: 64845 - DNA, 658 bp, Arabidopsis thaliana landsberg
acaactcatttttggtttttacaaaatagctaaagtgtcaaacatcatgtttacaagatttagctctttatcactaacctgaaccaatccacctaacttttagaataagtggtgttgggtttatgtttatgttgaagcagtaaagcttttatcacttttttgtgttaaataaagtgtttttttttggctttattgattttaagatcagattaaataatcggttacataatttcagagttaggtacattaacaatagaatgagagatgaatatcccaaaataagcttatagctatgtctaaaatgtttcaggccttcttgttcttggccatggcagcactgatatcagatgcagtgtgacagcgaaggacgagatcagagagtgagagcttgagatcaatggtgagtttctggaacaccttagataagagtaacacatctgacaaggccctgtgagcatcaccctcccttgtaagactatagtagtcagcaagcgcttccaacgatgaacttagattaaccgttggctctgcaaaattagaagaataacgcatttctagttatagccaactaagatcatggtgatacaaagcgagaccatacaggcttaatttgcatctcagtgaaatagaagcagatggattttagtatgttacctac

SEQ ID NO: 64846 - DNA, 164 bp, Arabidopsis thaliana landsberg
gccgacgagtgcatgtttttggtgagctgatatgtctcgactcttgacttgagaaggtccctcatctcattttcacctgcgtacgccaaaaaactctcgacttgaagcgcctccgacttcattcatagacggaccaacccgaactattgctatgcttatctgac

SEQ ID NO: 64847 - DNA, 1746 bp, Arabidopsis thaliana landsberg
atttggcgtctttgcactgtcctgctaactgctgcagtacatgtgcgttaaacgagaatctgtgttgctataaatccagatacattatctcggccattaaacgtgaacaaccaaacaaaagcaaagaaaaaagatggttaccaatctaaaccagttgctgctagttggctcctttatgaaagagtgaataaaaaaattggagtccggaggaagaatgcatagaatcaacaatgaaaatggttaattgtctaactaagttgagaaatatcaacctcatcaggaatcttgaaggtatccgcagcaccaaactttctaaattcttcgccttcagccactgagtcgtcttcattatcatcataatcttctgcaccatcctgatggcggggtgttgaagggtcaaacacacttctggaccggcagtcatgagttgcaagcatgttcacttggccaaggtgtgaaatctctaccatcacagtttcatcatccagtggcagtggctgtttccagggctccccatccatcctcatgaatgtatggtcggttgcacctttgtgaaattcgaagcgaatacgatttgcctaatcacagaagttatcatttgtatgcactcaatcatcacctctttatttgtgtgtatcgttatcatttccaacttgtacaattcttacctgggcaagtcgtgtcccatgtccattgggagcgagcagaacaagaccatgccaagcatttctaaacccaacaacctcaatgaggccatcatctacaaatggtggagtcaagcctctctgtttgtgtcacaacaaagaaaaatgcatattattttaccaggcgaagataaatacgcaatccagtatgtatcagaaacttatgtagcactcaggcaatgtcaagagttcgtaaaacctacatcacgttgtttcctgggatttggtgtgccccaaggatttaatcctcccgaaaagctgggcagattcagacatacaatggacctgatgctgcaagagtagaaacaaatgtccgaattggagtagttcatattcgatcatgtaaccattgctttgttacatttgaaatgtaaccatatatagttaaaggttacaaacagagaaagatcccaagactatccaacatgtccatcctgaactgtgtccaatgggatccctcaggattaataaaaattacctatgtggtatgtggaggtcctgccactggccatttctagttgcaatcttaaccttggcaagctgagctatattcctgcaggggaagccatagagctttccttaacattgtgatagagagcaaaatcatatataaacagaaattaaattacagccaaaagacaggaaatgtaagaaatgtgaaccacttaaccgagaatataaaaccagcataagattacatgtttcgatattgatgttggagagtatttcaaatttgatgttgtttagcacacaacgagacccaagcagtaaaaagaacaaatgctgaaaataatgatgggtaccaaatttctaattactgacactagaacagtatactaaagacaaaagataaggcagtagtgttgcagagcattataatcattcatgtccaagaatctcagaaagagaaaaacagtgaatgagaatgagaagttgagggggacctgagactcagaaacagaaaacaatgaaacgaaaagtatgtctacatcttacacaccgtgaagcagggtggaaaagagaggcacaaaaccatccttgc

SEQ ID NO: 64848 - DNA, 610 bp, Arabidopsis thaliana landsberg
atataagatacaatggttttggagcttttttttaataaacattattgggtttttttatctgaagcctaagaaatgttatgttcggcgcttaaatcacacatgtcataataatttaactaaggtctgagatccttggattatcaaacaatatattttatttcaaagtgaaagaaagaaaattaaatgttattcaatatagatgtgctcaggatcttgatttcaagataatgcggacatagctacagttcctatatagctcgcattgatactcctggccaaggccaagtttgaagagccagtatggaataggctaaccatcccaaaaacatgtaaaaaatcctggcctttctttttgaaaaataggctctttgtaataacaaatggccaaactacaaagagcctattggacctagaaagcattcatttattagaggcccatagtgattagtttttattgggcctagaggaatttagaaatatgtatgaagtggatctaaaagaggtaaacaacgacgatgtactattcttcttaaaaattaggctacagacaaattcttgtaatttcagctctctccaaactgttccatggcggaagggactattcaagaga

SEQ ID NO: 64849 - DNA, 867 bp, Arabidopsis thaliana landsberg
tgtgactaaaaaatcttgttagattaaaaatgaaagagaaaagttgttttagttcatttatcttagttttcttccaagcatgtgaaaatgaaaggaaaaaaaattcaatccatattgaaatatactgtccaaaaagtgttttgtcttatataatattgtccaaagatgaaaagtcttccttctttgtgtacatgaactgagagtaaattacaataaaataaattaatttatttcttttactctcattactctaaaccttttatttttcttcattcttaattactctacattattctaacacttttaagctcaagtttcaccaatcataaccttagtaatcttatggtacaaatagttgtctataaaaaattaaggtaaaataaaattagtaaaataaatagaagaaattaattttcaattttttcttcgctatttagtggagaaaattttctttgataattttcttattttatttctctaaccaatgcatgtagaggtagaattgtttttttctctagaatgtttcctctaaaattacctgttgtgaccatatagttttttcatcatgaaaataaagacctttggttgtcgaataaatctcaaaattagcatgcacatgtgtcatcttaaaactattttccattctgttatccaatccattaaacactactaaatgtgttactccatctatatacccaattttctatgttcaacaatcacttatagttttacaaaacataacattatctaaaatgattaccttttgatgtcaaaaacataaaataagaggagtccattgctttatgcataaatatattactttcattttgacatgtggtattaaaataacatacattaaattttaat

SEQ ID NO: 64850 - DNA, 409 bp, Arabidopsis thaliana landsberg
tacataactaaaatttggcgtatcttggggtgacgatgttcctccccaagaccctatcaaagtaccttcataattaatctgtggcgataaactgaactgagcaaacatagttggtggagctactattgcaggtatattgtttttcgactttactcccatgccgcacctacatcacacatacacaataacacatgcgtgggtgttggtatatatgttatcgctccattcaagttaaattctaaaaaacaactttttaccacatgagtgttgcaatatgatctgtttgatttactaaatcagctacctgatgagagcaatggccgtagctacaagggcgccaccggacgaaaaccctgcggctaagacagttgaggatatagagggtggtaccagaatcaggctgaatttg

SEQ ID NO: 64851 - DNA, 486 bp, Arabidopsis thaliana landsberg
taacactgagtgttgccttgattatagaaaatgttttttctgacgtatataacgagaaaggaattgaagatatacataattagtggagcaagcatgccagctgaaaatcgaagagtgcttagcgatgcgttgcgtattcgatatgcattatgttcagaggatcgatggaattgacacatttgacagctccttcatgtctctgtctatcactcgtcaccatttactaataactgttttcttcagacgtttcctttctttagatccctcctcttaccgtttctgcttctctgtctctctattttcttttttttcttcatatttaattattgagtgtttgaaaaactttttgggggttttcacattttcatgttttattggtcctttttcgtttttctaaaaagtgatcatctttgctatttggtctcatcgaatggcgctttttacctacaacttattttaagccaatatccaaataaacaacactta

SEQ ID NO: 64852 - DNA, 577 bp, Arabidopsis thaliana landsberg
tataaaccaaaaaaattctaattgcatgcatcatccgaatctaatcaaaatcaatacctcaaaatccgaccgtcttcatataatggaaggcttacggcggatcattatgatgattgatgaagaggatgatgatctttttgggaggaaataatattagtatatagcataatatttcttcaataacgtgttgttcgaattaatttaatagtataagcaaaagatactcgttaaaagcttgtatgtctgcaatttcgattcgaaagtcttttcaatgaattatatgattttccaatataattcaatcatttgatgaattctttaatccgaagtaccttatcggcagcttcgttattacatgatatcatacaataaaatcaagtagccctattttttattgtgtttgattatgggatatgtcttgtcgatctttattttaaccaacataatttttttgttaaccgattaaccaacataaattgtctagctacttcatgcttcttggtggttcctgcatgaacaaggcattgtacaaagagattccctcgtcaaatgcttaattatattaaaaaaaaaaaaa

SEQ ID NO: 64853 - DNA, 672 bp, Arabidopsis thaliana landsberg
  unsure (1)..(672): unsure at all n locations
tgacggaaacaatatcttagcatccctatctcctatcggctctgcctgagccctgccactgatttgacctgctgaaaaaacaaatagaaaagaaaattccaagaggtcatacaaagctacatcaaattataatcctgaaaaaatacgcgctcaggatgtggataaataactgataaataatataaagcaaaaaaggccgcccgacgggatggtctcttatgacaatttcttatgacggcttttactatttacctgaaaaccgccagggtgtaagcggcagttttgccctttccttcaacaggctcaggaacgacatttttggtgatctctttgtttgccggtttttctgactgattgatcttaattgcgtgaaggacggtgatgcaggcgatttcaagaaccaacacgagcacagtaaggggtttttcctttcttcatggttaaaattggatttattctacgagtaaggtcagattttccaaccggacgacgattaccattttccgcggcaaaagtacacccggtagattcacaaacgcaagatagcctgtgtttattttaccggcaagagtagattntcttgccgtttaaccgtgagtttacgataaatataaagctaatcatcacaataatagcatcattattatataataaatgatcttaaccggaaac

SEQ ID NO: 64854 - DNA, 449 bp, Arabidopsis thaliana landsberg
  unsure (1)..(449): unsure at all n locations
ttactgagttgnctcgaaccaccgcgcagcagcacgagactccaacggtaacccctctcgattttaatattactaaccagaagcaccaaactcatactccagatcaatttcagacactncaaacaccagcggcnccatctccatatcttcattggactctgtctctgtgtccgtctccatctccatatctctttttaaaatctccactggacacagtaacacagaaacagagagaattcactggtgggtttttaacgtcactcaccaacaagaaaccctaatttatgcgtgattctaacatcattggatttgatgagtgaacagaaggagaagaagaattgcagagaaggaaataaacgtcactgttttatttctccagagcgacaaaacggcaaatttatttattttttccttattcagaaccccaaacgacaccgtagaagcgtgca

SEQ ID NO: 64855 - DNA, 520 bp, Arabidopsis thaliana landsberg
  unsure (1)..(520): unsure at all n locations
ggtactgcgggttcatcgcagccacatgcatggccacacccttggccagctcctcggagccgcctttcagggccaccagcacgccgatgcggccgccgtggatgtagctgccgatcacgccgtcggtctcgacgcgcgcatgcggcgcacttcaatctctcgccgnnnnnnnnnnnnnnnnnnttggcgccttcctcgacgttgctggcgcccgggaacgcggcggccttcagcgcgtcgatgtcggcggcgccagattccagcgccacggtggcgacggtgtcgctgaacttgacgaagtccgggttcttggtgacgaagtcggtctcgcagttgacttccaccagcaccgtctttccggcggactgggcggtcacgatgcggccttcggcggcgacgcggtcggccttcttgtcggccttggccaggccgttcttgcgcagccactcgatggcgacgtcgatgtcaccgttgttctcgaacagggccttcttgcattccatcatgccggcgccggacc

SEQ ID NO: 64856 - DNA, 106 bp, Arabidopsis thaliana landsberg
  unsure (1)..(106): unsure at all n locations
ggggagatnggcgaaggctgaaccaaaggaatgcggaagggaccccaggagtggagctgcggctaattgaccaacaggggaaaccaccaaggccagacatagaagg

SEQ ID NO: 64857 - DNA, 723 bp, Arabidopsis thaliana landsberg
ttttattataagcttagtttgtgtaaaatccgaatttattgtggtttaagttgcatattccaaattagtttgtgcacagacttgccttgcatagttgcataacaacaattaaacattttctcacatcccaaacatgatgtaaaatatgattctactgataaaatgtgaaacgagacatttaaattagttcttacacaaatatatatatatatacaatataaatgtgtatatatttacataattctttttttgagacaaaataatccatactttcacccaaaaagaacatcttttaagagtttataaaaggtacaatcattttagtttttttttttttttaacatccactcttttgattttcagaacatttgctgcggcatgtagaatcattctttctatttacaaaaaaatatatcccttaacattttgtgttgcaagaagaatattattcatgagatcactcatacactattgttcattcatatgcaattacagctacaatgcttgatgtaatgacagaaataaaattacatggtaggagtacgtctaaattctaaaatttaaaagaaagtaaacatgacgatggctgttatgaagctgataatctttaaaactcacttatacctatattagttataattaatcaatatttgattaaaactttagataacaattttatttttttaaactccatatctttgcagaaaaactgaaaagataatt

SEQ ID NO: 64858 - DNA, 553 bp, Arabidopsis thaliana landsberg
  unsure (1)..(553): unsure at all n locations
aaaaatttcgagtatgaaacatattttctaaatggttcgcctttctcttcttggaattgtttgcaatgaattatggtccaagataactcaaaacatatatcctaagtggagttttcacgttattttaatttgtccatatcctaaattttcacatatataacctgccccctttttttttttgggggccccttttttcccccccaagggctaaaccggcttttttttcccccgttggtttaacccccttttcctccctttggggaaaaaaaaaattggtggctatacacaatttttgccacccctcctccaaaaaaaaaaaaaaaaaggggccccaaatatgtttaaaaaaattttttatatatttttcctcttctttccacccaactaataattttttggggttgaaaaaaaaaaaaaaaataaaatttcttctattatccccgcgcgggggggggggtggggggtgtattcctccacaatatatttttcccccccccccggnggggctctctctccttcgtgtgttttcttttctaaaaaaaaaaaaaaaaaa

SEQ ID NO: 64859 - DNA, 800 bp, Arabidopsis thaliana landsberg
tgcatcaatcctgactgttgcgtgacgacggaacagaaattcttcaacgagcagaccgccgacgaattgctcggatcaaaccaaagtgctgtcggcgtcccgccgacaggtcaaatatcggatagtctttccggcaagatgccgaaagcacgttatgatttcgtcctcgatgcgattgacaacacctcaaacaaggttctgttgctcgtgcgttgccgcgaaaagaaactaccggtcatcgcctgcggtggcgcgggcggacgccgcgagctgacttctgtgcgaaccggcgatctctcgaaagccagccacgacaagctgctctccgaagtgcgacggcgcttgcggaaggaacaccaatttcctgccgaaaattcagcgatgggaattgagtgtgtttattccgtggagaaaacttattttccgcagccagacggttcggtttgtgaaatgcgcaacgatacggaagatggcgcacggttgaattgcaacggcggcctcggctcggcgacgtttgtgaccggcgcgttcggcttcgcggcggcagggttgattgtgcggaaaatcgcggagtgtggatagcctgtccgcgttccggcgattacaatccaccgaacacacgcagaaaattttcttccacccgcacggccaacggtttcatgttttcgccaaggaattctgccaaacctgaatagaccacgggcagattggctggatggtttaacgggtttgcatcatcaagtggcagtggatgttaaatcttttcatcgggtaaatgctgatcgggcgcgtcgggttta

SEQ ID NO: 64860 - DNA, 730 bp, Arabidopsis thaliana landsberg
ggagaaagcacaacgaaatctgaggaatctatgtcgttatgtcttcagattcagatgacaccttctctttcatttgtcttctctcatcttctcacttttctaatatattatttcttatgtgtttatttttctctgtaatgtttgacaagaaaaaaggttaattcataaatatatgaagagatatattttatttgtctaaaatctaaaattcacattatttaggaaagtagattacaaatgtttaattttgatgtgttgtgttccaaaaacatttatagaaaaatataacttcgccacataaatgatggttcgataaatcaaatgcaaaaaacaaaagaatagtagttatatagtgcataacaagcgataaattatcacggtgaaaaaatgtttatataaattataattggattatctaaagaattactgaaaaatagaattgaagattttaattaatcgaataaagtatgaataaacaagaagtaaaacattccaatttcgtagatcgcggaagaaatatctcgtggtaagtcatggtaattaaatcgaaatcttggtaagtctctctgaatatttttactggctggtcctttatttgtccccttttctttttatagagaacgcctctgatgtttcccttttaatatttgagatagaaatcaatctttgcatattccttttgaatatttattcctttagaaaaatcctaaaaaagggattccgattttat

SEQ ID NO: 64861 - DNA, 513 bp, Arabidopsis thaliana landsberg
ctcctgaaaagaggtttaaaatcactttaataatgtgcttaacccccttaggatgctactgggattaagtgtctaatcattccatctaatcatatacttatctagtggttggattttatcatcgacgtggcacacccaattcacaactcaacaatcctgaatgattggttgtttgaaaataaaataaaataaccatccaatttggaagggtttattgaaatttttgttataacacagctcacatttgttttgtgtaatagtaaatattacagtgaagttaggattccgccagagaaagcttgcaaacaaaaatctataaatgccaagcaaacttagttatttctctctttattttcacatttttttgtcttttcttttgtcaactttagttatttgtctcttatgttgggtgagatttttcggttaaatagtgaaactaattatttggagaagacaaagcctaatgtgggtacagtaaggacaaatattcagagttaaagtaccaatatcatt

SEQ ID NO: 64862 - DNA, 202 bp, Arabidopsis thaliana landsberg
tcttcaatgctcatgaatggtctacgtccttgccattatagagtcagcgtgtggtcatcccgtgcttcggtcaactggtttcctcttagttctctcttcacctacacacagaacaaaaatactttatgaaaaactggtctcttcttctctttatcttccaaggtttcagcatgtcccttaccaaatatgttactacttggta

SEQ ID NO: 64863 - DNA, 125 bp, Arabidopsis thaliana landsberg
ttgaaaactaaatataaatcaatctaaagagtctttaaaaaaagagagacaacgaaatgcgaaatgagacggtatattaattgggtcttcgtggctaccttgtcgtaaatgcaattttataaact

SEQ ID NO: 64864 - DNA, 387 bp, Arabidopsis thaliana landsberg
  unsure (1)..(387): unsure at all n locations
aaaaactaaagaaaaaagacggacccaaccccccggcttagggcgaaagattttacaaacagggtgatcccccagacggaaaagacacattccaggggaccgagcgcaaaacacacaggcgcaccgaagaaaagagaaccacggaggggggcgcccnaaacagananacacgaccaagaaggaccggagacacgaaaggaaaggacccgaaaggagaaggaaggcaggaacgccgccaggcggccaccaaagaagacacccgacccgagaggaccaacaaaggcaacggccaaccagagccaaagacacagaagggggaagccaccaaacccaaaaacggacaaagagangnacccgaagcggccgcggcacagggggcaaaacacc

SEQ ID NO: 64865 - DNA, 483 bp, Arabidopsis thaliana landsberg
atatatttatacatgacttcgcatgtgttgccctttgtatgagatcaaagcctctgaccataatatattattaaaacccctattaaaaacaagaaaaacaaaaattctttgaccgcaaaaccctcatgttctactcgctggaactaaaaaccttgtgagattgatgctgaaacattattactttctaatttcaaacagttaccaaagtcatatccataccaattgtgtttgctttctttagttttggtgtagggttgtggaggtgccttcctagccacccaacctatatactttggtcttattcccctcaaacatcgacttctaatgattctgccccctttacattttgtatttaacacaattcatcattattaattttggttcttaatgtatgagactctcgaatctatttgctatcaaaaatttttttactcacatattctcatttaatatttactttaagcctactgtgtattttaaatc

SEQ ID NO: 64866 - DNA, 1142 bp, Arabidopsis thaliana landsberg
tttcaaaccggagattcattgcgactttgtgagaaaatgaactagagagtttactacaaagtgtgtccactatgcagttagctacgaaagcgcttacagacttacagtacactgaacttcaactttctgctatcatcatctcaggttatattgctacaccagcagttccagaaacaacgcttcttgtttgttggtgaggctgagttcctcaaaggttaaggcaccgtcttgaatgctgaaagcacgtcgaggatatggtctaacctgtttaccaaaaacaattacaccatttctaaagcttgtaatatcagaaaatataaaccaaaatgagggggatggcaaaactcgaatccttagaaatagcaatgaaataatgcatgagaatatttatcgcacatcacagggcttaccactctatatgtgccaggtttgactaatccagcagcatctatgaagtcaaaaaggtactgcaattcaagaaacaactgttagggaagcttgaatacgtaaaaattgattacctcgctaatcacttgagagttgagactcacgaacttcaccttaagcttgtctgatttgagaaagcgacgaccatgacggctgctatctggcattctaacaagtagagtgatggcatcttcattttcaccagacggctcaatgggaagcgctgcctttctctcaggttcctgccacaagtgaggtacccaaaacagtgaaaatgagaacaaacaataaaattgacaaaacaaaggaatatcagctttcaccggacagggcattacaaacccaaaataactaacggatacctaagatatggatttcttctagtcatggaatcaatgttaatcacatcttacaaccattttgctttaacattcactatgatcatatattgactgatagactgagcatatagaatttgttgatggttgaaaatatacgggatcactctgattacaagccctatttttgtacatagagttctacctatgggcttatggaagaggagttgttcacagcctggactatgttcatgccaactttcacgttccatttaatgaatgcctccaaagaaaatcagtattacctctctaacaacccctttgaatctgagattgtgacctccttggtgaattccc

SEQ ID NO: 64867 - DNA, 731 bp, Arabidopsis thaliana landsberg
taactgttggggggacagccacacccgggtttcctggtttttttggggccacattttttttgatatgcaacataaaatctcttttactggtaggggattttctttttttggaacacctacaatactattgttaaattgctagcggtaactttagcaattataatagttaaaatgatgaatttaactagctaaagcctttgatcaaaaaaaacaaaaaaagctaaagcctaaaagtattttagaaacatgtattttgcttaaaatgaggtatggatgaacataagaatttttaacaaatgggaaggcccaattatgctttcgatcaaatcatatttattttgacatttaatccaattattattgtatagaaatgtgagttgcaacacaaagaaaatagttcactttaaaataaagaattttgtcaataaattaaagacaaaaacaaactacaacaatttgtagcgatgtggcgaaaaagtttgatcactttattataagaggtcagtttttttttcttaataagtggtatgttgatatatagttttttttttctttcacataattcaggttactaaaagttttatgaacagttttgctgtcaaaaaaaaaagttacattaaagttttatctagctgtcgtaattttattggtgtgaactactttttgaaggtagcataaaatctacagagaaaatttggtgggcaatcactaaatgatctttaagttcaatc

SEQ ID NO: 64868 - DNA, 319 bp, Arabidopsis thaliana landsberg
ttgctcttctctttagttcttctggatcgcgctctctctctctctcttcattgattgagtcatcatctccttgtatctagaagtggtccgaaccaaaaccaagccagagaatgaatctctcaggggatcgaacaactctaaagcgtcactcgtcgctttcaacacttgtggctcatttctttggcatcttagctgttgttctgatgctaatttggcttctccactaccgtgaaggcatcgagtatggctccgacgaccccctaaaggtattaaatggaagactgaaatttatgctcttcctatttcttagtgggtagac

SEQ ID NO: 64869 - DNA, 514 bp, Arabidopsis thaliana landsberg
  unsure (1)..(514): unsure at all n locations
ggaacatttcctcctcacatctttgcaagattgaaacttctctcccacgtgttaagttattgattcagaaaatagatattctagcacaacatagaggaaagaagagaagcananagatagaagacactaggggtcttgtcatttttggggataaataagtatcatggatctcttgttaacaataagttgttaatggcaatgccattgcgtatagattattctacatattattgcgtatagtgagtatatttttttttacatgaattttgtttatttgataaatatacatgcaatgcaacagtaatatttgtctacttttatactttatgtcaacaacatatatacaacgccgccggatcctgataattttaatatttggcatagcaatgtggcacatacactcttaatctcttatgatttggcgtttgaacatttaattggaggtttgaacccatgttcattcattcaattttatacccaatgtttgaaggctcatttttgtttcttctgataa

SEQ ID NO: 64870 - DNA, 193 bp, Arabidopsis thaliana landsberg
cactgcaaccgcaaagcccatgatgtgacagaatgctttctcagccatggatacccagattagtggctagaacaaaaacgcaaagatgaccaatcttctacgcatggtcgaggctccaatggacgtggtcgtggtggttctagtccgccaacatctgcttctccttctcgtggtcgtggtaaggctaacaatg

SEQ ID NO: 64871 - DNA, 436 bp, Arabidopsis thaliana landsberg
gaatcccgttcttgtttaagataagagtcgcctatctttcttagattcctcacactatagggaaagttaataaggtgagtctattattttactagtagacgggtgaccaagtgtaggtagggtacttcacttggtatcatgcgcaaaactgttgaaatttttaggagagttaacaggaaccacaagaatggaacctaaaccaacatcagtccaatttaagatacttggttttgtacggatgaattttaatagcaggtctccgacttggttcatacaacatgatggttattgttctatgggtttgattggttacaccatttgacgcgcttggatcctaagtcgtaccgcttctttgattaccaatcgaacatgattgtacttattgtttgaagacgcgggttagacaaatggctgccttgtgtacaaccatatggat

SEQ ID NO: 64872 - DNA, 803 bp, Arabidopsis thaliana landsberg
taagaaattggaagagtttgttaccaaagatgaggagctcagcaaggaggaagtgtctgaggatagaataccttcttgtctcttgtcaggatcactctccatggctctttgctgtatcctcttggaaaagcatatagcatcatgataggtttcttgaagctatatatagtacaaactattaggatttgtttgcataagttctggcagtgatcttgaagcttagctttctctctagactgggttaagtaaggaacattttaggttgacatgtttgttctcagctaaacctatagcatgtctaaggccatcaatgttatctggtaatatatgtatttgattttcagtcttcacattttgttgttgacttaatttatggctctagatatacagagggttttccgttctggacatcttcatccccagcctcgggtgagtgttcagtaggatatatgtatcaatcagttgtcttggataaaacttttcatgttgattgctttgtatgaatcttcagcttaaagtattaatgagaatatagactcctttttcttatgtgttatctgttctatcgtatacccccaaaatacagaactgattgtgctattgacgtttatatgaaatacagattttatgcttgcaaggttccccagatggcccggaacagtatgtttcttccttcattttttttctacttgcaagattttgtcttgtttgtctggtctcattaaaaggttttgtcattctttcaggtatgttgctgttatgaactcaatcttctctgcccaacgcttggtggaaatcttcat

SEQ ID NO: 64873 - DNA, 596 bp, Arabidopsis thaliana landsberg
  unsure (1)..(596): unsure at all n locations
cgccaattgacataagatatacaattgtatgttgaaatgttattctgttcaaaccttaaaatcataaattggagtttgaatggactatgtttgatgacctgttgcaataaacttactagtaatagaagtaaacaacatttttttaccaaataggatttcaaacatagttcaaaagtatatctaaatattaatggagtaaacatatttaatagtcaaataagaatgttacagtgacatagataaaaaaaatactcttaacatcaataatcaagcaattaaatacgaataatattgtgatttttgataaattaggtaaaatcaaaatataacaagtaccaattacaaatattaccgtgattttgatagatagaaagattatcaaaaatacttattaaaataccaaatacaaatattaccgtgattttgatagacgaaaacatgataaagaaagattactaaataccaattacaaatgtaactgtgattttgatgatagtctgcaataaatttattgatgaaaataaacaaatttatcatattttaaaatctaatangaatgttaccgtgattttgatagatacaaagatgataaaaat

SEQ ID NO: 64874 - DNA, 1506 bp, Arabidopsis thaliana landsberg
cagttgaacaagtagagcgaaagtctgtatcatctatttcatctccggagtctacaaacaatgttaacgaccctaatgttgcttttcaagagttagctttgatcatccaccctaaggctggtgtacaagaacaacctatcgaagcacgacctttacgctctgtctcttcgaagaaaccatcttttcaacctgaaaaatacggacacaaaagttacctggagaagaatggacctgcgtctaatgatcccgcacaaaggtttctattcatttggaacttcgtgacatttaaattgcctttagcataatggatgtttttgaggaagattcctaagcagcttgtcacgggctttaagctaacaatttttcttccatgtagtgctacaaaaaggaaaagacgattttggacgctggcagaagtagagatgcttagggtatgtaacttgcacatttctctctatcctacgtatatttcatgctgcagtcatcttggtttttcgtaatttggagcttacacattcaacggctctttttaaaggtttatgcctgttttagttttatcagctttataaaaacagccagggtagctggtcttatcatctcctaagaggcggtatttcattttcagtcgtaatgcaattgttttgtagactagacttcataaataagagcttatcctccaaatcattgtgaaattatatttgagatatttaacattgtttgtggctgtccaaattaaatattttgctatgtagtgcacaatggtgataaatgtggatttgtctaacttcgtcctgtcctttaggttggtgtgcagaaattccctggcgagaggaatattccatggcgcaaaatcttgcaatttggtcgggatgtgtttcatgatgaacgggctccaagcgacctcaaggacaagtggaagacgttaaacaaaattccttctgacacggggaaatgggtaagcctttcaactgaaagacaaccgaattactatgtgtctgaagttagttctgaatgacctatcggacttagcaagcattagagcttagaagagtagtagatagggctttgcagattttgtacaaccttgcttgctcctagtttgctaaatgtatatggagcaaaactgatcttaccttttaacactaaattcaaaaaaaaaaaaaaaaaactgatcttacctttctaatttgtatgtcctcggcaatgtagagaattcacaagagtgagatgatatttcatgacacttgaacacaagtttatactaaaaatcatgaaccaatgttgtacttcaatatctattaaacttttacatgtcttttgatatggatttctctgcaattgtaagacaaagaagaaaacagtaaggtcaattttacacttcgtgtaaacaaacttttttctaagtttttaatgaattaaaaaatagatgttttagacagaaaatgatgagggtagaattcccgccagtgcgtgggttcaactataaatcctttaaccgccacgtgt

SEQ ID NO: 64875 - DNA, 198 bp, Arabidopsis thaliana landsberg
accgcccgaaacccgaacttccctgagatttctaatgacactaagctcttagattcatttccttgaagccctttgctgggtgacatttatctttgctgccacacccgggacatggctcgattatcttagtctcctatctctcattatttctcttttcttttttcttattctttttcattaatcttcttttatttcttt

SEQ ID NO: 64876 - DNA, 455 bp, Arabidopsis thaliana landsberg
  unsure (1)..(455): unsure at all n locations
gctaccaacattattgcaggacttgcggagggtatggatttnnnnnnnnnnnnnnnnnnnnnnnnngcaggggggatctatggatcttttgcctttgcaggcctgtatggtgttgccattgctgcttccggtatgatggctactaccgctatgcaattgtctattgatgcattcggccctattgcagataatgcgggaggcatagccgaaatgagtgagcttccgaaagaagttcgtggcagaaccgatatcctggatgccgtgggaaatactactgctgctactgggaaaggatttgccattgcctctgctgccctgacttccctggcgttatttgccgcatttgtaggtgtggccatgcctgaccctgctgcccaacacatcgatatttaccaggctaaagtattggccagcttgtttgtgggtgctgtcattccttttatcttttcttccct

SEQ ID NO: 64877 - DNA, 239 bp, Arabidopsis thaliana landsberg
caatgctggatccaatttttctctgtagttagtcgtaaacactataatccgctcgttaccacatacttgaccatagtccgtctacaaaattcaatagaccagagagtgtgacctgaaaatgactaaccaaaacattagtaatgctaataagcaaaagatcacataacaacataactgatagtgaatcaaaatgcatcaccgttttatgtaacggatcgttgaatttttgattagtagac

SEQ ID NO: 64878 - DNA, 1843 bp, Arabidopsis thaliana landsberg
aagaaaatcacttggaagaagttgatcacatcggctttgaagtctgtacgtatttttctgtatttcggtttcagtttagcttctttgtagcaatgtgactacaaaatgtaacaaatctatgaatttgtattgatacagaacgaagataaaactttgaagatgaagaaactgaagaagctcgttctggaatctattgtggattcaggccgagacaaatctgagcttaaggcagagctagaactaaaggttagatatacctcatcagtctaattaatgtacaacaatctgttctgctgttgagagatcttcacagtagagtctttttgtttttctacaatcttacaggtgaatttgagctccagattcacagttgatgggaagtatgtgaaacttgtggctaaagattgaatctaattcttgagtccagcaacagtatcatgtctccgactgtcacagttttggcatatgattcattactattaatgtctgtaccaaatttggaattttggaatctcatcaaacattattcgtaacaactttataatatgcctcaggtgacatagttattatctccatagttctgttttgcagttcacggcgtaaagagatttttcgagaataaaaaaaaaaagacaagaaatgagttcggttttgtttcgtgagagacacattctatattttaaatacttagcccaatagacccaaaatgagtggacataatatcttcacgtctcacaagagcaacaagaccaccaaatcagtcagcaattcacaaactacacttaacgaaacataaaaaactgttagactcatactatttgtaataattgaatagatctccaatcatacttcaatgtcacaaataaatatgatattttgatctttgtataaatgaattatgatcctaccaaaattaacaatttatatgaacaatgttccacagagaatcacatgtataaacatgagttgcatcatcttagtatagcaacaacaagaaagcataatactacaaaagtaacatgaaactattcaaaattagatgccataatatttacaaagctaggagaacggctgtgttattcagcttcaacagtaagaagtgttcaattgtatagatcatttataacaattcatcaccaatcatagcaagtaatgtaactaggaaacaagacatctaattttttttaaacatgcctctcttcgatcaacttacaagggcataagacaatagaaagaccacacaagatacatcaatatcaaacatccaaccttatgatatcaaaaagatcaaagcaaactcttcctttttttatctctaaacttgaactcatctttacctttacaaaaattcaacaacaaaggttacgagaaacacacacacaacataatatcatgatggtaaaagattgtatatgtattagacagtgacctgataatggagggagaaactgaattttattaaggaacataaaaatgtatgtacagagatgtaatggtcctgaggttacgaaaactacaaaacaaaacccaaagatgaaagaagaaaaagagcctccacttatatgtatacatatatcactacaacatcaccatcatcactcctttttcctttctttctttctttctgccacaacagcttgttacagccggaagttaactatcaacctagcttacccagcggatccaaatccagcatccatcacaaaagtacaaagagattcacccaagaaatcggagttataaaaagacgaaaaaagaagcctaagaagaagaagatgatgtagaaaagaatctatatgacctaattttctggagctaacatccgaataacccatttcctgta

SEQ ID NO: 64879 - DNA, 511 bp, Arabidopsis thaliana landsberg
  unsure (1)..(511): unsure at all n locations
gcggtctaaagcgcggccggtctcaaagacgcagcaggcggtcgcggaactgattgggcaccgtgatcactttgagctcctcaaagagcgcatcgaactccggcgccgtaaaggagagctgcttgagccagcccttggtgcgcgccacggcaaacgggggattccggtacgtggcgctggccgcgtaaaaatccggaagnnnnnnnnnnnnnnnnnnnnnnnnnnnnnnnnnnnnnnnnnnnnnnnnnnnnnnnnnnnnnnnnnnnnnnnnnnnnnnnnnnnnnnnnnnnnnnnnnnnnnnnnnnnnnnnnnnngcggtatcgtggcagcggctaaaggtcgtccacactccagatctcgccattggtcacgacccggatcggggttacggtgcggatcttcggaatccactcccagtaggcgggcggtttgtacgcgtcggttttggtgcggcagtgcacggtgagccagtcggcgccggcggtctccaccgctttggagttttcgaggc

SEQ ID NO: 64880 - DNA, 570 bp, Arabidopsis thaliana landsberg
  unsure (1)..(570): unsure at all n locations
acacaaaatgtaacaataatttacaaaatagaagcctacacgtgtagtctttaacttgggtttgtgacagaaaaaggacctacaaggatgagtcgagatacgttatccaccaaagtcacagtgtatcacatgcctttgcctctgtccttctccgtttctccattcggctccacaattttcccattccctgctttgcgtctatggaaattactctacactaatgatgtttcctaccattggacccataagctgagccgttagatctaactatttcttgtcaacatcagttgactgtaaaaactagactcaatgtgggcttaaaacgagctcttcatgtgataaatgtcctgattcctaaagagttttgtttctaatccatgtaaaaaatatacagtaatagtaataatattgcaaaacatatacaattgttgaaaaataccatgaataattcgtattattcttgttattgtaattataatggtacgtcgataattgatgttacantttatcgaagccgccttcgagacttggcttatatntcatgaagattcctcttcttttttttatatg

SEQ ID NO: 64881 - DNA, 469 bp, Arabidopsis thaliana landsberg
  unsure (1)..(469): unsure at all n locations
gcccgttgcggataatgacccgccctttctcgcacggaagcgtgggttgatgccgtttgtctcattaacgacgcggacctcccgcgcgagtgggccgagttcatcgccaatgcgccgttcgagcgcctcgtcgcgttcgtccatatcggcgtgttcaagtaggccggtatccgaaatgtcgaagcgcaaccgccgatccgacgcattgcgcatcatgcgattctgcagatcgaccggactttcggcgacgaggcgcgcaaaatcgaccgtgcgcgccacgacctgatcgcgtgtcgtgcgctcgaccgcgacccggcgttcgtcggtaacgacgacgaaggcaatcgcctgcgcgacaacgatcgccgccagcaggaacacgaccaattgcccggcaagactttgcggccacaggcgcctaagaaaccttgtgagaaagcgcattaccggctgngctccatcccatccc

SEQ ID NO: 64882 - DNA, 295 bp, Arabidopsis thaliana landsberg
agcaagggttgatttacatacagacgataacacactgtgtcctcagttgtgatgatgatatgcccctgagtcgcgaggttctatactctctcgtggagatgtgcctatcacattcacggacaactgaagatgaggctgggggagaggtggatacatacttgccactactggactaggtgccccgactgtgactgcagatagagcggatatgcggggagagaaaggaaagcatagtacagaaaaggacctgcgatactgtggatatatactgatcatcatctgagactgctcagac

SEQ ID NO: 64883 - DNA, 237 bp, Arabidopsis thaliana landsberg
gccttcttaaatgtatacacatgcactttatacgttatagaagataaattagttagaccaaatattttgttttctacggtattcgtgatatgttatatgtttttcaaaatgatggagaatttaccatagaatggtaactaaaaaattaactcgcacacaaaataataatctaagtcacccactcaatcacacgtattattaaacctttatataaaataaatgctatgaccttcacta

SEQ ID NO: 64884 - DNA, 363 bp, Arabidopsis thaliana landsberg
gctgtgggcgagcatattcatactgtattaacttaaactgcaacaaaactatgcatatataataaacatagtataattttcctactccaaatgaacatgttatgattgagttctttccgcttacatctcattttctttgagttgcgtgaggctttcattcttttgctcgtccaacttaatgctcacatcctataaacaaaagaggattaggaaggtagagagcataagaaaaaaatcaatcaaataaattctgattttgtttttgtaagtttttgatgttgcaaaagcctgcaagcaattcatcaaacttagttctatcaatctgtaacttgaaaccaatatggacaattttctactttgttt

SEQ ID NO: 64885 - DNA, 2141 bp, Arabidopsis thaliana landsberg
tgtctcaggacctgataataacgatgagcagctgatgatgggagagattagtgaggttttgagatgtttagtttcttgtatgacaagttttgattgtgtaataggaaaaaaaatgtagaccaaaagagtctagtggaagttaatcaaagcccacttgtaggaacctgtggcccaacgaattaaatcaaaattgataacttaaataattttaagttttcacttttatcaaaaaggggcctgggaaaaaaacaaatatcaaagaaagcccaaaaaagacggagaaatcagatttttttgaatttaagaaattaaaaaaaaaaaaaggagagctccgtcttcgttgctttttcgagcggtgcctagtctcaacttccatggctgacatcttaccttcaaattttctcaaaccaaccaaaaagcttcttctccttttctaaaatttcatcaaaccctatagggttttctcaatacaattgattttttttttcttcttcttctctatggatacgaccctttctcccgccgtggaggcggaacaaatcgccgactcaacgatcgacactgtttctcgtttgatcgccggcgttttctccggcgcacttactggaatcttcgctatgggtattaatatgttttgccgttttgatcatcttttgtttgtgcatttgagtagaggaaagttttcccttttgtgagaattgtgacgattttgttccctctaagttgttcgtttctatccttttggtcaactcttgatctcttgcaacaaatatttcttgtgggcctgcaaattttgtgaaaaaggttacatttttctgtcttgagagatttggttgaacatcgttcagatcattagtcagattatcatacgtgttcaacatcttacagctaatgattttgaacttaattctcactttttagaccaatcctgggtttaagattaggaaagtgtgatgttgttgtctctaggttatttgaataaatcatcgtctctgcatgatccctataaaccattttgttttttaatgttattgtagctggagcttttactggagctgtaactggtgcggtggcaggaagagctgcacagtatggagttctccgtggggctgcacttggcgctgttgctggagctatcctctctgttgaagtgttggaggcttctcgtgcgtattggtatttagagctgtcaggatcaaggggtccatcatctatggttagtctttaattctaacttctgtgcaatcttacacgtttgtcaattttggagatggtttttggagtttttcgactgactttatgatcgagatggtgaaatgattctgagagaaatgaagtttggtggaagaaataatgagatagttttgacatgttactggtgggccaactaaattatgggatgacaggatggcttgggttagtcccttggtatagtaataggaatgattttgtgttgctaatgccacgaggcagtcttacaaaggatttttagctcgacaaagtctgagtctgttttttttaattgttttttttctgtgggaaggacttgaaccaattgcacggtgtttttgcaatgctggataagtggacagctctgtctttttttccacctactgccaaatttggtagtgatgactgtttaagtatgagtaagctgagcccttggtatttttgttttggatacaggcagattttgtagagcaactgtttcgtgggagactggtagatgaacaacttatgtcaacaatgataaattcacaccattggcaggttctattcttactcatctgaatgtgtatggttaaaacagaacattgaaaagtactactgaaagttactatatgaacatgtaaatatagtttttgaagtgtttgaaggatgtctcttatgatcaacgctggcccaaacttctttcagtgtcctgagactatataagaagagctagagtccttagatttccaagatctgtaaattttgttatatatactcttgatcctgcatcttactgtttctcttgatgataggcaatcacctctagtttgaatcgatgcagaaagactgatgtaaccagctgtgtctaccttttatagttaaggattttcgatgtcagttatgaagagcggcatgatgtttatggtgaa

SEQ ID NO: 64886 - DNA, 429 bp, Arabidopsis thaliana landsberg
ttttatctaattcttccacgatttagtaggtcctatgcgcatttttacagggtaggaacaacagaaaattaaaaagaaacccaacataaacttgtaacgagactgcgattttgaagaaaaggaaaaatgaaaacaagaaaagattgaaaaaaaaataactgggatttaaacttctaagggcaaagaaacggatccgtctcaggtactaaagctccttccatgcttcaaggctcacggcaatcttcttctcaagagaaacgttaaacgggattgttcatatcttcatctctagtcagttttatgcccatgccgtgagcgacaccatcctcttagttagcaaccatttgccaccacatcgcctgtgactggtttagcaacagacccattctcagcaaccttaacatcactggacgtttgaacagctgcagg

SEQ ID NO: 64887 - DNA, 471 bp, Arabidopsis thaliana landsberg
  unsure (1)..(471): unsure at all n locations
agagataccttcatggatgcggcggactccgactgtggcaatgaaatctgcttacccttactatcctcgactctgtggaacttaccattgttagcggttatatgattattacacactgcggaactcgtccatgtccttttgacaacggagttatcctggaacaaaagggcttcgcacccattgtacaagttgatcaaatagatcccaacactgcatgtgatgacgtccattatgcatacggaagcatcaggatcacggtatcgcaagacggtttggacagccgcaatcctnnnnnnnnnnnnnnnnnnnnnnnnnnnnnnncaatcaccgccgtcccggtcaatgctccggcgttcccggtggcgctcagcttaagtgttgccacggttacgcagacattgaactacggatttggtccacaaacttatactttaagggttatggaagcgacaagcggatgtttcaccgatc

SEQ ID NO: 64888 - DNA, 1576 bp, Arabidopsis thaliana landsberg
gtccttttcacggattgttttgccaaaaactaaattttttgaatgatggacaaaagtttcacaatttgcgggtttacattgttatcattcaaaattgcgaatatcttatctatcactattcatattgaattttataattctaaacagtaagtagctgaattttcagaatcggtcatgagaccaatatattctttgatattttgttgtttaaaaagtggctaaaaatcgatgtgtaccgttttttggaatcctactcgagtgagcataggaatgagagactcaagtataatatggtttcttatatggattcccaaacttttttttgtagttaacattatcaatatttccattgtggctttcctatgcgacgtccatcaaagaaacacatcagcatatatctatcaataatgcgtgtagttttgaaatatggcactcattctctgtccctctcaccgaacctattcgaggaactcgtgtaatgacgatcgcaatttacgtgtttcaacacaactctaaagatctcatcacataactcgaaatgcaagaatctttatattccaatcgttattgaaattacgtatatatcatacaatgctgaatcatactttgtctacttggtggttacaaagatttcagcctcacatcacaatcacctaaagttgcaattcctttattaattggtcaacaactcgcaagtctttgatacataatgctctaatactttgctcccacttctaaaaaacagttcccctctatacaatatatttaatattatccttacaaaaagaaaagcaataattttgttgatcccctacacctcatcaagttctaaaaaggtagtagaatagattatgatatgggcccagtgctgtcaaaacaaaatcatgggcccagttgataaaataaaaaatatgggcccaacgatactttcccaatttgggcttctcttaaatcctcaattattatcgtctcaagctctctcgagccttcttcagaactcttcttcttttcgtgcttttcacattcccgccaacagagagtagaaatcttctcccacaaaacctcagatgaatcatcccaagattccgacgccgggtaaacaaatggaagctcctcgctccgtcggaggaagaatacagaggaaaccgctcgcggattgtaccaacaccgtctccagatcttctcaacagtcatcttcttctgtaaaattcgcgaatccgagtctcacttcttcactaaagagattagtagaacaaactacgctcaaggagaaacccaaagatgttaatacttcggcgactgctcccgaaatcgcttctcggcctattaccacggacgttagacccgtaactcgccgtatgtctgctgatctggcttctccggcctcagctccttctcgtccccaaacatcgcgatctgatatgggtaattgatttagctgcgatgattttgttccagttttgttatactgtatcaaattttaaggaatttcatctgaattgaaattgtttcgcaaactcttaggggggttttttttaaggttttttttttcgggggggtttttttttttgggggg

SEQ ID NO: 64889 - DNA, 490 bp, Arabidopsis thaliana landsberg
agggaaggacttccttccttcaagtgttttattactctatagcagaaagacaaaaattgcgcaatgcgattcattatatccaagagagggtaataaatctttagattgatgctgttcatcctgttggtgacaaagtaccatcagaagctggcactctggccgagttttatgaggctcaagcccgatgggggaaggaaataactccataccattgtgaaaagatgattgaataagcttcaatggttgcaaatgctatagttgttaatcgaatccaacacaaactaaaccttgttagtagacctttttgtttttagtttgttaatttgcaaacttgaaggttactgtgagatgtcttgtggcaactgtcttagtacgtcgttttgagtattataacttcttccttgggttgtaacaggcccaatccaagtttttaagagcctagaaactgttgtccaaaatacaagtctttatgattccaaatggacctgat

SEQ ID NO: 64890 - DNA, 1894 bp, Arabidopsis thaliana landsberg
tgatcagatttataacatcgatagggaaatgacaatctttaagcttaagaactgaagagtgaagactattatgttattccaaaagaacaggaaattacggcagatgctgactagaagattaacagacaaaactaaaagaaagacctctatgattaaagagagggtttggaatactcactatccttgtccaagtctcctgtctcgccgtctggtaaaccaaaagttttaattccgcatccagtagttttcagggacagtgttgcgggcaatagacctaagctggtagaaaacgatagattgtaagctagaggatggtcctccttcaaaaatatttcctgcagaaaagtaacccaaaactgaaatcaggtaactaatgacttcactagcttagttcaaagcattagagatgcaaaggaaaagtgtggcctcttttcagaataataacctttgcccagtaagtggataagagcattgattgagatgagacctccacggccccgtctccgggattaaagaactgccctactgccatggaaactgctactggaggtttaccagaaacggcctgtgcaagagaaggtctcatttcagttacatgctttttgtcattcaaaaactgctgaaatttgaaagaaaccaaatatgtatcaaggtgagaaaatacttcgcgaggcgcaactgagatagtcaagaatctgaatccacgcatgtcttcaggccccagcttcagtactgcagatgggggagcttgttcagtctgactccctggttccgactagtaaacatatacacaaagaacgttgagtttgtgttacaggaaacaaatccagcaatgttgcagtcgatcactaaattactttgtcagacacagtatatattaacctgttttggtgcagggcctgccggaatgagaaccatctttgatgtaacttccaagaccctttcacaaaccggtaaatttgaattcgatttctccttctcaggccatagatggagtcttactccacaacaaggcaccagatttgtgacaaatataaagtgattctttccatttgacccctattgtacagaaaatgtttcatgggagatcgatatagttatttaagtgatatataggtctaaaatgacatccctaaaggaatactatcagcactgaccaataaatctatgtccaacctgcgccttctctcgtccattgccaaaatcgcgacagtgctagcttgtatgtatagagccctatcgagagcatcatccctccaatccaggaaacacgtagagcctggaaacatagacagtaatatgataagagaatccatgtacccacaagtaatatgtacacctaatgaattgttctcaaaattagccattgcaattgtttgatagataaaatatacctccagctttttatattcggattacttaagaacatatactgataaatgttaataacccccacgattagacaagcttataatacaacgaaatttatatcctttatttgaggacttcttttcagagaaaacaagatatacatatgttcagggtagagatggtactattaccctttgaggccaatatgggtaactcatgagagacttccatgggtgtcattccattgaaactttgagctaatgcactttgaagcattctggttaaaacccaaagtctcttatgagtatcagaaaatggctgattagttttcgagtcaaccatactaagaagcgtatgtgaaacctgcatggcatacaaattttcaaattcgttgaacatggcatttccagattacaaataagggaattttacctacttgaacaaccaattggttacaccacaaaatagcttgatgttccattgacagccacacgtttgtcatgcttgtactacttatcataaa

SEQ ID NO: 64891 - DNA, 155 bp, Arabidopsis thaliana landsberg
cacggcacgagccaccgaacaaggaaacacaactaaggccccgaagagcggcgagcggaataagagcagacacaaccgcgaacacaggagcagaggacagaaacaaccacaaaacaccaaccaagcaaccacaagccccacaaagcccacacgga

SEQ ID NO: 64892 - DNA, 417 bp, Arabidopsis thaliana landsberg
ggctagcgatactagactcttgcttgcggtttctaccactgttctctggatgaacatgaaacggaacaacgcgcctatgcttacttatagtgtctccaccatttcatatagggagctattgaagtgctagcagcagcaagatccgatgtataacagtctgggcacgttgatacttggggtaatgacaacgtctcccagacgtgtttaacgagcacggatctggaggcgtagtgaactgattacacaactgcggcttttctgccacatcgagatacgatactagttgaaggaagcaggagatagagacggacatgaatggtaggagaatctttctggagatggactacgctgggccgcatctaggagctcccaagccatccgaccgtactgtttcgggaccacaggtccttgccctac

SEQ ID NO: 64893 - DNA, 627 bp, Arabidopsis thaliana landsberg
tgtattttaaaatttcgaactctgaacttattaatataactgattggaatactttagctcgaaactttgttttaacaaaattaaagatatgtaagtgttcattaattattggcttaatttaagttacatgtacatatatgtcttaccaactagaaaaatatatgtctagtcttacaaaaaaatgactaatgtttcaccaaaaaaaaatgactgatgcatgattatattcaccaaaaaaaaaagcaaacaatacctggtagtgagacggccagagaagaatcattcacattaagggcactgagcgacctcaaattgtaagcaagagattatcagagaatcttgatttagtgaaatcacattaataatttctgagacggccagataagaagcaaagagagtatgtttattatttctcaacttgttttaaattcttttatctgggcttggcccagtatatttaaaccaatgatcgcatatgtttagaaattccaaatattgttagtgggccttcgttcagcctatcctaaaaacatatgtttgttgtagtaggtaacaacccaaatcctaaaaacataatacaacaacacccatggtttcctttgggcatcttttcgttaattattcaaa

SEQ ID NO: 64894 - DNA, 1321 bp, Arabidopsis thaliana landsberg
aggtcctcctcctcctttcctttgataactttccggcaaaatctcagaacctccccttttttctttgccgattattgatcggaattgctttgttcgctcatctgccaacttccttcctactcggtgtaggaatcttacgtgtccaatcatctgtctatttttggaaacaaatcctcagtgattttgtactttacttatatcaaattcgataactagggtttatcgaatcggattgttgtttctccaattataataattcaagttggttcacacagtagcgtcgacttttcatagccgctgttgtcgaattttgaatttctcgattttcccggcgcttttgttacgattcaaggagtttgaacaagtagggcttctcgttgcggagatcatggatattgacggagtagacgacgatcttcatattttagatcctgagctcttgcagctccccggtttgtctccttctcccctcaaaccaacctctcttattgctgatgacctcttctctcagtggctctcactccctgaaactgccacattggtagccaccttcttatttctacacttccttccttggcctctcttttacacaagtgtgttccatgaccttggtttcccatttttcatgtttctgtaggtcaagtctttgattgatgatgctaaatctggaacaccaactaataaatccaagaatttgccttctgtgtttctgagcagcagcactcccccactatctccacgaagctcctctggttcccctcgtttctccaggcaaaggactagccctccttctctccactctcctcttagatcactcaaggagccaaagcgccaactcattcctcaggtttgttctcatttcctgcctctggacctgtgattttggtctagtatctatgttcactggattggtcgttgaaacagatagctttcgttagtagatgcagggtacaatttaaaccgaggctactaatttgtaggtaaacttgatttgaacgaaaaatggtccttcactgtgacatgataataagtttcgctcacaactgttcatatgtttataatttctgcagttctactaccaacacgggcgtccaccagcaaaagaactaaaggagcaatgtctatccatggttgatcaagtttttagtaactatattgatggactacatgtagatggtgatgtttttgttctatttttgtccttctaaggaatatataaggcagttcattttaccattctcgttcctcttgcagaattcaaatccattacgaaacaagtctgcaagctgccttcttttctttctcctgcacttgtcagtaa

SEQ ID NO: 64895 - DNA, 698 bp, Arabidopsis thaliana landsberg
gctttttgggatactttcctttgggggaaaaagaaaatttggacaattaaaattaaaggaatgttggttttcacaatgcgcaatgatttcaaactcaaaagtcaaaacactaaatagttttcaaaatatccaggcaattaatcggttgattctcttgtttccttttttatgtttcgacgattcgttccccaaaatcaaatgggaagaagagcgaataatttacttaaccttcacgttttccatttattacactgtctttttggactgccattttactattccaatgcctctttcaccactctttctcttatccattcaatctattgatttttttttttacattttccaagttttactcttttacataatagtataatactattttaaaaaaatactcaggcttattagatcaatcatacgaacttgagataactaaactaatatttaggattttaacttgatgaactctcataaattcataatcgtattaagaaattatgttgtaggttttttacacaaatatagaaaaagtaacttttaaatattttaattattatttcgtttatttaataatactaattctctttctctccttattctataggttatatataaaattaataataattttaatatcaaactttatagaacaaaaaaaaaaccataacataaagcttgatgaaaaagaaaaagttata

SEQ ID NO: 64896 - DNA, 239 bp, Arabidopsis thaliana landsberg
cttgaatggatattaactcacacatgcccatgtggcatgggctattgagaatactctatttgacactattatgtgaagcctgatggggtaatgagacacgacgcattatattgctgaattattttgattgggagatggtcgtgactctgcagggtcctttgtcgagtctataacgctgacggggtggacggatggagagggataaccttcttacatatctgattacttgcctaaacccg

SEQ ID NO: 64897 - DNA, 348 bp, Arabidopsis thaliana landsberg
  unsure (1)..(348): unsure at all n locations
ccttcgagattcccattttgacttgtccctgaccagagcatgaccgaggtcatcatactgttctaccattcgagggtnnnnnnnnnnnnnnnnnnnnnnnnnnngggtacatggcacttatgcccacgtaaatccataacgttactctatccaatccgtcgcggctatcttctgatttactgatcgttctccatagcgaacagccgccgttttcatcctgggccaagacatgtattgggtccttgacacaagctgagcctggatgggtcaccaacagacgcacatctgatttggatccaagccctcgcttcggaatgtggaggaggttgctataccacaagacatcta

SEQ ID NO: 64898 - DNA, 670 bp, Arabidopsis thaliana landsberg
tcatctaactctccttaaatctaagaattcgaaacgagacgggtcggaataagaacggaaattcctataagaaatatcttataacaagttacaattaaaataaaataaaaatgctcgcaataatgtatttacaatgtttctcttattttatctagaataaatatgttccaaataagaaataagaaaagttaaataatattttttaaaataatgttatatgttagttaaaaattaagaaaaaaacatattccgatatagataatttaaacataaaataataacaataaagaattaaattaattttataatattatataatatatacatatactatgaatatacataattatttattatatatataggtcataaacgggacttcaaaaattctggtttacgtctcgtctcgtcctgtctaatgggacgagaatttgagaaatggtacgagatggaacagaacgaaatggaaattgtgcttaccctctacttaattccaagactaaaacttattttgacaagttgaataactaaattttgatctaaagttgtaggtaagaagatcataaaggattaacaaaattgtcattaagttgtattttatgtagtgtatatatttagatcaaattggttatttcctctctttcaattgattaagaggcaatataaaatt

SEQ ID NO: 64899 - DNA, 275 bp, Arabidopsis thaliana landsberg
ttatactactgagctgtctatagcgctgattgctacaaacactaacgcttctgatgtgacatccgctactgctataatgaataatgcatatgagaacgtatatagaggggatagttacatattttcatctaatattttgtcccacacaaacatttaaaatgtctgatacctgtggcataccgtaaagcttcagcttcttttatcaaggatccatccttatgaacaccctattatgatactttaaattgtaatcagatatatacatatccgacctg

SEQ ID NO: 64900 - DNA, 593 bp, Arabidopsis thaliana landsberg
tgctccatctgccaaaagcaggctctttttcgattcatcatcatcttctccttcaaaacgtaagagctctaacaaaaatgcatagaaagagaaacttccggagaagtaagttttaatctctagggtttataaaaagtttcaattttttcccctttttaactgattaggatttggatttgtgcaggtacgagaatctgggaaagttctttgaagcattggataattcgatgttgttatcgaaattaagaggttctaagccaacattctccaacatttctaaacaaatcgagcatttaaccgagaggtagtcttcctgacatttcaatttgaatcgtttttgtgattgtcactgattggatctgatctgaataaataagccaaatttggttattgcctttaaactttatagagtcgataagacaaattaataatctagatcgtgtttatgggatctgatctgaataaataaaccattttgatctttgctttttatactttataggttcgatgagacaaaagaatactttagatctgggttttatagatttctccgataacttttctagattttagatattcacgagtctgtttct

SEQ ID NO: 64901 - DNA, 2276 bp, Arabidopsis thaliana landsberg
tgtgtttcttctaagcttgtcgagcaggaaaaaatgattttgattacctttgtgtgtgtatgtgtatgtttatgtgagcgtgtgtcgtgaataaagaaaattggaggcaaagaggagagtagaggtggtcactcgtcattgtagtcagaaacggaataagaaggaagaaaagaggagtcgatgagttctttacgagatgtttcccacaattgttgttctattccaagcttccttagctccctcattcctctttccactgtcccagcaaacacaaaaggaatcagattctttactttaactgatttagcttcaagtaataaatataccatcaattgcatcatgtgaagatgaatgttgcccgagtcggttgatccagaactgaagacgctcttccgcaatatcactttccacgccatgaattttagctcttttccagaaatacagcagccatgcctatacacaccatgtatatatgttttttgagttaatgtatatgatcctgctaagtaaaagctaaactctcccggtaaagatgtaacttacctctttaaagagaatatcttgttgctcatcatgactcaactctgcattcaaaattcagaataaacccttcctgcttagtcataagattcaaatacaatatagatgaagaagaacaagaaaacaggttttgtttacttatatgatactctgtctagatagtaacgaaaacagtttaaggatgtgactcaccaaatgtttcggagaacttaggttccccttgcaccctgggatctggatattaagatgagatgagtgtctgttgtataacatcacatcagtatttatatgtgccaatcagttttagatatagttttaccagtgacggcttgtcgagccacatttgtctgtctataccgggaaagtgcaagcattacagcatcctcaacctatgaggtgcaagaaatgatatgaatgagatgtgtattttctgggaaacagttttttttagtaataaacagatcaaaatgtgtgcataaaccttcaaggatgctatctctcgtaatcccgtttcaacagcaagcatactctcaatgttcccttctccattcaaatcactgaaattactgatgactttgctccaagtgcgatcgctaccacctgcgagatgtgattttaccaattagttttatatactcaaactaaatgattatgtgggaaatattggcaggatagttgaagatcaaacctgtctgccaggaatcttcagacttttgggcagcggaaaggacaacttcagagggaagaggagctaaagctgaccaatgttcatatcttgatgtggatatatcttcacatattcctaagagtgacccaatgaaatgcataagtaaacatttccaaataagggcaaatgatcagctagcggggatcacatagttgttctccatgtcagtatacattttagtggacaagtacactgcgtgaatgggaaacatgcatatgctctaatcatgttttaatcataataggaccaatttatgagatcttcaaaaccatttgaacccttggcatcatcatgagaagaacaggttacttcatcatatccatcattgcaggtcaatacccaacagaggataaaacaattgtatctttacgagagaaaaattctcttaccatgttgaacagctaattcccagtagcgagcaagccagcatctctttagaacaacttcctcctgcaaggttggtcaatcatatagttaaatgaaacaaagaaggtggagttaaaccgtcaatgcacaaaattctagtttagattgtaagcaaaccatttcttcttgactcaaaatcgttctatgtatcattgtccgaagagactttatttcagcttcaacctcctggagctgttccgtggatttctctgcttcatcttttaaactctgatcataacacagcacagaagagatgattgttcccttgtcaagttgaaaggtttatcaataaagtctagtaaactctgtttagtccagcttagattggttaccagagcattgtcctgaaattctagtaagggcattagtttccctatttcttccatctttttctgtcagcagcccttaatgtgcctgcaaatagatttatgtttctccttttcaataactttactgtaaagcactgccaaccaagctacaaagaataaaggacatgtatattggaagaccaagcacccatccttagatatgagacatcggaatcttttagcaatgtgttctctcctgaggtcttccagatttc

SEQ ID NO: 64902 - DNA, 180 bp, Arabidopsis thaliana landsberg
aaagacggcattgcatgtggaatattgagagatttactgctcaagatgatgataacttcaatatgaaaactcagtaaaacagagtacataacctcaaaaggtcaaatgttttgtttgcttcagtcacaagttactgctagagatatgatttctcacaagcttttaggtgacagtttacat

SEQ ID NO: 64903 - DNA, 432 bp, Arabidopsis thaliana landsberg
agggtgcacccgcgagccggcgatggaggtgacggtgatgatgctgccctgggccgccttcaactcctcgaacagtccgcgggccatcagcgcggtggagaacaggttgacgttgaacaccttcagccaggtgccatagtcgctctccagcacgcccatgcgctggccttccgggcccttgggcgagatgccggcgttgttcaccagcgcgtccaggcgcccgccgagcttctcgcggatggctggcagggcggcctcgaccctggcgatgtcctcgaggtcgaggtggatgtggctgagcatcacatcgacctaagggcatactgccagatagtcctggcccgaggcggtgaacgcgcgcccaacatcctcgattaagggcacatgggccatgcgccctttgccaccgactctcggcgtggcccccgacta

SEQ ID NO: 64904 - DNA, 648 bp, Arabidopsis thaliana landsberg
  unsure (1)..(648): unsure at all n locations
aagatcattatcagtaaaagcgtatcacgatttcccccctactattgatataagctagcaagtttttgaaataaagttctacncatataaccaaacaaattgatagntcgatttatttcatcatttcacattggattagttttcgaaaaacgtgaacatcgtcttaacacaatttttgtaagagggcacgtaacatcgttgtaacacaattgaactgcttaagaccgagtagtgttttcaaaatccacaacactaaaagattaaaagttaaccattgcttaattatggccgactgtttcggttcttgtctaatcttctctttccacaatcaacttgatttgttttgtttttttttttcaatattgatgtttatcttttaataaagtattcttaacagcttagtattcatttcatttttatattatatagctatattctatgtaatgttatagtatgaatttgtaagccgttttccaattatcaaaaaaaaaaaaagaacctaatttttgaaaggccatgttcattgccgcgtggatggttccgttgccatcaacattctaacatttaatatttggtagatttattcccaaaataaattaaaataaaatcattttttttttcttaaaataaaatcattttacatacccc

SEQ ID NO: 64905 - DNA, 2224 bp, Arabidopsis thaliana landsberg
ggggctttttgcttgttacatggccaaggaattggatgcaaaattggatcatggagaagctgttcgtgctgacagttgcttaactggaacggataccggttctgtatcatttcttgagcgaattatctgccctatatatgaaacaatctcagcggtgagttccgctattacaatgattttgtgcatcttaattttctattatggaaattagatttcaacagtttaatgctaggcaaaaatgatagttttaagagtgatttctttcactaaccagagcttttgggtatatagagtatctaaacccttgttatgattttttgtgttaaacccatattacttaaattagtagcagttgtctgggaagtatcattattttaagttaatttgagtacaacgttaaagatcttctaatcattttcttgacatagtatttaggtggttctggcctatatttgaagtacatccctacttcgtatttgagatcagatcttattctatgtttctgaggaattttagcatgttttaatgtggatttgacgcgtcttacattaatgtttttggtatatggttgcgtgagcccttaagttggttttgaaattgatactcatgtaggaaactgttcgaaacaatggtgggaaagctgcacattctgaatggcggaattatgatgacttcaatgaatacttttggtttgtagtttgcttatactattacatttgctagtataaactcatttcaaggagtttccattaactgtttgttatgttcaggacacctgcttgctttgagttaagctggcctatgaaaacagagtcacgctttttaagcaagccgaaagggcggaaaagggtgagttttgttcatatggatagattccatgaattttatgtttcattccttcttcgtttggtcaatcatctgtgaccacttacttcttcttggcttcaattttcgtgagttttactttggaagctatccctgattctcgtatttttcattttggatggtatctgataactcttacattcattatatacgattgcatttaatgggtcttgtccagttgcgggtgttatatctgatagtttgggagttatatttctctccgacgtctatgtaggggaattactccaatgagaattattgtcccacaatttcaacttctgtcttcttatcatatttccatgtctctgcaacaactttgcctgatccattttctttgaatttaatgtagactgctaaaagtagctttgttgagcatcggacataccttcaccttttccgaagttttattcgactttggatcttcatgtttattatgttccaggttggtgtggtttttatgaacaatgttctgcgtatatttgataatgttcctaattattattattattcttacttgtccacagtctttgacgattatagccttcaggaatgaacatctcaatatcgaaactttcaagatcttactcagtgctgggcctacatatgctattatgaacttcattgaatgtaaatttttctgatttgactctgttggcttactattagaaaattcagattaaattgcaaatgtacgtgtatcttcttgttgagtatcacatgtttgtcatttcttcaggtcttcttgatgttgtacttatgtatggcgcctacagcatggcaagaggaatggctatatccaggctggttatcaggtttctttggtggggcttgggatcggcatttgtggtgtattattatgtgtatgtatcaaatttgtccaagcgagctatttcttcttgataaagtttgtatgcggaacaactaaccttttgtgaaacaaatattgcaggaaggttctggatgaaagaaataaaccaaaccaaaatgagtttttcttccatttatacattcttgtattggggtgttatgccgctgttcgcctcatctttggacttttagtcaaacttccagcatgccatgctctgtcagaaatgtcagatcaatctttcttccagttttttaagtggatatatcaggtattcatttagtagaactttagataatagaaaaagtaagcacagtgttgatgcttcttctctctttcaggaacgatacttcgtgggacgtggcctctttgagaatttaagtgattattgcaggttgtgtacctgccttttcaaactatattgctggttacaaaaaatgttcattgttagatggctaattaaaattcatttgc

SEQ ID NO: 64906 - DNA, 576 bp, Arabidopsis thaliana landsberg
aattagaagcctttcatgctctttgaatactagctatagtataccacacttcacatttcaggtttaaattagtgatcattatacctatagtagtggtttgtcctaaatgattgtgttatatacgattgatgcgatagaagaaaattaatagcattgttgtgaaatcgatggtaagatacataaatgttactttaatttgctttggtttcttgtgttaattgactaaacgagagaatcatgggaaatttacaacatataaaagaattttcttgtcgatttagtttcttgctaaagatagagaaaacagttaaaaaaacaaaatctaaaaaaggaagagaaagaaaaagtgagggtaagaaagtagatacgattctctcccaatctctctgatattttcagtcattatatatacgagagatcattaacttcattgtttgttagtgaaaagaaagtgacgtttcgaagacgtatcctaaacgcaaaattcacttgtcgatcttctttttttttttaagcgtcgtgtccgaaaatagtcaagtccctcaatcaaaacgctccctcacacttagaacacac

SEQ ID NO: 64907 - DNA, 576 bp, Arabidopsis thaliana landsberg
ttatgaacacgttcctttctcttccggcggagtgtctcgccgatctacaagctattatttcagtctctgataaacaatcttgaatcgtaatgataaagcataaatatttgagttgaagttgattaattatttgtttaactatatgttactaaaaataaagtcttactcttaggatttgaataaagaatatgtaatgggtggccatgaaaaataaaagatgagataatgggtgatgatgagcatggaacacaacaaattacagcttgaagaagtaaatgcgaattgacacatatcttaacacttgtttgtttgtgcattgtgattacgaaacttatatatagtttatttgaccgacgttgtaatttgatgatttttgttgttgttggagaattgattgaatactgtagatgactacttgtgacgaaagagacttttttaatatataaactctaaagtgtaaactgtaaaaattacttatctccaaatttcagcttatttgtgtatttctcttaatagcagtataagccaaggttccaatgtgtgtgccgtgacttatgcacataaaagggttacgtt

SEQ ID NO: 64908 - DNA, 1067 bp, Arabidopsis thaliana landsberg
taaacccaggtacgattaatgtaatcttaacaagttatttacactttggaagtcacattcaaatttgtttattattcagaggattacttgaaaatcgattcatctaatcacggagaagacaaagaaatcggagacgaattggggattgcagagaaacagagtcgagcgcagagaaagaggttaaggaagaagatgctcaaagaggaagcagctcgacggaagaaagtcatcggacctttacttccgactgaaatgcttcagacccatgatgaaagaagtgtcggagatgcttgtgggagcaatgttgaagaagaagattctgacggtggcgaagaagaggttgatgggagcattagcaacatatgctcacaacttgttcgaccaaatgcccaagagaagaaagaaggtacacacagcttttgacttttttgacgatatccatagtttcaaatcttttgggaaaaattcgtactttatctaactagatttcataacacatgtacgtattcagatcaagggtttgactttaatcaaaatctactagctcatcaagttgttgtctcattgttggtcctgtgcaaattactcaaacgttctcttttgtgtattaattacattacgcgtctgactctttattttttgtttggtaggactaatcggtgacaatgataagacgagaaaagtcaagaagagaagaaatgctaagaaactggccaaagagagttctaataatatccaggatggatccaatgcaatccctgaaattcctaattagggttcaaattatcacagacctttatctaagagttaattacttcatctttaataattcaagggtatattactaaatttataattctcgtctataagatttgtgagttccttttatgcccttgttaagaggatttaactcttacatcgtcattgccattgtgtagcttttctctaaaccctaagaccctcactttttgctcttctcccaccgcagcaatcgcacgaagacgataatcgaatatggcggaactaaagctatcacagagtcgggacattaaccagagtcgagtgtc

SEQ ID NO: 64909 - DNA, 718 bp, Arabidopsis thaliana landsberg
gtcaaacaccttattagcaactaattgtactttatttttataattttcacacgtttcctcttttgtctattttgattggggtcattcatgctcaaacattacagcctgcgcattgtattatgttttgtatgtctccggcggaacaaacaatgtgacatgcgtttgaataatcagtctaattgtatgattggtgtgttcattcgctattaatgcaaatggtgtccaaaatattaaattttgagttaaatccgtggagaaataatattcctttcattttaaagcaagtgtcgttttagactgatttttttatttatgtcgtttacgaattaagataataaagaagtattaataaaaatgtgagacataaatatataattctgaaagccaatcttatcttcaaatgcacatttcacttatacgtattcagtattctgccattcaacaaacccataatttattttgtctatggtaaaaaatccgcatatagtcagtcatattagaattattttacgaatgtaatttttattgctacttatcatgtatgcttaagtgaaaatagtgagtcactatcgtcattcgtcacccatctcatgcttggcgttggcgggctcgaggtcagttttcgaataatccgtcggtgttaacagaataatccgttattgaaaaactaaacgccggtaacggaaactgtgtgcttagctggcagacacagcagaga

SEQ ID NO: 64910 - DNA, 758 bp, Arabidopsis thaliana landsberg
caccgataattaatcatagccaataaatatatgcatcatacaagacaaatattgccgtaattccttacgtacttatttcacttcaccaagaacaaacactttttctggaaaaaaaattattgggcatggaaaattatattgtttgtgaaaatttcaaggaacgaaaacaaggtggggtttccacttgctgctctaattcaagaagtcttaatttttatgattggcgactaagttgaaatatagattaatttcaagcattgcatctaccatgtgatatctccagtagtaaaaaaaacataaaatcgaaaaaaaaaatatgactgagaaatgtcaataattacatttttttcattcataattaagtatgatctgtgtagacttgaccgatgagtgttaattgagtgatatggctctaatccacaagactataactactccataccttttcaatgcctatttgtttcctaaatgaactagtaatcattaatcaagtccatttaaaaactaattaattaggtgttttcccactattgatcttaattaataaatcaaacgacatgagataagttttaattgtagataacaagagacgcctaaatccatgtctctctcgctctataaattgatagatagagtggtttttaataattaacatacaacaagtttaaataacatcatcgtccatgccttcctatactacatttgttttcaaatgcagatcgaaaaacaaactagaaaagttttttggtgaggagtca

SEQ ID NO: 64911 - DNA, 741 bp, Arabidopsis thaliana landsberg
tctacttcggcattttttgccactttcaactccgtacttctttatggtttgtgacattttaatgttgtcattcactaacattttcggtgaacacaagattcattttctttataaaaagccatacaaaatttccaataacacttgttttttgtagacaagacctttttcttttccttattgactacgagtttgagtgcaccgttacgcacgatgcaaatgggcaatgcatgattgattatttattagtaagtacattttaacaaaaacttaaattcattttctagcatatttaccgaaaactttatcaaaaaacatacattcgaaacgtgggggtcatgaatgttcttgcagtaaagtaagatgtgattgaaagggaaaaagatagaaaagtaataaaataagataaaatgacaaagatgtaattattagacccttcaattaaattaatacgaaagtaggaggaggtgggccaaaataatgacaaagaaattagaaaggcgaaaaaggaaagaaatcaaaagtatagggacttatcataaataatgtaacaacacaacctcatcagggcaagtgtgtggattcacctatttcaggcatttgttacttgttgcaagtttctcttcgtatcactatctcatgttgtttcgttttgacatatttatacaataatttctttatatgcgaatcattaaatatcattatcattaaagttcaaatttaggtagggagatatcaaatatc

SEQ ID NO: 64912 - DNA, 1276 bp, Arabidopsis thaliana landsberg
agcaaggcaggaggggcttaatttctgtgagccactctcaagagctcgttttgaggagctgaacattgacttgatggagagggccatgggtcccgtgaagaaggcccaaacaagtgtaaaaggtttgagttttgacacacacaaaaaaaagttgaaacctttcgtattcagaagagattaaaagtttcttgataatctctataaacaattttaaagttttgactttgactctaaataagtagtaacctttttgtaatctctatacaacaaaacgagttcttgctcttactcttaccatttcattgcacatttttctacacgaaatgtaaatcttaattttggttacttcctatttacaaagtctccataactgtccaaccaaaaaacgttgcaacaaatgagtagaagcagatactaaatcacaccacaagtgtgtgaagtgaaacttagagaggcttgaagtagagatgatcatcagagaaaagaaccctaaaagcttgtctgcatctacacttcaatctaattacaaacccatctccagatctctctatcctcatccctcctccacaatcttcttcttcttccaactcctcttgctccttctgcaatttcaccgtaaacttatcaaaaccagtacttgcgatctttaagactacaaaaaagaaagcagaattgattagagaagaacatcaaacctcataagcatagttagtctctccacgattcatctcctctacgcatttgttaaccatcttcatcgtctgttttaccaaaaccaattcaagattcttcattagtagttcaaaacaagaagtgaaaacaaagattagagaaacgcttaatagttatataacaacctctgtatcagtaacagacggcgtcgcttcttgcttctccgaaacagagctagtgagattcgtgtaccggctcgtgtcatgaacagaggaagtttgtgtttccggggaagtgaagagaggaggagaagtggtaaagattgggttttgaggggagagttttctgcgtttggggagatcggattcatcggaaacaggggaggcgcgtttcaatggaggagtgatttcatcggcggagaacacggatgatggaggagagtagtcgtacggtggtgacgtgagacggaggagagaaagatcaatgtcgacgaagctgagattgttgttacgctcttgaagttcttcttccattatcatcttcttaagacttcttgcttccttccgtccttctctgcgagtcaataaatgtctctggaaaacga

SEQ ID NO: 64913 - DNA, 510 bp, Arabidopsis thaliana landsberg
  unsure (1)..(510): unsure at all n locations
actgtgcttgacctaacaacgtgcaaccttgcctctgtcatgtcgtctttttatttcacgaagcgtggccggtttgcgcgaggcgtgtgcagctgcatccaattgaccatgtcgaagcgcagtggtcgcgatggccaggctaatgagaagcactatgacggctcagagcgtccagaacaatagcgtgaccggttcagagatggtgagttctccatcgagtgccattcttccttgaccttgacagggacactgacagcacgcgttcaccatcatgacctagcctagtcgaccgatcaaggacgctattgcttcgtatctctctgtctactcacggccgcgcccaggttgctgggaccagcggtcagttccgattcggtcgccatgggcctggcagaagcccatggatgcagtatgacactaacgagcgtttgttttcacccaaagaccatctatgcagtggccccgagtagcgctgcggaccaagggactttgnggctgtctatttctatc

SEQ ID NO: 64914 - DNA, 569 bp, Arabidopsis thaliana landsberg
  unsure (1)..(569): unsure at all n locations
cccatttctttcgacctcaacttattttcgattcacctgtcatggttatagacaaatcggtgctgagtttcattggcatttatgccggtagcaggtctgtctatggggctccgctatggagttcgtcgtttatcatagcactcgcagcggctgcggtgttttctcgaccatcgctcactcgaatagccctattttttgctgtactgttggcaccatttccgcttgttgtgttcgccggtggctctatgccattgcgcacatttctcgctgtccctatcgtgatgtgggtctgcacgataattgccttggacgggcacctcacaggtttgaggatagctgcaatagctgtggtagccctgctggggttgcagaccgtggcagcaatcagccagtatcaggcgaaccgcgaacttgttgggaaattcgaccagtcgacggccagagcgctatatcagcggattgccgaggtcgcggatctgcgcatgccgcagaaagacgacttcttagggtggatcgatcggaagccgatgtatccgatagctctgganacgtcatgcggaggttcattc

SEQ ID NO: 64915 - DNA, 1234 bp, Arabidopsis thaliana landsberg
tatatatagatatatatatatatatatatatatatatatgtctcccaatccaccggatcttaatgaatattacagaacccggtgttaataatgaataagaaagaacatgtcgatgatttcaaaatcgttatcataagaggttgactttttgataccttaaaacacaataacaaaagtaacatattcagatatatatcctgcttaactctttttttttttttttcgttcagaggtaaatttctcaagtggcttcttaatgtattaaaagaaaacagtgctttgttttttaactcttgagggaactaatcacgtacctgatactgttagctaggaggggaaaacaaaacagttgattaagaaatgattggcaactagctagtctagaattcttggagtagatgactttgatgagtttgttgactgactaaaattaatgaagataatgtatcttatgatatactagcaaatctaaatctttcacataaacagattgtttatgtagttgtaaaaaatagtagatgtttacatatataatataaagaaaaacatattcgttcataatcgaagatcgttcaatttttatgtttttgtcaatcaaacaatttaaaacctccaaaaaatgcatctgctggaagtaaacatagttcttggtcaagaaaaaacgaaggtgttaataaactctagatgactagatggtggtatgttgtttgttttgtggtcaaggctgcaacttcaaaagccccaacgccaatggggcggcaatgattggccccacaatatgtaaaacaaactatggtcggtacttttggatatcgaaaaagtttatatacagaagaagtctttcgttgaatatacaaatgtttgtttccccgacctcaagccaggatgacattgacataccacgatttattgtacatgaactcgattgtaatggaattttcaagaaaatataactattacaagtgttttgaagtttatggattggtataagagtaataaataagtatagcaagcaagataacttccattgtatataatttgatcttgctttctttccaagtgaactgtttggaccagctaaatacggtatagactatacaaacgtgaaacgtacatgctcaccgtcaataaatttataatcgcttgttttgtcaacgcaaaccgtcaggaacatttttatacacaatttaaaatgtccaaaaatatttttccatttttttctcttttgctgggt

SEQ ID NO: 64916 - DNA, 3430 bp, Arabidopsis thaliana landsberg
tgaaatttaaaaaaaaaaaaaaaaaaaaaaaacttttcggttccataagaaatgcacaactgttcacaagaaagatacaaatattttcacttttttttttttacttttcttaattcttctcgttttctcagtcaaaagaataaggttaaatgtaaacacttattttcttcaaggaaaatcgaaaactgttattttaacactaaccattatattttgggaaatatcgaattaaaaaatgcatgcaaaagattcgaaagtaccaaccagtggtaaagtcttttcactgttattcttttcatttgaatttttgactttgaaacgcattcttctaattgagtatttagtttagtggtatttttaaaaaaaggatagttcacatgtagctacgttgtcttctatatgatataataaacttcttcagatttcatatatatccctgaatctaagtcttaaccatcaaaagcttacaatttaaacacaagcaacccattgtgtaaggagatttataaagagcgacatattaatggaccccaatagcttgagtattgggtaggagactcgattcgaatacgaacaaagacatattaaaattttgcatgcaagtcaattttaatgaaaggaccacaaagaaattaggttttgtcttcttcttcctatatacttaagtttaattataattaattaataattgagacttttatggtaggccccaaccactcagcaatgatgtccctcttttgggcttattctcagtgctggcttcttccgtataggtcaatattattttattacgattatttttatatttttcgtatctttcacaaactgattgatgaataaaccacacacaaaccaacacggcaataaccattttaatgctttatatacaaatacaatacttctacatcataattatgctcaaatcgcacgtataatattcgaattcttaaaacaattttcaccgctccattgttgttgctaatattcgcttcaattatttgatctgatgcttgttggagcagttttatattcacctttgaaaacatccattaaaagaacggacacaataaaaaggaaaagccatattttaaacttacaaaattattttaatatgttaattatcataaagtacagaaaaaaaaacaagaaccaaaaaaaaaaaaaaaagagcattattctatttttcgccatgcttaacgatcaagaattttagctctctctactttcattttccccctcatcaaaatttctcgatgttgtttcgtttccaccataatatggacatacatgtcttagtatatatatatatatatgctaatttatttctctgccccgattatttatgcctaattattttatttacccccgatcccccatatatatatataaactcatcagtagaagaactccggctaagtcactagaactccggtggagaaaatttggccggcggtgtaaggagaggttgagaattttgatctacatctctctttcctttcatcatttgctatatgactcgatcgacactctgtgctgcaaaatgctttttctcctctgcatataaaaagcaataagcaatcgaaagatacgaccatagtataaaaatacttatatatatgctcccaagttatacctgtaaataaatatgtcttgaccatgaagtttcttcctgcacaagtaacatgaattgaggaaacccaaaccctgaaactctggcgaattctctggagattccgtaacgacatcgaccacgaaaagtctttcccgacgatcatcgttgatcttacttgagaaacactcaaacccatctttgtcataaacccttgtactacaagatccacttggtccatggtggcatgtcaccaacgtgtaatcctcctcgtccattatgaacatctcctcgtcttctccgtccgtgcttccaccatggctcatgaactgaaccggatcagaccggccgggttggttcggttccgatctacaaacgctcgtgattcgacgagtgtttgagttctcgagcgcggctacaatccctagaccaacagagccaccaagattgtcatcgtagaacctctttgaactgtttctttgagatatctgagggagaatcttgaaatccagtgggcttttagggctcgtcatcaagacgtcgaagaaaggagccgccgtggatcggttgacaccgacaaggagctccgatatctttccgatcatgggatgggttcttttagtaagcatgatcttgagagagcagggttttgatgatcagattaaatcgaaaaaacaaaaactaaaagaagaaacataaaagaagaagaagagagaagattggtggtgtttgtaaacctccacagagaagagaagagatgggagagagatgtgttatttatggtggagttggtgggagagttgagttgagaaccctttacactactttttatttattgcaatatttacaaaaaatcacgtgaactattcttatttcacgaataaaacccttactgtttatcttcaaaactaaactaaaccatagaatatctaaatgacgtaacaagccacattggaattttttattatgaacgtctagagagagagagtaggagtagaatagctgatcgccaggttattatccaaggaaaaacagaagggagaaataaataaatttggtataatcagtagtgtcttgatctattaattgaatgtagtacgtatgtaagtatattataagtacatgagtaagtcgtcaattatagttatgaagattgtcaaaatactaaagctaatataacacattgacgcaaatatgatttggtacttctttatacaaataatagtgtgggtgacccggtgttaaactgttagtactgtagattatattaatctaggttaattatttctttagtcatgactcatgagcaggcaaataatagctctctagtcataaaataaaatttatgtacatgaggcaaataatagctctttagtcataaatctatgttactattaagaaaacttaaattgttataaaaatatggagatgaatgtatcccacaaacgctacgagaagatagctttttaatttttacagcgttataaagttagtttcaaatgcatgcaaatgatgcaaatatgcaatcacaatcatccatccacaaaacgctataccaaaaaaaaaaagtcatgcatctacaaagatatattaacgttttgtgagcagtaatgtctaaaccaaacgcaaccatctgtatttgcccaaacttgtacataacagcaacacatgcatgttttcttagttattcaataaaataaatatttagttgagtgttatatgtataagctgaattgacataaaccctaaacaatgcttataatgattttgatttgaaagatttgtttttgtaagaaaatcaaataaaagattttaaatctg

SEQ ID NO: 64917 - DNA, 173 bp, Arabidopsis thaliana landsberg
  unsure (1)..(173): unsure at all n locations
aaagtntcatgaaaaaaccattgaggaacaagcagagatagctaaaagctacagggaaagggaaaatcgaacaaaagagagagaacttaccccgagagacaggagatcacaccaaaaagacagaaccttcgcaagcctagtaagaaggagccctacacaagaaacatcccatc

SEQ ID NO: 64918 - DNA, 1798 bp, Arabidopsis thaliana landsberg
aaagctttacagtgaagaagttgagatcgaaaatagaacgcgaaggtcgtaaagtcaaaggtagtacaataaattcccacccacaaaactcgccgaacacacaatttattataattaaaattctatacccacgcaattcccatttcctcttctagtaaagcaaaaaatgcaatttcaaacacatacacgacagctacataaaaaacgaataaaaaacacgtgtatatttccacttttatatcagcactagttccaaaattccaatcaccgtcagtcacgttcgatatggaaacaaaaccctttcacggattaatcattagacaaaatcccaatagattaatttatatccagagtcgcgcactacaaagcatgatcgtcaaaaacggtcccaaccatatgttcatttcataacattgacttgatcactcattgagacagaacaatatgctacttataacataacttctttttaaacaaaacacacaacattgatttgactacatttcccaatgtaaaaaaaaagattgaagaaagctcaaatgtgtaacctacggggagggattaaagcccgaggaggatttggtatcgagtcatccggtccaagatcatcaataggtggtcgcttcctatgtgcatcggtaaccgattggtacgccatacccaatgccaaagcctaccacacaattttcctaaatttcagttcactgaacgacatataagatatatattctattggttttacttacaatgtgatcacgttctggaggggcataaattccggcattgatcgttgtccgtctccggcaactgttggttggtggatccgttatgttcttgaaaccggtcggaatcactagaaccggcaaaccgactaggtttcccatacagactttctcccaatcggtcacatttccaataaacgcatcgactgtaaagctcttctccacttcccgaatcaacttaccacgagctctctgagcctaagccggtaaattagatagataaataaatcggacataactatcacaaaaccaacctataaaccaaaatgagaagttgaaatggacaaaaacctgaatgtaatctactgctgtaactacacgagcacggcgtaactcaaccggccattgatcttgagcttcatagagatcttcttgaccggttctttgccattcatcaaaatgagccaacatatctacatccattgtgaagttcaatatcccttgaaccgattccacagtataatttagctcaaaaggaaccatattgacacctttggaaccaagaacttccaccacctgaagaagtcaaatgttgaatcaacacaaactagttcattactgtgattggaaaaagtatttagcagcttgtttaccttcatatcagcatcttttgtatacccaactgtgagttttgtgatatcaacggagaagggatcttcaaacgcgatctctctagatgagagatcatcgggatcttttcctttgatagcgtcaagaattacagcgcaatccgctgctgttctacagaaaggtcccagcttatcctgtaacaagaggagttggatcttaaaggttagatattctcaagttttcactcggttttgaagcacattaaaaccgctactattttcaacataccaggctctcggatatgctcatcactccggttctaccaacgctcccaaatgtcggacgcaatgctgttatgccacaccgcgctgcagggtatgtcattgagcctgctgtctccgagcctatagccaaaaaaaccacccccgaacaaaaagtttacccaa

SEQ ID NO: 64919 - DNA, 569 bp, Arabidopsis thaliana landsberg
  unsure (1)..(569): unsure at all n locations
ggactaacaattgaagtgcaaacaaaccctacttattttttccnnnnnnnnnnnnnnnnnnnnnnnnnnnnnnnnnnnnnnnnnnnnnnnnnnnnnnnnnnnnnnnnnnnnnnnnnnnnnnnnnnnnnnnnnnnnnnnnnnnnnnnnnnnnnnnnnnnnnnnnnnnnnnnnnnnnnnnnnnnnnnnnnnnnnnnnnnnnnnnnnnnnnnnnnnnnnnnnnnnnnnnnnnnnnnnnnnnnnnnnnnnnnnnnnnnnnnnnnnnnnnnnnnnnnnnnnnnnnnnnnnnnnnnnnnnnnnnnnnnnnnnnnnnnnnnnnnnnnnnnnnnnnnnnnnnnnnnnnnnnnnnnnnnnnnnnnnnnnnnnnnnnnnnnnnnnnnnnnnnnnnnnnnnnnnnnnnnnnnnnnnnnnnnnnnnnnnnnnnnnnnnnnnnnnnnnnnnnnnnnnnnnnnnnnnnnnnnnnnacaagcatgccacttacccgccaccgaaactcgccgacgctacccgattctgtacatgtgtcgactccctaccttaagaaatatcattacccatgagatgctctccat

SEQ ID NO: 64920 - DNA, 522 bp, Arabidopsis thaliana landsberg
caaaaactcctgaaacatagttgattgagggtaagaatatgagcattagacaaaattcataagaacacagacacacacatagaagagcaatctagatgaaaagaaaaccaaagcctagttctttttgtcttttcctacatgcaaagacgtgcaagaacatgatcaaatggcactgctagacataactatctcagagtcatcattgtaatcagctttactctgtaatcaaaaatcttagctgacaataaaacatagtaacctgagtcagggattattgtgatgaatttgagaattcttaatttattataaggaaatttctcatatttccatatttaaagccgatactaaatcctaacaatcacatttccattaatttcattaatctagggattcaaagatgagattttttctagttcccagtataaattcacatgatttaaccgttatacagcattatgaattgagggattaagacaaaaacagcaacgtgagacaatcgaacaaaacttgataaaacaaaac

SEQ ID NO: 64921 - DNA, 552 bp, Arabidopsis thaliana landsberg
tttgtttattacaaataagaaatgtactattttgcattatttactcttgttaatctttctatttttcatccagaggatcagaaagatcttagccttggcctaaaatattacatttgaaatctggatcggaacttaaatatgataaacaaatgaaacattgccagagtttccagcatatgctgcattgttcagctagcgtttttggtaaacagatgaatgtcactactcacttcctcaaacttcagtttccattggtcccggatccaatttgaaacaccaaaattgacgatcattccattttattcagatcaattgattttgttggaatctccttgaaatactacttttcttgggattttggaacacactctgcatcgttattgtaagagtctgatgaaattcatctttcaaagccgaataacagagtatgtgtatgatatgatcatgcatgcatgtgactacaccatgtcattttttaatacttaaaatcacaatgtcacataatctattcaaaaacgttttatacaacattctcagtctcaaaatatgaga

SEQ ID NO: 64922 - DNA, 1546 bp, Arabidopsis thaliana landsberg
ataagtgtggtttcctcaccatctcgttttgaagattccagaaaactgcggtgtcattcattgccatcataagtcttaaatatctaccctgcatatttggagcatgctgcttcagatacgaattgacaaggtcagctgagatatttccagacaaaaacaagtcgatggtttgagttggacagctttccaggacaagcatagaatactccaagacaagcattggatcagttctgcagagaggctgcagagagaaatccaccaacagaaagttagcatctcacagctgtttcttagaatactcattattttcagtcagtaccaaaatcaaaggtggttaacaaatttgtagttttctataaccatttagaatctaaagatagacaaagacgaaaggttagcaccgagaaaacctgccttgagatattcgatgatcaactcaggactaaatatctgtgtaacatcagtttgtgactggtttgttttagactcatccgccagctggttaagaagcttaagggcttcatggtgcatcgaattgctcttgaacagttctaatagtgcagaataatttttacttttcatgagaatctcctcacaaatcttaacgtcactgtagttgacaccctttaataactctatagcagctccagactggccagtgtgtagaagtgcttggagaagagctgtatcaaggattgctgccatctctcttgcacctgaattaagagggatcataccacgtccctgcagaaaaaaagatgttaagtccccaacaaattactatcaaacgtacaaatcaagggaagctgcttatattatccatgcatcaacttccaaggaattagtcagtcagtagctcccaaaagcttataaagtgttaatatccaagaactagtcatcaattaggtatcgcggaagataaatcatctgcaccttgctggacttcttagacttagatgaatcatttgccccgtaagttttaccaacagcatccgaaatgacctcttctgttccttcagaagtggccttctcgataacagccggcctcctcttcagcaagtactttataagagccatcaaagtgttgtgactcattttcttagattcaaggtctgcattgtcctcagattccaaaaaatatcgaggagatgaagactccatatcatctgaaatgccggatgaacctcttgacagagatgcttcatcaccagaaatgtccaccatcttatctggttgaggaataatagttgttttaggaagaatgatggatggatacatggaaagtacatgcgtgatatctacttgagatgcgaggaagtgttccatggcttcctcatagctcccgttctcaaaaagataatgagcaaatctgtatcatgataacgagacaacaaatatgaacaaaaagattcccatggaactgcactattaatgtgtaactagtagaaggaagagaggggcttctagctttacacaccttgtgtgaattgaactctctttcgcagctcgtaggcttgactcatcaggggggaggtactttgcatac

SEQ ID NO: 64923 - DNA, 1218 bp, Arabidopsis thaliana landsberg
cgttgacattcctatgcattaaaagtttaaaacataaacgcatgtttgtggttttcaaaataacggaaatattttagatagtaatgttgaccaaagtttaatacaaagacctttgaatatgtgaaaagccttgaaggcttgaacgaatccaaaagtacgtatagtgagtgtagagtatgtaatcaaaaatagacttatttagtgtggttgataacgatgatggtatcgttaatttgggccaagaaaaaagcacaagtgagaggggatgggctgaatctttgctgtttctggtttggaacgcacatgggtaggtcacagttgtaacaaatcatatgggttcgtttcataatcacatatgttaatttttgtaaatccaagtactaattttattgtacagaacgacaatatagaaaaacaaaaactaggttgacataccgaacatgtcggtgttttctataattgatagtacttatgctatcaaaagcaagatgtgcatatttataaaaagaatcatttcaaaaaaaaaaaaaaaaaaaaaaaaaaaaaattgaagaataagcttaaatctttaaattaagcaatcttaactttgaatgtgaaattacgattatgaattaactaatttcttcggaggtatacgaatatttggaataaaaacttactagtaaaaatcttatagtactaataaattatacaagcataactctaagagaaaaaaaggaagaatgaattctttgtttttatcttacacttatatacttatgaaaacatctatttagatttgtgatgtcacttactgaagtagaagtaaaaactaacgaatgttttacgtagactttttttataaatatctatttagatttgcttataatatccatattttttccaaaacacagttatacataacatatcaacaatgaaagattcaaataataattattatttttaaaaaagatgaaataatggatacttattacatatgtttctacacacatatatagatccgaaataacaataaattttgaaacagattaatgttttaactcaacactcaagaaacaagtagtgtatatatatatagctgtctttctgaagataattatgcaaaccataacttgaaattttgttgcaaataatatactataacatatatatttatataacatgaataggaaaaatgttctaaaggatcttgatgatcaagtttaagattaaata

SEQ ID NO: 64924 - DNA, 743 bp, Arabidopsis thaliana landsberg
taaattcgccaagatgctatttatctcatcacatatgtctttagggagtttgaagcagttcattgtatagaccggtagcgccatatccaccgtttgtaataattttagtcacatatgtagacaaactatatatcttccataacaccatattacttagattaataatatgtatagctggttagttattaatagtcaacttacatgatcttaaaccacttgtgttatacagatcttaaagacgccaacccaaaatccatgaatatgctaaacatataagcttatcgtgataattgtattaatatagatatgtttattcatatattatacaagaagtataataccaatgtgttataaaagcgaactatgagctcaatcaatatggattgtatgaattaacatatttacaaacatagttataacctaagttgttcatacatattgacaacattaatgttatcccccatgttatacaatattgtgtacgccttaatgaatatgacctttaagataagtatccatgattataaacagggtaagtcaggtcgtgttcgaagtgtatgattgacaatataatccaaaacatgtggtgtggcacattacagtattgcgtttccatgttcttatatagatgtcatgaacatggtttaacatattcggtgtcatgattaagaataaaccgtgactgaacatataggctgcttgtatacttaattatcaaccagtcataaactatcaaagatcat

SEQ ID NO: 64925 - DNA, 455 bp, Arabidopsis thaliana landsberg
cgtcccaaaagaaacaaagaaatgataaggaacgactgaaggttttactgttggaatgaaaaagacaaagacagaaagaaagaaagaaagaaagaaagaatgaatgaaagactgaatgatatattagtaagattgtttgaatgaaaatgaaagaaagattgaacgaaagacataatgaaactgatgaacgttcatgtgctaacatttggatatacatagaacatgatatatctttgggtaataatctcattatgttgtcacaggcagatgaggccaaaaatatagggttctgctttcttgagcgtatgtaaagactaggcagcaacgtacataatgggccagcaccaggcctggtacttcagtttggcttcatgacagtttgtttactccttttacccctttcccattctagcaaattggaagctccccagcctgattttccaatgctattgtct

SEQ ID NO: 64926 - DNA, 2126 bp, Arabidopsis thaliana landsberg
aactgtttttcctttcctacttatgagacattgataatttttatttattaatttttgtacattttttgtcaattatgaaactttttactaagtatagggtatttttgttaattatggggtatttttgttaattttggggtagttttgctaatttcgaggcttaaacaaaacaaaaatatctgcaaatgggtcgcaaaaatttaagacccaatacaaatgtttcataataattggtgaaagctggacctaagtttatgtgaaatcatgtggtctagaacttatactagagcatcaatctgaatataagggtgagtttcaaacttttctttaggcatatattatgctcacatcagataaagattacattgagtggctcgtgaatacattcaacagagttttttttaacattaaaacatgcatagaattttttcaaataattttctcgtacaaaatatgcaacaaataataataaacacatttttaaatgcaaaatagtttcatataaaatgaaaaaaaattattacttgcgatagaatctataagccttaatcttttatcattgtgcttataattttgtccaatcaaatttctcaacctttattggtttattatagactcattgcgatcgagtaatttttacttattctagtttttcttataaataaatcattaattattgctatgtgatatattttctttcaaaatattttatgaatcaataattttagtggctaaaaaactatgtgaaagtgaaaataaaaacacatgtagttggctttatgcgttcatataatcattttatacgtggtgggaatgagaatacttcaacaatgaaatatgattgtgagtaaacacatttttagtggtaaagtagatgatagatttgtaaatagatgtaaattagatgatgatttgactaggaatttgcatgtataatatttttcgaataaggaaaaaacgaatatataaaaaaaatctcaagctaaaacattatatatttattttctacttacaataagattttaatatatctttttgttaaatttattttcattttaaaaaattaaacatgcatattggatggagtttaatctagttgaatctaaaatttaatagttttacgaaagatttgttattaattttagttttgaaattgagaataaaactaatgaggcatcaatccattaaatatatgtaagaacaaatcttcatatattatataatatgtttggcaaatatatataaagtaactgaaaacaaagtgaaaatttgagaataattgtgggttctttagttgtatgtattaaaaaaaaatgttgttgatgaaaatccatattattatgatataaaacaaattcattatgaatataaacataacagatatctgctataaaattcattatgatataaaacaaaagattaaaataaaataaacataacaaatatcgcttgtgaaatgagatctatatgactattgggctggagttgggcctttagcaataagagtgcgccttataatataggcccatttcaagtatgtattggcgaaatccacggcgaaagagagagagagagcgaaagggacgatgagcaacagaagaagaaccggagacgatgacaaaggattgctctggaaacttccccaagttaggatcagagacattggaaaagttggtccagcttttggactcggtgtcggttgcggatttggtttcggcgccggtcttatcggaggtaaatttctaatttctcccaattttgatcgcagactcgcgaatcgctcgaagctatttatagatagttttggtttaagagagtagagattggtttgatgaaaacaggtgtaggattcggaccaggagttcctggattacaatttggtcttggatttggagctggttgtggaattggtgtaggttttggctatggtgttggaagaggagctgcttatgatcactctcgttcttattataacgttggaaaaccatctctgtgagtatttttctgcaattagattttaagtgattcaggatttgaagaagaagaagaggattttgacaaagtgctttgttgacaggaatgaagttgattcaaaaaaatagtacgcttgttgttagaccgaaaaa

SEQ ID NO: 64927 - DNA, 617 bp, Arabidopsis thaliana landsberg
  unsure (1)..(617): unsure at all n locations
cgaggcgtgtctcggatttcaggcgagtgatctaagccatggatcaagattcatataaagtatatatagacttgaaatgatcttagctgataaaccatattctatacttttaaatctaaatttgcttcataatcataactgcaagaattaaaaagtaattggtatattctaattatgggattttgatacgaaatatatggtcaaatcgctgatgcatatatatagctcaaataaaaaaaattctaatgcataaattgtttagaaaaatgtataagtgcatggaaggaaggccacacatttgatcttttacatgctccaactagatcagtaacttctaaagcaaacaccactctattcagcttctagctatgcaagaatttgttgctattacctattgggggttatacctttctaatattttcgttaacgattaagtttacgagcgaatacacatgtgtacgtacatatatgatatatactgncaacatataaatagttgtgtgtatacatgtagtgttgatagaaaatgcgtagccttaatcatatgctagaacgagcgttgatgtactattctgatttatttaagatagcatatattataatgtatctagcccaat

SEQ ID NO: 64928 - DNA, 475 bp, Arabidopsis thaliana landsberg
gaaggatatatcatagtgcactagtacgcccttcggttcttaaggatgaatcactaaaatcaggtcgtatcataatcttataacagcggacaactctaataacatactgataagaacttaatcacacgtattttaagctgtatatgaggaaaaaacattacaccttcatatttctgtgcaggtacaagcaaccgatgatagtctgcatatgtttgatgagctttaacctgtatagcataaggattacaatgagcaatgaagaactaacaagatttttcagattttggaatacggaaatactagaaggcagggataatatgtgtctaccgtataagaaattcccttgaccacaacaagcccaggcagtggctttcccttgtctaatgaaaagacccgcccatgaactcctgtctaaggtgtaaaagataaaggtcgtacttcataaaacaaaacagaaaatattttatataacgat

SEQ ID NO: 64929 - DNA, 505 bp, Arabidopsis thaliana landsberg
cttttaatttcttttaattttatccataacttctactttgttaaatctcgtaatcaacattaacgttcggtaggactatgaggtaatcaagtataagattcatttaaattattccggaatccgagtcatccgatattatgctagacctgttcttttcgtaaattaaatatctttgacttatagatcttgtaagtacttgatcctaaacaaattattgattgctaaaagtgtatattgtgcaatcaaaatatttttaaggtacatcgcgatataattgctataattctcttaccactatatttgcttcctggatggtttttccttaagtagtagcatttacaaaactgaataaaagtagctagttaactttaagcaaaatataaatataatgattcgaacaaaatataatttatttgatattttgcagcttggcttcacattttaaaactttgattgaaaagtaatggaaacagctaaaaagacatttcatggatgattgtgaata

SEQ ID NO: 64930 - DNA, 660 bp, Arabidopsis thaliana landsberg
ctctcatttggccggcttttgtcagcgccacccggcggttggtgcgctccagcaggcgcgcgcccatctcctcctccagcgcctggatctgctggctcagcggcggctgggaaatgcccagggcctcggcggcgcggccgaaatgcagttcctcggcgacggcgatgaagtaacgcaggtggcgcagctccatgggcactccgaatgagtcgaattacatatcaaacgtgtcgatcaatatattggaaataataaaggcccttccttatccttgtcacacaagcccaataacgactttccactttctgccagcctggctgcgcgggccgatttcgctcgccgcgaggcacacccctttccagaatcgaggtgagttgtgagtcactctgccgtgcgggcttcatcggcttccgaacccgccttgctgcaggccgccgaggcggccaaccaggcgctggccggcgccgtgaacgacatcgagagctacatcgagaaaggcaccccggccttcatgcgtacctcgctcgcgctgttctccggcggcttcgccaccttcgccctgctctactgcgtgcagccgatgatgccggtgctgtcgcagaccttcgtcctcagcgccgcgcagagcagcctggtgctgtccatcgcgaccatcatgat

SEQ ID NO: 64931 - DNA, 1618 bp, Arabidopsis thaliana landsberg
  unsure (1)..(1618): unsure at all n locations
caaatctagtaacctattatttcttatgttaacatttctcatttatttttgcaggagtcgacgacgagacacaggaaaacaaagaatcgtttggtgatataataaaagacacaagatcgttgacgggagaattgaaacggatacatatgtcaaaagagaaagtttcccattttaatgtcttttctttatttataaatacgttactgtaataaacttcaaacatgttaatgagtgtgatcccttcatgcatgcaaatcagttatatgtttgtannnnnnnnnnnnnnnnnnnnnnnnnnnnccttcaatatcaaagtttggttgttcaattaaataaaagtatgagtttcttttcatttttcctgctccactatcccaaattttaattagcagctatgaaattctaaaatgaaccatcaatatcaatttctctataaggatatatagataaacgttaacatcatcgaggaaactgaaaatgtgttttagttaaaactggtcaacagtcgtcgtacttctgtctaagtacatcctcttaatcgagtcttagtttggccagacacaaacaaacaaaaaccgagtctgttgacggtaaggagatcataatatgccttgaggtcaacggctctaatagaatcgcagttgacttatgccgtaccgtgtgatacacctcacgtgccttcctcttgcttctcagaacaaaggaaacttgtttttcaacatagattaattatataaataaggaaagcaaatctatgcaagtgatcaagtgtcaagtattttgtgactattagtttatttcatgcttagtagtatatctcggcttgggtaaaaagactatacattctcgtttttatttttatgtgtttgtttcttctgtaatttcgtatttggattcatcattgtttttgtatttcttcatttttctgatatatcaattacattcaattattcatttgaatcaagtggtagtatatttctgcattatttttttgaacaaaaaaaaagtatatttctgcattattggttaccttaagctattttggaaaaaggaggcaggtcttcatacttcttgtcttgaaattatttaagtggttagagagaaaatcataagaaaatacggagtatttgactattgcaaaattaaaatctatgtaagaataagacatgtataatctgtacatgtttgtttgttcgtttataatcttattattgtcggggttttccgtaaattatatgtctcattcggacttaggtcttagactatctgtctttctttttcatctcttttactctttgcatacattaacattagtcaagtcaactatattttttggatccgcatcgtctttgttcttgaccctcattgccgaagataactctctccgactctttcacataaatccaccggattccacatatatggctgttttgatcagtacagcaagaatctttaaccgttgattaaattataatcttagttactacatcccgaataaatgtttctcaatttgatggacgcattgtgatgattttgttcgaccatctatagaatgaaacataatggtgcatgacacattgcataaattatggacccattttgacttataagacataaa

SEQ ID NO: 64932 - DNA, 177 bp, Arabidopsis thaliana landsberg
ttgccttctcctgccgggatcaaaaaaaattaaaaacattgagtattttttaaagtaggaataatattaatttcaatgaacaagaacaactatcaagtactggttcattatcaatttattattcgaaaaatatttagaaaagaaaaaaaacgaagatgcgtgaataagcatcttttt

SEQ ID NO: 64933 - DNA, 393 bp, Arabidopsis thaliana landsberg
gacagatgtgttgagtaatgcctttcttcagcgatgatggtaatacaataatgcaaactaataatataatattcatgtctctaataagtactatattacaaattaagatcaatttgtcttctcattattcttctctgtatattcttctcatcaccgttgttttattaaaaaaaaaatctacgttaaaactaaaattgaacaagaagtatatataatttgagaccgtcctcatcattatacttgtaagtttacgattatgatataattagtcattagagaacatgaatatgctgaagaactataagttagattatttaactttatgtatatagtagaaatatgatatctcatcgtaccaaaaatattcgagaaacaatcaaaacccaaaatcca

SEQ ID NO: 64934 - DNA, 178 bp, Arabidopsis thaliana landsberg
atctaaatttttataaaataactgttaatttccatcctagtgtataataaaagacttggataaaaatcggaataagaatgtcatcaatcaaagtgtagagtaaagattatactatatgacattctgaaccatccatatctatcttaaaaccaggaagattgttgacaagagaaggaca

SEQ ID NO: 64935 - DNA, 106 bp, Arabidopsis thaliana landsberg
atagtacctaacacggaagcgcatgtaagtcactgctgctcatagacgtacacaactgccgtggagcttaacatcaagttcttcttaaccacagtacctattctta

SEQ ID NO: 64936 - DNA, 1590 bp, Arabidopsis thaliana landsberg
agtctccagcatgttcagcatttctattgtgtaatacatgcacaaaacttcttccatggactttccaacaacgacatacgagtttatgacgtccttaaatcacaaaaagaaggcaaatgaagcaaagaactatgtttgcattttgtatattcagtccgtgagagtcctaagataccacctacctggagtgtcccgtgtgataaataatcgcagacaagtatactgtagtctgaatacacgtgcactctctgagccaatccaaaacttgatctctaacatagcatgagagtaattagtacggtgtgaaacacctgtgaactggtaatattaatggaaaagggcatacttggctatctgggatcctgcaatcaagttggcgatacatgtggaattcccaaggaaaaggtggtttttgtacctgttgagagattagtatatgcaatatgagcatttagcatcatactgtatttgaaaaaactttaagggtctatctacctttagagcaactacttcatcaggattgctgtcaatgaatgctttgaacacttgagcaaaaccaccttggccagcacagcccttcatctggtactttcttccacctagcaaatagacagagccaatggatccaggtcactttttattttagtctcagagaagacatattgtcccaggtgagaacaaagcgggaatcaatttcttttacacaaatgaatacatgcccagccacttttaatttgaaaaatgcatcttataataaaaagaaggattctttatcctgtagcggtgacagactagattggtatgaaaaaagtatacctatctcaatgatcttatttctggaataattctgcaaagatgacaggttggcctttccagggaaaactatgttgcttacatggtacccctgatgcaaacataaagaaagaaactcagtggacaagcctccctatataagttaaatcatgtaaaatatcatgattttccatcagccttacatcatatttcacaagctgtggttttatcttgtgaattaagccgttcagagtggatgtttcccatggattcacaaaacccgtctccaagtcagtggcctgagcatcatcaccaacctgccagaaagaaaacgttcaatcctcaactaaagctatcaaagtgcattagaataaccatatgctactcattaaagttagaaaaaaccttttcaagggaagatgctttggtcctcttagagattctttgtaagaacaatgagtgagcctcttttaacctgtcaaatggttcagctttcctacaaattctccacgatagcataatgagcaacaaatcacaaattaaatcacaaaattaggaacgagccacacagcaaggagaaagataagagaccttgaaagaccagtctgataaaccgaatttgctcttcgccataatcctttgacctcaagaaaaatagcataccattcatagagcaacgaatgcccttcacatatctcattctcttcaatttctataaaaaccctctcaaaattttccatgccttcaagctaagaagagattcacaatttaaccagtatgataaaaccccaaattgta

SEQ ID NO: 64937 - DNA, 1461 bp, Arabidopsis thaliana landsberg
ctctacgatctacccttatcatcctttttaacgctgtcctttcttagaacctgaaccggtattttaagaaaaccgaaatttcaaaaatcacaaattatgcaagactccggtttttttcgtaacaaaactactcaatagatgacaataaagtattatattagagagaaaaacatttattgatttcaatttcatgtaaccatttcgggtttactaatgtgaaccggacttccttaaccagccaacagaatctgttctggcggcagcgggaaaaagatagacaacgacaataaaagaaaagggtagtaacgtaatttagttgaaaaccatggtgattagaagctaatctcctctataatacgagaaggggattcttaaaaatcagagagacataaaaagtaattagtgagagaattaagaaaaacaaagtctattccatacgaagaagagcctcaggtaaaaaacttcatcataacaagttcgttttagataatttagaggttagaattcgtttttttgttgttctgctcgttattgggtttgcttgatattcttgtgattctagagattctacataacacgtataaattaaaaaagacaaaggcttgtgattaaatttatgttataatttataatctatagtctatataggtagatgtatttatatgtataaaaacgaaggttcatcgatgatcctgccttgtttttagtctattaggttaagtagttaagatcgcttgttttcgttaagtttatgtaaaattaccgcgaaccatatatatagaaaacttctaataatgttttttacttttggtggcaggttaattttttaaaagatgggttattggaagtcgaaggttgttccaaggatgaagaaattgttcgagaagagtccagcaaaaaaggaagttgttgaggaggagaagccacgagaggtggaagtcgtggaggaggtcgtcgtgaaaaccgaagaaccggccaaggaaggagaaactaaaccggaggaaataattgcaaccggcgagaaagagatagaaatagttgaagagaagaaagaagaggctaaaccggtggaggttccggtcctcgcagctgcggaggagaagaagccagccgtagaagaggagaagaagacggcgccggtggaagagaagaagccagctgtggaagaggagaagaagcctgccgtggaagagaagaaacctgtggaggaggagaaaaaagaagttgttgccgctgttccggtggctgaaactccttcgactaaggctcccgaaactccggtggttgaaactccggccaaggctccggaaactccggcggctgcgccacaaaaggcttgaattttcttcatggtacatttttctaaaaaaatattgattgtctttgtgtggataatttattttctttgtttaaatgtcttattatccatgtgaatttcctctataaattaatttgcgtgct

SEQ ID NO: 64938 - DNA, 1585 bp, Arabidopsis thaliana landsberg
taactggcatcacgttctacaggcgcgttacgaccatcgtcgaggctagaacgagtgctgtcgggtttctggtcatcgaccaccatgccggaatgatcaggatggtgatcgtggagaattggcagatgttcagggcttggctcgctttgatctccggggcttcgaatttgtttgtatgagctatgagatttgaaggaatttctgaaatccatttgaaaattaattgttattattaaatctaagaagaaaaatttgcttaacaaaattacgattttttagaaaaaagaaacaaaaacttcgccgattgttgtgatgcatggtacaaaagcttacgttaattaggaataaacgttacgtgtacataatggcatgagattataaacaaattacaactattatattatttacgataatgtttttttaacttactatgatcaatactggtataagagattcaaatctttatagtatagcaaataaaattcatattaaattgaaccaaaaatgataattaaaatccaaaactatttcaccttaaatattttattttcttttatcaaactctaattattacaaaaacacacacaacacaatctctagatatcctttattcaaataatcaagaccagagttaaagaaacaagagatgattagaacaacaacatcaccaacaacaacaacacaacactaataacaacaataaccataagaactaagaaagaaaaaaagaacatcaaaagaattaaaacctcaagtaaagatgaagagaattggtatttacccaaatagcttcagaattatcagtcttcttcacttgcgtcttcttcactctcgtcttctgcatcctccatttcaacatcaccttcgtctccaagaatccactgttcaagctcatcttcttgtgcttctatgtgttggtgtatgtctgcagagtcccagtcgtcttccccatcatttccaagctcttctccacggcaagagacctgcaaatgtggtcgtctccttgccaaagcatatacgatatctctgtttacacttcctgtgatccctaaccatttaagcctcgggaaaaacggtttctttagccatttgaatgagagttgcgtgatgccaccacagtcgtaaagatccaacaagcacaggctacttccaggacattcgtcttcgtaaacccgggtggatgcaagagccatgactgaggcatcacctatgagtctacattctcttagttgcagttttgtgattggggctccagattttgctagagcaaaaatggcagcatccgttagattaggaagattagacaagtcgagttcccgcaacgccagttttgaggatccgtcaaataaggtagacatgaacttatcggttaaatttctgcaccctctgacagataaagaaactagggagtccaaaactccctcttttaggtacgaaagccctgtgtcgctaatatcagcgccatcaagaagtaaaaccttcagttttggcagatgagatacagctttcaaggtttcatccctcaggtttctgcaccctctgaggtcaagattctccagcttgagacttgatgccagcttttgaa

SEQ ID NO: 64939 - DNA, 2281 bp, Arabidopsis thaliana landsberg
tttggacgcggggatggcaacccagcagatatggcctgctgcttaaatgaagaagcaccccaatagccgacacgaagttgctgaacatgcgacaggaaccctctaagtttaatctgaaacaaaattcaagatacaacaaaaaagatatggactcagttggttatggtttccaaaagcccaattaaaaagcttgaaatttgtaaatgtatggagtataaagttaacaaaatctgtgacatttcaataactgcagaacgatatgaacagaaagcctaatttaccagtaatttatatccaagcttttgtttctctgctattgtctcgatcatgttccaagcttctgtatcaggaagtcccaagccagccttcaaaagagcataaagtaaagtgaagacatattaaataaagagaactgtaactatcacatatcaagaaatgaaggtaaagaataagtcaactctcaaaataagaaattcaccatatgtgatgccactatgattagtctggctgtgaccaaagtagcatagttcacagatctgagaaaatacaataaagagttacacgaattagtaattcccatgatgattaaattaattggcagtataatgcaagagacaataagatgatgtatgctcaacagggataaaatttcaagtatgttgacaacaatggaaaagttgatgaagcatccttaagggcaaatcgaaaaaagataccgatgagtgacatggaaattacttacaatctacgagcattacatatatttaaagactgaagatctaaaacatagacaaagtaaattcctgatcaatctctttttttttctccaaaattttctttcagcgatctagttagagaaacaaacaagaattatggaaaccattataaatagctcattgcgagagccaatatatcaagtatgctacagatcgacttttattttcatcacaaaaacgtgataaggagcatttatacaaacaaacaattgatattatcgatgaatacaaaattttaagaagactcactcatttgcaggctgctccatgagatactcgaagtaaccttcccaaaatctgtcaaaaaaattcacaataagtcgaataatctattttctgagcagcaccgaaaaattcattaaattcatagagccggcagcatgttaaattgcatacctcaactcctcccagatgggtatggagatgagatgacgctgaacatagtcagagacattattggcatccttcttgaacatttctgcagaaacttcaagtgcatcccgcactgtcgacaaatcgcttcttgaagcagcacggcccacagccattttgagctgataacaatgaataatcattgttgaagaatatcattgttaagtgtttaaaagatttcttaaactccaaattcaaaaacccaaaaaaaaatcattaatggggttacccaaagctaaaaacctttcaacaacagccaggactaatctgaccaaatctaaatatgcacagctctcgtgcacgcaattgagaaactgggaatatgaaggccagtatacagataaaactagttaatcgatcatctacctaccaattctttgaccgcaatgaactgctcctcggacaattgaccatgccagccctgcaggaaataaatccactatacagtaaggttgagctcaataaaactggctcagtatatatatgccgtacagttgctacgcttaccgaatacagatgctctcgtatacactcgataaagccactcccaccaatcccctcagcatcagattcaatcagagctacatgagcaaaatttggggttcaattttcaattgagaaaacatcagctctctggattttacagcagagacggaaacataatcacaatggaaaccatttggttagtatacggctgattaagcataacaatttggttcattccttggtttaccaatttcttgcagcggaaattttagtctacatttatttacattcccattaaaatggaacatacccaatattgtgccgtattcgaatgaagaaagaggatcttcatctgaacccagtttcagaagacggagccataatccctggaaaccacaacaaaccaataaaatagtggcattagacttgatcttcactgtttttcaatttgggtactgtaggggttctttccttcacaaaattctcaatagacaaaatcattccgaaggagaagttgatcattccagaaacttgcaattggaatctcttaaatacacaaagaagaaaaaatacctgcaacttgactt

SEQ ID NO: 64940 - DNA, 1210 bp, Arabidopsis thaliana landsberg
cccatgtgctatactcaagtcaaacagtcttcgcctagtctctacaaagttcacactgtattcactcatgacaaggaaattcataacttataatatctagcaagaaaatgtgactagagtagaattctgtatccatttcggtttaagaaagccaagcttattctgcaaattacaaaacattatgattcttcaaccatgtatctagcattttgctgaaagaataatagtataagagtacctgaactgcagaacccaaacttctgcatgcgatgcaccatataaagacgacaatacaaagatgtcagtggatctgcgagacctctcaccatcatgactaaacgatccagaacttccatgggctgattaatgaggaaacgccagcaaggcaagatcgcaagctccagataactatgggcatacaaagaaaggccaatgctaaggcagaggaaggtagggagaataagaaaaataataattgatggggctttacatgcgagggagaagttctcgaacagaaccaactttgcagaaccagttatagcaagtctctcttgcttcaaggcagatatcacttgattgaaaatcatctgtctttagcacaggttagagaataaattataagctgcaactagaaataacgctacctgttggcatcaaatgtatgtgtttgattgtaatcatgaacaaatgcccaggtcacgtaattttattctcgagaacactatgctcaggactaaatattattttgttagaaagaaacacacgattagaatagaaatgcatactcggtaaggcgcagatcactgttccatctatatcaagttctgctttctgtttgatccgctcccacaccatatccccaagcatatctagcatgtcagtgacaatgacaaagactgtaggataaaaccgcaaaactgttgtatccatcagaagctttgtgacctgcagaatggaagatattattgaaccctaaaataataataatctagttagttaggaataaatatctacagccaaagcacatatctatttttatttccaagcaaactgcttctatggcggaaaagtattcaaatacaactccaattgaacacgagcttttgagagcactctatattggatatatcaatcaaatgaatcctttttacttattcatacggataaaaatgatacagaggaatagaacacaaccaattttttgaaattt

SEQ ID NO: 64941 - DNA, 139 bp, Arabidopsis thaliana landsberg
  unsure (1)..(139): unsure at all n locations
gccncccagacgcaaccaaggacgagaacaccccacacaaagaacaagcnaagggaacaagcnacaaccaangaagggacaacgaagcaaccaggcacacagaaaaaaccgaaccaaaacaacgcgagacacccacaac

SEQ ID NO: 64942 - DNA, 1543 bp, Arabidopsis thaliana landsberg
cgacacttcgttcaccaacacttatcacagtactctccgcatctttccctgtaagtgctttctcttttgctatttgggcagcaactactgaggctgaaggacctaagtcagattctgtaataacgattggtcttgacctcattggtgttccatattcgattgtgttccttttgggggtatatgctgtcgttttccttggcctcatcggtgtcccatacacgagttgttgctttgtttgcctcattgtattcggcatttttctttggggctcatacacaaccatttgagagtcagaagaaaactcatctttatcaaatcctgagtttgtagtagaactcacacgggattgtgtcaccttccttggcgaatccaccattgagcttgtatcactttttgaccgtcgaagccctacgggttttgaagatatgtttttcttgtgaaacaacaaatcttcttcaaacaaaagaggcatgctttggcctgagttatcgataagccccaccgcaatgtttaggaggccgtgggggcggccagaggcacgaagaacctctagggtaacgaatctcatagccgaagaagggcttacaaggtcacttattaaggcttgtaccgttccaacatgaatgtctttgaaccaatgcaatgcatagatctctataacaactattgatgtggcatcgtagactgcttcctcatctagacgaaacacaaacttgtcgttccatgtagggcttgttccgcccgtattgtcgacccgagtcgtcaatttacgctctggatcaatccaagcgattgcatatgtcttcatacaccgtgccacgggcgccaattcttgggccgaaataatattcagctccaaaatttgacaaggcgcaagaaaagacattttgtgttttcttgacaaaactaaatctgaaaaagttaaataaatggagaggatgaaatttggattttcagtagacagaaagacagatccgtcgtcgtcccctccaaggacgacgaaggaaagcaatgcatgaagatgaaaatggaaaagcaaattgacaaagacacccaaaaataataataagcaaaaaaagaattgttttttttgtttattaatttcttgttttggtttttgttattttagaacaccgaatcaattgcattactttccgttgactactattttctttcattgatctccttgcgatatttttagatctctctactctctttcactattttaggttagtttctgttatttttctgtataattccagagtttatagagattgacttatggaagttctgtttagttctatgtgcgttctaagaaagtaaaagattgctagtacaaaaaacaaaataaaaataacaaaacttacgagttcaaattgatagttagaattctttacgtccactaaaacctttgctccaacttcttaacccatccctttccattttgcttggaatatcggtgaactgtctatggtagaatatttaaggcatggtcaaaacatacttatgatcatatgatatggctacaaaatttttgtcaatg

SEQ ID NO: 64943 - DNA, 552 bp, Arabidopsis thaliana landsberg
  unsure (1)..(552): unsure at all n locations
gcaatatctgcgcgccatgtggccgcgcaaactttataaaggtgtgatgcgggttccgggcgaaaagcgcttgcattttcccggtatggctaccggaacgggcatggaggcgagataggcgcgcggcgccgttatcacaagggctcgtcataatcagtcggcgaaaagtctgcgctttggccggactcatgacggacgatgcccatttgtcacatgttcgcaaaaagctggatacgtcaatctaattcttcgtgtgtcctttttaacgctttcagatctgacatatttcatcgcccgcgcccctccttaaccacatggcaaccatattcggtaatggaaagataaccgtaccccttaatcgtatttctacatccgtgtggcagtatgacgggacagccggagaatgccggcgagaaaacacacataatgtggtgcgtggagtggtgaatgtttcgacggtttgacgtccttgccaatgcgaagatgatcctgaaggcaatgacgctggcgngctgtgtttgtgcggcggcgctgtgtgcgcagtctgcaacg

SEQ ID NO: 64944 - DNA, 318 bp, Arabidopsis thaliana landsberg
ggacccggccaggtgccaggtctgaggatctggaccatcatttcttttcttggcgagaccacagccaccccgtggtggggtcatatacacttcacgagggacgttctctgactttatatccctgcggataaccgacccgcgcccatcgttggcgcacagcttgaggttcacaagctccgtatgagatgaccttgtattggtctgtccacttaagcttcccagcttggggccggataaggtactcacgacgactgactgtgggcatacagtcttactccataatgagttcaccacagcctgtgccattgccgtgaaccc

SEQ ID NO: 64945 - DNA, 420 bp, Arabidopsis thaliana landsberg
cccactgttataatagcactcacacccgcagacagtccatccagaccgcctgtaagattggcgccattagacactgccgtaataatgaacattacgatcagtatatacacgatccatgtatatttttccgcacccggacctatccagctgatcagctaggcatagatgaactcatgattctttacaaaagggatcgtggcgatcggtgtttttaccttgatgaatttcttctgtatgccattcacctccgtgagcaccacattcgtatccttcgcgaggcgctcaccctgctgcaggtgttgagaaaccgttgagatcactttcctttccaccgatactgcattgatgaaataaagggtcacacctatgataatgctcaatcctacctggcctatgatctttgacagaccggacaatcca

SEQ ID NO: 64946 - DNA, 1866 bp, Arabidopsis thaliana landsberg
ttttcattgggcagatgccatgcaaatgatgtcttcgctttattttatttctttgatttaattttttttctttcacttttgaaggcccatgttggagttgccttactgaataataaacttcccttgtctccatcggattcgtctaaagatgacaagtcaaagtcaaaaaagtccaaactgccattagaaccagcaagcaaaaccataactcagaatggggaaggatcatcaaaaggaaagatcccaccccaaaaccgccacttaactgctgcggaactgcaaagacaaaagttgaagaagattatggatgacctaaacaatgatgaaggtgatggccggtcagctcccctagttaaacttggggatgcatcaatggcatcccccttcacagctaaacatgcgtcggttgccccagtgacagacataatccggcagggtcgtagcacacttgtgacgactcttcagatgttcaaaattctcggtctgaactgtctcgccacagcatatgtcctaagtgttatgtacttagacggtgtaaagcttggtgatgtccacgctacaatcagcggagtgttaacagctgcgtttttcctcttcatttctcatgcccgaccgcttcaaaccctctctgcagaacggccccacccgagtgtcttctccgtgtacctcttcctctctctgataggacagtttgctgttcacttgaccttcttggtctactctgtgaaggaagctgagaaacacatgcccgaggaatgcatcgaaccagacgcaagtttccatcctaacctggtgaacacagtgtcgtacatggtgagcatgatgcttcaggttgctacatttgctgtgaactacatgggacatccctttaaccagagtatcagagaaaacaaaccgttcttctacgcactcattgctggagcagggttcttcaccgtcatcgcctctgatctcttcagagacctgaacgattcgctgaagctagttccattacctcaaggtctgagagataagcttctcatctgggcatcacttatgttcatcatctgctactcatgggagcggttactcaggtgggctttccctggtaagatttcttcttggaaacataagcaaagagctgtcactgcaaatctggagaagaagaagaaagtttgaagagaaactaaacaggttaggttgaggtaataatcatcaatccatacaattttttactcgagaaagatgttcgtttttggggatcttgttttgccagaaagcttcaaaaaaaaaacatgagcatttttcccataggtctcccatattgtctcattaccttattttgtcactctctaagaaccactaaatctaagggttttcattattagtctttgtaattgtttcgttgcttactttctttgtataactatgggctaatatagaacgcttaatataacgcgtatccgtgcaaagagcagaagacgacaaacaaaagtaaatctcatcctcaccagaaacgttgtaaataatcttctgtgataaggtcgacggtagatttcaagagattgatcacgcgtcggtgtaacattggtttctccactgattattcatgcgagttgaaaaaggaaaaaagtaaagaaaaaaataccaataacggcaaaattgaaaagggggaagaagagaagaatttagggattttggcggctttagggctctctctcagtctctctctactcccgtcgtccgcttctttttccatttccctctctgcgctctcgtctttgtcttcttcttcttctctatcccgattctacggtggcgctctgatccctaaatttctaggttttaccattttctgttttcaatttcaatcgcgaacaggctttt

SEQ ID NO: 64947 - DNA, 1586 bp, Arabidopsis thaliana landsberg
  unsure (1)..(1586): unsure at all n locations
caccagaagacactctctcaaggcctcctatctctctgttatatgcgtcttgctcttcatctcctgcctctgggcagaatttgtggtttaccttacttctttggtgcggtcgtcttaggtctagccaccccaaaacgtccgcctctaggcacgggactgtcagacaaaatcggttgttttgtttggtctgtcctgatgcnnnnnnnnnnnnnnnnnnnnnnnnncaatatcgatctctcactgttttcctggagagatgttatccggtttgagctactttttggggtggtcaggtttgccnnnnnnnnnnnnnnnnnnttgccttccctttactataaagtgcctctttggcacgccattcttgtcgggtttatcgtcaatatacaaggactttacgacgttcaaatatacaaacagaatttcaattacacggtaacaataattcatttaggatatactttggaacatatataattttaggtcaataacaatcaataatggtcaatgggtgcagaaaatatcaagcaaatcttttggagcaatggtgatgtcagcaacggtaaactcgacaattttcatagtgatagtgaagaaactgtaccaaaccatgagcaaacgcaacccttacaagagacgtacggtgcaacactgccgagtggaggctcccctaaggatcctcacttgtttccggaaccgtgaggcggtccgcccggtgcttgacctcgtcgaactctctcgtccagccatcgggtctcctctctcagtcttcgcggtgaatctagaagagcttaataaccatagtcttcccctccttatccatcacacgcaagagattagtcccttcctcgtgcctagccgaagggaccagatcgttaaggccttccacaacttcgagaagactaatcaggagaccgtgttgatagagtgcttcacggcagtggcaccgcgaaagacgatgcacgaggacgtgtgtgcgattgcctttgaccaggaaacagatattgtgatcctaactcttgatgccgggatcgagttatgggagaggctcctgtgtcgtaatctcctgcacaactgtccctgctctgttgcgcttttcatagacagaggaaggctcccagatttcaggttcgttccactgaaaaagcttaccatcaatattggtgctatcttcttaggaggaccagatgaccgtgaaatgcttgcgtatgcaacacgcttagccagccatccaagcgtcgagctccaagtcttccggctcgtggaccagaacggcgtctctccgctcagagacatggtcgagaggaatcacgacatgagagtcatcaacgtcttccgcaaagaaaattctgagaaaaacatcatcttcagagaggtaatgagaactattttgccttggcttggaagctatcttatttccccttagacgaaaccttctctatgcaacagaggtttttattcggtttagaaagtttcttgtgtagacgaaacagaggtttttctttatctaacctatcataatgtgttcccctgtttctgacattcttaaaggtaagaatagaggaagcagtgaatctactgcatctact

SEQ ID NO: 64948 - DNA, 657 bp, Arabidopsis thaliana landsberg
  unsure (1)..(657): unsure at all n locations
gcttgtgtttttgtttaaattgtcaaaattattgtaagtcactatattgattaccaattgtttttatgagaaacttttatcactcttcacatgctttcaaagatcaaatccatatcaatcagttcatttgatcgacagctattctgtttatgtaatgattatctttttctttttaggtcatgatgatgtaataatattatagctctctgaagtaaagtaatcaactagataacatgaaatataaccaaattatatgatttaatctgcacattgttgtgggggtaaatcagtcaaataattgaataagactgagtggtaagacttgatttgctggattggctaaatatatattatcagtccagtgatacagggaagagtgttgttctttaaccacaaaaacaaacaagtttcataccattattcaagggactcgatgaactctctcaacccttcttcacctttgtataaagtatgacgataaagtaaacaaattctttaaaaaaaaagaaaaactaaattgaaactaaaattcgaaacaaaaaaaaatactaacaaaataaaacctaaaatttatttgagatggaaaatgcaaacatcaaagttctagtagtattattgtctatatggnattcatgtgttcaagctcaaactggaaca

SEQ ID NO: 64949 - DNA, 387 bp, Arabidopsis thaliana landsberg
tgactccgccacggtgggcggcagcgaccgctcgagccgggaggccagtgtggtcaccgcggcgtccagtgtgtcgaccaccggcagcggcgcgcgcaccatgaacgtcgccatgccggcctgctcgtcgcccgggagcgggcgcagcttgcgcgcgaaccgggcgcgcgcggcgcgctcctcgcgctcgcggaccaggtgcggcgcggccgccgcgaccttgccggccacgagggtctggaagcggctccacgggatgcggccgtcggcctgctcgtgggtctcctggtcgacccaggcggcctcggcgacgcagaggttgcgcgtggcctcggcgaggtggatggcgtaggtgtcgcggtcctcttgcgcctggacgcgcgccca

SEQ ID NO: 64950 - DNA, 551 bp, Arabidopsis thaliana landsberg
  unsure (1)..(551): unsure at all n locations
ccggcacatcgcgatcgcccgcctgcccgcccccatgaacaaccaatcggcaattttcaagcacgtcctgaacctcaaacaccacaccatcgcgacaaagnnnnnnnnnnnnnnnnnnnnacaaacatggtgaaccaatcataaactttttgccgctaggcttaccctatcagcattttcgcgtgaaaaggtggccgctcgtgatcatccagactttcatccgttgggcggataccgcaaagtcagccgatcgcgcccgcgccgccaatgcgctcggccgcgcctggctgcaatccgacatggacgacgaggaacggcaggcggcgctgatggcgctcacctggctgctcgacgatccctcgcccaaggtccggctggcgctggccgaggccatcgccgatgccggcaatgcgccgcgttcgctgatcctgccactcgccgccgaccagccggaaatagcctgccacatcatcgcccgctcgccggtgctctncgacgtcgatctcgtcgatctcgccgcgcgcggcgacggcgtcacccgggcgctgatc

SEQ ID NO: 64951 - DNA, 165 bp, Arabidopsis thaliana landsberg
  unsure (1)..(165): unsure at all n locations
acgaacgagcccgcaagggcgcaccacacggccacgaagcccngagagaacaccacancaacaacagctgcgacaggaccacgaaccgnngncggcaggcccacccaaccggcagcaaacgcagagaccgacaaaccgaacgcggcaagcagcagcaaggcaagc

SEQ ID NO: 64952 - DNA, 549 bp, Arabidopsis thaliana landsberg
  unsure (1)..(549): unsure at all n locations
tttttgagattttgtaacccatggcatctctttacttgagactcatgtctcactgataaatgttgtgacatgtactatttttatccaaatcctcagaaatatttattgtggcttcagtccaccgtccacactatgaggcagcatcgcgctactgcatcttgctattgcgacccctgtctgatatccccatatagttctgcgagtgacctgaacttcccccctaccactgctgacaacttccataacactgtgctcgtctcaacagcctctcttcccataataccttagggagatgaagctgaatgcgataccaacgatagctcctggttgactggcttgaggcagccacacgttcatagcgacctgggtgttttatccctctttgtcggccctaccttttatagtgctggttattnnnnnnnnnnnnnnnnnnnnnnnnnnnnnnnnnnnnnnnnnnnnnnnnnnnnnnnnnnnnnnnnnnnnnnnnnnnnnnnnnnnnnnnnnnnnnnnnnnnnnnnnnnnnnnnnnnnnnnnnnnnnnnnnnnnnnn

SEQ ID NO: 64953 - DNA, 411 bp, Arabidopsis thaliana landsberg
  unsure (1)..(411): unsure at all n locations
nnnnnnnnnnnnnnnnnnnnnnnnnnnnnnnnnnnnnnnnnnnnnnnnnnnnnnnnnnnnnnnnnnnnnnnnnnnnnnnnnnnnnnnnnnnnnnnnnnnnnnnnnnnnnnnnnnnnnnnnnnnnnnnnnnnnnnnnnnnnnnnnnnnnnnnnnnnnnnnnnnnnnnnnnnnnnnnnnnnnnnnnnnnnnnnnnnnnnnnnnnnnnnnnnnnnnnnnnnnnnnnnnnnnnnnnnnnnnnnnnnnnnnnnnnnnnnnnnnnnnnnnnnnnnnnnnnnngaacatctgaaatgagaaacgcaatgaccatgatttcaaagacattgccatagtctgacttttaaatacgtcacaaaatagttaaaaaggcaggcttgctactttctttatgagctctctgatgttccaaataat

SEQ ID NO: 64954 - DNA, 2388 bp, Arabidopsis thaliana landsberg
ttttagtttttaaaatttttgtagtaataatgagagagagtaaaaaaagaaaagaaaagagagtgaaattagagagataatgattaggggatggaatcggaccccacggaggtttactagatgacaccgaacctgaactactcacctgtgattgtgctctgttctatacttacacattttggaccatttcctctttattttgtctcttacacattattctaattgtaattaacttccatatcttatactaataatccgatctcatttattctactttgtttgatttcatgcaaagccaatcacgggttcttgttaaagaatttgtttttttatataattaacaataagtaatggtgcgtcgtttagtcttgaatgattcttaatcaatagattattgtaaattacaagaacaaaactatgcatttcaagtattttaatgcaactttcaaaatttgatcagatgtgtcggctgtgactatacgtacttgtttttttttaattgtcaactttgaaaattttatttaaaatctaagtacttgtttagaaaatcacgtttatgagatggagactgcgtttgattcaaatttgtcatatattacaacgttgcttatcgtttcccgaggtaacaacggacggtatgtcagcttggaggattttggtgatcgagagggtatttatgtgaaactaaaatatggtgtcataaagctacaaaattttaaatttcaaactaaagagttttactacattattaaactacttctgctaaaggagaaaagtagaaagaacaaaacaggctatctttcagttcaagcaatttttgagctaagcaagcaatttcaaatgtcttgttattaccaatagattgtaaacaaaaaataattacaccaccccaagtaataacatgacattttcttatggtatttaagtaagcattttaacgaatttaatttcatttacatcacataattagttttattttagaaaaagtagtagacaaaactatacaaaattctaaggagattgagttatgaccctaagcctattcaagctgtacataaattgttggtcacaaaatttgagtctttcacttttcagattgtagtccctcccatattcaaaactgggacctgtaaaggtaaagtttggcttccccaaagcctaaactaaatctctccaaagtcaaaaactaatcatattttaaatctgagattagtatttgtttattctccaaatgcatgctttgctaaagaattaggagctgatcaaagcttaaaaaaaatatgtaaaggaaacactttggtgggtatcataaccaaatgtgttggactatggattaaaagttcaaactagatattattataagagtaactatttgaaaaggcccaaaacatattctactatatttttttttatgaaatcatgaagagtagccttggaaaagacacaacagataatagttataaccagaagatggtaattttgttgttactacaaagcaacacagaagccaagagagactagtagactagagaagattatccaaaaaccctaaaaaaagaaaaagagagagattgttttcacattttcgcggttttcttcttctccttgtatttatctctgaagtcgtgcttttgatgtgaaaggagaagaagcttgaagacagacaactttaaagttgacgaaaccaatgcttctggtaatatcattttcttcacaattgtttgtgttcttcttcttcgtctggtctcactcctatagttttgtttaatcgttttcgtggcggtgaaattcatgagagcttaactggtgaatcttttttttggttctgtaataattttataatcttctttctctggcagtttgcgacgaaactaatttaatatataaatgtaaatctagcagccattcttattggtttattgttgaaatctctacgaaaattcctttttattcgatttcgtggttttaatcttcaccattacgatttttcttcagctccttctctctttcaattcaatttttactctttttgtatattgcaggtgaagttttgagcttttgagcgatcttttgggtcttgctcttgctcttgaggcagagaacccatagacagttgttttgtctgtttgttggtgtcagatccaaaatcaagaggctgttatagctttgacttggaagtgatttgacacaatgaaggaagaagattcaaaaaaaataagagggtaggaatctatttggtcgcttttgcttcctcctattctggggagaatttgggatcttggagttgaatccgttgtgagaagaaggatctttttgagcttgtgtactgtgtcctctcagttgattcatcgcagagacaacaagtcctgtcatgtctatgagttttgt

SEQ ID NO: 64955 - DNA, 1517 bp, Arabidopsis thaliana landsberg
gacaccatcctggacatacagaatatgtaagaaattcatcaacatgagaaacattaaaatggaattatatatagatcaacataaaaaacctagtagcacattactcagagaaagatacaaattctagtcaatgcttgggggccctggtcaattggtcatagcttaatcaataagtatctcaacatttttcaaaccaaacccactcgaaattatcacagaaaccgagccgtattgcagtataaggaaacaataaagcatcgttgcgactacgcacaacgaaatcaagacaacacgccacaaatatacaccaaagtcgaaatttctcagccgttttccccataaaccccaaaaaacgattaaaagggataactaaaaagtttacttcgcgagtcttggctttatctgacgagagcttggagacgatctcatggacatccctcgaagcaaccatggcgaaatcaaactagagcataatccgagaatcacgacaatggtagtgagtgggggagttcaaagtaccccaagtgtcacccgatgaaattgattttgaatttctgaggaatgggttcagggttttttttaattgacactgacgggactgtggtatgtcaccgtctataactaattttatataggcccttatattgttttaactttcacaaatttgccccaaacgaaccattagattatgttatggactcaccacaatttgacctaaattacatataaatccctacattttaccactcaaacgatttgccccagtcgaaccgttaagagtctccggttctcgtgattatactccaatcgaaccaaattatgactaaggccaatttacaatttcactcatttccccaaatcgaaccgttatattttccggttatgtggttgaagaaggagctaaaccggtcagacacgaaatgtcattttttaggtgaatcggtttctttccttctcgtctcctctacattttcccatttttgtggaaaagagcaaagagttcaaacttgtgaaaactgagactcttaaacaacgccatcttacattgttgagttgtgatcttttatattgtttagaagctcagtggtagagaaatcaatacagatggacaactcgagctaatgaatgagtttcgctgtctctttcgcctccagaagtgtgtgaaagaagctaataaaggcacctccaagagaaatctagattaagggactgcgtccgtgcgattgaggttgcttcttggtgttgatttctactttgtagttctatctgaatacaattgtaattactctatcttggagtatagacaccaacatggttttgatttgattaagaagtgaacaagaaacagaagatctcaagcttttcagtttctctcaatatggaacatattctaaagagagatcaagggaaacacaaagtaaacatttatatgtacaaaggaaatacttccgatcttgctggaaatattcaactaggcaagaactcccatgaagggtggtgattataaactagagagc

SEQ ID NO: 64956 - DNA, 1135 bp, Arabidopsis thaliana landsberg
tttgagattctcgggaagagttttaacaactctaacatcatttgcaattgtagccatgaagtgttcttcattgtacaaatacgcaaagctcttgaactgtgaactgtaagtaaacaacaacatcaggaatctaatctaacatagagactataaaagtttcagtgttaagtccaaacctaatccctttgctactagttgttgattgtatctcaggaatcaccaaagtggcgttaagaagccgagaaacagctacaacatcaggaatctaaaaaaatgaccatagtaaaaacttataacaagagtcacacaacattcaatatcgatgtaatttttgttcttaccgagtttctaatctcatggaaaccaccttgtattctaacaaaaacaaaaccatttgttcttgcaggaggatctgttacacacaattcaaaaacagaacatcaatttaaattcaacttaagacaatacaatctaaaagattcagtaacagatccgacaatgtaggaaaaaaaacatgaactgtcctaacctgaatgaaaacctctaggattagcatcaggaagtaatgtctctacatgtcttgttggtccccaaagtcttctatacaatggtgtctgtaacataaaccaattgataaactttttagagtcatcataagtaaaacttttttgtttaaggaaagaagaaacgattctatattggcccacttgatgaaataaaataaaatttcaagatccactaaacaaaggagaaaggtgagatttttacatgacgggcaaatctgggattgtcgaagataggtctccaagagaagatagtgacagggatagagtaatcggagatagagtcatctgtgaatccagcgagaagaaaatggacaagaagagagaaagcagagagaacaagaccaagaagaccaatccatttcatacgcgacttcaagaagactttaccttctcccttcatctctacttcaagatgtgaaagtgaagtgaagtgaagtggttcttttgctaatggaggacagaacagagactaaagtgagagtagaagaaaagttgacccgccagagagagagaagagacacgtgtaaaaacggtctgagaagtagatcggtgttgatcggacaatgggt

SEQ ID NO: 64957 - DNA, 1168 bp, Arabidopsis thaliana landsberg
atatttaaagtttttatgaatcatccattaatctttttttaaatccatctttcatatctcaaatgtttaaaatatttgaattttatagaagaaaactttaatgatgttatgttatgtatatataaaaaaacgtttttatcagtttctacttgtactttatttttaaacctaaaaacaatctttaaataattttaacctttgaaatttattttgttttaataaccaagggttagaaaattcaattatcaactacaacacccaattgttaagccaccagaagaaagtgatgactttggtagcccatgacaaagcagaaaaaaacagtcactactactaccactacaacggtcattgttgccactaatctaaggccgtacacatccatatttacattccaaagaattctctgcaaaaccgtttttaacgctctcagtacaagatttagacacttgtcactttatcataaaatggtagaatctataaatacaaaatatacaatgaatgtgtaacttgaaggttaggaaataaaaatatatatgattttcaaccatcttcttcaacatttctttcaaacttttcttcaactcttatagtcttataacactcacatcaactagtagaactacgagtgtcgagttctttttttaagaaattattagtataaatttttaaaatattctcatcctattaaaaaagaaaagattcatatatccggctaatataattcatagataaaaatgatatttttcagaaaaaaagaacaaatttgggtcaacatcagcgtcacaaaaaatagaaacgtcatgtttaatagatagtactagcaaaagcctatatattcaaacaacattgtctaatttctcatattagaaggactaaaataacgcctttcacttaatttacggatatagatagatgatactaattaatctttatatttttaccgaacctattctattatttcatcttaattttgttttactcaattaaaaatctgaatataaatcatatcaaacatcacaaaaaaaaagatatacgcactttaaattttatttaactaggtcgttgttcacaccaaaaaaacaatacaaagagagtagattatgtatgtgtcttggtcattttagtttgtgtaattgcacaacatattagttcaaaaatataattt

SEQ ID NO: 64958 - DNA, 263 bp, Arabidopsis thaliana landsberg
ggaggcatgaaggaaagcgaggaagcgtatggaatggttgggagggaagcggatgggggccggcgatgcgagggggtcggatgcggaacggagcaaaccggaccgggaggggagcaggggagcggaccaagggggccaaaaacggaagccaagcagctatggaggaggcaacagagtacggaaccgcgggacgaaagaaaggccaccttaagcgaggccccagatagatctaccaggccatgcatgatggtatagggaaacga

SEQ ID NO: 64959 - DNA, 535 bp, Arabidopsis thaliana landsberg
ctgctgcttctgctagttttccttccgccaagtaatttttctcctttttaattacagattcgatgcctgcgtagcttgatccacttctttaaactgtttaagttattaaaacaaagaagcccaagaatgacagttagacttcagagtttttgagcgccgaattttggttttgtaattagcacacctttagcgaagatgctacatgtgctagggaatgtgctaagatgcctccgccaccaggtggaatgagactgaaatgtctaagtgttcctttcaaggtatcaaactggcaacataacgagaggagagtaagagaaaagttggaacaatttttatatccaaaaacattgattgtgagtgggatcaccttctgattcaattgcagcactgtgtcggttccattggatcgtgcttcttctggaagagatgataataccaggcctaggattgaatctttatgagtcccttaagataagtctgaagcgtatcgatttctttttggactggcagtcctttcgagagtgtatcatccagc

SEQ ID NO: 64960 - DNA, 542 bp, Arabidopsis thaliana landsberg
aaattacatactctttctgcctatagctacctcctccactttattgctataacaattaggaccatacattaggtgaattcttttagttttgtagcggtaatgagaatgatatgagataaggtgttgtttcttacagcttgtaatcacggctgaatcagaagaagcatcttgtagaatcagtttccttatcctagttctgtcattcctcgcgtataatgtggtgtagtggttgattcccacgtaatcaaatgccccttttatggttttatacatctctggtgttatcttaggtagtctctcttccactagactcttcattgaagctggatagtctccattgattagaggatccataaacctattttttaaatctcattctgttactttggtcttttctctctgtagacttttctatgcaaattttcagataaagggatcttatatttaccatccaagcccaaaatccattgctctacgagctgcatctttgtcctcatcacaatcagacattggctcataccattttgcatctaatgatatcc

SEQ ID NO: 64961 - DNA, 118 bp, Arabidopsis thaliana landsberg
  unsure (1)..(118): unsure at all n locations
actttttgtaagatttcttattttgttttcactgatcaaatcaatggcattgatttttatttttattttgtggggttgatttgaatgncatggcatattggcattgccttcttgtttc

SEQ ID NO: 64962 - DNA, 664 bp, Arabidopsis thaliana landsberg
ttcaaattatgtgatcaatacgtaattttatgatcagtaaatatgtagctgtataatgctaagattatgacttttgggcatagcataaatggaagaatgattttatatacaaaatttatggcatacaagaaattatgttaaataattactgagatctaatagtttaaagcatttttaaaaatttctgtgcgattcaaattatggttgttcacgatgaatgtccttaacggaaataaactaaagttttgaagtataatatcactttaaaatatgtcgaatccatatcacttagaggtattgaactgtggataaggagttcaaacaactcgtgcagactactgaatcgggtgcaaatgcaagtcaagaggtatcctcaaatgcttaatattgtgctttttatcaccatagcaaaaggaacaattcacgtgctcctcctaataaaccttaaacgtgtaaactaaaagcagtaatgagaatgtgttgacaagttattcttggaaaaactgtaagaaatttaagagtttagcatttgtctagacacagaagagaacttataacaaactctaaaagaaccgatggctgcagcgaaaagcttaaaaagggatgattaaacttcgggaaaaaaacccgcaaaagaaaataaaaccatctattctgaaaaact

SEQ ID NO: 64963 - DNA, 272 bp, Arabidopsis thaliana landsberg
aaacccatgtccatgaatggtcagagaagctcttcaatttctttctcgcctgtgaaaatcctcgaatctcccagacccattcacctgcaacaagcatattcatcagctaatcaattccaattgcggcattctatctctcaaattcttagcttacttagtctccagaggttacactcctcatcgttcttcattcaattcggtcgtatcggttgatttgataccagggcaagttaatctcgccgatgatatcgttcactcgacgcctagattcg

SEQ ID NO: 64964 - DNA, 1202 bp, Arabidopsis thaliana landsberg
attgcaatcgcaaacctccagtgtgaacatctcaatagttgacatcttagatcataatgtccaacttaatcggttttagattatcacatactttatccttttttccttggttacaccaacagttgcaccacgttttccaatatagtcaagtgcaacctgaagtaatatgaaagttatcaagtgattgcaagatcaattcctcaagcataataaaatgtcattaaccaagtgaaaaaaaagtggataccagctgattttgaataacgaaagcttcttccaaggaaggcctgagcaactccatcatctgggtatcggcaaaatcatagcagatgtgttccaatatgtccttatcggcaacaaatcccagtgcacgaaatactatgataataggaatttctgttctgatgtatggaagagtacatcgaatatactgtccagatgaaccctgcatccatttgcaacatagaatgtaatttatttaccattatctagaatttaaagaataaatttcgaggaaggatatagtagagttaagactaattagctttctcttaccccttttgcactagcacgagcaagcatacgcacaaacattgtgcttggaggcctattttggttttcagccatagaacggacttcaccaacataagcatacttatttggctgccttttcttgaacacataaacatgattcgtactcatcttctcctgagcaatcagaaccttttcactgccattaataatgaagtatccaccctgatcataaggacattctccaagctctgtcaggtctttctccgagttctgaaacaaggtacagtaactagaccggagcatgatgggaacctagcaaataatcaaacaagaagaaaacatttctactatcagaacagtagagtacatggaaacacctaaataaatgtgacacaatgaactgagttcggacacctttccaatgaaaactttagtaaaatcctgtgtctccgtaacttcttcaccatcatgccctttcttaataactctcttagtaacatcgacatacaaaggcgcagagtatgtgagatttctcaaccttgcagccttagggaacagggtggcagtctctccatcagactctgtcatcatagaattactcagataaatctgtccaaagctaatcttgtagattgtctgcaggaaaacagctatatcagactgagagc

SEQ ID NO: 64965 - DNA, 672 bp, Arabidopsis thaliana landsberg
attatataaataagtactaacaacagaagaaactttaccagtcttatgaacttgctgaaagacattgatattaaaacctcccgaaaatcttccattgttccctgaagtgataaacaaattcaagctccttaagcaacaacaacgattagaaaaaggattaaactttcaaaccccttcaatacattaatttacaatttcacaatcgctagctacaagatcgaatacaatccttcaaaacaaaagtttaccgatcaacacgatggccttaacatcattcctttgattggcgtcacgaaacttctccttcaacccagaaataactgagaattcacacaaccaaacaagatcaaatcagcttaaaccaaaccaattccagataaaaaaatcgtgcatgatctaatcaatcacagagaaacatttaagcttttttaatacttggactggctaaagagttaacaggagggttagaaatggtgatgacagcaacaccatcgttcccaacttccatcgttactccaatcttcttcgccatagcttaatttctctctgatgagattgaaaaatgaaagctttattattcggtgagtgtcaaaattggataaagatctggatattgtgataaaaatggggcctttgataaatcaggagttcacttttgtaacgtgatcgata

SEQ ID NO: 64966 - DNA, 1146 bp, Arabidopsis thaliana landsberg
cctgcttctgcggttatgggtttaggtttctgtcacgtttcttgtgaggaagagtaaatgagcagctgggccttctcatcccagaaattgaaaagtcaacagaaatcaaattacaactgacacaaaagctatgcaccaaaacatattttagttaattaatcccaaattttgtatttattttactaaccgcttggtttagtcttcgttccacttcacccccacacattccttcgttaattggaggagcatttatgtttccatttgaagcaaagccaggatcctgcagacagatatagctagattacatattgtagttggggcaaattagcaatatgttaacaatgataaagttctaactacagttacctctataacgacgtagttgctcacatccggtgatggaggtaaattttccacatcatcttcatagtaaaccaaagatatactactcattaaactctcatcaaattccctgccataaaagtctagaaacagtaagaacaaccagcatgaattcattacataaaaaaaaaaaaaaacataatttttttttccaacttacttgaaaaagtaacctctgacattgcatgcaacatttcttgctacgcagagatgtggaacgacaagggctgtctgataaatgggcatacgaaaatggttagatacccacttggaaaattaagtgatacagaatttaattcacaactaaatgcaagagcaaccacatgcctctgcttgtggagcataataaggaagatatgcagaaacaacatgaacccgtggttgatccttgtcctcccaaaccttcatacggtcatcaatgaccattgccattttcgggtggcaaatgccaccattgaagacacttaacaacgatttcttggcgtctgatatgcaaagagcaagacataaaaaaaattgttagttcgagtttcagagagagacagagacagatagttgggtaaaaaatgatcaggttcatctcttaatactaaaaactgagaggtcggcaaatcaatcaggcacgatagagggagggagaagaggcacattatattaaacaattcaccacaaaaagagtaatgaaagctacactaaaggagcatggtggctatgtaccaaaaccaagatcaagggtatcaaaga

SEQ ID NO: 64967 - DNA, 1641 bp, Arabidopsis thaliana landsberg
ctttgatccacatttttttttgtcaacattttatataaactcaacatatgtgaagtaataaattcagatttcgaggtcatgattaacattgtcatcgtatcttaatcacacacattttgctctgtaatagttgtcatctatcttactacagaaaaacagacaaaaaccgattaaaaagaccgaacagagaccacatatgtggtgatatagcagtttcatattcatccttccgacactgttggattgcttactggccatacattacaaataataagaagaaaaacaaacttttcatggtccacataaatgtgaaatgctttggagaccaaggaaaagaccaacgaaaagtccaaaattcaaaatatggtttatagatgatacaataaatgttgagtagattcaacatacatgaagcatacttcgttattaatatggcacacgttgatatctatcttggacttttgcctttgtgaatctttctaaatttacacaaacgccaaagattgcttccataatatccggatttaattttcagacaaagcatatgcatatgtaagctgggttaatatttagtgaaaagtttgtttggtttagtagtaaccaattttactaaaatcattcaaattaagtctttagggggggtagcttaattggttttgtatgcatatttttacgtggtataattgcaattaagtaagaaagtagcttttatgttttatataaaaagctttaatgagaataattagtttgagcaatgcacgtgaaagaaccctttcagtaaaatgttcgtcggcccctccccacgctttgcggccgtcgaatcattgcttttcttttgaggtctttttttgttttgataaattttactttgagatctttcgagcccgtctgatcattgtgctaatttacgttaatcactttgttttatgctcgtatgttttacttgatatctttcgaagacctttttctagaatgaaatgatacttgtatatctagacaatgatcccaagttttaaataatccttgagtttaatcaacagtgtgtggcctaatctactatacaaacggaacaagattcgtcatgtgggttaaaattagagatcgagttccacaagctacaaaaatcaatgcagtgcttttttccactaaacactttaaataaaaccgattttctacatattcagactattcttttcaacatggagagtatccccaattatatgaagaaaatctacatattctgactattcttttccaaatggagagggtggtaacattaaaactcgtaagaaaattaacgattttatggaaatacagaaggtgttaacattcggaaaaaaaaagcatgtaccagaccagtagatttatgacaaagcaaaagaaaaggagcagaaggcacggggctcaagataagaaaatgttgggcaaaaccaaaaggaaaaaaaaaacaataatggaggcgtcggagacttgttgagacaaagactaatgcttctttgcctaatcggcggaggtggcgtgctgtctcacttccctccgacatgcgtcggccccacgcgcctaatttcacctttttatagttaaagaaccagaccccaaattgaccggtttgattcatcggtttattcgagaggaggcttc

SEQ ID NO: 64968 - DNA, 164 bp, Arabidopsis thaliana landsberg
ggttgaatgatctgcttttgcaatgaaacgaagcgccaagactcacattgacgaagattttcccccggggggatctcctgttcataatcaatggggaacaagaaaacacaaggtcatcatcacaagaaccccaaccctgagacttagagaggcacaaatgccta

SEQ ID NO: 64969 - DNA, 486 bp, Arabidopsis thaliana landsberg
cggacctcgacgccgccattgccgcccaccatgacgccatagccggactcttcttttttcacacccatgtccttgatggaggcctctgggcatttgcacggacaagccaaaaccgccaacttgaccttgagcggcgtccacgacccccaggcgagcttttccagcttgacgcccaggccggaggaatcctgggtaccgaaaacggcaccattcggtgccgacacaggtcttcaccgggcgcaggcccttggaataagcgcgggcggaaaccatgccggcgtcgtccagcactttccagacggcgggcaggtctcccttattaacccccagcaaggcgaagcgctggccgccggtgaccttgaccgccgggatggagaacttgccggagacgtcagcgatggcgcacaattccttcggactgggcaagccggcccacaatgcgcggcaccacgctggaagtgccatccttctggaaggaggcgagga

SEQ ID NO: 64970 - DNA, 205 bp, Arabidopsis thaliana landsberg
  unsure (1)..(205): unsure at all n locations
agggacacagacagaaagcacagcgaaagacagagccccccacaggaggagccacaacgcccggacacacacagaacaagaaaangaaacacggggagccaaacacccaacagcaaaccngagaaaagaaaagaaaaccccacccacaacgaccaccggcggggccagcccaacagaggcaacaccaggaagaacagagcgacgc

SEQ ID NO: 64971 - DNA, 473 bp, Arabidopsis thaliana landsberg
tgcagtggacatcccatacatcgtcagttatcattccaagtttaatcaacaatacaccaactccgtgagcgggcattttaccaagggagatcagatcctatttaagcataacgtcagatacaattgccacacagcaggatatctataactgtattgcacggggcaaacgagacctcgctagagggcaaagcattatgcatgctctcgctgagcagctgcaaagcgagggcttctggagccagattcgccttgatgaagacggccgaattatggcagtcttctttgcacatccgaagtccctggggtatctcaaatcatatcctgaagtgcttatattggactgtacatataagaccaatatgtattagatgcccctgcttgatatagatggtgttgatgcttgtcaacgaaccttctgtattgcctttgcattcctgagccgcgaggaagagggtgactttatctgggctttt

SEQ ID NO: 64972 - DNA, 347 bp, Arabidopsis thaliana landsberg
  unsure (1)..(347): unsure at all n locations
cttgttcttttcacaaacgatgcgttttgaccttgaaaacatagacacatatgcttttttctctcttagttcatttcaccgatcagncaagtttagggggatagaataaaataattcagctgcacgtaaggaaaaataagtactttctgaaaaatcaaaggacacgaacaatcaaacattagtatgcaaattattttcatacacttgaccgtcaaaaatgcactgatcaatgcaccggtcattccgaacaaaaaagaaaaaaaaatctttaaaagatgaaaaatacaaaagtgcgacgagaggaacaaaatcgtttcacgtacgacgtatcggcaacgatatctagg

SEQ ID NO: 64973 - DNA, 559 bp, Arabidopsis thaliana landsberg
gataaaactgatttttttgaatataaacttttatattcatgtatctgatcacaaatctataaagattagtttcggaatatattacatgcatgtatgactgtatgtattcataattagtcttaaaatccaaagaaaatatggagaaatgtataattttatgatagataaaacatgcaatgtttaaagtaaatcaatataagtgaagaaatattgaagaaactcaagaaatataaactaataatcggaattaagaatttaattaggttactaactgttaggtccaccaagtttttccacagcattaacaaagcaatcgtgaaggtcgcttgaccacctcaatcgtgccttttcatcagatgtgtagaaaatgcatggcgtgatctttgaagatgaaccatttccttcttcaataccaactttctcagcattctctttcgtatttttttctaatttttcattatatgtctccttattactttgtagaataacctctatttcttgctcacttaaaaccattgaggcttttttcgtgtgatgatgaacataagtgctaggattt

SEQ ID NO: 64974 - DNA, 395 bp, Arabidopsis thaliana landsberg
ttaatattttgtcaaattgcacccatctcagactgctatcatttttaaatatgtcatcaatgtctgagatggtccctcggataaaaacaaagaaaagctatcgtactaagtatgtacatcaattacaaggcacgttctcaattccagagacgacatttcaaatcgcagaaatgtaacaatttcacactaacttctctcagattctatgacacagcgctcttttgtgattatatcttcatcactctgaggacagagagcagtgcccaccacctccgtgttatatctaccactactgacatctcttgacacatgtccctctgtgtggctgacactctgagcctgcagtctgcactcaggtggttctaaacagcagcttggtgtggcaggaaggggac

SEQ ID NO: 64975 - DNA, 1258 bp, Arabidopsis thaliana landsberg
ccggattttggatctttactctataagaatcgaagacaatagatgatgaaagaaaacttaattactactattcactattttaaagacaaacaaattcaaattaatatgcatatatagaatcgtacgcctttggtgtgttcctaatatacacacaacttattatttggaacaaaaaaaaaataatcatttaactaaaaaactatccggataatgtcatatatatgaattatcattcatctatgaatatatgtcaatttattcttacgtggttgaagtagaagcctcttctttttggagaaatgagtagaagctttttatgttatcataacatcatcgtcttacttttctccttttctttctttttcttcacatttttactttctttggtatatatcgaaaccttaaactttaagctaattccgagaaatgaaagtttatactaaaaacgtccatgattcaagattattacaagaaaaattgacatgaattttcgttttgccctggtaacaaaatcactacgtacttaaagcaaatttgaaatatcatttctgtcttctgatgacaataagttaacggtttggtagaacttttggtagggaaacttgtgaagatagagttagcttttagatgcaggtaacgtataaacttatttgaacggttagattgagaaacgaacaaaatacattggatgcaatatcttcctttgtactttgcaagtgttgtatataaagaaaaaaaaagtgttgtatataagtaactcatattctgatattccccacttccatttcttataaacaacataatttgaatataatattcattttaattatatatcaaacaatagaaccttaagtttttgattataatctctgcctaatcggcagctaaactcatataacccattgtttagcccagttatataactttggaagttgcataatcagcttaactattttctactacaaaaaactaaacatttttctttttgagctcatcaaattcaactataattgtctctcagcttcttttttcccttttcctttatagtgagtggcgttttaaaactaaaagcaaacggatcaagatagagaaagccacgatcaaagcaaaaccataagcaaacaaacaccaaaccactaaaagaataccgcacacaacttctttctatcacatgaatctcctttataacaaataaaataataataaagtaagggttatgcatatcttattgcacgtggccggtgccctttagacgtat

SEQ ID NO: 64976 - DNA, 323 bp, Arabidopsis thaliana landsberg
  unsure (1)..(323): unsure at all n locations
accggcatacattacacaattcacaggaaaaaaaaattagagagagaggtaaagcagagnaaaaccgagcagccctgaacggagcgttaccaccacttgccaccaaaccgaagaacgncgaagcaataagctccaccttcagcaatcatcatcacttccgtctttctcccacagaaccttcctacacgactacatcttccccagcatccttaagagtcatcgcccaggaacaccatccaagctgcacactatccgatcgattcacacacacaataaccacggcatgcgaggaccccgcctctctatgcaaaaaacgagagcag

SEQ ID NO: 64977 - DNA, 661 bp, Arabidopsis thaliana landsberg
cgcggccccatgggctgcatcgtctatgacggggcgatcccggacgatctggaagacggcattgtcggccagggctttcccatcgaggtctataatgtgctgggcgcgggcgatgcgttcatgagcgggttcctgcgcggctggctgcggggcgagccgcatgcgaccagtgcgacctgggccaatgcctgtggggccttcgcggtgtcacggctgctgtgtgcgccggaaattccgacctggaccgagctgcaatatttccttgagcatggcagttccgagcgggcgctgcgcaaggatgccgcgatcaatcacgtacattggtcaaccacccggcggcgcgagattcccagcctgatggcgctggcaatcgatcatcgcagccagttggaggatctggccgaaggcgatgcaaaggttttggcccgcatcccggctttcaaggcgctggcggtgcaggccgcggcacaggtggccgatggccgaccgggctttggcatgctgctggacgataaatatgggcgcgatgcgctttacgcagcgagcgggcagaagaatttctggatcggcaagccaatcgagctgcccggctcgcggccattgcaattcgagttcagccaggaccctggcagccggctgatcgactggccggtggatcact

SEQ ID NO: 64978 - DNA, 620 bp, Arabidopsis thaliana landsberg
atgagaggctcttgcgtacaatgatcttactgcattggaagctgcatctttaacatcttcagtattcaatggactaagcaagcaatgacctagaatccttaacgtaggttgaaacagctcccatggaagtggaatcctcacgcctcttcctactccccctcctccgccattagagctaagttgttcttcgttctctctgattgctaatctatcaaaatcctcttcgatctcaagactacgtccactgcttccattgaaagaggatgaatctccaaaaccattagttagtgctaagactttgtcttcgtcttcatcgatcttttccttgcaatcgcagtcttgaccagcccaactagcagagaacttacagaattcaagcttagaccaagccggcatttgtgagatctccttgaaatagcattgtagtcccacgccaacgatgctggctcgcttagttgacttaaccgcgatctgaggctcaagctgcggagacaagactccgacggaggcggtgggattggaatcacgcgatttgtcaacgccgtttctcggtgtgtggtaaagagatggctgagagagatctggaatgtgtacgagtataggtttacctgcgcgagctt

SEQ ID NO: 64979 - DNA, 179 bp, Arabidopsis thaliana landsberg
actaggcttcttcatcatggtcgtcttgacgaattagtggagcatcttgaagtgcatagatgaattaggacacacagtgatgcctattttctataaggtcgatccatctgatggtcagaagctcactgtaaaatttgggagaggccttcaagcatagttgctcccataaatcaaatgag

SEQ ID NO: 64980 - DNA, 300 bp, Arabidopsis thaliana landsberg
aaatagcaaatgacaatatttgtatcaaagtatacgcacaacatgcatatctaaaagagaaaaaacgaaagtgttgatatatatacgtacctcgaccacgacaatgtaaccatcgtcctcttcttctccttcttcaacagagttttttgggacaaacatgggctcaccaacgaatcttctagctccggtagaccaagtacggacgaggtttgagtctaagtcaaatttcacgaccatgtcgaatggaaaatggggaagttcacttcgagatcccgacaaggcagcataatacatgtactt

SEQ ID NO: 64981 - DNA, 2205 bp, Arabidopsis thaliana landsberg
gggaaacaaatgcaagattgtggtgggagcagaacagagctcggatacaacaacaatacttgtgatgaccgatgacggtcgaaggctctctagagaagaatctgacacacaccaaaacaaaacaccttttcttttatatgtttacttggaaaaaagctacagagtgatggaaataacttgggattcagataatgaatgtgctttttagttggtggttgttagtacatctctttctcttctttctcatctacatctatctataaagaggaggtattagttttactggattttcttggtgttattttcttaaggtaatgtactgtatatagtttaatactaagaaaattcatattattggatttgaaaattacactttgtgcactttattactttttctctaattatattgaccatgattggtgctaataattatggcatgtacttaaatgttctgaataagaaatgtataaagtaaaaaccagttaaattgccagctaacttgtatctccttagaaatttccatttctcacttctcctttgactaatctttctattgggttttattaagggtaaaatagtcaattaggtttatccaattagtgaatttggaaccaattttttcgacgcgtgagaataaatcctaacttcttttttttttgttctcttaaagccgttccctcttctctgtactcgaaaccctagtagttgctctatccgattttagggtttaagagtcgaatcattagcatctaccttgattacgctgatctcacttggtttcgctactcgatccttgaatttctttgttttttgtgtgtttcggtttattcgatacgtctttgatccgtaatggtgactgggtccagaactagcggtaatcgtggggtaggactcgatgatgaagcgaaaaagatgattcaatcgattaaggaagttgtggatagtcactccgatgctgatatttacactgccttaaaagaagctaacatggatgctaacgaggctgtggagaagctgattcatcaaggtttcttctctcttcatctctttttctgctttcctagtttgacggaagttagggttttactgattgttctctggtccgcattatcttgatcacgatgaatgctacaacatcttgtttgaggcgtatgtagaatgctgtagataggttatgcaaatttcgtttgatggagttctgttgataattcgatagatggataactcttgttttcatttcgataatttgtcaattctcttcagaatacttcaattactatatacttgaaatattattggtcttcttttcttggctctcgtttcgttgggtgactaatatgtgtgttattgttgccatcatagttttggttcgctaaaaagcttttgttttgttcagatccatttcacgaggtgaagagaaaaagagacaggaaaaaagaggtgaggttacatataattgttatggtatcttgttcccagttcttctcctttttaacatttttgccaatgcaaccacattgtagtatttttgtttgactctccttagtcttttcgaaactgcatttgaagaaggtgactagatttttcataatgttagttgtgcttgtgtgactattatatctcatcggatgtctgctgtggcaagctatatttttttttttttttgtttagtattttgtgtgccttctaatttaattgatcgtcaaaaaaaatttcaacttttctagccattcaaatagtttgatgaatttgtagagatcatcaagacacctcttgtataacctctgatttttagggcgttcctttggtttcaggatacagtatttgttgagcctgccaacataaagaaacctcttgaaaatgttaccagtgaagtgaaagttcgtacacagcctgaacataatgttcggagaggaggctacagtaggaatttcttccccaggaacgctgctcaacgaaatgcatctcctagaaatcctgctactggtaaatcaatttgatgatgatatacttgccagtttctttcgcatgcttgtacagttgtactaaaaatctttaatttattttaagctgtcttttgaatggttcgtaaacataatctatataacggcagtatcaaatgaacttggttaaatccagaaaaatatttgcaggcaagcaaaggaaacgtagaagaaattgttttgcgttgattttttttttttt

SEQ ID NO: 64982 - DNA, 552 bp, Arabidopsis thaliana landsberg
tctaagagtttggaaccactataccacatactatattccatgattaaaaaaaatctcaattattatagcgcaaatgattggttttcatcagttaatagaacttgctgagtgagtccccaaatttgaggatgattagtaatttagtatcgtaaagactaaaaaagacttaagaaaaatagtaatgattagagaagtcaaacctttaataattaagatagataaagagagacaaggttgctcaaccccacttggagtgtgatgcttttttggcagtgttcctttatgataacacatctcttcacacacaactttagtgtatcacaggcccatgtcactttaagataagataacatattctagtatatgattattttcatatttgtaagtgtattaaattattcatagacacaccatgaattaattgtaataatgcgaaggacctgtatcatgtaacagagacagacgaagtgtgcagaggtcggtgagaagcaatttggtcaccatgctccaactctcttctctaggtcccttttgcttaatttttctcgttaa

SEQ ID NO: 64983 - DNA, 591 bp, Arabidopsis thaliana landsberg
gtttaaagaatggagtcttgatctttgaaacattgttgatttgggaacatcatgccaatccatcaacaatttttttactgctaagctaataaaaactgtggtgcttaatttcttttattcgtttttttccccttagattatacactttgcttagggatttttccttaggaaaaaaaataaattcaatataataatcgagtgtttaagttagatatagttattaacatgtttttatccaacaacgaaaaatcaaaacggtggcgctatgatttaggatcgggagatcttcttgttggcgaaataaaacaaatatttacattttgattttgattttctctacaaaacaaattaaatatatatattttgattttctcttcaaaattttatcaaacaaatttctctacaaagacaaatgttaaccttatgaatatacaaacaaaagtagggtttgggtttggtgaaaaagagagagtagagagacgatagatctcgtccttcaagatggtgcattcgtatagatgaagaattgttcccaatacagtcatcctggggctcgtccaagaatttactcaccctacacgaggtattata

SEQ ID NO: 64984 - DNA, 399 bp, Arabidopsis thaliana landsberg
acaaactggcgtgggtcaaaaagaactagcaggtgtatcggcgttaagtgacctctctgactgagaaatatgcggcggcttgttctgatcaggcacatgcctatcacccgtacgttcatacgcaaattagccaaggcaagatcgggactgtagaaccaatagacgggaaggaccaatatgaggaccacagacacgactgcaccaagcgtttggtggaaaaaaacaccaaacatgggtgggtcagatggctacaacgggccaatcagagacatacaggaggactggaaggaatgcctccctacacaatacgcagtggacattgtgcacctagagcccattccggtcatggtacaacaaaagccatatctatgcatgaatcaagaacaacaacgggcacta

SEQ ID NO: 64985 - DNA, 562 bp, Arabidopsis thaliana landsberg
gagcagccctttcatacgccagtatgcatgcgcctttattatttgtcgcgcaagttctatattggcagaatcggctacctgcaataacactatcggcagatcgccggatatcgcatatccccataaaccggattgccccctgttgtttttgagtatgatggaaggatccgttctcagcgaggggtttacaaagatgatggagctggcaagtcttccgtacatctgtgcatcggattccgatgcatctatctggcggagtattacctggctatgtgtccatgccagttccagtgcacggttggccatgtggcggtcctggtatttttccacaagccattcgcaggtctgcctgttatcggctatgccgaatacgaggtctatggtggccgatgcctgtggttctataccaatgcggtattggatggccattacgggatcgagtacatatcctgctgtattcgacagcggatcgcgctgctgcaatacctgcggattatggatgctgttgcccctgccgataaacctgcttctgtcagtttcgtatgatatgtgatttacttct

SEQ ID NO: 64986 - DNA, 1545 bp, Arabidopsis thaliana landsberg
aaccctcggacaggactttttcagacagatttatgagggattgttgtctcggtttgacgtggttgccatgtcaagcaactagtatatatgatacaaaaaatgaatatgatgacatcaagcttaattaattagattcaaaatagataaatagatctgatattgtttagtgtcagaccaatttaatccatcattatttttaacaaaataaataatattcctaattccaaagacatgattattcagtcatcacttgctcgatctgtatatatatctctccatcggagtcaaaataaacaaaaacatattgacaccatacccattcacctgtatataagagtacataaatatacataatggagataaaggaagcaagtaagactcaaagagaaagacgaggagcatcgtcactaaagaagatgctgatgaagagatgttcaagcttcgtgaagaagagcaacgaagaagacgtgcccaagaagggctatttcgctgtctacgtgggccacttcagagaccgccacgtcatcccaatcacatccctcaaccatccaaccttcaagatgatgctgcaaaaatcggaggaagagtttgggtttaggcaagagagcggcctcaccattccttgtgaccaaaacacctttctcactctcttagactcaatcacatcttactagctaggatcgtagttatatttttgaggcttcctcacatgatgataagaggaatatatgtacaacttttgtttttcatggcctttcttcaattgtgttccacgtttcttcacatgcatgtgtgtctgtctatctctacatataatatacactaactgatgatctaatatctaaaatcatcgatacagcatattaattagcatataattatgataatgttaatgagtcgtataatcatggcgccttcaatatcaaaatatcaatatttaacatcttaattatcgttaaccagtacttatgatacatgaaatgataatattaagagtcgtataatcatggcgccttcaatatctgaatgtcaaagtttaaatactatacttttagttttgaacttgtttttatatatgctgagaaaaacataatcacgatacaaactagtaggagatgagatcaaattctgatcatcttacagtgtagtaaacacaaagcaggtaaatgcgcaggtgtgacggataagcatgaaaatggacttcctccgccgccacataagtccaactacatgactatttgttttctatcaaagattttattctgtctggactcttttgtttttggtttttgtcatatgattaaacagctaactcattctttttaaacataaaaaataatgaacgcattattcatgcttatattgcaggcagcagcatgcaagttgatcatttattaaaatggctttgatagtccggtacttctatactggtgataaacacaaagcataagtatagccctctaaactgtacatacaatcgaaatatatcttttgatttcttaaattgggtgtatagaattggaataacaatgtagttcaacaatt

SEQ ID NO: 64987 - DNA, 492 bp, Arabidopsis thaliana landsberg
  unsure (1)..(492): unsure at all n locations
ttaacagatgactgcataaactgtggcaaatccatacaatgcattttttcttagcatttaaaataaatgagttatggcacctgtttagccatgggaaaaaaactgaagatgcacagttgggtgaagaaaccaataggaaaacttacacgctgtggtgttcttaataattctgtgacatactggaaatgttaaaaactatggcaacaaacccaaataagtggtttcctatggcnnnnnnnnnnnnnnnnnnnnnnnnnnnnnnacttgacaaattgctgtaattaaacacttaacaagaagtaacctaaggaaggaagaatttattttggtttattgtttcagagtatagttcacgacagcaagaacagcttgcagctatgtaggcagaggcatgaggctgattatatcacagtgaagggaaaatgacaacagcgagagccataagcagagtttgagctataactcctgagctataacctactccctagaaac

SEQ ID NO: 64988 - DNA, 297 bp, Arabidopsis thaliana landsberg
tgtgaaccctgtatgggcggctctcaaagctggagcgtgcctctgacctctcctatactcttagaacatgctaccggaaagagttaagctagaccagtcgctagctttcggtgtaacgtattcgtggggcgaatgaacccccatctagaaccagccaagtgcgactaggctccaaattcaagatctacaagggctctcccctgtgctattttgctaacgatttgcctagcttgcctgatatacgagattcatcactctgtatactgctccaggtggtaggatacccttgcttctctg

SEQ ID NO: 64989 - DNA, 589 bp, Arabidopsis thaliana landsberg
  unsure (1)..(589): unsure at all n locations
atgcggacagtcttgtggaacgcgaacagcggcgtcacatggctgcattcaccacaaaaaatcgttcacctaagcttggacgaagcagccttgggtggctcgatactgctgatgcacagcaaaccagcaacatctgctgcactcgaccaactgcttacaannnnnnnnnnnnnnnnnnnncaattcgtgcttccagtcagtaagcacactaatcaaatagttttgggcaccaaaagggacggcggcaattaatctcctcgggaacctcagtgcctagaacccctgtatcgaacccctgtgccaggctcattttcctaactctgttgacaccaaggcactggcctgactttgcctgacacgaaagaggggttgccttgcgcagcccctnnnnnnnnnnnnnnnnnnnnnnnnnnnnnnnnnnnnnnnnnnnnnnnnnnnnnnnnnnnnnnnnnnnnnnnnnnnnnnnnnnnnnnnggcgcgcccgtccttgctgcgttggatgttcgcgcgtgggtcgcccggccatggcgtgggtagcctgctcnnnnnnnnnnnnnnnnnnnnnnnnnnnnnnnnnnnnnnnnnnngg

SEQ ID NO: 64990 - DNA, 2255 bp, Arabidopsis thaliana landsberg
atccaaaggatccagaaattgtgatcaaccgtacaaatcatatgagatcaactactcgccacgcttcactttatattattgagaactgagaatcactcaatcaagtaaacaatcaacgagacatgagtcttaaaatccatcctcacataaatcacacaaaaactagcacaatcttatagcactagaacacaaaaacaaaaaacctcagccatctctcaggatcgaatctactgagagcatttctccaagtatgcattccatccttgaactctatactcatgagccgtctctgctgggttttccgcctttatgattccccgtcccacgattataatatcacttcccctctcagtaatcacctaaaataaaataaaagagcaatcaacattatatttcagactagaatactaacaatggatgtaagataaatgtggtaaggttgggagagactcacagagtgtggagtgttatactgctgaccaagtgcatcaccacctttcaccatttgaacaccaggtgttgcatgaatcatagacggatacacatacccgcatttccaagatgctggattcaccgagatgaatcccatcacaaaatcagaatgagcgtctgcgattttcacagctgctgcagtgtagtctcctgtagccaggttacctgcagagctcatttcagcaagcaaaagcaaacctctaccacgaggcataccctgcaatcatataggaatgcaacaaaacattagaaaaacaaaagaatctataatctggtaataaagagaaatgaaaaataccttcaatttcaggccatccacgattcctggccccgatattacatgagcgttgataatatcagcccactccaatattttaaagatgcctctgcgaacaaaccagaaaaaattggcacacgaaaactcgaaaagacttgaatgaaagctaagtgacataatgtagaaaaattacccttcatactgcatagtgacagtgttaccaatgtctgcaaacttgcgatcctcaaatatgagaaatttgtgcttgtctgcaatctaaagtaacaataaacatagatcaatgagtatcaaagagaccaattaatcagtaacaaacatgagactcatgtctattgcagatattacaatcttcacttactctatataactaaacctatcaaagaaacagaatttcgaagatgtgtgagagcaaattagtacaaaagtaattaccgcacggagcttagagccaaagtcaggggtgaaatcaggcagtatatcaacatgagtcttcaagagacaaatctctggtcccacctgcatcaacacaaaacatttggaagaagatgtcactaaaacataattctaatgaacagtcttcaaacttcgataccaagaatgatcctaaccttatctgcgatgtcaagcaattcagcagcagttccaacatcagcagctaaacaaagattggcttccttcttcaacataatatcaaacagcttcttccctgtcggattcttagaaagctcagacctttccttgaaccccaaaaccctaggcttaggcttaggtttctccacacttggaacactaaccctacgattctcttccaaaaacttaagcaaattcacttcaacctcctcttcaattttccccttttccttcaaaaccctaaccatatccgtcaacataatcatcgaatgtaacttaatcccattctccgctagattctccctacccccttgttgcctatcaatcaaaaccaccgcgtcactaacctttaaccccacagcacgaagaggagcagcagtctcgagaacagaagcaccactagttacaagatcttcaattatcaaacaagtttgatccttttcgaagattccttcaatagctttagatgttccatagtctttaatctccttacgccgcataagcatagggataccattggaaacagagacaacagtggcgatagggagagcagtgtaaggaacaccacagacgacgtcgaaggttgcagaaggtggaagagaagagatgagagtttgagagatctgtgttaagagggatggataagagacgatgagacgaaggtcgatgtaaaccggagaaaagattccagatttgagcttgaaattgccgaatttcacggcgccgatttcatgcagctggagaatcagtgcttccatggctgacattttttcttctgctgcttttggaatcggagaattcgataagcggacttggaacgactgcacactggaga

SEQ ID NO: 64991 - DNA, 730 bp, Arabidopsis thaliana landsberg
ggtggtgaaaaaaaaaggctttgaaaggatcgtaattctgctcatcttttgcataaaagttgaacacaaatttcaaaattttcatgaacatagtttcttgatcatcctttcacatccattgatcaattcaacatattacctttaaaaatcatttaaccaaaccaaacaaagatacatacaaacaaagccacccaaggctttgctcgatgacttcttcaaattacagacaagtttaatatagaactaaaccttcaatgagggatcaagtcgttcaaaaaaacaatattagcaacactaccatctcccttggcaaaaaatacacatccacttcccatatcaaacggccatacacgttaacatacctaaactcaaataaattcacaaaaatactttttagtatatttagtatatgagtacatatttagtatatttttacatttttgaattgaaaatcccaaactttcgcccgacttatcacgttgttgagcagttataacattgctctgtccttctattgacagagcaattataacattgctatgtcacgtttcaggcctcaacttgacagttttggaacactggtgatgcatgtccgcaaatgaagtctactatcacattttgtgtactacaagttgtggcctttcttacttttaggtagtcagcttggtcaatttcttttttttataaaaattattctaaaatctgaaatggaaattattccacctaataa

SEQ ID NO: 64992 - DNA, 1402 bp, Arabidopsis thaliana landsberg
  unsure (1)..(1402): unsure at all n locations
cctaagtttgctttgttatcaaataaaaacacatatccaatagaaaagcaattcgaaattcattaagatcatttaagagtaaaacaacataactccgaaaataaattaaaaaaaacaaaaaaaaacgagtaagcatatttggaaagtcactggataagcctagttaactaggatnnnnnnnnnnnnnnnnnnnnnnnnnnnnnnnnnnnnnnnnnnnnnnngggttacatcactattttatttgaagcattcgtgtcttgtttttaatgtctaaacatactcagcactcttataaaagtatcatgattgatgaaagagcatatatatgcactaattaatgttaatttgtaaagagataactaaaaccattatcagtagtatcttcttcctctttctcctttttcttatatacagagacaccattgtattttcagtactacatatatatttttaaaatgattcttaaaaaaattagagattcaacaattcgtagaaaaatagttgctggtccattgaacgttgagataagaagtttttaaaaaataaaacagtttttcagttgacttcggtgttggtacctgctcgttcatttttataaacctagtttaattggcttgacctgtttactctatttctaacacttcaatagaaaacttttctcaaatttttctgaaactatgtttgttttacacttttactgctgcagtagtacaaatatatcgaagttgtctcaaaaatactttctcaagttcataattgttaaaacatattctcaagtcttcttagttaaatatacttactgacttttattgattgttcatcaatatgtacgcattaataagtcacttctttgaaaggaaagccttaaaattatttgttttatgacctgtttgccacttttaaaagtttaaggtcatatagtttataagagtcaacaaatatacatgtggtcgattcctcacacctattgtattcaacgtgctttttatttcgtcaatggatttataacgtcgagattcatgttacgatttattaatctcttttttttgttaaatacgatttattaatctcttcaaatttttatcaatctatatgcaaaaagttacatgtaaacaagaagtcaattagaacatggagtatatatatgaatctcatatgatattctggatcttactatgaaaaaaaaaaaaaatatatatatatatatatatatacagttgaaaaatattgttaaaccagtcattccctcataagtacattcagagtacatgattacttaaaactggtgaataatctgaagtatggaacttggacgggaaaaaactccattcctcaaaaacactgacaaaatgtattcaactaaagcaacttgtaaatctggttagagaagatatggattaat

SEQ ID NO: 64993 - DNA, 1291 bp, Arabidopsis thaliana landsberg
  unsure (1)..(1291): unsure at all n locations
cactcaaaattaatattctccctctatcagtctatctaataaaattggaggtttcgtagcagccctaaacgtttccttctcaatttcacttaaagttattcttttttcttctgcagaaggagcttgccttgtatacagcttccaaagttagtagtgagtttttatgctttgatattgatggtgacatagacccaatgttcaaggtgataactctctctctctctctctctctctctctctctcttgatatttctaatgttgccacaaagtcggacttttactttgtttgcgtgtcaaagaaatatatgggaacaaactggtcaagtttaactgggtatactgaatgtgctggaaaggaacatttaaatgtctttaaaatgtgacttcaatattaagtatcaaggaacatttggggggaccctacccatgggataccctctccccagggattagtcctgattctcctgaacccttccataggttcagggatttaccctgaattaacaaaaaacaatatatattaagtatcaaatagctcaaccaattccaagtctgaattgatcctttatttcgttttgagatactagatgattattagtgctttcaagtgctctaggtggaaattagaaagtagatctcagagttcattgcactgtcactctgcttttttgagtttttccactcttatatgtggtgaacgtggcttttaatttcttgtgatttttcaggagtactggtgcaaaagattacacccaaaaaatgtatgtgaaaaggtttacagacaacctcccctacgtgaatcacttaagaagggtaaactgaaaaagcaagatcttgcaataaccaaacagaaggcgaatattcttcgttttgctgatttaataggcaagaggatccaatatgattgtcctggattcttaccaaacaaacgccaggtgactttcagcaaatttttggagtatctaccttttcaacattcttttttcggttaatttcttcttccctgtagtacatttaaacctcatagcagctctctttatttcttgcgccagaaggttcctgttgcatttaatcactagatgtctactctatacacaaataggcgtatcatagttctattccattgattatttgtgtttccatgattttacagcaccgtatggcaggattagctgtgatagagattgctcanaaagtttccaaagcttggcgcatagagtggaggaattcaaccaaaggcaccacaaaaaatggaaagaaaactcgaggagagagagaaccaacattctta

SEQ ID NO: 64994 - DNA, 563 bp, Arabidopsis thaliana landsberg
agaacgacaatgctgtttgttgatgcatatagtcaaatttgttttttttatcttcaactattgagatctcatggggttggttgacttggttagattgcacgtttgacctattccccttctggagattacatactggctttggcagaagacgccacacataaactctggacatggtcgagtagccaaaatgaattctgcaaggtatagtctcagatgccaaaatgatctctcctatgtttcagcgctgatgtcttgactacttgattcgttaaatttttttgcttatagtatactcctaaaatattgaaggaaaatgtatatccaaagccacgattacatcaacctcaaagtgggaaaactatggaaaatgagatggccacctctgttcagaagtcaacgtcatgtttttcggtcaagggttcctatcttttctcgacttcaggaggaaagatagcagtttttgatctaaagaattttgacgtaataagcattgtagtgttataagcttttaggtcctgcctttgtgtctgcctcatcaaatgacactgtttgcacaataatgc

SEQ ID NO: 64995 - DNA, 638 bp, Arabidopsis thaliana landsberg
tattatctttatcattcatatttcatttattgaattttgtttttaacaaagctctataagtttttgatgaattaaaagatatcaggaaagaaaaggctcaaatcttcccttttttaattgttgcttataatcttgatcatgttcttaaagcttaagtgtgaattttgttgtgttgtatgcactttgtgaagttgattcttggaatgatgagtgttattatgataagagtgtagatagttgaacacttttctccggttataaatgaattgttttggactcgttcaagatatttcgataatttaaatgttactatgttagacatgattgttctctattggctttaattttttttctattggaaattaagagagctaacagtaatgggaaatggcacttttggtacttgattacacatataccaagtgattcttgagggttgagatttacttgatagatagatacaaaaaccaaaaaaaaaatattaatattttgtcaaagaagttctttttgggtagagaagaaaggagaaagcaaaaatgagtgaattgtgtgtaaagcaaatattaaaataagaattagaaacttaaagaagtaaacaaggagtgctttaaaacagtgggtggggatggatttagggt

SEQ ID NO: 64996 - DNA, 493 bp, Arabidopsis thaliana landsberg
  unsure (1)..(493): unsure at all n locations
ttgtccaggccgcattcaatgccgccgaggaggaataagattcgaagttctcgacactggtcatcgccgcccgtgccgatagtgaaaacgcgagcggcaggcacaagccagccgcccggcaaaatatttttttcataattgcaaaaccgaaattatttgcgaaagcgaatgcggttacaactcaaacccatcattgccagcccgccgccgaggatcgcccacgtttggggttcggggacggatatgatgttcaggccgatttggttcaggttggcggttccaccgncggttgagaggtcggcaacgaaaaaagtccaagtcccattcggatctgtattttgaaacaaggacagattggccgtcgttgccgcgctgtcaaaaattgtcccggccgattgcggatcaatggcccgtccgttcgacgccctagttctcgagacctggcctaaaccatttaagttgtaagctccgctgccataatcatggatgtttg

SEQ ID NO: 64997 - DNA, 367 bp, Arabidopsis thaliana landsberg
aacacgtcaataatggacagaccaaacacatgctaatctaatatttcatgctgacgcagctgatggccgggagtggtgtaaccacaggggaccatctactgaaggatcccctgggagataaaagcgtactatgatctcattacaacgaagaaaaatgtagaaagactctagatacagaaccaaaaaagagagtttcactcatgaccagattggtggacacgtactatcacatccgggcaacaaaagtctaagctagcgcactaaacatcaatgatgagaatagccgaccacaaaacaaaaacaagagggtcacaaacactattacgcattgacgacgaaaaataccacatgactctgaaaacgatga

SEQ ID NO: 64998 - DNA, 1529 bp, Arabidopsis thaliana landsberg
acgtgtcctttgtgcaggccttgtcaaaccagcagatctgaaatcattcgtgatggatccaccagcctcttcttccagattttctgattaaaacacatatacaagactgcaaagtaaaaaagaccctctagactcacttgctcactcgatagttttcttagagagtatttctatacaatgccattcaagctgtgaaagaaaccactgatgccttggaagatgttcatactatgtcatttgttaatatgaatgaaatcgccttttatattccgttgcaaaaaacaatctgatttcattcaagaagaaataattaataataatgaattcaagaaactgaaaccacacttgcacacacagagctctcttcagcaaccacaagcatctctttaatcatctcttgactaggaggagactgtgaacggtcagcgggtgaagaagtcatcaacgttgatacgaaaggggaaacttgtgtcacttcttcactgccctcgtctatgtacacaacgtcctgcatcgtaagctggtggtattcaactatctccctcaagaaccggttttccctcgcatacacagaattttcatgagccagccgtgctttctctgccagtaggctctccagctggagccgaatctgatacaacagcttccacaccgagttgttagatggaatgcaacacacaaattagaacatgagctcagtcaaaagatttaccaaatcttcgtctgcagggttgcttcctttctcacggtggctctctctcagatgtttgttctcttcctcaagctgagcacaacgctctttcgcaaatgcaagatctgctttgacagttttcagctcacggaggagtagtttagctttagcagcagtggccatcgccacctgcagctcacagaagaaactatatatcaacgaacagagctatcatacataaatcaccaaccaaccaagccatcaaaagactggaccttacatcgcgagatgccttgagttgagtttcatgttccatatgattcaactgcattggctgctctggagactttttccatgagctactaactccataagattgattctgattctcatcttcaccaccagttcctcttcgtctggtttgaagttttcgtgtttcctggatgatatcagctgttttgttctcaacgagtgttcggccatcctagagaaacaaggaagcaattcaaccaaaagaatgaagaagcggaatgatttagagagaaggagaaacaacacctcaaaggctttttcaaaagtgtcaccgatctgattaagagaagatgtaagcttatccagccccctccgaagcttgggattatccattttcttgaacccttcatctgataggtatgaaaaccgggactagaagagaaacaaagaccaaaaaaccatgacgacgtcaaagcaagaggatgatggatcatgagaatgtacttgagtcagatgagcaaaaacaaaacctgagaagctgttgcagaccgatcactagatttatcatcttcaaaaaaaaattttg

SEQ ID NO: 64999 - DNA, 538 bp, Arabidopsis thaliana landsberg
cggtgggcagcaaggacccggatacccgtccggtactcattgtcaaagtgttcctttaccaggtcaacaaatccactctggtccaatccatcgccgacctggtgaaggacaagatcgttgaagatatttccgaagtgcgggacgagtccgaccgcttcggcgtgcgcgtggtcattgagctgtagcgcggcgcgaatgcggatgtcgtgctcaaccagctctacatgcacaccgcgctgcaaaccgggttcttctacaacatggaggtgctggatggcggcctgcccaagctctacggcgtgccgcagatcctccgcgctttcatcgcccaccgtgaagaggtcgtgacccgacgcaccaaattacggctctacaaggcgcgcgaccgcgcccacatattggtgggtctgggtattgccgtggccaacatcgacgaagtcatcaagatcattcgcatcgcaccaaaccctgacgaggccaatatacagctcatggcgcgcgcctggccagacgacgccgtcaagccgctgctggtact

SEQ ID NO: 65000 - DNA, 122 bp, Arabidopsis thaliana landsberg
gtcggcgttctcgacatgatagggaaacgtttgcctggtgaagcaagagagacaagccccaagtaagacaccaacaagccccacagtaaaagcccacaaatgagagcaatgaaatttccccc

SEQ ID NO: 65001 - DNA, 564 bp, Arabidopsis thaliana landsberg
  unsure (1)..(564): unsure at all n locations
gggaatgtctatgatctgaaaagcaaatttggggtcaaattttaaaatccaaaagacttcattggtgtcatctcgaactttccaatctccatctcttatcgaagaccttttgattctagcacaaggtttcacttcttccgtgcttgtaaagcttccacattctctatacacataccaactcccgaaaagccataatttctgcaaatattttttaaacaagaaacacaataattttaaaacatatgatgaatttattcatattattgtccaacttgtttacacatgatcatcattaaattttaaaagtccaattccacggcgcaaatttgaatcatagtttgagtttttttaatataagttaagtatggttgcttgcttactatatttttgaaaaactatttctaaattgagctagagaaacttcatttaactttttttttagtttaaattggaaattccaatttttttttttttttttttggcgttgttgatttcaaatgattcattattcaataaacttttaagaatccaataangtatgagaacttagccccatagtttctt

SEQ ID NO: 65002 - DNA, 191 bp, Arabidopsis thaliana landsberg
  unsure (1)..(191): unsure at all n locations
aataaaataaaaaaagcgtgcttacaaaaacntnnatagacaccatgtgatcatcggtgtctaataagtcatacctactatgtggatatgagcgactgactgtctgagcactcgatcgtagtacctatacccattacagtcaagagtgaatatcgggagcctattaagtgaggcaaattcaattgaaacaa

SEQ ID NO: 65003 - DNA, 1701 bp, Arabidopsis thaliana landsberg
ataataatgaatagagagggttctgatacggctgtgtttaatggggaccaagagaagatcagaatcggtctctttgttgatgtaatacatgagcaacagaagaagagaaggatgatggcgagtgaagagataaggaggccgaagatggtgaaatctctgaagaaggtattacaagtgatggaaaagaagcagcagaagaacaagcatgaaaaagagtctctaagattctgtagaaaagattgtagtccggacatgaactgtgatgtgtgttgtgtttgtcactggggtggagatttgcttctttgtgatggttgtccttcagcgtttcaccatgcttgcctcggtttgtctagtcttcccgaggaagacctctggttctgtccatgttgctgctgcgatatctgtggatcaatggaatcacccgcgaacagcaagttgatggcttgtgagcagtgccagagaaggttccatctcacgtgtttgaaagaagactcttgcattgtttcgagtagaggctggttctgtagtagtcaatgcaacagagtcttttccgcgcttgagaatctcctaggaagtaaaattgcagtaggcaacgacggtgatttggtctggacattgatgagagctccgaacgaaggtgaacactatgatgatgaacaaatctccaagctagaatctgctgtcgagatacttcaccaagggtttgagcctaccaatgatgttttctctgggagagaccttgttgaggaactgatatacaggaaagacagaactggagtgggccgcgggttttacacagtcttgatcgagagaaagaacgagcctatcacggtggcagcagtgagagttgacaaagatgtagtcgagatccctttggtggcgacattgtctagttacagaagaagtgggatgtgcagagtgctgatggatgagttggagaagcaaatgtctcagatgggagtttgtagactggtcttaccggctgcaaaagaggttgtgaccacttggactgagcggtttgggttctctgtaatgaacagttcggagcggctggagcttgtgaaacatggaatgcttgattttgttggtaccatcatgtgccataagtttcttcagaaggaaagagcagaaaatgattctgcagaagagtcaagtctcacagaataacaagtctcctggtttttgtcatgtaatattgattgatcttaaatattggggagaaaatgtgtagtaaacaactcttgatgtccatatataattggtacatctttgtttgtctttaaatgggtgagtctgctttaattgaatgtgagttatatcaaatcaaataattggattcattttctctactgtttataggatttgtatatgaaatctttagagaaaccaagacaatgcactaactcgatgatgctgaaactctactcacacttgctcaatctgaggtatcaatttcctttctatctgtcactgtcagacactaaaaacacaaagacccaccattgaactaaaaaacattgccataaatcagacatgcataaatgaatcttaggctcatgccgcagaaactaaagctatcagctcatttgattctaacatcgttctaaacaacttatttattggatacagtgaatagtaagtccagagctcacagtaaaacagagagatgatcttaacattgtactctgttatttctttttt

SEQ ID NO: 65004 - DNA, 1380 bp, Arabidopsis thaliana landsberg
gtttaaaagaaataaaagagtgtttgtttattcaataatcaatatagctgattcttctttacagagtcattgtatttgggatgttgttaccaatggttgaatccttaacccctttggtgtatgtatatactctttacttattcaaatgaataatccagcaatgaatgcaaaagcaaaaactggatcagctttattcgttatgagtctttctctaaattcaaaaatttaaattcgagtcttatgattgacgttatgacttgtgagaaattgataatctggccttttatttgaaattttaatttctgaacccagaggataaataaagttaaaatcgatgatgattttaggctttattggtttgaaagtgggccgtagatgggcccgaatctaaaatatttgaatcgaacccgaataaagaaagagaggttggatcataactaccatcgacgtggcttccatcttcttctactttgtcttccatcttcgccgacgagtcacatctccgaaatccggagccggagagggagaaagaaggagaatttgggttctccgagatcgaagctcttgcctcggaacccttgattttgttttggaataggctatttttttagtaaaagaggaaatggtgggaagtagtaattcgttagcgggtctacaagaccacttgaaattagcgagagaatatgcactagaaggatcctatgacacatctgtcatcttcttcgatggcgccattgctcagatcaacaagtaagtagctcctcttgtctctccagtcttgaatctagcttttttgtcaccccttttggcaatttcttcaagccctaagctactttaatagtttcgtgttggattgtattgaaatgggcttagaaaaatctagaattttgcaatgttcaccgtgcaatgtctgtgtagacagagatagaagactcttatgtgctgcgttagtggttctgaagctatggtatactgttttaggcatttaaacacccttgacgatcctttggcccggaccaaatggatgaacgttaaaaaggccataatggaagagacggaagttgtgaagcaattggatgcagagaggagagcatttaaagaagctcccactgggcgtcgcgctgcttctccacctatcaataccaaatcatcctttgtttttcagcccttggatgagtatccaacttcatccggtggtggtcctatggatgatcctgatgtgtggaggcctcctacccgtgatgttactagtcgaagacccgccagggctggtcaaactggtactagaaaatcacctcaagatggggcttgggctcgtggccctactacacggaccggtccagcttcccgtggtggcagaggtggggctactagtaagtc

SEQ ID NO: 65005 - DNA, 566 bp, Arabidopsis thaliana landsberg
cggcggtcgccagcttctctaagtcggcccgagacgccgcgagcgcggccggatcgcgatcgccgaccagccggagcaactcgatcacaaccccctcgtcaaggtcgaccccgcgaccgtctcggccggcgatcgcggcgaccagaaccttcggctccggctcattggcgagcttcgccaggtcgacgagcgccgcgcggcggtcgtcctcgcgaactcccttgcgaaacaggacttcctgaagcacgccccggttccgcttcatcttgagcaggtcgtcgaccgccacgttctggaggaagtaccgcgccccggcgtcgcttgagaactcgatcgaatggccttcggcgagtgctttcttgacgtagggctcgagcgtccggatcgtctcgttccgggtgtagtcgagataatagtccgaggcactctcggtggagatcagggccacgtcgacggcctcggggacggtgaagaagctcgccgcgcggacgggtttaaggcggacccgagggtgctcgtcggccgccagctttttgagcagcccgagcggcttcgggacgcggtcg

SEQ ID NO: 65006 - DNA, 274 bp, Arabidopsis thaliana landsberg
tacagacaagcaggagcagaagccggccgccagaagcaggtcgaggcaccgcccagcctggcccgcatgccggtcgccgaggccaccgacactggcgagaaccggttcgcctggctggccgccatccgcgaccctgacaagcatgaggcagcgatttccaagctgagcgccgccgaccaagaggcatacctggctgctgggggctgatcatcacatgctgcgactcgacatcaaaccaggagagagcgtgtgcataggatactgccctgtagcc

SEQ ID NO: 65007 - DNA, 639 bp, Arabidopsis thaliana landsberg
aaactattgtgctattagtgaaaatgataccacaagttgtcattagcagagaaagatcagtatcaatatccaatataggaatgaagcgtcactgtcttaaagagtcattatcgtggagaaccacatcactaatccacttatgtgtagttagttgtttgtaatcaactttttgtattttcttgtgtaatccaacttttgatgtattagtttaagctgtattacttttaaaagcttgcctttattttccttgtgaaattctgcataaatatcaaaagagatttatgacaaaacaatgttgctttttcatcattaaccaatcaaattctttagtttctaattttaaagttgtgtttaaaaacaaaaatgtaccactatcgtcgacataagaaaaaagtatctaagcttaaaacgctaacattcataccaatttaaatttatatcattccaaagttcttcaaaatcccttagtctctctatttcaatatgtacgtataaatgtattataagacatcgaaacgtgtcatgggtacactgaagtcgcaggactagaaggagctaataggtggccatggtgctctacgtggactctctgtttgacacgtgtcaaggtgattatgcatctttcaaacttctgtgata

SEQ ID NO: 65008 - DNA, 495 bp, Arabidopsis thaliana landsberg
taatcgttctcttccactaaaagtttacatggtttcatactttcattcatgtaattaactaaactataatcactaattgaatattttcaattaaactttcggccattagaaaaacatcttgggttatgttgctatcgattggttattgactattatatacagagtcaaatagaaatgataatgaaataaacaaaagtcaacctcagaaaatttggccactcaatttccttttaaattgttatttattaaaatatgtgaaagaagaacaaaaagatgtcgcaaaagacaacaacttttggagtggaattggactcggattaaaaggtatgaatgcctgagaaaataaatagcgcaccaagaaacgataataaattaattaaacaggcgtgattattgattaatactttaaattatctttttgaaattaaaagttagggccagtatggaatcgtaaccctttattgctaggtttcgtgtcaccaaacaagtaagcat

SEQ ID NO: 65009 - DNA, 421 bp, Arabidopsis thaliana landsberg
gcccccccatccccggtagcctgccgccccgcctcacctatataaagccgggcacattcaccaaggtttttccgttgaccgctctccagcctgcccgcggcactcatgacctgatcggcgaggaacagcgcctgttcttacgcgttgtggaggttgcattgtctcgtctatgccacctatggcttctaggaatggatcacccccattttcgaggacacgcgcgtgttcgcccgcaccctgggagagaccttctacgtggtgatgaaggagatgttcacgttccaggaccgtggcggggactcgttcacgctgctgccggaaggcaccgcgggggtctgccgagccctggtgtcgaacgggttgacgcaatcgctgtcgcaaaatgtgatctacgccgggccgatgttccgattttagcggt

SEQ ID NO: 65010 - DNA, 1172 bp, Arabidopsis thaliana landsberg
tagttaatagattttttttttttatcaattagtatttgggatattttactagatttaaacattgattatattttcacaaacacaagtgatttggaacaaagatttggcaattgtactactttgattaaaatttcatagaaaagctaaggggttgtgaaatttgtgtggtggggcttagtaaaatttgtatggtacgtccctagtgacggtgatatttcttttataaaattcacatatacttacaaggttttattggaactacaagatcattttgttgttgtctggtccactggtgacccttattttagctctgcaagggacgcgacaagaactctacaaaggaaacgtcgaatccagagacaaagtgactggatgatagccgagaggtggaaccactctcctaataaaggctttcgtcaaactataccaaatgtaaagactaaagaacatgatatacaaattgtctttctccaaccatttgtattttcaacgtatatgatacgacaattatatggcttacacagtctatacgcttctatttacataaaagtttttgtaatcgctagtcatgattagttccaactttgattataaaagaattttattctatcttaattgattgtttgtcctccttattcataatacacaaaaataaaaaaaaaataaaaaataaaaaaaactttgattttgaaacgtatttccttttatttgcatttaacttatggaacgggttatagaacaagaccagattacagcctcagaattttaaataagaatcaaaaacgaattctacaaacccaaacaatcatgccacgtgtaaacttatgacaaatgaaagtatatcataataatatacaccagagaacagttgagtaaatccctccctcctctatctatctcccgtcgtcacctctccgactctgcttttataagacgtttctctctgcttcaccaccagagagatacatccaaaaaaatcatatctttccttcatttttattggcgttttaagaaaacaaagcttccccaatcagggttttgtattacaagaatgggattgtggaatggaaaaggcaccggaggatttgtcctctaccttctcgtggctttctccgtcgccgtcttctctgtttcttacgtcggagacacaacagaccctaatcatcatcatc

SEQ ID NO: 65011 - DNA, 542 bp, Arabidopsis thaliana landsberg
ccgttttttattgatgtctaagccgatggtggtaaaatgcttgccaaactctactgccagaggttttccatcgtctccaaggccaacaatacaaagtattttcttatttgtcatgtacgaaagttattagagatgtgcacaggtatgggaatgaaattgatttaaaatcataaggcgctatctcactgctttgaagacccgtgtgaataaataactgaaaatatatggatgtgtcgcatagtttactttctaaatcgggttcgaaagtgacgaatactgtcattgataatattacggattactagtttcataatttctattccttttatctgctgtaataaaggataagtgactaaatcatccttctatgaaggaataattctggcctgtgcgatgtcctcacccgtgtagatgcccttatcgatgaagtgaaccgctacaccacagatattttgatactgactgactatgtgccaatcaccaccatgcacccgtatgtatgcaggtgtaatacccacatgcatagtaacgagtggacagac

SEQ ID NO: 65012 - DNA, 532 bp, Arabidopsis thaliana landsberg
  unsure (1)..(532): unsure at all n locations
cttcaacaactcaatccagcggacgcgctacgcgcgccgttgatttcgggcgttagacctctatgaccaaggagggttgtacccttcagatcttgctcgctacttgtatccttgcgttgcctggcactgcttgttcagcgggtagcggcgtgatgcccgagtggctcctcgggacttggaacaaaactttggatgaggacggcgggccaccggattnnnnnnnnnnnnnnnnnnnnnnnnnnnnngtcacctacgacagtcagtgcaatgagcacaccaattcgtactttgttgagaagggaatggtctttttgatcattccgctggcgaaaggccctatcgcactcgtgctcgtaccaaacgcagaccgttcgtacatgacctttacgtcgcctcgtactcagaacaatgcggactatgagccttctgatgggccttactgccgagagaagtctaacagtgcgtgcaagccgaaattgcatcgctacaccaacaacatggcataaagagcttcgcctgttgacggctatgc

SEQ ID NO: 65013 - DNA, 555 bp, Arabidopsis thaliana landsberg
tgggggacttgttcttaaatatactatatggacgactttctcaaaagttcattgaatatatcataggggaagagttaaagacactaaagagaaaaatacaaaaattctaatgtataaggtacattcccaccaaagaatatttacttcattgctttcacttaggtttttgatgtttccttagtcgtcaacactctattctcagcattttgtcttcctcgagcacacataattatattaagcatgacgattgccatccatatgcgacagtgaaaatgaccaacacctagctgagtaaatagagataaaataattgctaaattgatatggcgttagatttgaattgacggtagacgtttgttttcaaagttttcattatctaaataaagtttactatgtgtaattttatcatttcgatacaaatactaaaattggaaatagaaattccatagttaaatattcaaacaaaactaaaatgatgatgatttgtgcctatatatcttatattttgggctccttatatgtttttcactcactgattttcgaaatatatatgac

SEQ ID NO: 65014 - DNA, 1690 bp, Arabidopsis thaliana landsberg
gagaggctaatgaaagattaatttcaattactattgttaagataatgtaagcaagttgagtaatagttttctctcaaaattcaagaacaaattcagcaaagataaactagtgataacaactggatcaaaacctgtttctccagctcccgagccctggcttctgctgcctcacgcatttcttctgcacggtgaagctgtaatcaagaacaaactgttatgaaaacagaggataagaacttattttcatgaaaaataattttagtgaaaagacgttgaaccttctccaatacaatctcattctcctcttgtagcatatccacctgcaagtaaaatttagtcaacctcaagtccaacagcttctaacaattttcatatacaaggtaaaaatgaccagtagataatccacaagggttaaaaggaaaaagcccacatacttcatcacgaagagctgaagcttctcgctgataccccttatctctcgaatttactaagcgtggtacatcaccaaagtatctgaaaacgctaaatctatgagataataggaactggttttgacaaattccactaaagaaagtgaatagttttcttcacctttgatctctatccttaaatgaatgatcaattggaggaataatcaccggaggtttcaacgatgccttaggtggcatccaaaagggagacgcattcggagttgatgatctactaaacgttgatggccttcctgtcgacgacgaacgcactgaagtcacttgctcagtgatgttcctacctatctaataaaaatcataaaaacaaacacaaaaatgagaaaaatcacagaagccaaatctgcttcttaagatctcaattacgaaattttaccgcaggtgaatgcgatcgattacggcgagcgaaggaaccgttgataggtccagaagaaggaggtgcgaatttgaattcgtgatcgtcgtcatcatcatcatcatcgtcttcctcattgtatttgttctgtaaagccataaccttcgctaaccgttgagccgccgctttggtggctacgttttgagttcttttaacggtggataagccaccaacaccaccgatttgattccggtgagctggagacatggacggcgatctagattccgtatcgttggatgatctgctccattgacgaccgtacgctgggctactcggtctcctgagatccatcaggagaacttcttacgtcagattcaaaatcactggagagaagaagatatgaacgcggtggcgtgggagggattttggtaagcagtttaaaagatgtgaaagagtggaaacgatgccgtttaatacggaggagaacacatgcgtcatcgattgggattagatttggcggaggaaaatgtgggaccattttagtcaactgcagatttgatttttaattgtaatgacataatttaattaaaacatttatataattttaattcaaaagggaagtcaatgtattaaaaaattgaaggaaaaaataaaaatgaatgatgtatgagagaaaaagaaggtaaagaagaggaaattcatgtgaaaattatgtgattatgtttaaggacatttgtgtctaattatgaaactcaatcacaaatatataattaatgagagatattgtatatttaaccatcaatctttcttctccatatgtatgtgattttcttgtatatgcgagtagcat

SEQ ID NO: 65015 - DNA, 552 bp, Arabidopsis thaliana landsberg
caggttgactaccacgtacgccaacaggccggtgctttcgccggtatcaagaaagttctgcagttactgaaatcgagaaacgccatccttgtggagcatcaccacctcgccgtcgagtacgcagcgacgcccgagcttggccaggtcgtcaaccaacggcgcaaactgttcgttaaacgattggccgcggcgggaatacagctgcacgttcgttccttccacctcggcaatcgcgcgatacccatcccacttgagctcgaacaaccagcctgggcggtcgaaggcggcatccgccgtgttggcgagcatggggcgcacgtggcgtggcatcggcgctgccttgccttcgagttcctcgtttcgcgtagctgttttcacgctccagtcctcctgcgtgaagtctcgtgcggtggcgtattcatcatcttgctttatgagcagccattgcggtgaatggtcgccggtacgtaccaagtgaaacgcaccttttaacttggtgccatgcagtaccacgcgcacatggtcgtgctccacgtcgttaaaatcaccttt

SEQ ID NO: 65016 - DNA, 378 bp, Arabidopsis thaliana landsberg
catggcccgctggctcaatattaaagtttaatactgcatctgaagcatacacacacaggaggagccagggacacttgacgcgcggtacgctataaacctcacaaaaccctagtcacaaacatggccacaggctccatcaatgcacacacgaactgagactaccaaacgatggaggagatcacaacgccattgatatgcaacggaatcaatctggtcaaggagcttgagttcagtttatcatcacaagtgtcaccagaatcagatttgtcgagttctctaagctcgatatccactctattcggagacgtcaacgagcggctgaaaaccctactagcgtggaggaactctttgtcacagtaccagcctgaaccggaaccg

SEQ ID NO: 65017 - DNA, 582 bp, Arabidopsis thaliana landsberg
ttgagttaaacctcttgaattcaattttgcttttttaatacatatcattttatgaactgaaaactcacatgtattcataaatgtcgaccaatttaatgactgtttagtgcgcaccatgcttcaatagttcaatctccattcaattatcggtttatatatagagtcggaaaggaattgtagatttcgtaaaagtcgttagagaaggtctcaaacatacctctataaagtctatttgctttgtagtccataattagggttgattttcagattttgctgtgatgtcgccttttctaccatttgaattttcaaatctaaggtgttatgacttatgaattttagtatcagcaaaatatattttgtatattgtttttttttttaaatagattttagcttgacaggtcattgttttttttttatgcgcgtgaaactgaagataaatgtaaacagttgtgttgatgaacaaatcttacgaatttgatctaatgactggcaatgagagtcctaaacacaagataagtgttggagtccaagaagtaggagagtttttatttaacttttacgtgatttggcaaaaacaaaata

SEQ ID NO: 65018 - DNA, 1290 bp, Arabidopsis thaliana landsberg
aaacactccctggatgccaaagacatactcacctctttgttagtctctttctctttctttctcttaacctcttgttgagttatattcatctctatggcaccatgtgagtctcccggctaacatgtgggaatggtgtgtgtttcaggttgaagatccttttgagcagccggtgaacgctgcaaggagtgtgagccgtagaaatttggacagaatagctcaagtatttcagattacatcgcgccgtcttgtctcagagtgtaacagaaactccatcatagggattctgacagggcaacacattcaagagtctttgtacagaacaataagcctcccaagtcaacatcatgcaaacggtatgcacaatgtccgtaatctgcatggtcaggctaggccacagaaccagcaaatgcagcaaaattggtcacagagctacaataccccgaatccaccacattggccaccactaacacaatcccgaccacaacagaattggactcagaacaaccccaggaatcttcaggggcaaccacctgtccaaggccaaacttggcctgtaatcacacaaactcaaacgcagcagaagagcccatataagagtgggaaccgaccattgaaaaatacatctgctggttcaagtcagaatcagggccacattggtaagccatctggtcatatgaatggtgtgaactctgcaagacctgcatatacgaatggtgtgaactccgcaaggcctccatcaaaaattccaagccaaggcggacagatctggagaccgagacatgagcagtagaatgaggtgtgcagacatggttcagagatactccttcacatattttggatgattttgtattctgaccttggggctttttttctatggatccattcgttacaatcaacagatttgcaatagcagaatgttgttactaaaaaatgaggacgaggtaaacttttactcaataaaacaccacaatcaaatttacagttacattaagagaaaaaagaagaaaacaataagagatatactaccaaacaaaatatattgtgttgactagtgcagtaacttgtgtggtattaagctcgaaggagacacttctcgcatgttagaatcctgtaacttgcgtgaggaccctcggatgtgtcacgcagagaagtatgccaacccatggactttgagatttcttgaatttcatgcataacatcaattgaatccctaatgtatgctcttccaccgggtcttaacatacggcacatatctaacaatatggttgacatctcacatacgattatatt

SEQ ID NO: 65019 - DNA, 625 bp, Arabidopsis thaliana landsberg
cttactaatgtaaaattatcataacatttagtgatgaaactaagcagtttttttggtcaacaaaacactaacgatcgaatgttaagatctgtattttaagaaaaaaaataatggtattctgaagagtttttactcacaaaacatgattgtttagatcgttattacttatactaatagttaagaaaaaatagtcaaagtgaaaaaataaaaaataagtttaataagtcaaagaaaacaaattgtgtcggctcaagttgcaaatataggaatatgccaatttctttgtcaaaattaattcatgtgttattaattgacgttaacatttttagtttactcaaccaaccattccatctgctaattatattttaatctaatctgaagaaaagaaaaactgcttagtcgctactacttacactggtcggaacatgatagttagatatttgtgctaatgttgacctcgactcatttgagtatatttttaggattgatatgttattattttctacgcctaagctttttgactagcatgtgtttgttgagcctgcctatacgtaaattaaagagaatataattttagtcttgacaattttgtttattttaaacatgtgtcgtttcaaacaagaca

SEQ ID NO: 65020 - DNA, 611 bp, Arabidopsis thaliana landsberg
  unsure (1)..(611): unsure at all n locations
acctgaaccactaattctacaaaatattgcttaaaagttttgcaaaaaatgctgacttaaaatgaaaaaagaaaacagaaagatgtgccggcattaagaaagatgtcaaccacatgagctgaataattccaaacccatttatcacgacatcacttcaacatacttgtttgttagtatctccttttggtatatttttttttgcgtgtttttggcttttacacacacctaaaactttgattggtggctttttctttgatttaacttaaaataaagtaatggaagacttgccaagtcaagctcatgtaatggaagtctggccaagtcaagctcgttacagagaatgttcctatataaataatagtgtgtaagcagacaggttcatcacttaccattcaacaaacaaattatctttgtctccaaacaacaaaattgagaggcgatggttcgaaaccaatctggntgctttcttaatattattattacctctttctaaataagagtaatggaccacaacaatgatatgataaattatattatataagaaacctgttcatagattatacaaaattttacttaaaaatcttgcaaaaatattgataaaaagaaaagat

SEQ ID NO: 65021 - DNA, 182 bp, Arabidopsis thaliana landsberg
  unsure (1)..(182): unsure at all n locations
gaactcacacaattcataaanagaaaacntatattcgtgttctctctaagttttgttacgagttcatgtatattttctgactcacttgtgaacgcaatgtctaagtcgacgtcagtgtctaccatactgtatctgaggcagaggttgcaggggctgaagatatatgaaactnnagatctaat

SEQ ID NO: 65022 - DNA, 619 bp, Arabidopsis thaliana landsberg
atgaattgtctccaattatcttatcaatattcgtggacgactaggaagaagagaactctgaaaccattcatgtcaaaaggttctagccctagtagtagtagtgatagtaggaaacggaagctttcgagagctgaagatagcgatgattcagcggttaaacggaatgcgaaacgaaggagaaagatatgcaaagtagaagaatattatgaagatgatgattgcatattaagtgattgggttcagaggaatactgcgaaaaggattgataagcggaacgaagaagttgaagttatggttaagatagagtcaggtgatgattgcacaataggtaagtggttttctgatgttagtagtaaaaggaaagataaacgacaagtagaagttgatgaagatgaggaatgggaagaagaagttacactgtgttctaagatcaaggcaacgtcgtcgcgaagcagaacccgtagtttaagtgctaacagtccagaaaatgttacagatgttattagtccttgtcgttcacggtctccagcttctaatgtatcagattccattcagataaatgactgcaccagtagtagaaaacagagtggcccaatttgtcatcagtgcttgaaagggg

SEQ ID NO: 65023 - DNA, 520 bp, Arabidopsis thaliana landsberg
tttgcgcgcttccttgggcatgcgcgccgacttgttgcgcttttcgatctcgtcgatgtccgcaccgtcctcggtctcgccgagttccttctggatcgccttgacctgctcgttcaggtaatactcgcgctggcttttctccatctggcgcttgacgcggccacggatgcgtttttccacctgcaggatgtcgagttcgccctcgaccaccttcaacaggtgctccaggcgctgcttgacgctgatcatttccagcacttcctgcttttgctcaagcttgagcggcagatgcgcggcaatggtgtcacccaggcggccggcctcatcgatgcctgccagcgaagtcaggatttccggcggaatcttcttgttcagtttcacgtactgatcgaactgctggatcatcgtgcgccgcatcgcctcggtctcgctgtccgtggccggatcactggcaatcggcgtgacctgcaccgtgaaatgggttttgacgtcttcgacgctgtggatgcgcgcgcgctgg

SEQ ID NO: 65024 - DNA, 475 bp, Arabidopsis thaliana landsberg
gggttattttgtcatactgatcaactttttagcatggctatataatttaggcatatatggtgttatattaatcttaagcagcaagagacctataagagctatcaggtacactctgttgtactgggttattaaagaccaacgcagatctgaaccgtcagatgatgagaaaatataggctactttgaatcttttgacctaaatcctaccattacaaaagaccaatgtttccttaaaactaaattaaggaaaatgaaacttatacaaatatccaatttagtggggtccacctattttgacttatgtattttccattggtgcttggtcacaaaacgcgtatctttttcatacacttggccatataccttgttattatgcagtatatgcttctcttatcgctgactcgcttttcacatattctaaaagcctttctaatctctacagtgttatttaaccaattaaaaatgctgtatacctt

SEQ ID NO: 65025 - DNA, 447 bp, Arabidopsis thaliana landsberg
cgcatcttcaggatggtaacctaaaaaactcgtgaaaaaagcaatgaaaaggagctattttattactcttcaaaaatttctgagcactgagttataaatagatctcacaattagaagatgaaaatgttcaaaagtagcgggcttatcttctactaatttttataaactaagaacatttaaaatatatatacttatatgttcaggtgacttctgctactaaattttgcgcatttatgtctattaattgcttattttggaaagaacagctggcatctacacctttgtttttaaatatagaagtatgtgtgtcacatgacatgctctaaagcaaccacaattgtaatggggcgtgagagtgatgaacacgacatcccaaccaagaaactggttcaaaaaacatccaaacactatgtgatggatatgtgtatgggcatgcatcacatagtg

SEQ ID NO: 65026 - DNA, 539 bp, Arabidopsis thaliana landsberg
  unsure (1)..(539): unsure at all n locations
tattaaacaaataaaaagatccaattttttgataattctggaagaggaancaatcntgttgtctcggcgatttgctcaagtgtcgagtgaccaanaacacgatgtaccgattactaggtctaagggaagaaactcggcgagtcctgaggaatctttggggaaacggaggaagcgtaagacggtgaagctatacgaagattttgaagagaaggaagcggataggaagaagaagagaaaggggaataaggaggatgaggatatggcggagggagatgatgatcaggcggaggaagaaacaaatccggaggctgaagaagaggaagacgaagaagaagaagagaagcctgatgatgcgtgtcctgttggtgattcggttaatgttacgggtaaaggaaaagggaaaagaactcatttcaaccaatttgcttatgatggtaacacttatgatctggtgagttttgttttatctctagggtttttgattttgggtgagtttgatgaatattgggtttgattgctgcgatcatgttgagattaca

SEQ ID NO: 65027 - DNA, 220 bp, Arabidopsis thaliana landsberg
  unsure (1)..(220): unsure at all n locations
ccgaggagacaagaagggaacaggggggattagagacgggacccgcgcttgccaaagaacggaagaagngacaaagaccggaccacccggggcgccggagactcaaagaagaggaccgaagacggaagaagcgaaggaganggggacnccaaacacgaaagcaaccgggacggacgcagggaagacagnagagagaaacccgcaaaacaggggacacagg

SEQ ID NO: 65028 - DNA, 1812 bp, Arabidopsis thaliana landsberg
  unsure (1)..(1812): unsure at all n locations
tctatgtacgtatgaattttaatggtgaagaattgtgcagctaagtccaatagcaaaaaagtgaacttcacccaccagcatgtatgtgaatattaatgtgcctttgggcagttcctaaaccaacaggtccggttagtggatttgatgagacagtagcaccagtaaagagagggctgatttggtgaggaaaaggctgcaaaatacagtaataattacataaaagtagaaaattaatttagaaaaaagatgagactagaagcttacctgaaccataataggattcggtcctgatggagatatatacacagcaggccctgcattcacataggataattcctgtagatcaaagtgttaatgagccgcatgtcaagaatgaataggaaaatgcacgaaaggaatgacccaaaacgcaccggcgacggtgccattctcaatgtcaaaattgtgcgtccaagctccagtaggagggcccctaaatgttgcatggcaagacctacttgcacggcctctgtctggatttgtgaccttagagtaggatctgaagatgaaccatcttgctccagacgtcccgcaatatgctacaacaatgtttttgcaaattacaaacagcacataattagatgacaatgcatggtaaccatatacataacagttcttgtaaagagaaagaatggaatcaattaataagcagtgtgaagaaggtgtttaccgataaagaagagacaccgagaccactcagtaaatgttgtgcattccttaggacaacagagagtgcttcaggtgttgctgcacctcgtctatttctaggcaactcttcccttggtcgccctccggatccagcagaagaggtatctggctgatagcctggaggaacatccaattaacttatttatgtgttctctatccaatatgacaataaaacttagatcacaataccattttgtgataatgcctgctccatccgattaatgaactccattagagtgtctaaggaatccggaataggctgcagaattagagagttacattgtaaaatgacaagattaaagctctagtctcaagatcaaaatactactacgtgactaagaactaccgttaagaatgaagggataggaatcgttgtggctgctgtaacaggaatctgaactacacgaggcatcgatgtttgaaatgatacaccaggaaatgcttgcctaggttgtgaatgacccgtagcttggctttgaccaccaatgccaggctctccatcagatgtatttccaggaggtgcattagacgactgattcgactaggaaaaataaaagcgcatgcaacatcgagtttagaaacaggcaatagttgatgacaatatgaaaccttacacatcaaatagtaacaacacctgattctcaacaatccttaacgtagactaagcactaatatggaataaattcgaaatagagagtgacgagaaaaaaactcacgggcatagaggattgcgtgccattagtactgtgatttgtaggaagctgtccactaactccaaaagaatttagaactgctccaatgaccttagtagttagcaacacaaaattaaaagcaggttagcctaactaatcaaaccatcccataggccaaacaatatcacaaatccttggggattacccggctgaggtctggaacaatgccttctgtctgatctccaacattaaaagacccaagaactacgctgtgggagacatgtcttccatttcgagatggtccaccatttgtattatttcctgttgaattaaataacangttgaaataagatgatggttgtgttaacagctc

SEQ ID NO: 65029 - DNA, 542 bp, Arabidopsis thaliana landsberg
  unsure (1)..(542): unsure at all n locations
ccagtggatgtcctgcatgcagcccttcgacggatcggttctttgtgatgccaaggcgctgcttcatgccggcattccacgnnnnnnnnnnnnnnnnnnnnnnnnnnnnnnnnnnnnnnnnnnnnnnnnnnnnnnnnnggcgaaggataacatgcaaaggataggtcagctcatccgcctgtacgcggataaagctcggttgcgaccgccagagcgtgtctttcagattttgtgcggataaggccgggtcgttcgggcgggcgaaggttttttgcaattcaccggacaaataatcaaggaacgggccgctcatgcaggcctgaannnnnnnnnnnnnnnnnnnnnnnnnnnnnnnnnnnnnnnnnnnnnnnnnnnnnnnnngctgataccgccaggccacgggaagattctggccgtacatcgcgtgaccggcttcgtgcacggtcgaataaatggaatcaaagaactcggtatcngtgcagcgcgtggtgatgcgattgtcattaggactgcccgaggacgaccgatggccgttgatcgca

SEQ ID NO: 65030 - DNA, 522 bp, Arabidopsis thaliana landsberg
ttgccgcgatcatgggcggcgcgattgaagaggtggtcgaagccacaggcaatccgttcttctttttcgtcacgcacgtgccgccatagctgccgggaggcacatcgttatggtcaatgacgaggccgatgttctggcagggccgctgctcgccgaggaggcgctcaaggcaggcgtggcgtattcgctcgcctacggcgaccagccggcgctaaccgacaagatggtggactgggcgcgcgccaccggctttcgtgtactcttggccgtcaaaggcacaaatgatctgccgatctatcacgatgtgacgccgaaggatgtgtggggacactacaggctgacggccgatgaagcgcagtccgccctcatgaatacgcagatgttcaactcatttctggatgggacaaaatcctcgatcgagatggcggcgatcgacaacgccaccggactcgacgcacccgcagatggtctgttgtttacaccgtgccgcgactaatacctgccggatatgatgcattcgcc

SEQ ID NO: 65031 - DNA, 708 bp, Arabidopsis thaliana landsberg
  unsure (1)..(708): unsure at all n locations
tcaaccgtcgtntgtgccgacgaagaccaccgacggttctcgtttggaccactaggttggtgagcctcttttttacttccttatttttggtatgtttcttttgtatgtctatctttctgaacatacttaaaacgttcaaggatgtattattatagagtaaacgtgcaacttcattacgttattttctgtatatgtgagtttatgtatgtcaaaatgacatgatgagattttttgtaaacaacatcttaaaaacaggacatgtgatttttgtaatcgtaaaaactttgggatgcagtttattttctaatcaaaacaaggatatatctaagtaatcgaaatttttttcgaaaatagaactagatgacacttatagattatagatcacacctatttttgaagatgtatctaaaagtccattcaatttttctctgttcccctaataagaaatcatatgttcatattcaaaaaataagaaacacaaaaaaaaactttaagaaaaacacagatgatcaaccgtctggctagagtttggtaaaatattaatatcttatgatttcatattgttccataaataaataaaaaatcataacataagctcttcttgctgattgtctaaaattatgtatagatggaaaaagccaaatcacatgtgatggagccagatttgagtgagagtcatgtgtcaattgtcaaaaacatcgacattat

SEQ ID NO: 65032 - DNA, 132 bp, Arabidopsis thaliana landsberg
  unsure (1)..(132): unsure at all n locations
catgcaatcatagctcaattaaataaaatgactcattctttcaaatttcttntgactcactctttcatcttaaagtagagtttttcgtaggtatatcttattataaaatgatcttaagttnnataggagtag

SEQ ID NO: 65033 - DNA, 584 bp, Arabidopsis thaliana landsberg
tcaaatcctttcattagagtgcatttttccttaaaaaattatatatttatttacttgtataaaaaattgaagaaatataacaataaagtatattattaaccaaaaatgttatgaatttatttacttcagttggtattccaaaatgttatgaatttaactatttaacagatctcaactatctatatatacaacgttcatgattatatttgtttcaccacaatttatacattatatctataaaatttatttttatttaataaaagcacctaacttccaaaatctaggtatcatatgtaatatgttgtaaaatatacagagtccaaagtgtttctgtaaagctagtaaatatttttaacatattactaagctggaattccacttatatataagcataaatgacactatgtaatagataaataatgtattttacgtcgggcaaaatcaatgcatgaagtcgccttcaacaacagaatcattgcaatttgctgaaagaaaattgcatttttgaaaaaggaacaaaacggcacttaaggcaagataagggagccatgtatatgtacatgatatcctttataagtagtgat

SEQ ID NO: 65034 - DNA, 109 bp, Arabidopsis thaliana landsberg
tgacctttatttatggatatgaccgcagtaaccaggcaacatctctagtataacctacaatattgaaaaagattgatacataaaaacatgaaacgagagatgagaatat

SEQ ID NO: 65035 - DNA, 2170 bp, Arabidopsis thaliana landsberg
cgatatttggttaataaggatcaactcaatactagcccacgccattcatttgctcactactagtcaataattaatgagcacagacccacagttatttcagataagtcaaaatttcaaaaagaagcaaaacggcatttcgttagcaagccaccaattggttgactcgcaacaaaaaccagattttcagtagtaataaagaagatgagcatgcgtgagagaggtaaggagacttacttgttgatatcatctgaagaataaccagtaacaccaccaaagacgaccaatacatagttcacatcaagtgacctcatgatgtcatacgcctcatcttcataagaagacatggcacgtccaacggtagcaatgtgagtgttgttccaggtattgttatcgacgatgacagttctatttcccatggcagtgatttggtacccatagtcccaccacgacataatcttagcatcagtggcagtgttttgcctaagccagtagtatgcctcgcggtaatcatcaaagatgattctgttcccgtgggctcctcttgcagctaagacaattgagggagatgaatatgcctctgctgtcacccatgtgcagtgaatagcatatctactgagcaaataaaatacaccaacaagaagagcaatggcaccattcttctggaaaggctgagactgatcaagtgtaacctgctagggcatagaagacaaagattaaattttctccttctccagagaagcttgctacagttcaaagtaggtggcaagtaaacaaacgaatataaaaaaatggacactaaaagattcacctttgaagaagcttttgaactaccagctcctttcgtggaaccagtctgagaaaccttttgttttgtccttaacagagaagttaaattcttgatagtggcagagacagctatggcactgataagacaaactgctggagtagcgacgagaataagccgaaccataacaccagcaaagtacaagctagtgagaccatacatgacaataaatatcgtagcatccgtcaaacgcttgaaacagaagtaaagacccgcagggaaaagaaagagcagaatatggtagtcaaacatgaacgacgaccaggcagtaggctgatgctcagaaacagatgcaataataggaatatgatcctttgcgtaagtcgggtcaagcaacgagtaaaatcgaccagtccatggagatatatagccagacgctgttccaacacccacagcaacaccaccaacaagaatagccgatgtcacagttattctcaaaaacgtttggaacaacttggtgtcattgagctggtacttaacccagtccaagaagtaaaacacctgcattaataagaagacacccatggcacccatatgttcaccagattgaacatgttgaaaaccaacaaagcgaatttgcatcgcgagcaacatccccaagatatacatacagttataagcaatgtaaagcctcatcgaataccttccggtgatcaacaacaccaacacgtaaagaggaaccaagttgataataaacacatatcctccccaagctgaaaccatataaaagtaaccaaacgcagaggcaagagcccaagctaatgaaccagtgttcaccgctttaacaaagagataaaacgtcagcaacagagcgaaaatcgcaacagcttcgttatcatacgaaccagctacagaacgagaaatgtatccaggacaaatagcgataagaacagcagcaacaagaccagctcctgtatcccaaagctctttaccaaagaaatacgcaacgagagtcgtattcgacgcgaaaaacggtgcggttaacacacaaacctcacggatatgaacgaagaatcggagaaatcgcaatgtccagtagattaacgcagctgtgaccataagaccgggataaagagtaccgccgatgattcgacctagaggataccaactctcggaatcgaaccagttccaaaactcgtagaagcctttctctgtgaggaaaagagtcgtacggtagttgaaatacggatcgaattcgtggatcattgattcgtagcggagaacactgaagagacgagctatgaaagctaagatgtagacgagaccaaggatcgagatacggagtaagagctcttgttgattcgtcgccacttttgcggatttgaa

SEQ ID NO: 65036 - DNA, 1356 bp, Arabidopsis thaliana landsberg
tgaatatagcgtaacagaatgtatttttctttgtttaatatttgccaaacacacaccaaattaaatagaaaaatatatctaaagatttcatattcaggatttagtttcaaattcaggattccatattctgatttactgatggtaagctcaggtgtggcattgagaggtaattcgtaaaagattgtagtgagaaccatgatgttctgtgaatggctgaatgcaacaacttaactgtatttggtgacaggctcggctcatatacatattgggccttgtgaaaattaattttattaaacccaatttatttaacatcatacaatttgggctctttagtctttacatataaaacattgagccccaaggcccaaactataaaagagtttccttaaaaaccaccgagtcaagttacaaaatgtctggatatggttttttcattatgaagtaacaagagttggtaaggcaatcctacacaatccataacactaggcctgttaaaattcggtttggaatggaattaattctcgacttacattaacactttgaataatcagtttgtacagagaattttaaccagccttcatttgctagttgcatatcatatagcataccactttaaagagaagactttattttcactacttgtatatgatcatcatctttcagtattaaatattagcatactaggttggcgcaagaacacaatatattataggtttagttatattacaaagtacagcggtaattaaagcccaactacttattcctttggtccttatttatgcattaattaattaagctgctactatagtatttttctttttccttcttttagtcttatcatcttacgcatgtgtgattatgttaaggtagtaataataacaagaaaacttcttttagcggtgttggctcctctctctacgaccaggagatccttcaccatttccacttcctgagccaccgccttcaccagcgtgtccggtcccacttccatggccagaaccaccgtctgtggctcctcctcctcccgagccagacccaaatccagttcctgaacctgaccccgaaccaaacccgaatccagccccttttcctcctccatctggtgacgaacccgaaccagaaccatagccataaccacctcccggggctgaaccccatccccaactatatccccaattaggtccatgagctgaaccacttgaaccactggatccttcggttgggctagtcggggtagcggctgcattagaaggtgtccagactctcctctccatggactaacgagaaggctaagaggagagacattattgccatcaatgtgaaaaactcacccttcattcttcctatgaaatatct

SEQ ID NO: 65037 - DNA, 448 bp, Arabidopsis thaliana landsberg
tcttttttgacacgaattgcttttgaaatttatgactgtgaatctgatctctttggatattacagagtcagggtcgcaaatgcctggcccagttgcactaccagaggctcaagaaagcagcagttacaacacaaagagcatggagagcaaggttagcccgtagagaactgcggaagcttaagatggtgagccttctcttcactttgtgtgtatcctcgttctcgttttaagcatagtatactatatggcaattgcaacagttcagataatgttgggttttaaatgagcttatataatagaaatatatgtccttacataacgattggctgaggttttaaagttgagctggctcttttgatgcaattgctagaagctggaaattatctttgccgtttgagggtctacgaaatttaagcagaagatgttagcttttcccaaaatatgaata

SEQ ID NO: 65038 - DNA, 768 bp, Arabidopsis thaliana landsberg
cattgaagctgttgttacagttcagtcaggtttgcgcggtatggctgctcgtgtcgtactacgaaggaagaccaaggccacaactgtgattcaggtggagaaatcttattattattgggaaaattaatggaataaaaactgtctcttccttttacttttcatctttgagcttcgcagccttttctcactcgtcaaaatttcttctagactctgatttttaatttttcattgcatataccagagccattgccgtagactccgggccgagttgcactacaagaagctgaaaaaagcagcaattacaacacaaagtgcatggagagcaaggctagcccgtaaagaactgcgaaagcttaagacggtgtgcttttctacctctcacttctgtctgtgtctgtttatttttttatgttacagtctaagcatttcacatggaaactgtaacacctcagataatgtttggtcttttgatgccttcatatctcctgcaggatgcgagggacactgtagtccttcaagctgccaagagtatgcttgcggagaaagtggaagaactcacatggagactggacctagagaaacgcatgagggtcagataaaacacagctctctatctttttcagtttttcaccatcctcaaacgttttctttactcttgatcctggttcaacacatacttcacctgttttgtggcttttacattggaagtggacatggaagtcagtaaaagccccagaaaacgccaaaactacaatttagcatttggaa

SEQ ID NO: 65039 - DNA, 656 bp, Arabidopsis thaliana landsberg
aaaatcgaaatcggtgtgagtaaaatcgaaaacgaaagaatggctctcaaggaggagagaaacacttactactcgttgctcatgtatttagctgaagactgcgtttccgagatttgattttccaagatgagaacaactttccgggaaaaagctctttttctctataatataagaaacaaaaaaaaagagaggtttgggtttagggggcgtgtcaatcaatttacatgaacattgaaccccacgacttctactggatttttttgttcccagttttttcaatatttgtttaattccttgttgtttttcccgagacaataaagaagctttgaccttgtctcactgatttctttacgtgtgcgtgtcttcttatttgggctttttgataaatgggccgagctcaaaatcttgtctatctaacttaaccgtcgttaacgtcctggccctgttattaaaggtttggattttattactcatgtatatgtctcaatttttatttttatttttttagagaagataattttacataaatttgatttataatccgtgatcaagatgtgaggaattaaatataatgaagtatttaaagcggattaaaaaaggtatattgaaaaaaagaaaagaacaaacctttgaattgaaataatgcattggatttt

SEQ ID NO: 65040 - DNA, 649 bp, Arabidopsis thaliana landsberg
tttatgccaatcgcatcatgaacatctactccaggccatccaatccatttggtctcaaattctttcaaacctttaagagatcatgacgaaaattaaaacaggtttctttgtgtttaaagcaataattaattattaattacgatattaccaaagttggtacattctcttacctagaagagcactaactagaccaccaggactcattgtgaaagaccaagactcttctccagacctctttgcagtgaccggaagcgacatcgacactacaagcagtcgtggccttgccatttttctttctctctatcagtattccttctaaaaaagctatgagaagaatggtctcgactttcttctaatttataagaaacttaacgctcgacttttggcagggtgcgggataataattaagaatttagctagtctttccttttggtgaggtgaaaaactttctctagttagctttagattattttcacttttgctgatttttttcctagaatagtcctgaaaatatatacgtacatgcttctgtttttttctttctttatttctggcgggtatcagatcccattaatatattagataaagtgaggataaaatctcaaactcgttaaaacacttggctaaagacagagttttcaattcaata

SEQ ID NO: 65041 - DNA, 267 bp, Arabidopsis thaliana landsberg
tacatctctgaatcaagagctgcaagatatggaagttcgtgctcgcagaggacaaaagaaggctccagatgaagcaaaccaagtgatccaggtatgttatattaagttatcatgatttacatcgtggaagtcaccttcaacaatgagttcttagcacactttcaaattttttttttgaagctaatactatagatcatttgtccttaatgttcatatgcatatgctcaaagatctcttttgctaaatgtacatatatttaaaattgtt

SEQ ID NO: 65042 - DNA, 482 bp, Arabidopsis thaliana landsberg
atgcacacacatatatataatgtaggtccatattttttctaccccgaatattacaggagattaatttggtctcttatctactataatgttcgaacttgtgacttgaaaattctcattgtgactaactaatcagtatacaggctaaactatctgattagatataagaaattaaatcgatctgatatgtaaatgaacacataaattctgtggtctatttttaaaactcaattaaagagggtaacctcatgaacttttaaaaagtatgtcaaaaagttgactataatttgagaaacaagacatatggaaaggagaaccatttcattgatccatcaaagtttcttttttcatgtgttatcttcagcaaaaaaactgatttagggtgaactctgtggtactattaaataggtagatccgatcccactttgttgtataaataactaaaaataatatgtacttccaatgaaaaagatcattatcaaata

SEQ ID NO: 65043 - DNA, 917 bp, Arabidopsis thaliana landsberg
tgacgttgaagaagctaaacaaagtaactaaacctctctgagcctttccacaataattattttcattttcttaaaagttaggtgccagccaatctgtgccgttagattgatctttatatgcttctataaatatctaaaacaacaatccaacggtggaaagatcacattgcgtgtcagtactgtagatactcatcaccgaatctttctcctcttttcactctccagctggccgaacccaccggttttgcccactttctctctaggcccgcaaacacaacttgctaagtcggtagtaatttactgaaaaaccctcacaaatagctgacttggctcttttcactccacgtggctccatcttacgtgcctagtttggtaatttcaatttcaatcacctagatcgtaactattgatacataatgtgaactgatgacgtgttgagaagagattggttaggtcggtttgaaaagatatttagaagatctaaaatatctagctaactcgtccacgttggaattaaaatattgcgctttttcctggaaaagaaaaatataaaacaagtgataatcttctctttttcgaaattgtttcacttctgaaaaaaaaaaaaaaaaaatttgtttgctcatcatcttcacaaaccaaacttctcttcttctccgatctcagatttgaatttttatcgattttgagcttcgaagagctcaatctctaactgaaattcgagaaattagagagtttgaaatgggagaggaagtacaaatgagccattacgatgtttccggcgacggaaatagggtttctgaatgggagatggtattaccaagccacgaagatcgagcatctcattgttactctaaaaatccaccgaatttggcgatggcgtttagtatcacaccggagagaagccgtactattca

SEQ ID NO: 65044 - DNA, 602 bp, Arabidopsis thaliana landsberg
tcgccacgagtgcgaagtggtcaccgcgaaggacggcgttgactcactggataagctggcacgagcgcgtgcccgacctgatgtctgctggatataccagatgccacctatggcactgctacgagctggtcacccacatgaaggccgatccgcgcctgcgccaggtgccgatcatcatgatcacctcgcgtactggcgaaaagcattgccagcgcgccttcgacataggggccgaacgttatctaggcacgccgaaccaggaagcggaactgctcgcgcaaatcggcgaaatgatggaacaacgggccatggaggccggtcaatgaacgattgaacccgtactgccgtcggcctgttgttcgatgatgccgagctgtgcggtcaactacagtctgcgctgagcgaacgcgtggcgcgcatcgtgcacgaggggacgctggccgatctcgatcatgcgcgcctgctcgacgcaggcgccagcgaggtggtggtcaacctcgatgacgaggccgatgacgaggcgctcgaccggctctaccgcatgctcgatggtcaccggccgcgggtgggtttcaacgatgcccatgccagccggagtcttg

SEQ ID NO: 65045 - DNA, 269 bp, Arabidopsis thaliana landsberg
tattcaaaaccggtatcagtgggttgatctatcttttgtaaacaggttgacatttattcgttatctagaaaatggaaagaattggttgataaggctcgagccaagcagcatgcagcctcaggagtacaacactggtaattctactactagaatattgaagtgatttgagtttgagtaatccttagactagattgctagagtcttgatgttattatataccttgcgggtaattgcaggtacctgcactctatgtaacctaagaatgtttg

SEQ ID NO: 65046 - DNA, 2005 bp, Arabidopsis thaliana landsberg
agaggattttaacggtggaagatgaagaagcttatctttttgcaaaatcgtttcttccttcattcatcatagcttcaaaatcttaaaaacaacaacaaaaatgaaaagtctccactttttagctcccaattcaacgattatcaatctgaagcaacaatcttatacaaaaaccaagttccagttgcatcgtagcaacagaagaactctatcgataaactgcgtaaacagtggcggtgatgaagagaagattactcagccgttggatggagtggagataagattcaaaagaggatccagaaggaaaatgagggaagagggttcaggagaaggaggaggacaaagcgggaagaaaaaagagactgttcaaaagccatgggaagagatgacattgaatgagaaggcattggagctttatgttggagagaaaggtttgttgttttggctaaacaaattggcttacgcgtcgatatacattgtcattggaggttggattcttttccggtttgttggaccggcgtttaatctttatcaactcgatacaccgcctcttgatcctaagaacatcttaaagggttaagaaatgctttgtagctgtgtctgcattctctgttccaaaacattttgaggcttatatattcaagttagtttcgagtaatgtgtagccatgtctcactagattaagatacacaagagaacaacactcttcatgaattttcaagattgttctgttggagttatgtcctgatcaaggatatctcgtgtagtcttgcacctgacatggaaaagaaaatatttttttcttcggctttttgtttaccttaactcaatgcaaagaatcagaattattaactgaaaaaactagattaaaactcacctattgcactctgctcgtgatgcataattgtgattcttgcaatttgtacacatccagtcgccatcacgccattgtttcactctaagaaatcagacaacacaaagaattgggaaggttgcaaaagatcacgccattgttctagcgtttagaaaacaagaaaacaatggagaccagagatcaatacagtaccccattccaagtaaagcaggtgttgagtgttgttgtagaaacgggagaggaagttgccaatttgagacccttcctaggctcataccaggaaaagatgcatatatcgctgactgtgtttgcatgcttgtctgcacaacgagccagaagaaacagaggttggttaagcagcaagtaaaattgatgaatgtactaatcaatttatgcgctctaactaatccttacatatccttgattcagtcttttgctatcccattcatgagccaaagcttctgatgctaatctctttgtaccaagggctgcaacccaaaataaactttcccatattaaaactcgtgaaaggattatcagacaccttcgggttatataagattgcacgtgcatcggtcttagacaaaaaccttacctagtggagctatttcattgcactttttgcactgcagagacatacaaaacagaaatgagtaaaacaacaagccggaatctgcaagtcggttttgcattgtgaacccatttcctcacctgtatacgagaggaataattgtgaaaaccacatctgcaaatccagtcaccactcctccattctttatgaaccgaagcttgatttgtagcgttagagaatgcgagtaaagaaccaggttgatcatgtgactcaggtccacgggtgaagtaatggagatgagtttgaagagaagctccagggatagcaagtgctgacaatgctgctacttccttagattgcccacatttcttgcacttttctcgtgatgcataattgttgttagtacaacctattgccacaccacaccacaccacacacccaaacgcaaaacgtagaacgaagaagatacacacgcacgcacaccacaacacacccaccagcaaattccatataccacataacacagaatacacaaaacagctcaacctagtataagtaatccc

SEQ ID NO: 65047 - DNA, 2156 bp, Arabidopsis thaliana landsberg
ggcctctgtctctgccttttcgagttattttaaaggactcgttccttatcctgagttgagagagaaagtgaaagatgatttcttggagcttttccctggaatgattgtgtatgatcctcctgaggatttgtgcgatgatagtgatgaagaagcaagaacagatagcgatcttgaatagagaggtatgtcttgaatcagtgcttggtttggactgttttagtgcttaaaatgtcagtgatgatattatcctcttgaggctgacccgatgtatctttgatccatagtttctcttgttctgcgcagttccagaacaattccactaacttcaggaaccatgtcccagtttcaggttagatcaagtgggaaaacaaatggaagattgtggctatgcagaaactggaacgatacgtctttgcatggaacaaattatggctattgaaaactgaagatgatgaggagcatatgaagaaggatttgagaagcttataagcgtatatatgtgtaaagatctctctcagcaatgctaaatgtcgtattgaatcagttcaagataattcatatgtttgtgaagatacatactgcagaaagcgttttgagggacaaaacaattagaactggattaagtttgggtcgatcttgtctttttgggacagtgatgggtccatttgggccagactaggtcttttggagtaatagcattatctcatttttttccatcccaaaagtcgacgatgatacttgaaaaattagcaaggatgatatatatacaaaccaaaaaaaaggttcaaattgtatttttaacagaaaaagaaaatacaaggatggaatgaactatagactatattagttgattatcactccaatatcatgataacttttatgagaataagaacataaatgtgttgtgaaaaatatttatttattctcacaaaagtaaaattgtgatgtacaatcacttatatttaagatttagaagtaaatctaagcttcataagtgaaaacaataaaatcagttctacgtggtacgtattttctccacagttataccaattgatgcccttttaacatatagttatatagaaaatagttggtgtaccaaaatttcacatagttctactaatataacttgagttgtcgtcaaaattagcaataataatagagaataaaatcataagaacattaatggttttgataatatttaataaaactcttgtttagacacaaaatacctacaatttaacttgaagttttaacaccctacctttcaaattcaacaccgccattaatttaacctgaaattttaacacctaacaaacatccacagtcttcatgttttcttatacaccttcacacgtatacactttcacactccattacctgattcagcaatcactcgatcaaagtattttagaaagcaatcaaaagaagaaacattatatcatacatatataataaacacaatttacatggaaaaatgccttctatgaatgagatttcaaaattgtccacaaatcctaagagttaataatgataaaaaggtaaaatttctaaactagtatatttaaaattatatacgatattggcttaaatgtgttttgaatgttcaaaagtcttagatattaaaaattatcaaacagaaatatgcaaaggtaatgtaaaaatgtaattgattaaaaatatattgttaatattggctcatctttttttaccttgatttcctcaacaattagatgattattaaagtaattttttaccaacttataatataacgaaaaattagattaacctaataaaacgataattagatatatgttttaatatatgtttatatcctacaaccatcaaatttttgaatctatgaacaaggcttctcgaaaactggcgtagtggctcacactggtgtagctgttctaaaagacccttggctccggttcgaagttatcacagtccctatatcctcactgattctcacaaaaaaatctcaatatacttactttttgccaacacttgaagccgaattaactcaaaaaggttatcaaatccactagttaaattaaatttaaaaagaatagatcaaaaaagctttactatcattataataggaataggaatttcacataacaatagaccaacacaaaacgatacacaccacaaca

SEQ ID NO: 65048 - DNA, 598 bp, Arabidopsis thaliana landsberg
gttcgacggtcgtatcccaaaacgtcttgcccttcggaccaccgtgcgtcttgtgctcccagttcgggtgatcggcgttccagccgccggacaccgcagccagggtcggtccgcgaccgatgatcttgtagttgccccaggtatagagcggatcgcccgctgtccaggcatccgagaggtacaaggtcgaccccgggatcaatggctcgaatcgctgatcggtcggaaactggcgaacacgtttgaacgccggcacgtaaccgtacaagtccgggaaactgtgctgatcgtagggccagacattgagaaacgacgtgcctttggcgctgtccggcgtggcgaagaaaatggactggaaacgcagcttgtcctgatgcttcggccagtacggcatcggctccatcaccacgcgtgcgaccggcgacatttccgcccagccggcttcgtagttgtagcgcacatcggcttcgacaccgaggtcgtattccttgagcgcgtagaacgcggcatcgggccggccccagctgagcgtgatgctggcaaagatctcgacgccggtcttcgcgtcgggaaacggattgccaccgatccacgggtt

SEQ ID NO: 65049 - DNA, 465 bp, Arabidopsis thaliana landsberg
ctgcgccgtagatcggcgccgaccgtcgcctcggcgtcgcccttgttgaacagcgctttacctgtttttggcgcccggggtttccgccgtccacacggcctgccggtcgtcgtagaccaccggccggttgcccatgctgcgctggttcacggccagcacctcgtcgttggtcagcagggccgtcgtcgccgggtccagctttcttaggtcgccgcccatgatcagcggcgagcgggcgatcgaccacaaagtcatcatcgtgcgctgctcgtcgggcgtgaagcgcgtggttcgcttgcccaggtccaggacgcctataggcagcatgtcggcgtcgggccagcagccggggatgcggtaggggttccagcgcttcagccggccgaactgctccagcagcagcggccactggtcccagaagtcgtcgctgatccgccagaggttggcgttcctttgcacatgggc

SEQ ID NO: 65050 - DNA, 395 bp, Arabidopsis thaliana landsberg
acgaaaagataacatattgagaaaagatatattattgcaacgaaaaaagaagcctcctcctttgtcataaagtggttaatcaattttaacttattgccataattaaaaaacattttatattttacaaagttttagaaaaagtaggacacttcctaaaataaaattcactcatggtacttaatttaagctttattatctgacttataacataaggattgaaagttcttgtacattaaactacgttactgagcgtataagagattacgagtgcttactctaacttattaaaaatttgacgtgaaccgttctaaaacattataaattaatatagattgaactatcgaaataccaaaacattatcttaataatcaatgggaatcaagaaaattgatatt

SEQ ID NO: 65051 - DNA, 624 bp, Arabidopsis thaliana landsberg
ataacataaatagtttggaaccaaataaacgttgaacgaggcttttctcacaccatatatcttttcaaaacatactaacaagtcaaaaattgatatccatgtaacttgaaaatcatgcacagacaatgctacctttgaatggtcattaaaaaaagaagctaaacacacttcagatccaaccatatatgtgatcaaagccagtgataaaagtcgagtcattcttggcagctaacgactgaggtaagcaaataatcatagatgaagttctgtaatgtttcacatctccctacaaattagaaacacgacatagatacataccaggcaaaactgggatctgtaaaaaaaactatcttcgaggagatatcaaccaaacagaacgtcatcgatcatgaatgaaagtgttgaaaacaaatgctagtgtatcttaagcacaaagtgagtcaacatagaagtaaacttgatctttagacaaactagaaaatgctggaaccagaagctatcactacaaaaggtctgaccttttctgtttcagaagcaacaaatcacattccaatgagaaatagcttagcaaaccacaaagaagacaagatttcttcactgaaccattaatgggtctcaacaaaa

SEQ ID NO: 65052 - DNA, 445 bp, Arabidopsis thaliana landsberg
  unsure (1)..(445): unsure at all n locations
ccatcgcagacaacctgcagtcctgtatgaggccacggaagagacttgatgtattttttttcttagaccaggaacatattaggtagggatattaaaacagaccacactatgtgggagaggtggaaccgctatataacgattatggnnnnnnnnnnnnnnnnnnnnnnnctgaccattatccggatcactacaaagcgcatggagcggaactagtacattatagggacggagactgtcctcggaggagctatctctataaaacacgatatatataatcctctctttcacttcaaatgagaccgccgaccatcggtgatcaatggcgctgtacacccacatgatgatggagactgcattttaggagattctatataacccattatattgaaagattgtgcatagatcctctaactaagcaggttcaggttacatacaccaagtaccg

SEQ ID NO: 65053 - DNA, 438 bp, Arabidopsis thaliana landsberg
  unsure (1)..(438): unsure at all n locations
acagaagacggcacggtacagtttaaagccgccacgccacaacataanncagacaagnacagaacacaaagaanncagacacaaagnataacgaacaagcngccaagcacacgagaacaagagagcaaagacnagagacacaacacaaacannncagacaaggacacaacagaanncagacaaggnnacaaggacacaacanaacagaannaagcngccaaggacacaacanaanncagacaaggacacaacagaanncagacaaggacacaacacaacaagcngccaaggacacaacanaanncagacaaggacacaacagaanncagacaaggacacaacacaacagggggccaaggacacaacnaaanncagacaaggccacaacaaaanncagacaaggacacaacacaacaggcngcaaagaaaagcacaaag

SEQ ID NO: 65054 - DNA, 610 bp, Arabidopsis thaliana landsberg
  unsure (1)..(610): unsure at all n locations
aaccctgacacctgatcactcttgaccgttgatcgaatctgacttatattcgcctggttctgcttccatctctctaattgagcaatgttcggcagcctcaacgctagattcctccctcgttcctctgtagacactcgtgctgttttgatatgtgatgatgacgtcgagattgaccagagatcgttggagtttgcgttttcagtgtggaagtcgaatcctgatcgccttgtaggaacgtttgtgaggtcacacggtttcgatttgcaggggaaagagtggatatacactgttcatccagataaatactcgattgtgttgaccaagttcatgatgatgaaacaggattatctgtttgagtatagctgcaagggaggtgtggagatggaggagtgaagattattntgtggaccaaatgcgttactgcgaggatatactgatgaattttgtagctgcagataggttaagggcagggccaatcatggttggagctgacagagttagggattgtggagatgcgcgttacgaagaagtagaagagagagttagagacgggggaatgagcactataagagtggacatacgaagagaagagggattggcttagggagtt

SEQ ID NO: 65055 - DNA, 626 bp, Arabidopsis thaliana landsberg
aaactcgaattgaaatatagtagttttaaattttcgtaatcagctgttaagcctgtaatttgacaagagaattctcatagtatacagcaaaaaaaaaagacaaaatctctcaagtcccaaatgagcaaaaatacaaatagtgtcagacaaacgttttaaaaacgttgagaattttcttaaattatttttggaagtatacaagaatataattttttcaaaatgattttgaattttggaaattttgtttagttacgtcaaaataattttgaaattattattttttttgtcggcaactgtgattttgaaattattttcttaccaacataattattttcttataagaatgaaggaattgaataaaacaaaaatacggcgaataatattacatgttgattgctaacagagaagcgtaaatcgcacggcccagaggcacctcagataaacggacgaatcagaaaagaggaagccaatatatacggaagcagagaatcattacctttcatcgcaatatgactcactatcctgcgctgttactgctactgtacgccaaaacaaatgtggtccctacctttgacttggtttaaaaaagtcaaaattaaagcagcttttgtgggataagattgttg

SEQ ID NO: 65056 - DNA, 623 bp, Arabidopsis thaliana landsberg
gtttcatgtagtgggttttcacctattttgccatttactgttgttgtatgttatgagtcttatgacaaaaaaaagaattattaaataaaattagttttatatataacaaagttatttgtcactctcaaatctaagggtccaatatgtttgggaatcaataacagtcttaaattgcctcatagtggtgaacaaagtaaggtgttggccaaaagcaatcaccttattacagttttatatcctttcacttttgacatatattaaagaagtggacaaacaaacaaagttaaaaaacactattaaaacactaaaattaacaacaaaaaatgttaaagttgtagataaaagaaccaaagacatcatcaccatgtgactcatgttattttccaacacctaagtttgatttgttttatatataacaattaaataatttatcaaaagtttgtcttcttcactgtcaattttcacaatcatcatctcatcaaaactcatacactatatatgacatattaatccgaaaaggaaaaggtagtttataaactagcccaaagaacgtggaattacgtggtggacttgcgtttaaattaatggatgcttcttttaacaaaattatggccatctttaaa

SEQ ID NO: 65057 - DNA, 1771 bp, Arabidopsis thaliana landsberg
ttcatttagaatctagagattccatatttaaaaagcaaatacaagatatatggtatagagatttttttttattgtatgttactatgtttctggcacaaaatcgcgcattaatctagcatgtacatatttgtttgtacttcttcactatacatacatgaatggacctgactttaagtgaattagatatgtcatgtgtataaacatacattcatgcatgttaaaatagtaatatatctaaatgaaattcatgaaaataaaatatatagtatttaactatatgactcaaagtatatatgtttattttttattaactttttcagtctaaaactaaaaaaaaaaaaaaaaacctaacattttgaaaaacaaacatagctaaacacaaatacggctgtagtgtttgtgtgatgatgacatagtgtaaataatttctagatgagtttcgtcgtttgctcaaaaaacaaaaaaaaagatgagtttcgttaaggatttgtagatatgtctaattatgatgataaaatatacgttaccatatattttaacgtatgtctaacatgtgtatgtgtgtacacataaattgcttgcttacgtacatgaatgtgctttatttcctttttgatatttgcgtctatgttcaaacacactgcattaaaaatggtgaaaaaaagaaaaaaaggttattgaaaaatcgaattaattactagaaaaaatcttattttagattccggatatttcttaacataaattagttagtagtattacgacatatatcgaaactagagacctttttttggattccggatattttttcattcattcttgaaaagaaccaacagtatgaattatgaaacactaatgctttaaaaaaacattaaacagttgaagtaacataagaaacgtaaagtagatttgaaccctctgaaaggtctagagtctcatgtcttcacagaaccaacagcaaactaagcagcctgtgtattcgatttggctttcaaacctcaaacatgaattttagtacactacatcacagagaccgccacaaaatttgtcatggaccagggtaagagataggtcttaaagcaaaactgcttctctctattcctctgctcgacgatagggcatgaacctatgatcctttgttgcattcttcttcctccgtttgtcaagatacgatgtaagcttcccagattcctggattgttcaaaaagaactgattcagtgattctgttttcatacaaacattttacatattggtagtcaaaactgatttatataccttgagactgttgtacttttcgatgagtgtttgctttcggatttccgctgcataagaaaagagaaaaggattcagtaaattgtagaaaaagagaaacgcaaaactgtaatgttcaacctaaacgtgggacttttgagtaaaagactcaggagacatacattttttgagatagtaaggcctttttccttcttttgcggcttctcgttctttctttttgtgttctgttagtattgctgctcctttgttctgtgttgatggctcatacttcaacattttctcctgatatatatacaaataacagatttaaaggtgagtaaacaaactaatgatcagagagttacaacaggagaggtaaagaaaggatcactcacaacgtaagttaactggttcttcaattcgtcgatttcttctggattctttgttttctttaacttctttttcaattcctgttttaggaaccccagaacatcaaacaaaaagcttcgtgacaattcggaa

SEQ ID NO: 65058 - DNA, 1452 bp, Arabidopsis thaliana landsberg
ataaagcatattgttgttgtacaattagatcataaaaacaaaaattgcaggtctacgttgaagcatctcggagaacaagtgatactcaactttgagacatcaaaatccgaagtaaaaaactgaacataatacaaactatattcgataaaaaaaaggataactcatgatctttactctttttttctttattccctcactgctttaaaatttccactaatactcttttgtttctttgattattattatcctagttatgaaaaagaagaaaacagaatgcatatacatacaaatatgaaagaatatttgattaaaatgatgcaaagagccccataaagacaaaacaaaacaaactagtttttgttgtggaagaagaactttttttactatgaacctctttatcatcatcagcactttcaatatctttaggatgatcgaaattggccgggacgatggtatcaggagcaacttcatcatcaccggactgagaggattcgctaggtccaggtgcagcagcatcatctggtgatgatgaatctggtaagccctgaccatgtgttacattgatcataaaatgctgaccgaatttacattgttcgccatcatagtttcccgagaagaaataattggaaccttctttaacaagaggaacacttattgagacgggaacaggagatgttgctgaaggatttgcagccgaccactctgttgtatcattgttttcattgttgtcgtaatcacaatctttgtatgttttgaaatcatatgtctgaaccaccgaatggttgctatctgtgttgaatactacatattgaaaacaaaacaaacgatataacattttgctaagttattgtagtaacgaaaatggggttgaagaaaaaaatcttactgaggaaatcacccaaagaaaaggatttggaatcggcccatttctgataattagcagagggtctctcttgaatatcgaaccatcccgtggactctcccacagtgtagttcttgtacgcatcagctgataaactcagaagcataaggcacatgatgagtaacacattgacacaagatgaacaagaaggcgacataactcttcttactctcttgtccgtttttcttgattataaattgtgattcgttgattgatctttctttgtaataaagaaaggcataagaaactgtacataaagtaataatgagctcgtcattgactgcatataaaaccaagacatgtgtgagtgtgacatgtggacaattcttggggatgcgaaggaacatgagacgatacgaagtggtcggtccaatcaaatgacaacgcctctttgctcttccccatgtgatctctcactctcacaccttacttttgctgtcttcgcttccctacgtatcattacttctttcataaatatctgtcaactgcctttttctactaaatggaggatattttagataacgtgtttt

SEQ ID NO: 65059 - DNA, 478 bp, Arabidopsis thaliana landsberg
  unsure (1)..(478): unsure at all n locations
gcgcagtacactacggtatgcaccgcccgcggcttcgctgaccgagcggctcggcgaagacctgcgggcggttttggaccgactgttcttcgccaactccggctncgaggcgatcgaggcggccctccggctggcgcggcaggcaaccggtcgacccaacgtcatcgtcttccacggaggttttcacggccgcaccgtcgcaaccgcttcgatgacaacctcgaacacccgctacagcgcagggttttcgccgatgatgcccggcgtccaggtcgcaccgttcccgaatccgacgcactacggctggaccgtggagcaggccacggagtttgccctcaaggagctcgacttcgcattgcagacgctcgccgcgccgaacgacaccgctgcgttcctggtcgaaccggtcctcggagagggcggctacgtccccggcaacacgggagtttttcgccggcttgcgaaagcgcgcggaccg

SEQ ID NO: 65060 - DNA, 474 bp, Arabidopsis thaliana landsberg
  unsure (1)..(474): unsure at all n locations
attctaaaagttcatgagactcnggtgaaattttgaaatatgaagttatatttcacacatcataaacttgaaattttataaattctataaattaacgatttttaaaatattgtgcaaaattttataattttggtaacccaggcaaagattggtccaaaataagcatttttctttgacttttgaaatatgggatctacaaagacacaacaaagaatctgcaaatatggagacaaaccaaaaatccaaatttgccagattctgccaagtcaacaacaaaattatagaatattgtcggttttagaaaattataaaggatagattacaagggaagggaaggaaaaaagtcttaagattatttctttaatagacaaagactattaaggaagataatagacaagtggactcttggacaattaaggaagaaaatcttaaatctgatatgaaatatctattccagttttttttttttttttt

SEQ ID NO: 65061 - DNA, 1937 bp, Arabidopsis thaliana landsberg
taaattgtgttgagccaaactatgaagacgccaaattttaaacaaaacagtgagatctcatcatatatactatattcaagattgatcaattcaaaattcatgagatctgagctattaaatgttatggaacttatggtcaaaacaaaatactactatacatagaataattaaaatagttttgatttgaagtataagaaaattactaacatacataaaataagattttgatcagtattatggtgatattttagtgtacttttaaccataatatattaagttaacttccaaaattaatttagtttatattctagactttagttgaattcctgactttgtagttttaatgaaaatattgctctatctattcgacatctatatttttgcacttctttaccattcatatttgtttgatcaaatcttatagattcttataaatttacccattaggagaatcaaagaagtctcaaactttcacataacaaactttattggtttctaaaataaaagatagtacaaaaacacttctgtatatttatgtatttattataatcttcaaatatttgctagcacaaaaacacttttgtataatgctccaaaatgttaaatctacactgtggtccataaaacacataaatacactaatttttctcgaagtaaaacaaaatctatgtaccaaaataatggtatacaatggaccacaaagcacactcaacaaggaaaagaatccggttcgattcggtttacttaaaccgctcggatttcaatacggatcaacccaacatgtatcatccctcacagctttcttccaacgttccttgaatctcttcatctccacaaatgatttcatcctcacttctggtctattatccacttcacgagactctaatgattcctgtgaaatctcaaccaaattatttcatacaaaatcataacacataactgcttcaagaaacatatagaaaacactagtagcacataccgttgatttcgagtctgtctcattccgcaaagcgcttgaagcggtttcaaccacaccgagcgttggaagaccataatgaattatgtactccgcatcaacaacaccgacatttttctttcggtcaccctatccgcaaccaagaacatgttagtaaaaaccgtacaatgaaggaagtaagggcttatcaaaacaagttagaagaagaaaccaacttgagcacaataaccaagctgcgtatccagaccccaagcatggatcaaatcattctgcaacgcaaacgaaagcattaaacccaatcctctcgactcggggaacaaaaaacgaatgctacacaaatgttacctgaatcatataccaagaacatctccatgcagctctagagaaaacaggtgccatcatttccacccacctacagatccaagttacatgttaactggagaatgaggtagaaagagagtttcaagaacatttcacggaatatgcgaaaagcgtttacccgatgcaaggaggattggtgctatggtcatcacatcgcccgctacctttgtatttatacattcttctatgaacttttgattttttttgacgagcggttataggatgatgcacttctgattttgaagtgtcaagagcaggttgcgatatctcaagcccctcttctttgacaatagatagatatctaaagtaaaacgattggaatgagaaatgaaaaaagataaaaaagaacacacattctatatttagtgcgttaccgttgaggattgaaatgaccaacaccaagatcttcgttccaaagaaatatatactcgtactctgcaactatatcgggatgcaagaatcgcttggcgaaccaccttgtgacattaacaacatttaagtattagagagtatatgatggttgacgaaaacataacaagatgttcatgaaacggaccatttttttgatcatcacgaaaca

SEQ ID NO: 65062 - DNA, 118 bp, Arabidopsis thaliana landsberg
  unsure (1)..(118): unsure at all n locations
aagaaagaggagaaacacccaacnaaaacaaaaacaaaaaagagaaagacaaaagaaacagaccccccccccaancaccaagccacaaaaagaagaccccgacaaagacacaaaaacc

SEQ ID NO: 65063 - DNA, 565 bp, Arabidopsis thaliana landsberg
  unsure (1)..(565): unsure at all n locations
tcttttttcaatatgatttttttattgttttttcacttaattatttaatagttttttaaaaaaagttaaatacaataacttaactatcttaataatttaaataaaataataatacaccctaatcaacgactcataaatcctaaccgtcaaatatttatcccatcattcaaataaaacatcaaaaatagaaaaagataaactcttaactgtaatttaaaaacgcaaacacaatgttctaacacattataaaaaacacgaaatttaaaccctagtgaatccacatttacttttacagtgtatcattcatacataatatctaaaccctaagttgtaaaaacggaacccaaacacaattcattaactactttacgagtttgtaatattctaaatgagaagaagctaaatcctaataaaaaaaattggtgaactcaaacacaacacattaatcatcttgcaggatggccaatattataaatatgaaaaaaattaaaccctgccaaaaattggtgaacctaaactgatttagttacagcacatagctagtngaaataaaaaccaggaaatt

SEQ ID NO: 65064 - DNA, 1642 bp, Arabidopsis thaliana landsberg
gtagtcccctgatgtctcttttgctatagcttgatcgagactcacattgttcctcttaaagtacagcccagttatattcgtcaggtccttttctgctcgtgtgacaatcacacggttcagagcatcttcatcagtccccaccgtgttgattgaattgcgcaaaacctacgtgcattagggattaaccatatgaataccagttagttttattgggataatttagagaacacatctaaacaatattgttgcatcctacctttgcataataccgggtagggtttttgatgcacctgatggctgcacgtagtgcactcaggtactcatttgtagggtgattgaggagatcctggtcatcaaatgtttcattaaggacagcaaaaagaacattgtcatgaagaaaaactggtatgactgctttattgttgtctagaaatttccaattgattgctttgtcacagatcagttataacataacttgatgttcatttttttgtttgtataccttagtgatcgatgtgctatatatatccttgtagcggttgaagattgcgctaagctgcatgctgctccttgtacttaacaccctgatcgtttcttcgtgatcaacagccttaccaaggatttcatcatgaagaatcgcagcctctgattgcgccagcatctcatcaatttcttctccatcatatttataagcagacaccattgcaaccaagagctgtatatatcaagaaacgcccaagcgttgaagatcagtcaaaacaagaagaaactatctggaaatttaaaattacttactctcctgatgtcgccaatagtacgggaggccaagtcttcctcaagagaatgcttgtagaggcaacggtaagcacgtctagcagctaacatatcttcaggggatctcatgcaggcaatttcgacaagaaccttgtagtcaggaataggcttttgaagagccaagttagccaagagagcatctctctctggaggatccaagacccacaagcaaatagctctctgcaggtaacaaatatatttatcttttgtggattattgaaatagagtagagtagagcacatggaggagatatataaaatctaaacctcaaaattgccagagagctcagatttgagctggtgaatgagatcctcatggtaaatctcctggtaagcttgtcttatgagcttcctctggaacaaattccggtgtcctaagatcgagatgatggcattttcattggttccccatcctaaaacgccaaatagaaataaagaagaggagtaaaggagatagcaagaaacttgatgaaccacataagttttgaaacactaatgcaaagaaaagtagaaccttgacaagccgccttgatgttttcagcgtcttcgacaggggagaaatgtggaggagaaacaatggtggccattttgttttttctgtttctgcgtaagatatctttgactcagattaatcacttgttggatattgcttccattgctttgagcactcttaatttataagagttggtaatgatgttacaatgctttgaagagaccagaaaatgtttcaaacggctcattgattgtttttgctctatgttaatctgaaactctctctgttaacgccacccctttatgtatatgacttt

SEQ ID NO: 65065 - DNA, 568 bp, Arabidopsis thaliana landsberg
gagtgttgctacttcctcgcccgacatctgcccctgcacgatctcggcggcttcggccagagtgagaggatcgaatgtcttagtcttcagattgccggttagccgggagatgtcttcgtgcagtccctcgatttcggcatccagatcaagggcaagatcgtccggcagatcgtgcgagagcaacagggccttattcaattctccctgaaaatacgccctgactgccgcgtcaagctgcgggacagatggtttcgacaaaagggcagacctcccgaagaacagatcgaaggcattgctcatgtggcggcagcgaacagttgccacggcgcggtcggttgtttttaacgtcagcttgatttcagtgcagttaattgcacgacgccactctgtaggcacggctgcccggaagtaaaacacgtctccccgacgaagcagcctctgcatcttggcttgcgacaaggccgtctccgatggccagagttttgtaccacatcggagatttgagaattttgcttggaattttatttaatggttgccggtagttaccgcaaaactggcggagagaaag

SEQ ID NO: 65066 - DNA, 1016 bp, Arabidopsis thaliana landsberg
caataagtaaatcatatattatacattttaattttctcctttctaagttcttaaaaaagtatgacatcccctactttgcctacttccttaatttcacaaaaataaaagtatgacatacttaattagaacatatcttttgtttagtattttactagtaattttaatagtacgtacgctatatagaacgaactaatcacccctgaactgaattccaaactaaatcaattggttgcatgtgtgtacgtacagaaactcatataattctcaagttcaattctgtgataatcatgtgacttattagcttcagttgttatattctgtatcctaatttatttattttttttaacatttatttgggttatatatagaaaaagagatgtactatttgcatgtatatagagagaggcgcatgtgtagataattatagataatatgaaatcgtaagagtagtggagatggagacaaacccgtgattgtcgttggtgacagaaacaagtagtaatattttcttctcgtgtctttcagtgaagacagcccagccaagcaccttttaacttctgtctgattcctctctctatgctctttctctgtctatctatctaattatgcttttgggtttcttctttttctggtttcacagctttggctttgaagtcacgagcccatccccctaaccatccccttttatgctttgcttttctagtcaatttaattcatgagttgtaacgatggaagaagtttcatttatctaattaatgtctatgcctcattaatgttgccttcttcctatattgctaaaagctagttcgaatgaaacagaaacacgtaccaaatccaatgaaaaacatagatcttcagttggttttgaaagaaagaacaaaaaaaattgtgaatgtacatgtcatattgaaccctgatttatgtcataaaattggtatacgtacgggttgatatcatgaaaacgtttgatcttttaccatgaaaatgatcattatttagataaattcaatctactt

SEQ ID NO: 65067 - DNA, 397 bp, Arabidopsis thaliana landsberg
ggtaccagcaatgagcatcctagagcaaaggtgattaataaaaaagaattgcgaaagatttttttttgattcaagacagagatctgattttggttttgtcttaatctctttttgttcaggctgatgggttcccaacaatcctgttcttccctggtggaaacaaaagcttcgatccggttagcaaatattgttccctatatcaaacagtgttttgaaaacctgcacatatttttacttgagtactgaaattgttctaactgtctcttgtaaaccaaataaaaaacacatcgctgtggatgttgaccgttcagtactggacctgttcaaattcttgatgaagcacgcatcactcccatttaaacttgataaacctggctacacctgaaccggtgatctt

SEQ ID NO: 65068 - DNA, 1265 bp, Arabidopsis thaliana landsberg
ttgttctgttagctggtttactgctgccttttttctctggtatacttacttgtggttggtttaagggcaagtctttgtttccaatggaatgatttcattttttagaaaagaggatcctgtgttgttttcctgagataaattttctctgttatggcagatggtgtttgccctgtattgaggatacttctgctgatgattgttgtgatattgtaatggctgctggaaagagggctgggatcttcaagatgttagaaactgtgcaagcctcccgttaaacgaactccaaaagaacggactcaagggaaatcatgtacggaagtagatgagataagtgggaacatggatcaagaaatatggcaggaattccctcaagatctctttgaagacgttgtttccagactaccaatggctacttttttccagttccgtgcagtttgccgtaaatggaatgctcttattgattcagatagcttctccagatgcttcactgagcttcctcagaccatcccatggttctacaccataacccacgagaatgtcaactcaggacaagtgtacgacccttctttgaagaaatggcaccatccgattatcccagcactacccaagaagagtattgttttgccaatggcttctgcaggaggtctagtgtgcttcctcgacattggtcataggaacttctacgtgagcaacccgcttaccaagtctttcagggagttgcctgctaggtcgttcaaggtctggtctcgtgttgcggtaggaatgactctgaatggaaactccaccagtcatgggtataaggtcttgtgggttggatgtgaaggagagtacgaagtctatgattccctgagtaatgtgtggaccaaacgagggaccatcccgtccaacataaagctcccggtgttgctcaactttaagtcacagccagtggctatccacagcacactttacttcatgttaacagatcccgaagggatattgtcctatgacatggtctctgggaaatggaaacagttcattatacctggcccaccagacctgagcgatcacacgctggctgcgtgcggagagcggttgatgctggtgggtctactgactaaaaacgctgccacttgcgtttgcatatgggagctgcagaagatgacactgttgtggaaggaggttgacagaatgccaaacatatggtgcttggagttttacggaaagcacattaggatgaattggctgggcaacaaaaggtggccgatattattgaacttgaggtc

SEQ ID NO: 65069 - DNA, 1901 bp, Arabidopsis thaliana landsberg
  unsure (1)..(1901): unsure at all n locations
agacttgagagtgcgtttattgcagctttgtagtttactgcaaaaaaaataaaatcaatacgttggttcgtcgctacaagaagaaaagggtcaagcctgtcttcttcaccagagctgttgtcctcacaagcaccagctttagcttttttttatagctttcttgtgtcaccattaacacaaaggttactagagatttgatttcatcaaaaagctagtcgtcggtacatgagattaccatttatttccattaattgcatacactacttatttccataaactgcatacacttccaagtggttcatctgcgaatatgatgatcctataaactactggaatcagcaaatgtttagacaggtagtatcatcataacacaagtcacacaactgtaacaaaacaatgagacatgggaggaatcataacttattgagagccctaagagttgtataaccaaacagacaagaagacgaactcaccaacctattcatctataatcattgccaatcaacaaaacaaattgatattttattgtaaaaattctctcttttagaagtgcatgatcaccctgcaactttgttcaaaggcattacaatacaaaaaaaattataaggacatgaccaacccggcttataaatatcaggaaaataagaagctgtgatgatgtctatatgtcgtatatagactttatgaactgaaaaacagatcaggaaccagacaaagagttggtatttgacaggggtggttgaggattacaagtagatccatccaaaaaatgcttataatttgtgggcctaaatacttcaagacaatggcaaatcaagaatttcaattattgcaatttcctactcatttagaacataacaccattaagaagttttgttgctttgttatctcatatacttgacttcttctagtggttcctatcaaacgtccccagaatgttataccataacaaatctcagaaaaaactatcttagaaactgtattcccgcatccaaatcatcactcaaagaagctaaaggcagtgcaactgcaagctgtacttctatctaactacacaagttgcatgtgaagtgtgaacagagaagatttggtctcaatggcatctagtacttagataagctcaggtttttagttatgatcacccaaaagtcttatccatgctattgatacctaaggatccccctacaagggaaaacgagtaatctgaaccgcctgagtataggcaatagtctgaaacttaatgctagattttcaatctcttttgttcccctaatcacagtgcttaatacctcctaaaatttgttagcatgacctatactgtttccacctcacacgatcacaacacagaaaggtcactactaacgtacaagttcattcaagacgtgtttacctgttatgtggataactatgatgtcgcaagaacacatctgcaccagttaagctggaataggatgatgatgatgatctcatgcactgcaaccagtacaaacccctacattttagagatgacatagcatcaaagcaacacaagaaggcccacatataccagagatcctttatggaagtaaggggtctaaatctctgattaagtctaaatttcatggcaattattccagagcttatatcagaatccttcatgtatacgtctcatacccataaagcatggaaacaatgagattggtgttaagtgttaactattggacaatggcagaaattacatataattacttgacacatccttctttcatatacaaaatctctaataatatttggcatttgttcacagatttgccagcaaaagaatagaaaagaggatattgcacacgttttagcaaagagaagcaacgcaatggcggttaacaagttgggtntcagttacacctttgaaagaagaggcctta

SEQ ID NO: 65070 - DNA, 393 bp, Arabidopsis thaliana landsberg
aaaccgaacaaaatatcaaaatcttatgtatttctatgaaggtaagaactttttaagtatttagatggtgattacatattccaaccagatgaaataattataacataactttggtttaacctactatataccttgaaatttaaagatggcaagcaaacgttatatacataagtcgttacgtaacatataattacagcatgtatataaattataggaccctaatatatggatattaggaagtcacgtcttatacatggggagttgatcattgaaactacacatggccaaccactttatttaatgataatccgattttaaataataaatgatgacatgatatactgtttagacacttgggaatgaaaatagaccaggacgacgtatagctattct

SEQ ID NO: 65071 - DNA, 307 bp, Arabidopsis thaliana landsberg
  unsure (1)..(307): unsure at all n locations
agctaccgagggacgccagccggacaaaaaaaccacggtacgatagaaccncgccacgcagcaccaggaaaacgagggaagtgaacggagcagaccccccgcaaaaancgaaggaagaaagagaccgaccaacccagcagaccaaaagagaacacgagcagaacccacaagaacaaccacacgagccgaccacacagccgcacacagacaacagcacacaaccaaaaaagcccgcccaggaaagaacacacacaaacggccaaaggcccaaaaccacaaagccacgaaagcgaacagcacgaagcca

SEQ ID NO: 65072 - DNA, 584 bp, Arabidopsis thaliana landsberg
gaatgagcagaggctgatttgtccctgcaaattccaattcaccataaagttcagaaatttttccaaaacatgatataaacacacaaagtgaacaaatcaaaatcaaattaacaatcaaaaggagaaactttacgtttgaggagcacaaacatgaacattgtaaagcccttcgagaaccaaagcctcaacgagagaaacaagccctggcgaatcaatcccatcaccattcgtaactaaaacaataggtctagaatcatcgatctcttcctccaccgacgcaacatcaacggaatcagatgtagacggagcctcctccgccgatccatcgcttccaactttttcctcatttcctacttttctcttcgaaagcacatcttggagattcgaaacgagcgcagctgacaaaccattgttcttcgaggtcatcgtaaagacacgagagaaattgatttgggtctgtgttgaaagaatcaaaaaccctaacgagaacacgaagaagaataaaattagaacagagagaacgggtctaacggagttttcgtagagagagagaggagaagaaagagagatactttaattggtag

SEQ ID NO: 65073 - DNA, 402 bp, Arabidopsis thaliana landsberg
gtctgaactatcgcgtcacgacatgttcgattgtaaattttttttcataataaagtatagaattgtttttcttctgattttcaccaaaaaaaaaaagaagaccttataacaaaaaaaaattagtaaaacttttatcatattttttgaactttcataaaatatccaattaaaatttaaaaattaacagatttgtaactagttttgagaggatacgaatatgaaacacataatatttcattgagttggaaaaaaaaagttgtagttaaatcaaatttttaaaacaaaaattctatttcacaaatcttttctagctccaagcttatttttctatttcctactaaatcaattttttccttaaaaactccatctttttgactggatagtttcgctgctttacgaacc

SEQ ID NO: 65074 - DNA, 487 bp, Arabidopsis thaliana landsberg
  unsure (1)..(487): unsure at all n locations
taaatggaaaacnagctggtcatattcactcttgaggggtcacaaggggttggggttaattttggcataaagtttccttaccttaccaaatgatttctattgcatacacaatgttgctgttacaggtagcggacatggcaaacagaagatttctttggatataccgattaatctggtaaccgggacgaacacaatcgatctccttagtgttaccgtagggcttgcggtacgtactatacgattttaatggcacaaaacgtttactaggcaggagtaacccaaccaatttatcttacttattccacagaattatggagctttctttgacttagtgggagcaggaataaccggacctgtgacccttagaagcgctaaaggtggtagctcaattgatgtggcttcacagcaatggacttatcaggagcgatacttgccatattactgctcctacctctggctttcaagtcttaacggttgcgattttata

SEQ ID NO: 65075 - DNA, 1657 bp, Arabidopsis thaliana landsberg
aattttgcatgatttgatctctggcatattcgtttatcgcttttgtggtactataatcattaggctgatcttctaccttgaactactgttgttagtctgttacatttttgaaaattttgatggttatgtggtgaagttatgttctaagaactacaattgctcggtttctctgcagtcgcggcaacttcaagaaagcggttggagaccgagatggtttgagagacaaggtgaaagcgacaccttcaagtacacgggtggttattgggaagcacgagggcataggaactgggatgattgccccgacatcttcggggagttcacagaagagctagcggacgccgcttagaaagcttcttgacttcattccaggtaatataactcatcctaccagctctcgtaccagcaaaataataaattgccccttgaatgttacaatagaaaacccgaaccacccaaattatcttggtttcgaaaaaaaaaaatcaattttttatattaagtatttcgtttcttgcatcgaatctgcctaacagaagatcttcattcggaccatattggagttgtttacacggcagcacccatctttcgaccatggtttcagttttctgcttgaaagagggcatagaacaaatatcagaaggaggctttggttctatctactaaaagacgtcctgcttttgagtcttagagtgtcactgtaaagtcttatatccttctcttcaattctctatctccctcgtcaaatagttgagattaatgtagtaggttggtcttacattggacaagttccttgtaatccatttgtatttaattattaaaaaaatatatgtcagcaataaaaataaatcccgacaaagactctttcacattactcctcttgcaataaaatttagcatctttgattaacaaccatccaaaaaaatactatttctccatgtacggatactcgtatagagtgagttagttatactgacatatactaaatcaaaacaaaatagatttaaaccgaaacaaaatccaaaaccaattttagctgaccaaaaaacccgtcaaagtcaacgaggaaatagcaaaatcggatttcgcaatctgtcgtcactcgtcactctcctctattattaaagctcaccagaattcgaaaccaatttgatcagaaatttgaatcgaagaagcaaatcacaaaaatgtcaggagtttacgatagtcaagctgatatctacttagacgcacgacctacttatcccgccgattggtactccaagctcgccgctctctcccaccgtcacaatctcgcttgggacgccggaaccggaaacggccaagctgccatcggagtatgtattttctcctccctctctttcttctttcttacatttcccgatctgaaatctcgtaacgcgaatctctgattttttacgacttgttgcttagatcgcggaacactacgaaagagtcgttgcgacggacgttagcgagacgatgttgaatctcggaaaaccgcatccgaaagtaacgtaccaccacacgccctcgtcgatgacggaagatgaaatggtagatcttattggaggagagaactctgtggatttgataacggtggctaccgccgtacactggtttcgatctcccgagattctaccgcgatcgcgaaatcgtc

SEQ ID NO: 65076 - DNA, 242 bp, Arabidopsis thaliana landsberg
ccgcttgttgtttaagaattatctttgctggactactttttttctttaatcaacattccagtggaacttttttttggcttggaaaaaacagcctgattaaagttatatatttgattactgatatgtaaatgggcttccttcagtctggcatgttcatgtcttgcttaaatggttcttgtatgatcatatcggatggttatccatttggtaactgttcatttttgcttggttcctttattgtt

SEQ ID NO: 65077 - DNA, 103 bp, Arabidopsis thaliana landsberg
  unsure (1)..(103): unsure at all n locations
gcagggcggacgatttcaaagcgttctagcggtggggaaaagcgggatagagaagatcgccaatatttcgcgagccgntgtttaacttattncattgcaatat

SEQ ID NO: 65078 - DNA, 291 bp, Arabidopsis thaliana landsberg
ttacatactaactaatagagtatcagatcaaagatttatactgacaattcatcttcaaaattaggcttagattaaaacttggagttccaaaaactatatcccaaagctgtttgagaattctgcttttcaaaagacgtttctcacacaaaactcgaccataatcacaacgagcaaaaggataaaaagagaaaaagtgaaatacctgataggactccacttcaagcttcagatctggaaacgtcacagagaaacagattgggcggcggcggctttaatgtatgggaaggggtc

SEQ ID NO: 65079 - DNA, 384 bp, Arabidopsis thaliana landsberg
  unsure (1)..(384): unsure at all n locations
cactngagnnatgcagatncttcatgtcatcatttttgcttttagnnnnganatctatnnncttccctttggcggactctgctttacttccactcatttcatcagcaaagctgaaaagttgctggatttgtttgagcttcccgtcatacagcgatttttgatctggtgacaatttcccctttctcctgttgaacaacagagtatagtggctagccaatgcttccaattcctgaaagtaccatgcattgaaaaattgagggaagacaaaatcgattatccaagaatgaatagacaggtggttttcagagataagtaggtcacctcaagctgctcaagaccaccataaattgtaaagcatcgatcaaatgtaaccttctcaagtac

SEQ ID NO: 65080 - DNA, 700 bp, Arabidopsis thaliana landsberg
ggttccatcggggttaccagccttaccgttctttgatttaatgagtatgggtggaaaaattagagctggttttggtgcacttggcattcgaccgtcacctccagtgtgtattcttacgaccttttagatcaatatgatttttagggctttatgttggtagaatctgctcatgttcttagagtttggcaaaggtgacagggtcgtgaagaatctgtggaggagtttgtacggcgtaacctcggtgatgaggtttttgagcgcctgattgaaccgttttgttcaggtagagttatagataaaacttcatgtgaaccatttattcatttagatgtcagcgaatctgattatctagcagttttcatttttgttctagtgcacccttaatgctttagattttatgcttttaggtgtttatgctggtgatccttcaaaactgagcatgaaagcagcgtttgggaaggtttggaaactagagcaaaatggtggaagcataataggtggtacttttaaggcaatccaggagaggaaacaacgctcccaaggcagaacgagacccgtgagtaacatcaaacttttctgttgcttgggtcttttgtcccttcatatacatattggttaaacaactcatcctgcttcttcaggcgcctgccaacaccacagggcccaacaggtggctctttcaggaagggacttccaatga

SEQ ID NO: 65081 - DNA, 542 bp, Arabidopsis thaliana landsberg
  unsure (1)..(542): unsure at all n locations
ctggataagtcggtacgatttcaagggcctggtgtccaccactgctggcaatacaagcgtggtcgtcaagaacgacttggtgtttggggcagtgaacagcgacggcgacttgagcatcacagttggcgggcaattaggccaggcaaaaaacgccgcgatggctgttgcgggcacaaccactgcacaggcccaatcggttgttctagatcaggcaggtaacgatttcaaaggtgcactgactgccacttccagcaatggtgttacccgtattcaagaccaaaacgatttgcttctgggcaacatcacaagcaaaggcgatttgacgctgagtgcaaagggcgagttgacgcaagttgagggcacagctgtgtccgcccacgctgcaagcgatttgaccgctcagtcagtcaacctgacccaaggcaacaatgatttcatgggtgctgtggctgtcaaatcgatgaagggcacattggtgntgttgataaaaatgacctggatctgggcaatgtcaatggcgcatacgatctgaatctgaatgc

SEQ ID NO: 65082 - DNA, 635 bp, Arabidopsis thaliana landsberg
tataatataacccatgttattctagaaagggatgaatatgaaaggtatttctggctaacaagaaatgtttatgcatgcacttgtttggttgttccattgatggtgtttggtatcaatgaaaattgaatatatataaaaaatcaatagacatttgaacatattatgggaaataagattatatttatatgctatcttttttcaccttttctggttggtccactgacatgaacaatctctagataaatttatgtagaagaaacaaaaagaaatgacaatttcattccttatccctccctcggtcgatgatgcaagtgtaatatggataagaatgcccattctctgagacatctttttcctttcgctttctttcttttttattagaaaaaccaaacataactttttattggatcatagtggaactgaattctgttgaaatgttcatttcgtatatcttgtgagctttttttcttggttgaagtgatttaagtactttttctgttacataaaatgatgggaattaacaaagcataaaatgaagatcttatcagctaataatgtcaacatcatatgaacatgatggtggtggaaatggttaacgttataactgctcccctcttttatcttaggacccaacc

SEQ ID NO: 65083 - DNA, 343 bp, Arabidopsis thaliana landsberg
  unsure (1)..(343): unsure at all n locations
aaagaacccaccaaaacttcaacactccaacaaaancaccagccaaaggacgacagaaggggaagaccggccacccccgggcccagccacaaaccaganaggcnccgcgcccccgggcggaccgcaagggaaagcgacagccccgcaggccgaccccagaggcncccccccgccggnaggggcaggagcaccggcaccaacagcagcaggaggaggcccaggccgaagaaaggcgaacaggccggcgacgaaaggaggcaaccccacgggaggagacgacgaaccagagccaccagaacgaaccaccngagcnnncccagccannnnncccccaccgagacgg

SEQ ID NO: 65084 - DNA, 464 bp, Arabidopsis thaliana landsberg
ttcagtctgatcagttcgttcggcaaatcgtcgaaggcaaaagcggttctggacgatcactgcatgcaatgagcgggtctgttgttaccaactctttaggaaccgaaatgcgaacagttaaaacaataaaagccgcggccttgatttgcggattggcattgccaggatatgccttggcggaaggcacaagcagcgataacccgaatgccgacggcgatgtctacaaggcgcagcccaatctgtatgtcggtgggttctacatgcgcccggactccaagcgcagtaccaccaatcgagcacaagggtggaccgtcggcgttggtattccggtgtggtggaggctctcttttgaagccaatctgtttactgcgaatcttgataccggaacgctaaataacgccacccttggcaactcggatttctatcagcgtggcggcggtctctacgcattctggaaatttttg

SEQ ID NO: 65085 - DNA, 573 bp, Arabidopsis thaliana landsberg
agagatataaaatcttcgaataaaatttattattgtatgaataggtgaaacgtagatattatggtagctaaaataattgaagtgactttaagaaaaccctttgtaaacaattcagtatgagtcctattacaaaaagtaatgagtagcaccatggcaatgagcttaatgtccctttgtagaactaaaacgtctccgtctcgattgacatatcccccaatatgacatgtaaccaaacctttggagttttggataattgtttctcagagaaaaaaactaaagaacctaactcaaaagattatttgttttctttttaaacaaatatgtcacgtttttcttaactattttactataaactgaagataatacaattgttaataagtcgatcgggtacgtaccaagtatattttgttgctattactaaattaaggagcacatagttgtagtaagtagggattagttgagatgattaatttgatattacaaggaaagtgatgtgacttattggcgctttcctaaaagactgttgtcgcttattagcacaaatcaaatggaagatccaataatgctacacga

SEQ ID NO: 65086 - DNA, 367 bp, Arabidopsis thaliana landsberg
  unsure (1)..(367): unsure at all n locations
ataaactgattcaatttcctttgcctattttcgaacaaaccatttcaaacaaccggaaaaagggaaaaactacctggatatataccttagaatcctaaaacgttaacatatattgctaaaaaagaccaaaccaaactatatgtgctttttatatttcatgaaaaacaaaatcttgaaaacaaaaccgtgcgaaaacaagattgaacgtcgtaatatatacctgccatgagtccaagggtaagagatattggtgacattagcgnnnnnnnnnnnnnnnnnnnnnnnnnnnnnnnnnnnnnnnnnnnnnnnnnnnnnnnnnnnnnnnnnnggacccggcgggcatcctcctccatcctttctgtgtata

SEQ ID NO: 65087 - DNA, 1745 bp, Arabidopsis thaliana landsberg
atggtaaattccattacatattaattgaattcatatgcatgttatggatattaaaatttttacctccacatatttaggctttaataggctggggtgggctcattgcgccctttactttaatatgaaggcacagtaattattgacacaaaagttatgcatctatctattatcatcatatcaagaaaagtcaattccatgaaacttaaacggtccttcggtccataattcattatgattccaaacattacacatggtccatgcacgtatatgcacgccctaaaagttttctcaagtttgtttttattcgtgtgtttcttgataaaggcaagtttatcattataagcaacaaaacccttaaattaaatggaccctatgcaataatagtgaataaaaagtaacataatgtagagtcaaattaaaggagtaggcctatatcacctaagtttaaatttggtggtacttccaaataatgtacatagtaaaatgtatttagttatagtatattgagatttcaatggtgaaaaatgtgaatataggaccgggatgttcatcaatcggattcggagctgcagaagaactgggaccattcttcccacaaaactcgagtcagcctaaactcaagctaaatccatacagctggaacaaaggtatggatatacataactttctaaatatttaaataatatttttctttctatcaataatgtaactgaattaattgctttgaaatgtgatttatgtagcggcgaatttgttattcttggaatcgccggttggagttggattctcctatactaacacaagccgtgatataaaacaactcggcgacactgtcacaggttcggtttatataacattatagttttattaatgagctattagttttgtttgtaagtaataaataaagattgtgtatgatgaacagcgagagactcatacaacttccttgtcaactggttcaagagatttccccagtacaagtcacacgacttctacattgccggagaaagctacgccggtaaattattattattataagttagaaatacacgacgtcgtttctacatgtgattattacaaaaccaaaaaacaaaacattgaatatgtatgatttgcatggaattattaggccattacgtcccacaactttcggagctcatctacaaagaaaacaagattgcgtcgaagaaagatttcattaatctcaagggtttaatggtcagagattttcttaaacaatccaataattattagtttcacttgcactatatctagtgttttgatgaagactttgaattgtatatatatacagataggaaacgcgttattggatgacgaaacggatcaaaaggggatgatagaatatgcatgggatcacgcggtgatatcagatgcattgtacgagaaagttaataaaaactgcgatttcaaacaaaaacttgtgaccaaggaatgcaacgacgctttagatgagtattttgatgtatacaagatccttgacatgtacagtctgtacgctccaaagtgtgtccccacctccacgaactcctctatttctcattcagtcgccggaaaccgccccctacccgcattccgaagcgttctacgaccccgtctcatctctcacaatgtaagtaattcgtctttttaaccacttagaaaaattctttcgtaaccaatttgactaaccggttataattgattatatacaggaaggatggaggaggatggccgccgggtacgat

SEQ ID NO: 65088 - DNA, 474 bp, Arabidopsis thaliana landsberg
aagcaggagaaattgctgacactgtagttcagaactttatgtattacgatactactacttgggatatgggtttttttacaaaagttcctagcattaaccctaacggctgtctttctacaggaagtatcagtgtggtgagcggcgacgctatttatgccgctatgggaccgaaagacactcccactagattcaacctcgctgactttgaagttcctttgattgcaggaacctcaaaactgacatacggatggatagttagtagaacaagttatagttctcttgataactactacgggaggatcaagtactacaatgccagtggaagcaccattagtacctcaagtgttactgatgctgtatcttctgccaatcaaacttttatttacggaactccagttactatgcctgcaggaaccgtatcttttagcactatctttggaatacggccggagctactcaaactgtaacgattag

SEQ ID NO: 65089 - DNA, 453 bp, Arabidopsis thaliana landsberg
tatcgtggtcgatctcaaatgcaggttccacttgtactttggtaatattgtttattgggggaaaaaagctgctgatatataaaaacatatcagcttatctttataaactaatcgagagttagcatagagtatcaactggaaaagttgaaaatagatcgatgcaggttttccataatggacgaatgtttatgattaataattttaaaatttgttcaaagtacaacttgcctttttgaatgacctcatctgttttttttttctttggttgagtgctttatttaaccatctttttctttcacctgaatgaaatcataaactaataaagaaaaaagaagcttacaattgttagacaatattcacatgggatgcgatggtatctactagttagtcacttcaatcacatgcttggtttctttcatgttgatctgatttagtaatacaagtggatcacat

SEQ ID NO: 65090 - DNA, 591 bp, Arabidopsis thaliana landsberg
cggtccggatgttacatagagttctaaaacgtaatgattagaataaagtaataaatgcttaattgggtgaatatattaatatttgtcatcccttttaagaattggggttaaagacatgcttaggctatataagaatcaaacgacccttgactactccactaagattttgaagttgatgtgggactaaccttacatttgattatttttcccgtatacataaattgattatacgcattattaccactgaaattataattagtgataatgtaatgcaatcaaccatacattggtttttcttaaatatgataattgatgtacacctatattcattatatctatctaaaagacgaagatattctcgtgtacaatggatattattttgacgaaatgctgtgcagtatttataatgagtcaaaaatgatacatgaaagtataattcacagcaagtcagcaactaattaatacctaaacttttggaatgtatgcctcattattttagtgtatcaaatttgaaaaggaattttatctatatacatattgagattcataaaaattataacttatgaatatacaaaaaatactatcccattg

SEQ ID NO: 65091 - DNA, 1855 bp, Arabidopsis thaliana landsberg
tctcctgtgtaaagagaaaggaaactaacactgttcaaatctcagaagacataaatcatcaactgcattggacctgaaagtaaagtacttaccatagaagcatctccaatgcttagctgtatctcatatttaccagagaggtagtagagcttctcaaccaatccaagaaaatcctgaaggtaagaaaataacattaaccattaatattgtatttaggacgtcattaatttcaccaaacttgatcattaaactttttttgcaaaagcaattttaaatgaagttgaaggaacttaactagaactaattcagacttctttccagaagttttcacgagaaagatatgctcgacctgtgactcatgtttcagcttgaaaaatgcctgcatggaagtaagcaagtcaagaaagtgaatagaacagaatataaccattgatgaagcgaaaaatcaagaatgaacaaacctggtgtggcttaaacgcattgccaagtggagtagttaactggaatgacaggcgtagcttttgaaggtggtttgctgataatgataccgctccatctttagttaaatctagcctacaaatgttacagagagaaccaataaacaaaaagaagacactaagcacaacaacaaaaagtttgaaatatatattgtaagcaataatggtacaagtttcctaagaaaaatggttaagcaattagcaatcaatcaaaataagcaaaaaaggaagttgttcatcaacaatacaggtgacatactttttctgagattcaacgcttccaatgtcactgtcaagtacagcaatttctgcattttcaatgctaatagctcctgtggcagctataggcacttttgtttgagcttcagttatgtatactttctcatgtgctgattcatccagcacaatctgcagaaaacgaagcttatcatgttgtcatcatacatttatatgaagtcttgggtgtagtaaaaccaaagaagtgcaataccttaaatacaaaagtatattttccaatgtcaaagttcttgggaaaggagtccaggaagtacgttgcactgtcagcgtcaaacttaagctcctgtaccccaaaaatgtaatggaaaaatgtaaaccggcctaatgcagagaataaggaacatttctattgcaagctcaaacagtaagagatacattatttacctggttattaattacagatgaatccactgacttagaacttagagcttgtgtaagcttcacactaagagctggtgccttcgaacccagtacagagctaactttaacctagttccagataaagagaaaaaaaatctaaaataagaaaaaatgcaatggatgaagggtcaactaaaatgagtcattatcaaatagataagagatctctacaaaaaagatgcaatgctatgagcctgagcaatctctaaaccaaataccagctagaatccaacatccaaccgttatagccagaaagtccaaagttaagactttcactactagaagtcaaatcttgatgcaagcttatgaatgggtaccttcagaggctctttctttgtcaatgaaatgacagtggatggaagagacaagatgagtggaacagaaaacctgaaatgatagagaatgaccatagagcaaattattgttcccatagaatgataaagtttcagctagaccataataaatgagcaagtggttgaaatttcacaagtgttcaaagttttaaacttctactctttccctacagatatcatttcttcggtaatcattttgttcaaaattctaaccacccaaagagaaacagtttttctctttcataagcaactttactttaacacaaaagaatggaagtaacagtaagt

SEQ ID NO: 65092 - DNA, 810 bp, Arabidopsis thaliana landsberg
caatttccctatgcctagcaatatatcatgtcgttattgggcttgtttacttacccagttacccgtattccagttataagcccattaatcagcctcgtacagttctattgttggtcagattattaatttttaaaataagggcgtattttccgaaactaaagaaagtatagggtcttcttcttttctctaattaggaaaaagactttttcaattgtcttgtccgtgaaattatgtggagagctaaaccattcatagcccgacatgtaacccagccacgtaattagaccactcgatcaccgttcgtattaatgtgattaaatcaacgattgatatcacgccacgtcattgtttttcttttttcctttgtatcttctgttctaagggaagaaataataacgagagaagaacgttttaataaacagagagcagagcacttgttctaaagatcaaagcttaagtgagaagcagaaaaaaaaatggcgaaatctcagatctggtttggttttgcgttactcgcgttgcttctggtttcagccgtagctgacgatgtggttgttttgactgacgatagcttcgaaaaggaagttggtaaagataaaggagctctcgtcgagttttacgctccctggtatggttcaattctctcaattcggatgcgatcctttttgatctgtaaatcttctggtcgagaaatgttttgatctgagattgcagtcttctggattaataaagcatgaatttccatttatatggcttactgagaaaattagagcttactgatgtgtgctgttgaatctgactaattgcatt

SEQ ID NO: 65093 - DNA, 284 bp, Arabidopsis thaliana landsberg
aactcaccaaaaagaggactattcattgattatttttgaatcatagcaggagatacaggggggtttatatcccaatatccccccacgaacagatgtctaacgaagctgtacgacgaggcttctgttgatggaaagaagccacatacataatgatgtgaccagcatacagaacacgagtccggattgccagttgcatatcgggagtctgatcatacttgcactacaatccatgggactcatgaggactgaccggcggattaatgaaagccctataatagtgaaag

SEQ ID NO: 65094 - DNA, 299 bp, Arabidopsis thaliana landsberg
acacgagacggagacaagcgggggcgaagcaggagaaaacgacacagggccccccccccccaaacaggcccccgacagaagagaccaaagagggcaacgagagacacgaacaaaacgccgaacacagaggacaaacaacaccggactgaggactccaaagagaaagaacacacaaaacaccaaaaggtgaagagcaggaaacgcaaaccaactaagagaccgccgagggacaagaggaagaagaaacaggagaacgaggaacggacagccaacacacggcaatagaggccaactaggga

SEQ ID NO: 65095 - DNA, 567 bp, Arabidopsis thaliana landsberg
cgagttcgcgcgccggtaccgcacgcccgccgattagactcccgatgccgcgggttatgaggggagggaagtgctgcttcccgacgacgatcgcagtgtctttttcgtgcttacccgctggcgttcggatgcggacttcaaagcatggacggagagtcccgatttcgccgcacgccacgcccggcaccaaactggcggtccgatcgggaccgccagtgagtttttgtccttccgcgtcattaagtgaaccgtcgcggatgacacacacgaggtggcctgacgatcacggctgtttaggaccccgcttacccgacggtttcctcccggagaatgccgtacatgacgccgtcccgccaggcgccagcccgccaggcggagccgcgccggacgccttcctgggtaaaacccgcctttttcagagaccgccgctccgcgacagagtcggtctcggtccacgcctccacccggttcgccagcgtgtgcgcgaacaggtactccgtcagctgccgctgtgcctgcgtgcccgaaccctgaccgcgcgccttgggcagcagcgtgatgccgatc

SEQ ID NO: 65096 - DNA, 106 bp, Arabidopsis thaliana landsberg
tccatcttcgaacggtgtcgttgggctcacaagagagctaggtgttcccgatacaagctccggtacagtaatctacaacaatccgatccgtttttacgatccggat

SEQ ID NO: 65097 - DNA, 574 bp, Arabidopsis thaliana landsberg
actttttcataacatgagatccaattcgtaacaagcaactacgaagaaactcaattcagataaaatccgtggaattgattccattaggaacaaagggtacgaaacaaaatcagacctttcgctagttagcaatccggaatttcgaaatctagggtttcgtaaacccaacagattggaagaaattcccccgaaaaggcgaaaggaaggtgaatgatttgaaaaaggagaaggctttttatacaaagataagaaatttttagagagggaaagagatttgtaaattgggattatatataaaggagagagttttgattttcaatatcgctctctgggttctctctctggggatgagatttgtgatctgcgctttggatctgtggagcttaaggacacgttattaccctctatatactttcctaaactacccttgcctctctttgtcggatgagggtaattatgggaattcagcttaatagattttaatgttacggcctttactggaattttagggaaccgtccactctttgtctgccacgtgctctattacagaatgtgttagccataccgttttttt

SEQ ID NO: 65098 - DNA, 604 bp, Arabidopsis thaliana landsberg
agcgcgtcggcggccagattgaggcgcgcgcggtccggctgggtgctgacctcaccttggccatcgacggcgacaatgcgcggtggcggggcatcggcggcatgcgcagtcgcgctcagcagcaaggcggcaggcagcagccaggcgaacttcttcatgttgatctcgtttgggggcttggatggacggtttgcgatcataaagcacccgtatctgtcagctgccttaacgcgggagcggacacactggtctaaaatagcccttcacgttttcgcgccagccggcgcgagccaccgacatccatgaacgctccccacgaacccgtcagcctgacgcgcgacgtcatcggcatcctgatcccgcagggcaccaaggtcgagttgcccgaaggcgcgcacgcgcagatcacgcaggcgctcggcggcagcttcacggtgcaggtcgagggtcacctgttccgcatcgacggcaaggacgcggatgcgatcggccaggaagtcgcgaagctgccggaaattgccggcgatgccagcgacgaagacatctaaaaagcggtctgggatcagcttcgcacctgttacgaccccggaaattccggtcgaca

SEQ ID NO: 65099 - DNA, 734 bp, Arabidopsis thaliana landsberg
  unsure (1)..(734): unsure at all n locations
cgtgtttaccccctcggttaatttggttttctctttgctcgactttgttccacatttattgctaccctgtcagtacttgccttatttacgacattatggatagcctcatctggtgattatgtatcttcaagttaaaattctgagaaaaatctctcaaaacattttctcagttaaaacctccaatttttttgtttttatataaaatattcaagttgaaacaattttcctacaagaacgtttacatttttttccatattctcatgtaaaccttccaactaattaggttatctacataaactttcaagttgtcaaatttgacctcgatcagtagtttattaatgtttaacgataattatatttaaaacagtaaacggtcattaacgatatttttcgtttatttagttttcaaaatttataaaaatcctttaaaaaaaaaatgcattctatatatagggtttgtaaataattatttttgtgtttcttattataactaacacgtatatttttttttaaaactaaataaacagaaaatatgtcgttaaatgtcgtttaccattaatcaatcattgatcgggctcaaatagtaaacattgaactaaattaaattatactctgntatatatatatatatatatattatatgngctnttttttttttaatataagctataataaagaactagttgggacgctcaacatttgtatcgtacaaggttaacaagctgtgtttaggg

SEQ ID NO: 65100 - DNA, 1989 bp, Arabidopsis thaliana landsberg
aaaccgggaataagaaggagaaacctcttctgtcgtcccgagaaggaaacggtttagtgccaaaagctaatacatgcaaactacattctccaaatctctcagagtgctttctttgataatcttactgaaaatcactagagaacttacacattctcttgcatctaactgctctcaactgtgttgttggctttgcagccaagacaactccagcagagcggaagaggtgattggttccagcggaaagtgaagcctttatcgttcttgattctatagcagcgacaataccaaacatgaagaatgcaaccatcttatctatttaaaagctagagattatgagtctgtgattgtgttttgtgtgtttatgttggccaagtgttatgttggcggctaagtttctacaattgtgagtgtgtcccgagccgataaagttacatcacaaggctttttggatcatcttcttcttctggtttttcgttacattactttgattacttttgaagatctaaactttttatgtttttatgaatctgtgattattttctccatcatttatatgtttgttcttcttaagccttctaagattaagcttactgacaaaactataaagtgaaaacttgacttgtactgtcaaattaacttagaccttgagttgaaggatttgactgttatctttttcaactcaagaaaagaaaacagacatgaagcataaagagaatgtagtatatttcacatacatgatcttaactcgaaccgtttctatcaaacatttcagatctacggtagcgattctttctatgaacatcaaactgaagtgaagaaagcttatgcgaaaccgctgaccaaatcatattcacagaatctccaacttgcgaaggaaagcgatactcaaaacacccagcaacctctttcaatctcccccacttcttcttccactgatcctctgttatccctctgagaatattcaccaagaactctttctttacagcttcagaagcatgcacaaacacggagaaacccgaataatcaagagtatcttcaaatggaagctcaatctgatcactgattataaccggaacacaatggctcacaatggcatcgaaaagacggttagaggaaggagtgtcacccgcgatattgagacaaaacttcgaggaagccattcctttaccagtttgtttagtcccatttcctctaacagttccaaatgcaaagtgaacatctttctcatctttcagaaggttatacagttcttgacgaatagttccaccctacgatgtttaagattagaatcagtaacaggattgatatcgattagagaggaaaactcaaagtcacttacatcttttctatagatagctccttggaaatatgccaatacaggacgcttctcaaacgaagctgactcgttgttagagatagtcttaacgacgtgcacgtaaggcgcaatgatatctttctcaagattggcgatagcagacgaataccttccgaaatccgaaagaacaaacattgctgatccaagaaagtttcttgcatagagcaaactgtttggatggtgagctactatcaaatgatctttcccatcaaatcttttccactcatcttgacttttcaagaactcaactaatctttcttgcaacaatctatcatcactgcttgtttcgtttccacggagcttcgatttccgattgtaactcaacgaagcaaagaaaggcacgaaaactatatcagcttcattagagttcttcactctaatagctgcactactacaaggtctcttgatttcaggtgtctctgaagctaataaatcaagtgttagccaatactctacactgtgttgacgatttaacccaccaggataagatgggattgtactaatgttgttgacatttggccaaatctcagatccttttttgtgccaattcaatatcaaaaagtgaaactcagagggtagatcgtacataaacaccttcaacagatctgtgtctc

SEQ ID NO: 65101 - DNA, 156 bp, Arabidopsis thaliana landsberg
gacgcaagaagtttacctatgactcggaaatacgaaagaacaaaactgtccctgctcatcattacttctatcctcaatgccaacaccctaggatcgaaatactatggagttgtacgatgctgatgtagcctgcgcgtaggctctctagcgccctta

SEQ ID NO: 65102 - DNA, 1895 bp, Arabidopsis thaliana landsberg
aaaaaatcagagattgtgataatccctaccatggagacagcaaatcggagattatcgctaatcgcataggctcagtcgtgaggtgagaaacactgtccaatagtaacagcgcgtgcatcacattgcaaagaatatagtacccgcggatcgaggacaggtgtcgggacgttagaccattcgccgattgtagcgagcaaggtctgggacaacgtgattttactcagctcatatcaactaaaataagcaagtccagttacagtcgcagactcgcagttatatgtattttttttttcttcaaaaacaaatttttatttactttgactaatgtgatatgtatatgaatatatgataaatacgacgagtaagcttaaaaactcactatacttagctgacaaataaaatactaaatacaaaacgaaaattaatatatttgagatttatttgaaaaagttagctttcggtatttgaaaaaaaaaatcgagagatagttattgcttcacatgagaggaggacgaaagcaaaaagaatagcatgagagacgtgaattacgagaagggtttggagctacggagtagagtagaaatgatggctgcatcatataaggaaacattttaaagctgcctccatgttaatcttggcttcagcccaatacctactattagaaaattttaattatcttaatacaaagtttgttttatatggatattctcaatacaagtcttaagagaagccccactgaagtaattatacattactatgtgttgagatttcgttttttttttttataaatgaagtaaccagatgagatgttgtacatcttaaatggctattatatgatctacgtaaccgttgtaaatgtatactagctaataataaaacgtacgttgttaaacaaaaaagaaatacaaatatatttaattatttctccattatgtatcttattttttctagttatcagtatttactcgattccaaaggtacttcgaattacctttgctaagtacgttttctgagtaaagttatcatataacactcaaataaccttttttacccccaaacaaaacaacttcaatatgtatcttcataagttcatatatttataaaacaaattactcacttcttatactcaaaacattcatgagtgacatgcaaattcactctgcggttagcgagattttgttatacgtagataattaagaagaaaaataaaatctgaattaatcactggaaataaatccaaacggcatgaccaacccaacattgcaacatacctacactgttgctataagcctagaatgacacgcgagatgataatagaattacactaaatcgaaataaatcaatatcgaaagattttatttctaccaagtttaatttgttcaaaaataaatggaagtatatgctttctatttcggaaaatagctaggtaaactttgatatagataccgcgtagattgtattgtgggctaggacaaggaactggtagggcaaaggacgaaagaggggaccccacatgtgctttcatgttaagttacggatagtggtccaactgacacgtgtcatcacggggaccactttagatggtcattgggcggctactactagggttttttttccggcacgtgtaaagaagaaccgaagcgtgtgaaggtttgatttatattgctgggtttaggcaggcatagaaagattcttgggatccgtgaagcatattgtgttcctttctagaatgattggatctttctcttgttttttttacttctcctcctattagatgatagagccaaagaaaataaataaatattattcttttggttattgcaaatgaaattatttatgtttcataacactgtttaacttagttcatagaatgttgttggctgccatttaaaagc

SEQ ID NO: 65103 - DNA, 591 bp, Arabidopsis thaliana landsberg
gggtgcatttgttcgtacttatcggatttacctttccctgagtggcagtgacgtccactgtacttgatgttggttttagacaaagaatgcataagatggtcaacttggaaacaaatcacaagaattaactattgctgcaaatgtgtatggtctagtgagaacagcttgaaacagttcttccaatgccacaaaattaaaacacagtggcgggacactcttcatgaaatatgatagaaaactctacgattagctcacattagaatactagctctttcagaagccataaaaagaaaaaggcacaggaacagcttcattatttaacggttaagtaaagcacaacacacaaaactaaaaaaagtaaatccttaatccttattagagagacattcaaagatacacatgccaaggtgtggtaaaggcatataacgatagaaagaataaagaagactcacttgggctaattgctacgtctgttgctcttaacacattactttttcccgggtggttgcaacatccagatggtttttagcaagaaccttttgaaataaagaatgcttttttaaacaatttctttcaaaaacccaaaaaacc

SEQ ID NO: 65104 - DNA, 1394 bp, Arabidopsis thaliana landsberg
taacgaatatccaaaagcatatttaagattgatttgtttttaggtcgaaacaaaaaaaaatgatttaacaagcatattttggcttagaagtgagaggaaatctatattttctagactccatgtttcatcaagcactaaacttgcgagtctttaatatatactgtatcctttctatattagtatgacccgtattataattaattatttatatcatcagtcgacactcaaactaatctcaataatctaaaaaaaaaactgaatatattgtccatttaacgcatataaaataatcaattatgattgaacttgctagggaaacactcgaattctagctcttcaacttccagaatagacccttcaaccaaggtatcaaaattatagcaaattatttttgacttgttaataaatatttagtggccattccaaccaagtagtgtgtattgtggtctaatggttctgagagtgagagtaggtcacttgttctattccatttaggataagtgatttacgtcttaaacgtagtattattatctacagttggccatgaacaccagaagaaattatgggacaaaggttcaaactcctatacacagtttatattaaaaaaaaaagaaaaaaaaaagtgaatggcttatgtaatcaacaatacgtggatatagaattatatttctccaatacaatgcacactataagaaactatattaccataagaaacaaaaaaaagcactataagatgtcatatattacttgataaggaatcgtaatcgatgcaactttacgttaatatatatgtatgcgtacactattatatactatatgcgacgagctgtttaccaaaaacccgttagtggcttttgattcgcttatgtaagctcatacatcaatggggttcgtccttactttagcacgttacaaatattgattagattatgtcttctttcctaatttatcaaatatgtcctcaaacgtggatgtagaacaaaaagtgtcttcattgttcgtgagaaaactcgaaaatatagtcaggactcaggatcattcatgagtaagaagattcaggattagaaatttagaatagcgaagaagtgaacctcgctcaagaagtttttatcctctaaagggttaggatatgttcaagttttcaccgatattcatactccatcctcttgagtcttgatacccgatcactctgggttcttacaaaacaaaaattggcgggagcaaaaagtcacaaatgctagctaagattttctaggaagcattttctatataatagctagaatctctatattcagttgcagcaaaaaaaatctgtatattggatcgagttttaaatcattcatttttttttgttctttttttcaattcgtgtctgtcaatttacattttctatt

SEQ ID NO: 65105 - DNA, 553 bp, Arabidopsis thaliana landsberg
aaagaagcaatctacagcgacatttcttggacataacaatatataccttgggaatttctttttcggaaagtagcacaggaaaagggagggattccttcaaaatcaactcagctagagcagttcgatcatcagcgattcgagcttgatcactgaaggggatgcccatgaaacagacacccggagacctgaaaagtcaaaacaaatacttagccgtaattgccgctaagttaccattattctttggtttaacaaaaataaaagctttcttaaacctctgctgaagcaactttagtttctcaaagaaaccactcagatcacttgttccgtctagcaaatgtccagctagaactacataagttcctttgtccttgaaaagctggttattcccaaagtctcgattcaaccaatgatgggaaggacctaagaggtcattttcaaaacgttgtttacaacacaaagagatgtttcaagccaatacaaaaagatgtgagaatcagtatacagtcagttaccttcaagttatcaagtgaagctttaataaagagagcaaatc

SEQ ID NO: 65106 - DNA, 1927 bp, Arabidopsis thaliana landsberg
caatcccgcacccaacatccactactttctttatctttttctcctcctcttcatcattttcaatcacaatcatttacatggcatcaactcaacttcatatatataataattaaaaaggtacaataactgaataacacaccagagaaaaaaaaagaaatttctaaactatatacgttttcagtttaaaaatatgtattcattaagcttacaatcatctcttaatacaaatgtaagaaaaattattgttcataaaaattaaatgttagagatggcttgtggctaataaaccacctttcatggggtaacagagtactacaacactatttgactacaaaaagacaattatccctagtcatttctgtagacaataagatttttttttgtggtttaaaagattttaagagtcattttgttgtattattaactcttttatttgttcgttaaccatataacaaacagcgtatttaactcaagtgataatatcagagcaaaagattgaggaagctaaccagtaacaccggcgaaacggagagactcttcaatcattcggatctgagcttccttgtgaccagaatcagaaagttgaacagaagaatcagggtcataaaagccatgatgcatatgatctccccaaatctcttcccacaaacccgaagtttcattgtagaactccgctattccttttcttagcgcctcagtggatgtagcagcagccgccacagccacgtttccacgcgttgtcgtcatagagactgaggaggaggaggatggagaccgaaagagaagcgatgactttgagccgaaagaagagttggttcgataagggaggcttgtgagagaagagggtgctgctagagttgctttcatttattggacgttggagatacaaagaaacgtgacgaagtcagggattatttgattattgttacagtgtgactgtgtgagatcaaattttggatatataacattggaccatttttcttaactttagagccacaaaactttctgttgccacaggtcttggggaaagggccaatcgtctacatccacttatcactttgatttttctcctttttttttgtttaacttttctttttcttccatcattttagttttgtaatttagtgaaaagtcagtggcaaacaaatattgatagaagaagtgaagtaagcaaagagagcttaatatggtaattgtgacaactatcacatgcttgtaggactatgagcctcgtggacaccgttctattacggatgagtaggttagagaaagattaaaatggtaaagtacaaaagttaatctgactacccaactgtttgtccggtcaaaaatggattattcagaaaaaagaaaaaatatgttggaaacaatatattttttttttttggtagggtggaaacaattctttttttttgactgataaatagttgggtaatatatagatattgtttcctttgataattttcttttcttctaaccatgctcaccatttaaatccaaaaatgaagaaactattttctttcattattgacttttccttccccttcctcttcaacgttacttttaacaaaaccagtcaaaattttaaagtcacaattttagaaggaattttttttggatattgtggattagcatatcacacgcatcaatttcaaatggttgaatccatttagaaaaagaccaatctgcggcctaatactttataaaaactatataaattacaagttttaagaaaataaaaataaacatagatacctattattaatgttgtaagataaagtaataattgtatcacctactaatttataatatttgaaatcacatacaaacatagtaacgtgtttttatccacttgaagatttgtagatgtgcattacaaactcacagaagaggatttcgacaacatttattatgagttaatatgatg

SEQ ID NO: 65107 - DNA, 1753 bp, Arabidopsis thaliana landsberg
catgaacccaaacatccaaaaatcaatataaacactagatcgcaccggttttcataatatatacatcatcccaacacatttagacacaaattaggcgcacttcatgcagtaactagctctctagtgttgaatctaatcatatgttaaggatcaaattcagattttccaaacaaccatatattattaactccagtttctttaatcaaataagtccataattcaacagaactctttcggcttcaaatctcaaacactatatgactcatgatgaacgtataaaggtttgttccctgatcctaggagaaattacccgaatcgtccgcgattaagatgattgaaactaatatcagaaacatgtcacatcaaacaccgaattaaataataatcaacatgaagacctaagacaattatataccgttaaccaatcgcaaccaaattggtattatctagatcgtgcaacaatctaagaactcaatcataaagcttggcagaaatcgatcgactagtgagaaggaaacacacgaatatacctgaatagcgcttagtgtaccgagaagaagaagactccatagaagcagcgtcactgagctcgccatcttgtcgcaccgtgctaaagtgtttctccacagtcccttttttttttccttgtccaccgctatttctcaccaaagccacgtcaatatccaattaaattccgccacctgacttgtagcgtgtacaattgtaattgggcccggatcgttgtagaaccgtaatgggctaatgagtggtttggttacagcccattaatctttgtgaattctatgattctttattgttgttaattaagaaatgataataatagtaattcagagttggtaaccctaatggaagaaatggctcatggctggatcggatacccaaaagtcatttttaattcttagtcaaaaagactcaacatcaataccataagcatgtcacattactcttgttccagctaatattaatatggttacttaactttataagtggttagttaaatattaattgtcagaagtacaatccatattaaagccctaaataattaattaagcacgtttccatccatattaagaattcgatgacatttaaatactgtcaactttccttgggccagtcttccagtacattttattttgctacatcattgataatattttactattagtaaaaagaaagggtaaaaagggcgagattagtacttaacttttggcctaaaagatggatttggaaagacaacagacctgcagctgcaccaccaatatagccgaacactttatttgttgtcgctttgctattgcaacatatctaatgttatctgttttttttttcttttggccgacatctgaagtatttcaaaaattaaattgaatttcgcatttcttgttttttcctacataaaacatcatttaatagataattaaagaaattcaaccactgataaatagtgcaaaaatacaaattgttacaaagatcaaataatttgggggaaaaataattcccaagcatgctataaaataaaatggaaatatatgaattaattttactatgaataacaaaacaatatatttttacacttttggtctaaaagagacatcatgaataaccatgatgttatgttcaaaacagatccaaagctttcaaaactctacagtttggcccgccactcaatcctatcaacaagatattcaaacaccaacaagaaattatgacctttagctttcagagtgtaatc

SEQ ID NO: 65108 - DNA, 516 bp, Arabidopsis thaliana landsberg
cgctaggtactaaatgcttctctctcatatccattttggtatgaaaaaacctcatgattttttagtaattataccttctttgtcacctgtagccactcaaaagttccatttagaaggaggactaggattataacattttgtagaaactaatcgcaattagcactatagaaaacagatgatcaaatctagctttgtaggttatgatcaaaacacacttgtttctacaatctttataattgtaatgtgtaaagtaacatgtgtatatcatctgctagatttattcaacccttttcgaaaggtgttaattatttacaaaaaagagcgattttcagtctattgtcgtagtaaccatggtctcatcgctttccgcataagtacggtgtctttttctgtgtggtgtaggtgatgtttgtagcacgagatcacagggtcgggatttttgcaaccaacgaatagaagctagcgaagagctttctatgactattgatatggaccagaccaagcaccagtgtgggc

SEQ ID NO: 65109 - DNA, 268 bp, Arabidopsis thaliana landsberg
  unsure (1)..(268): unsure at all n locations
catgattctgaataaaaatgagagatctgatantatattttgaagcatctatactttgttgggtcgggttatatttatacatatcatgaccatcccatataaaaaaagatttgacaagagttatcaaattttaaaatggaggtaagcataatgcgataaatcttgtagtagaacgggacgctatatgcttaggtctaagtatctactatttgttcattgagattcggatactatacgtattttgccatgttaacagaatagttcccca

SEQ ID NO: 65110 - DNA, 526 bp, Arabidopsis thaliana landsberg
catacctattggtaatccacaaacatattggaactcaatgtaagctaggattcgaaaccagctttatcatttttgatgacagacaaattcatgtcaaatgtataggaaaaaagtgaaaaatgcaatcataagttaagcaaaagatagagagaaagaaaccattatccaagaaggagatcggatcagggtttaggaaacaaaacataggaaactgttgtttggtccgaaacaaaactcttgttgaagaaactcctttgaaggttctcactcttgacgaaactcctttgaaggttctcaaactacttctcagcttcactgtcgacggaaaaactgttgtgatccatggagatatattcgtgagggtaattggagtagaacctccattaccagtagaacacgaagaacccaaagctctcatctgcattttcacaaaacttggttaccaagccagatagtctcaaggataagtattataaaaaaaaaaactgtccccggtattagaggactaatcccttgattaatttgg

SEQ ID NO: 65111 - DNA, 1738 bp, Arabidopsis thaliana landsberg
acccgtcacgtgcgggctaaagtcatatccacttgttttggtctgtccacgtggtctctctttattcgtttcctctcatgtctctttcattttctcaatcaatttcccatttttttcatttaactcaaaacccatcactagctatgtgcgtatatcagatgtatgtcggttcgtaaatcgtaatacgcaaacgcaccatgtagttttaaacacaattttgtatttgtgattataaataacgtgaggtacattatattacacatatgagttatctttcattttctgaaaactatagcgcctatcaaagttatgaatttgaaagtgttagaccaggtattactattaatttgtttcatccaatttctgatatgattagattagttataggtcaaaaacgacgagtgtttttttggtaataaaacaaaaaaggctccaaaatcaataagtagcacaatagcaaattttccaccatgcactattcttcaacatatgcacatttggacatatatagatatcttgattattttttttatttttttgcttaatacacgtaaaacctataacatgtttggtcaatctgatccaccaaacaaactgttgatatctatgcagatttaaagatccgctatatatcaaaaccaaaccaatcgtcgtctacatatttttggagcgcaacaacattacatgttcacatagctatgttactatgtatgtggtttacaatgagttaaggcattggtgagtgcatgagaatgacgagacgtcgtgcatgcaaggttgttatggaacatggtatgcccattcactctttattatcagatatacgtaaatttatggcatagttttatatatgatacgtagctgtctaattgcttttattgattgacatgttcaccaacttcttgcttataactgcccacctgaaactgagaaatataaatttacatatatatatatatatatataatatttttgcattgatttgttagatattcaaaagttaaaagattattgcaaattaacctcaatggaaacatcgttataagtaaaattagtataccatgtcatatgggataaactaatatgatacgatattactaaaatatcgtgtcatggagtaacataacatgttatttgtttaaaatacgggtgaaatcaaaatctttttaatagactactagtgcataaatatatttcattgtttcgagtgtttgctctgtaaatttcgtcgtaccgggatcataatggttcccatcatggcatcatcccaataatttcagcatacgcagattccctatatatatatacgcagcagccacacttaaacatgaatttatgactaactaataaatctgactaagttttttcgttggtttgatatattgagtagtgcaaatttaactgtttttgtgagcaacttaaaagaagatcgtaaacctaactatgatgcataaataaagaaaaatattatttgtttttttttttggagagaggaaaatatgatttgttatgacttatgcatggaaattctttgtttttaatatataagtgatcttcccatatgtgttgctacgaaaatatccctttttcttttcttaattggtttatatttactttaacaaagtgttttgttgtactctataaaataagaatgttttagttcctttattaaatgtatcgcatctttttgttatgattaggcgcgctgttactaaaccctttttgacttttatttgta

SEQ ID NO: 65112 - DNA, 483 bp, Arabidopsis thaliana landsberg
tggcttctattgggtccagctatggttaacgagtttccacacgaacttatgatcttttcatctttgtgttcagcacggacgtgattgttgagatccttgtaatacccagtgtagtggcagtcaagtatggggcaagaacatggggtgaaaacacatacctgctcatgactaaaacggtttccataggaggtactcttcttgcacccgtatttggcatttagacacgagactctagatgcttctataaccttctccatagctctgcaacgaacattacctatcggttttgtacacgacgggcatctgttcctcactttggtgcagcacaaagtacaagccagatgaccattatcacactaaacacagaaccacaatagcttattacaaacagatttttgacaatatgaacaccatagaagctgtttgcatcagtgaaactctaaagtgtacttaatgacgttgaaccattcctactacaatgaa

SEQ ID NO: 65113 - DNA, 509 bp, Arabidopsis thaliana landsberg
  unsure (1)..(509): unsure at all n locations
ctatgctagcacttgagccaacattatatgattttttttatatgtttttgttgtatgacttgcgctcaaagaattctaagtgatattcacaaacactatacttctgttttagaaaaatattgactaaatgaatgtacaattgtcattcttactgttttttgcttgttctgttttggtgaacattttttttgcttgtttaattgtcattcattcaaaccattctaaccggtcagtttttccgaagaatgaagagttatattttttgttaatataatttatattttatctgactagtggttagataacttaggttagtagttgaatggcaagatttgcgttgtgcgttgaatgaagttgaaaatcgaaccgaaccaattagaccctacaaatacatcatcaggtcctttgaatatctaatagtttaccaatatctacagtatacgtgccaaacaaatttcagactagacgtccatctaaatgctcatgagccttcagntattccgcatgag

SEQ ID NO: 65114 - DNA, 711 bp, Arabidopsis thaliana landsberg
  unsure (1)..(711): unsure at all n locations
agcatctnggctcttgcaaacaaaatttagtgtattttttttacttctgcataaaaaaaaaaatctgataagttggcgtcaaaaataaaaataaataataattaatattagggccccttatattattccttttctaaagctccaagtacacatacatgatgattaggttgttaattttaaaatcttattgtccatttctcaagatctaatactaaatagtttcctggatccgtatcgttgggtaacgtgagagaataattagtttttgaagtcaaaaccctaaaattgaaaccaaagagatcaaacagtagatacagaaaaatagagaaaccttattataagcttttgcattatgtcatgtaagaaacactttagtgagacttgaacaatttttattattatcttctctgccattatgtgttggttgataaatatatagcaattggccctataattgatggatttgctgtagatttgctatggatttgatagcactcttcatcctaatcctcagttttgaacaaaaatgaaccaaaagaagacttcaaaaccctgtttcagattgaaatcttgttgacatcaatttgatccctaagaagagggaaagaataaatggtcaagtctcacctaagtgtaacaaacaaagaacaatcaaacaaatgccaatcattggcttgataaaggaaaacagaaagaaaacaaacttttctt

SEQ ID NO: 65115 - DNA, 561 bp, Arabidopsis thaliana landsberg
  unsure (1)..(561): unsure at all n locations
ccggtttctctatacactgagtctacttttctttcggcccacatatatttatttcaagctatttcattttaattcctctaccaattttgtctattttacagtcacctagtatcaatatcttagaggcggcgagaaacacgtgtcagagaacgcaagtgtggcatctgcgggtgtttgccgcgtggacattacaaccttaaaccaacgttgagatagaaagcaaaaaaagaaaaaacagaaacaaaatgataatgttgtctgatctatatcaaaaaatatgtatagggaagaatgggagtaacggagacaagtacgtacagagatctacatttnnnnnnnnnnnnnnnnnnnnnnnncttcgccaccgatgccatttgtctctccctttactctatcctgcaacatctccgtttctacaccaatcctgttgtacgtaaaaaacgaatctacattgtctttttccttgaattaacattgtatgtattttcgtggtcgatgcttgacgactttaatgttaaattgtaggaacaaaaatggattggttctggtttgtttatgggg

SEQ ID NO: 65116 - DNA, 2086 bp, Arabidopsis thaliana landsberg
ctgcttcttgttttctctttttactctcttctaataaaagaaagacaatattttacttctcttaacgcaaaattcagatgctctacactgttggtgacttggtgtgatctcttttttgaatgaataagtacttctttagttgattatttgttggttttggttaacctctttgtgaggtaatacaggaatgtcatcttgaaaaatactaaccaaaaaataaaaaatagagaatataaaaccttatccaaaagtagggagattgtgttatttaaaagggaaccacagaaaaaaataggcgaggaaagaccattaagccgttggccacacaatcagatatcataatggaaatacactccgatgactacttcttccttcctcctccctgcttctcctccctcagccgcctttctccggcggcgcttcttccgccactcctggctttcctctaagatccaccaccgtcttccccaaggtacattactactcttctctatttcacctgtcaccacttctctgatctttggattattctggaatcttcgttttatgtgatcttgttacaaaaagtttccattacgattccatgttttaacccttaagttcaaaattgtggtacaattctatctcataggtgttttgagttgaatgataccttctgattttctggagccctattgattgtatatctcccactctactcttatcttactatgcaactatcctgtctttctttacttgcttcagttatgaatgattccacgaggactgaagtatccattgataaatcagaagtagacaagcttgttgacaagattgattttggggaattatgcaacgattttgagtgcacaagtagtccgcaggtggaatccacagctagacaacttgttcgcgacattcttgaaatcagagaaggaaatcgtgcctttgcatgctatgcagtttccgttaaatataaggtacatttctctgtcacattgtattttacaatgtacattgcttttcagatagatatggttcgtcgaaaatttggcacttgttaatccactttgctcaaaatgggcacttgaatatatgtggctatgtgctaaagggagtagtatttatcttgcgtttagacatggtccagtaaaattgatttgctcgaacattacaacacttgtattccattatttctcttgtgatgttctgatattccttggcagtaagtaagtacatcgtgattgatagtgattgcaggatccggttagaagttttacaggtcgtgagaagtacaaaagaccaatgtggataactagtggattagagaatcctaccgtggtaagaactgatcacaaccttttaacatttgttttgcattttctaacccttttggttcacaagtaatgtgattcccttccccttatttgtagacggtacaagagatggtaatgttatcgaccagcgtcttgcgaattaaatggacagtgaaaggaaaaccaaaatctattcttgctgctgtaagtggagatttgatagtaaaagtcaaatctgaatttactcttaaccagattagtgggcaagtgtttgagcatgaagagtcttgggacttatcttcatcatcccctattgctcaagcctatttctggacatcccgccgcctctttgctgcttctgaatccgcaaaagatgtcgccgatgtcacaaaagacttgaccgccaatttgacaactcgaaaagaggacacagatatatatcgcgatccaaccgatccaaataaggtcagcttcatctaaacactattttatattgagtctatgtaaattgcagtattgaatatataaactaagagaatgttagttgtggtgatgcagtttttccaaagagacaacagctttgagagagatgtgtatcaaattgcactgtttctagccattgtctattttgttgtacagttcttgaagaacacaatctagttaccttctctcccatcctctataacagatatgtaaatgcctatatattgttgtatatgaactgtaaaaaaaaactgaccaagaaaagagatgtgttttgttcgtgttggaagaaaagactattcaaaatg

SEQ ID NO: 65117 - DNA, 357 bp, Arabidopsis thaliana landsberg
  unsure (1)..(357): unsure at all n locations
cgataaagcctctaaacgccaatcaactttntttaagatacctaacagtgaacctagtaaaacgtgagcagtgcttctcatttcttgaatttgaccagcggttaatgctttgggttttggagagggggacttattctcagctctcgaccttgctgataaagtgtcaaaaaaacacttatttctttcaagttgtagagatccaagcttaactgcttagccagagctcttcctacagaaattgggaagagcttgtaagaagtgtcacaagaaaccttctgcttatctcgaaaccagtttaaacaaataatatgatccacggtggagaccatgaaaggggctctccagagtaagatgcat

SEQ ID NO: 65118 - DNA, 371 bp, Arabidopsis thaliana landsberg
aaggcgtgaaattggtatcccagccttagtcccatctattattagatagcctctctttctggccagcgatcttgtttatgcgcctctcatcgtaggcaatgaaaagatcagacccacgcacatctggcgctcattgctattttaaggaaacagagaatgcctggtcagatccctcccgtccaaaggagcccttacaactctggtacacataagcgccgcgtagtaggattggtcgccactttcgcgcgcctaaggcccacccccggggtctagtactgcagtgcgaacacactcatttagggcctgacatccaaggcaccgagaaaatcgggctgctcgcttttgagacccggtcgcggcgctggtgagct

SEQ ID NO: 65119 - DNA, 1353 bp, Arabidopsis thaliana landsberg
tatcatcaataaatgaaaaatagttctctctatctatctataataataataataaaagcaacttctacctgggactgatattaactacgaagacctctcactctctcaatgggttgtataatagctgtcaaattatgatgtatttagtcacaagacaaaagactgattctgaacactaaagcctaattagggattagtctttactctttagtcatctgtttcatctttattattaaagtttgcaggagttgtagtagatggtgtgggggcaatatatgcagaacatgcatgcttccaaaatgtcctaactacgtcacttaaggttccatttttttctatctaaactaagaaatacttatgtatctattaatctacatctaattggttgtcaaaaaaaaatgtatcatagaagtctttggagcacataaataaaacatctggagattttctgaacataatgtgaggtcaagaatttgtgtgcaaaattacaattttcaggcatgagtggctctgattttgaccatttgaataaatttgtagcttgttataacctttacactcgtaaggaaaaaattatcaaaaaatattgatagtcgataaaattgaaaactctagatttatacaaatcaataaataaatttgaaaataattaaatgagaagtaaatgacattacttcacccaaaaagagtctagacgaaaaagacagacataaaaataagtccccttctatttgtttggagcataaacaaaaacagacacagtttcttctctctctctctctgtctctttccttttctcacgccgagatttctgcgactgctctaatcttacgaccttataagaaacgacgcttattttcactctgcttgagctcttcatcgtgtcacacagcacgatcttggacgtcgttttaagcgcaaaacaaaggaaaaagactgacgtttatacatactaaatactggtttggagttttgccttttggactcagaaaactcaaaagagagagagagagagagagagacatttctgtatcttatcgggttttgtgttgtcagaaagaagctcaaggacaaaaaaaaaagcaattatttttagggttcaaacgaagcaaaatttggaactttcagaagttgtgggtggtggcttcttgaacaataaagctttttcttagactcttcttccaatttgtgactctacctatctctctctccgtaagctctttctctctctctttattcgttctttctttatttgctctgtttctttactccatttttggcttaattacaccaaatttagtctgctaaaagctaatttcaagcataattacttatctctcctcttcttgttgc

SEQ ID NO: 65120 - DNA, 585 bp, Arabidopsis thaliana landsberg
ccattcacgcctaagtctttctttaattatcaatgatctttcaagttctggagacggaaccttcattttaaagctatatatgcgagcatctgatggaagttgatttgggataaggctaacatttgcatgccggcagatcaacgaatacaaagcaaacgttccacctgcaattcatttccaaaacttaaacctttaaaccttaaatgaacttcaatctacaccatataaagaggaagagatataccttcaccatcgtcattggcccaaagaacaaaatgtacatactttacaagaggaatcaatattaaagtgtatataaccaatgacaaggctccaataatatcttctttgtcgctaattggagatcttctgaacatgacagcgaaggtatacaatgggctagtttcaatatcaccaaatacaaccccaagtgtctgcaaagcaagtatgagtttctttcctataccagtgtcctgaaaaaacacattaccaagttcaacaacttaattagaacgaaaagtaaacaccatgaagaagaagaagaacattcacacacaaatgctaacctcgattccgtttttctga

SEQ ID NO: 65121 - DNA, 901 bp, Arabidopsis thaliana landsberg
tgatgacacttaaagaatcttctagttcataatcccattattggaaacggagtccaattttgccatacaacacggtcgtgatggcaaattggcaacaccgcatggtccgcatgccgatgaaggtgtcggcatcctattgacgatctctatatttaatacactttgatttttttttaaaataagtaaatgaattagttctaaagacatcgggctgtcgtgtgagccaagtaaattaaagtatttcataaattattctattttagttatttacaaacacacgcgtgtgcacatgtatttggcaaattatttgagtcaaacaacatcttcctatcacaattctgaacttctttatactcgtgattaatttcttatatttttgtcttcactgttttagtccacatgttaaattataagaacttcatacacgaaaactaaacaattaaaaaaaaaaaaaaaaactaaacaattagaataatttcaaacgaaataaaaagtcaatacaattagtcttgtaagagcgatgatcaaatagattgaaagactataataatgctctaagtttattttaaaattttcaaccaattttatctaccatttaaaaggttgacaaaaaaaaaatgttgactaaaacaagtcttgatacaattatttgaataggctgaatgatgataccaatcaaacttacatttaataaaatctgaacattttaaaaaataaaaataaatgaaagagaattccatgaatgatgatgagatagagccatagagagactgagagagagagatgtggagaaaaatctaactttggtcgacgaaaggcggctaagttggttattgacatttagctattttttttatgaatcccgtcatacatcgatcgatgatagtgactcactctacgt

SEQ ID NO: 65122 - DNA, 494 bp, Arabidopsis thaliana landsberg
tttttgtgtgatagtttatgtgaacgaacagatcactaggagctgtgtggagtaacagaattcaagtggctttcctttgcttgcggaagtaaatgaagtatagattacgaaaattaaatttctaacaaataataataattcacgattacagaatggtccactatataataacgtgtacgatccaatcatccatctctgcattattattttctttgtaaaaaaaaaaatatttgagtatcccaattgtttcctctatctataaacaaatccaacaacaaattaacatttttctttaaaaaaaataataataatgccccgatgactcctcaaattttcatcatagacgccgttgaggtcctaacgcggcaacaggtgaaaaaagaccgccgttaatcttcaccgtccactaaccctttcttcgcttgatagttgacttttcctcaaactcagtcaacgttaagaagtcgtcactgagacttgatcagccggtaagt

SEQ ID NO: 65123 - DNA, 143 bp, Arabidopsis thaliana landsberg
cagcaaaacattaaactaatcgttcttttttgtttgatgggatcattcttgaatggagtacgagttgctctgctttatgctttgactcgagtgactgatggactctcttaatcaccattatccttctatgctgcaattttatg

SEQ ID NO: 65124 - DNA, 372 bp, Arabidopsis thaliana landsberg
  unsure (1)..(372): unsure at all n locations
ccaaccanttaaancagaaccacccccaacgaagaagaagaaagaaagggaaccacccanaagaaaggtttcgagcagaagaccccccggcggaaggcggggaaccccaaagcccccgacccggaaaacgcacaaggggagaaggacagacccgcaacacgggaaccaaaggaaaaaacccgaggcacaaaacaagaagacacaaaggaagcaagaaaggccgcagcaaacgcggacacacgacagaagggcaggggcacaacacagcagaaaccccaccagcaaaagcgaagaaggaggaccaaaacacgagagagccaccaggccaaccaaaaacggcgagaaaaaaaaaaacgaaaaacaaaacgcacc

SEQ ID NO: 65125 - DNA, 1666 bp, Arabidopsis thaliana landsberg
  unsure (1)..(1666): unsure at all n locations
ggattaattttggttgggtttgtttgtttgacatcaacatttttttaggatttaggtctcattttcgccactccataagtttgcttatctcatggccaaaacaaaacctcatttaatttgtgtagaacctgacacctgttattggataaaatcatcttcatggtgaagtttggttatctgattatatcatcattaaaccagtccgatcttggaaagaaaaatgcttttgattgatgtaaaataatgcctttgattgaaacactttaatgaataatagtataaaatatccttaaaataaaataaaacaaaatatgtgtctctttttggggtatttgcatcaaaagaaacaaacaatatgtaattattggtttgacatcgggtctaatgttttgtaaaggctactttttaaatgcaaacatcacaaaggacaactaacaaatggaggatttactgctgtttgcgggtgaaattctaaggtcagttcatcatcacattagagttcctgattcggattttctttttacgctagattctaaatttaaatagttggaacatgcatggttgtatttgtacgctaatcttatgttgtaatgacaaaaagtagtcacattattctatatattgtgacaaaacagcacgttatctttatctatgtcatgatacattacaagatttctaaatgaaaaataaaatgaaaaagatttctaactgttctttataatctatatgaacatataacgatacatttcgataggctcatagtacttttcgagggaaagctattagcatttggaacagttaagatataaatattagatttttgaaggatatgtagttccacgttatctatatggtttgcatactcgtcaagtggaccatttttaaaagctccactaaaattcaaatatttgtaatcgcatttcacgaatatatgaaaacatcttttgacaaagcattatccgcaagagttactaatggtaaattagaaaaggtatttggtgggtgtcttttggttaaagagatggagtggcaagcactaagcacttgattgaaatggtaaaggaatgccttaaaagcgatgaaaggtgagaaagtagaaaacccttttttctataagaaagctaccttacgtaagatggagaatttgagatgcatatttaatgaataaaccccgtacttattcaatgttctaactgcctagctagtcttcaatagccaaggacacagaagaagttattgacgattggatcaatcacattatttacaaattgttgttagtgttggttttgtttggaagtgtaactaaacataaattccaagtgttttgaaggtttaattatcgttcggtactcgataaataaaatgaaaagaaacaaagagtatccaagagaggtgatttatctaatagaagattcattttttgggattgtgttcttcattgtgactttctaagttttctgttccgtagttttcgctccaagacataagcgacaatcctcttgtcttctcagtttctgtctctcgattgccacaatttcaacacaactaacttctaagagtcttgacacttcttaccatgcacatagtaagttactaatttagtatccattcatgaatnngttgtattagtaaatcgatttttntaatggatggatacgcacttata

SEQ ID NO: 65126 - DNA, 475 bp, Arabidopsis thaliana landsberg
  unsure (1)..(475): unsure at all n locations
cctctatatgtnaataagacgaatttcatgatattgttcttgagcatagcgagacgaggtatataatggtgggaatatattttaaaagagttgcatgagacaaaaacaaaatggaaattgtcatgtcattaatgactgaccaatttccgtagctttaactagaaagcttcaaatttgaagtatatactttatcttcatttttcgtgcatgtatttctagtagattttgaattgaatagtcatatagcttttcatcataaaacacaccagaaataagaagtttaataatcaataaaagaaaacaaatgagttagggagataatttgggtgaaagtctatttcgacaagaacactcaagtgtgatagttttggataaacatataatttttatcctagtatgctgcaactgtatgcaaaaagtataaaattcatgttaaagtactatatactcttgctagaaaagaaaaaacaggtaa

SEQ ID NO: 65127 - DNA, 130 bp, Arabidopsis thaliana landsberg
gagaaaggcgcttggcctttctggaggagatcggtctcaccctgtaacgccgcccggcctgccgggtttggggggggtggctgttgaaacagggaagcacacagaccccggaccaagaggacaacaaagc

SEQ ID NO: 65128 - DNA, 1572 bp, Arabidopsis thaliana landsberg
aagtgatatgacaactgtcaattttagttgagaaccattttctatttgagaatcatctcattcacatttcacggtatattaaaagaatacgactatgaaaaatcaaatgttagagaagtagatcagcaaaatataaaaatgagatagtaagtaggtcgtgggcatataaataagcgtccttctgttttctttgtcatcatcaattcattaccctcaacaatggaaccaactactccctattcccatgaggatgacgttgactccacccacagctcgaattctactgcgagtgacggtaatatagagctaatatataatttacgttgtgatcctgtgtgatgaaagagtttcattttattcctgatttagtagcacagtatattttagagttacgtacgttaacatttgatttttggtttatgcatttatatatgttcatgaaaacagaaaataaaagcctaaagatattttactgcgagatctaagctcgaatgttgtgtagatgttggatgcattttataaaaaagtagtagtttttggtgtcagagaaaatagttggatgaatatcagaaatcatctcttcttgaaaagtgttaaaatacgaaatttgtattaatttccttgagtgctatatttgttgtattgtacgtaggaaccgagagagaagacaacaacaataatgaatctcaagttgtacatgaagagacgagaacgtcaagaagtcccaatgaagctttggatgagataaggaggcaacagactcataatctcttctgtcctaaatgtaaaactaacatcaccaaaaatgctgaactcgttgtaaagaatcaagagaccgattcgtacaaaacaaagccttacgtactttgggttcccatcgttatctcgcccttcgagttccctacccttcatctcttattgtcttttctcacaggtaaaccatttacatgtacatatacatactgttttgtgtatatgtcaatgatgatgaatacagtttttttttttttttcttcttgatcaatatgttgaagacactttgatttctttaaggtttgattgattgattattgcttacaggactatggaagaaactaaaggcacttgtcgcaaactgtttaccaaggcggctcagtctcacttctctacgtctgcggttcctattagttgcggttctactattgctctcagtcattgttctatggtcctctcatcccccttcgccattgccagtgccgccttctcctttgccaccaccaggaccgccttctccttcgccattgccagagcctccttctccttccccacagccagataaaaaaattcgttggctcatacatttgccgagtatcaagtaccttttcgtattctcgttattgttcattgccattctgactcttccctggccttccatttcccctatcatcaataaacttctagcagcaattaaaacatgtaggggaattgtaatcccttttgttcccttttccttttgccacatctttaccaaagacttattaacactatatttctatatattgcagggagaacaagagagagtcgacaccctaa

SEQ ID NO: 65129 - DNA, 739 bp, Arabidopsis thaliana landsberg
ttgaaccgtggcagactctattgagaggtgagttcattggttcagattctttatgcttttgctcgttcctcatctcttattacatcttagatgttttaaggacacagaaaattgcgaagttccatgatgttataaaagagaaaaaggacatgcatagtaaaaataggatagctaagagactaaattagactgatcactgtcttttccagctcaaacttaaaaaaactcacaaaactttttcatcaagtgtaaaacaaaagcttgcataacttaaggggtcttccatgaatgttgtttttaccctttctgttgtgctccttcatcatgtcgagaaagatagccagttcttccttccctaacagcaagcaaatgaaaattctttctgaagttttgatttccaaaatctttaggcttggacaagcagttcctcgtgtggcgagtcaagctgaaggtaatagcagaaatcaagcagcttctcctaggaatctggcatcatttgcagatgagtacagaaaacttgcgactgattgcctaaaggttcttcgtgttgagatgcaattggaaacagtcttttatcttcaggtatgtgatggatcttccctttgtgaggaaagtggcatgactatgagaattctatttctggcctgtaaaacttacgaaaatactatgggtgttaaaaaggaaatgaccgaataggggaattttttgggagggatgaagggatgcttgaaagaacccc

SEQ ID NO: 65130 - DNA, 478 bp, Arabidopsis thaliana landsberg
ggtcccgttgcaatctacggcttggtgagaaactacgcgatgaatcttgtaccgatttgatatccattgtctgagatgtgttgtgttgctgcttcttagggtggtggaacagctgcaagattgatgcttgagttgtggcctacaatgcatctggaaggttgggaaattgatgaaattgtatgtaagaagaagctatcttgactgacccgattaacattttgccgcgtttcgacggaatcttgagttcactgtgtttatggaacagtagctgattgagaaagcaagagactatctagggttgtctgagctagagaaaccgacatcgaaaggcgggagactttctgttcatgtagatgatgctatgtctccttctcaagatgtttcaggaagatatgctggtgagatatcaatatcaatatcaatatatgcttgcctattctggttcttattctgagctcttatgtctatataaggatca

SEQ ID NO: 65131 - DNA, 1505 bp, Arabidopsis thaliana landsberg
aaccttggacataaaacatcttttgctttgttttgtcaatctcttatgcttacactacttgatactcattactttgaggaagagcgccaatcctacaaaaaaagtaagaaatatttattgttacaaaggtgattcgaattcgagtgataatttcacaacgacgcttacaagaatagctagatttcatgtattttccgattaccaatttttttttgtatcaacaacaacatgcatatgagtttgaacttcgacggtatcacatcagctcttgcacactagcacaaatcactaaattacgtttttagtcaattaaaaataataaaacatatacaaatatgaccacaatcataatactacaattgaatggcgatgatataaattcaatttttgtattagtaatacggtttgaaaatctacattcgaaatgtgaaacgtacaatgccatcattatgcaaaaaaaaaaaacaactttcaaacattattctatatgaaatggatgaattggtaaaaatagaattcattacatcacctaaagattaatcacccgataatataaaaacagaattctaaacaagatttccctgaaatttatagtttaatatattttcttatgaacataatgaatttctttatttattctcatttatgaagatgatataaaagtttgaacaataatcacaacacaacacataaaaagtaaatctcctaatcaccaaaaactataaaaatgaaatgtatgtttttgtagttgaaaaaagggtggtggttggctttagaaattggacttttaacctaaatgtttctctacaatacaacttccaaatcataaccgttatttaatattacacctagtcttcatcaaataatcaaaatcacaaaataatcaaatatcaaaaacaagttgttatagtttttaatcaaaataattatgacatagcatagattatagaatatctcgttcaaataatgatgtcaggtttacatcaatcaaactgaattttctcgagaagcatattttgaaaattaaaatttattcgcagaaaaagaagggaaaggaatctactattatttactgtatattatataaagaggaaaataaaataggtaaataaatttccttttataattgctttagattgcggttgtaccacggctctgctcttgcttttaagaacttgccggtactaaatttcatatactccaattaaaagctagctcgaaaccccaaatgttattttatttttctatataataataatcatacattataaaaaaaaatcatatcattatttaaaaatagaattttatttttctttcttcttcttcaattattatgacactcccgtgttcctaatcttttctcttattcttctctttcttctcatcttacaaaatcttgcaaatcaattttaatgaagagagagcacaaccaccgtgaatcatccgccggagaaggtgggagttcatcaatgacgatggtgattaaagaagaagctgccggagtt

SEQ ID NO: 65132 - DNA, 540 bp, Arabidopsis thaliana landsberg
  unsure (1)..(540): unsure at all n locations
acgcaccggcgaactggtcggtgcgctccacgcgttcgttgtattttccgaacgcctcggcatacgccacgaagtcggggttatgcagtgtggtggccgacagccgccccgggtagtggcgttcctggtgcatgcgtatggtgccaaacatgccgttgtcgatcaggatcacgataatgggcaactggtgctgcacggcggtggcgaattcctggccgtgcatnnnnnnnnnnnnnnnnnnnnnnnngcacaccacggtcttgtcggggtggatgcgtttcgcgccgaccgcggcgggcaggccgtaccccatcgagcccgaggtgggcgccagttgcgtgccgtagcgctggaagcggtagaagcgatgcagccaggtcgcgtagttgcccgcgccgttggtcatgatggcatcgtcgggtaaatgcgtgttcaggtaatgcatgacctgncccatttgcagcgtgcccgggtgctggatgcgttcgggatcgctccacgccaggtagctttggcgcatgttttgcaggctttgggcac

SEQ ID NO: 65133 - DNA, 794 bp, Arabidopsis thaliana landsberg
tatttatttatgccttaaattttaaatactattctaactaatgattactatgtgggatttttattttgtggttgggggggacgatttggtcatagtagtgaacaattatttgtttaatataaaatgctaagcttgttttgacgaaacagtttccaattgccttatagtattatatcaaatgaaaagagaaagtcaaattacaatcgttaatgtgtaaatcatataggtttgagaatgattatagcttttaatatatatatatatatagataattaaaagaaaattttgtattgacatctaaggtggccaaaaacatttaaagaatgtagtcaactaggtagattgtttataaaaagttagataagttcttccaaaaattggttctatctttgataaataatgcttaagtctcgtatttcttaaaattacctcactaatgttcacatatcgagtatctaaagtatctagtggaaattttgtccacatatagagcttttgaagtaggtttagcagactaatcattcgttgcatgccagtcaaatatgaaatatacacatgataaggatggcacaatgatgtctctgcttactttttcctcatgaaatgtgctcatcgtgtcttgtcagttgtcattagttatttatgctcaaccactcatgcatgtgtttataaacgttaatgtgtttataatattttttaatagatttgatttaagaggaaaactactattcaaaacattttatagtttcattgataagtataactagccaataagttattccccgtaattttag

SEQ ID NO: 65134 - DNA, 986 bp, Arabidopsis thaliana landsberg
gctctcagttaacaccatttttttataacgagaaaaatacgatccataattcaagcattccaaaggctgtcttaccttcagccataacttgatttattatttcatccttttctttcaaaagggccgcagcatcacttttcttgttctgttctcttctaagtgtatcccgctctttggtgagagcataaacctacaaagataagcactgtgaaggcatatatatatataatgaaaagaagagaattgaaagagaagaatgataaaagatataataccttcctctcaagagttgcaactctctgatggtattcttctcgcaaagactcgacttcagcttcgttagatttcctctgttccagagcagaggttattagaatgtagattcaaaatcattccaaatgaaaggaagatgggcggaagactggggaaaaaagtaatccttcatctaatatcccatattccgcatactctattgtaccttcaaatcctcagtgacagattttagctgctcattttcatgcatcaacttcgcaatctcatcagcctttgcctgtaaacaaatccccagaaaattggtatagaagcaccatatccgtagcaaaacctttcatgaggatctaaagatgtacctgagcttgccttgcagcaccttgcagggcattttccaacatttttatttcctttttggtcttctctaattccagaataacatcagcagagtcggaaacatttgtcgcagagcttgaacgctggctttcatttaactcactagtatccagtcttgaatctatttcacgagaaacagaatccacaattctctccgaaatttcatctgacgacgatctctttggtatagaagactcgtaaggagaaccatcagactcaaaaattaaagccggatgagcaacaggggactccatcctatttacatgattgatatctggtgaaacttcaaaatttttagacgaggttctcccgtccagagt

SEQ ID NO: 65135 - DNA, 519 bp, Arabidopsis thaliana landsberg
  unsure (1)..(519): unsure at all n locations
tatgtgatgatgcatccaaatatgttttgtcttggatcagaagagatggaatgagctccccttcatactttatatataaaatgattgacataatttctgccactttctcctcacccataactttagcctctttttttaaccgcgaaagttccaaacctttagtccataatctctttcggttttcgtaaccagctttttagtccattctaatttaaagaatgcctcttcgtcccaatgacttaagactttttctttcatttgctttcatcctcttctcctatcttagctactaatttaacttccattgtggtaaaactttttggaggccaaaatcttgttatcaatttgtatgtatggactttcgaatcgatatatgggtgcnnnnnnnnnnnnnnnnnnnnnnnnnnnactcaaaattgttaaatgtgaaccataccaaagactcttaccagggttaatcttttcaaagttcaatactttctttttcctcaccaaggtcaatattctctcacccctttt

SEQ ID NO: 65136 - DNA, 343 bp, Arabidopsis thaliana landsberg
aactatacgactttatagggtatgggtatggtgttcacgttgcaggaggaagcaccgtatgagttgagggagtggttccaatatctatcttaagaggagcacacccttccgcagtatctacaccaatgcccacttccagatcgtatattttaagggtatccagttttgtaattgaatcctggcatccatgcgaatcagtggtaactaatgatactgtataaataccattttgctggtaaaggtgactaggcgtggttaaatggcttgtattgttagcactggtaatatcaccgaatgtccatgaataacctgcaagtgtagcgggtgtgggatgaaacgtaat

SEQ ID NO: 65137 - DNA, 189 bp, Arabidopsis thaliana landsberg
  unsure (1)..(189): unsure at all n locations
aagaaaaacgccaaaaccccaaccaggacaagccaggccnccccagaaaagcgcccgaaacgcnggaagaagacaacgaagccgcgcacacggacaacgcgcacccaccaaaagaaacccccggccaagaaagggaagcgaaaaaggccaaagcgaagaaacccganccncgggccacacccggcaccg

SEQ ID NO: 65138 - DNA, 542 bp, Arabidopsis thaliana landsberg
  unsure (1)..(542): unsure at all n locations
cctgcttcccctgcgngccgaagatggcgcggcgagttctgggctggccggccgacaggcccgccaccttccatggcggcctgaccttcggcggcgggccgatcggcaactacatgacccatgcggtggtcgcgatggtccaggccctgcgcaagggcggcggcaagggcctgctgttcggcaacggcgggcactgcacccacaaccacaccatcgtcatcagccgcgaggcgccgcccgagaacctgctgggcctagactacgactacaacgccgaggccgacgccgcgcgcggctccattccgcccatgtcggacacctatgaggggaccgtggaggtcgaaacctacacggtcatctatgaccgctcgggcaatccgaccttcggggtcgtgatgtcacgagcgcctgacggcgtcagggtcgtggccaaggtcgcggcggacgacgcccgtgcgatcgccttccttaccaatggcgaggccgagccggtcgggtcttctggcgcgaccaggcgatcgggcgatacgctctattggacg

SEQ ID NO: 65139 - DNA, 308 bp, Arabidopsis thaliana landsberg
tggagaccccgcccgtataggggtccgatgggacacgccgtccaatgcacaccatttgtttaccggccgccccctctccaggttaggctccgacctcttgaactgcaacaactgaaatatacccttttggaggtggcattaccgctgctgctgggcccggacttgccctgcaatggaccttggttgggggacgaagattgtactccgtacaattaccagacttggctgagcccagtacttgcatctatcggcactccctcctcgtgtcatgattgagaccgtagcgcgcctgctgtcgtccttggatg

SEQ ID NO: 65140 - DNA, 252 bp, Arabidopsis thaliana landsberg
ccgtaaggggataatatagccctaagcaagtttcatcgtcggcgtgtatcgcatatactcaatcattttatatggagaaaactcgaaacaacacatctgacgtcaagagagcgtattatcttgatgacgatggaatctacattacaatggaaggcgcggctgaccgaactgctatagcgaattatgtattaggcagggattacttctaccaagcttaatgctgcttgtttctagcgctggtcatggatctgt

SEQ ID NO: 65141 - DNA, 634 bp, Arabidopsis thaliana landsberg
  unsure (1)..(634): unsure at all n locations
cctctgttctgtttttgtttctgttgcatttgcatacataattaagccaacacgagactcaagtagagagatagggaaagagataagagcgactctgttttgttgatcaaaatccttttttttttgtttgagggctgaatttgtttgttgatggtcatctaaatttgtaacctttatctgttttattgagttgtgaaattcagagaaaaaataaatgaagttttgtaagaagtatgaagagtacatgcaaggacagaaggagaagaagaatcttcctggtgttgggtttaagaaactcaagaagattctcaagagatgcaggagaaatcatgttccttctagaatttcttttactgatgcaatcaaccacaattgttctcgtgaatgcccaggtactgttcgacataattcccctgtgaatgaatcatcatcccctgcttttctccttttggtttgagaattcaatattgattttgtagtttgtgatgggacttttttcccggagcttctcaaggaaatggaagatgttgttggatggtttaacgagcatgctcagaagcttcttgagcttcatttagcttctggttttacaaagtgtcttacttggctcanaagcaacagtcgaaaaaaggac

SEQ ID NO: 65142 - DNA, 2123 bp, Arabidopsis thaliana landsberg
gcgaaattttttatgtgggcatgcggcagaaacagatacattgtttgcaaaataattaaaggctgaccaatataacgtaaataaaaaaactccaaggctacacacaagagtaattgtccacttacatatgaaacagcaactccaaggatacacacaagagtaattgtccacttacgtacaaactgatgttatgaattatggaaaagcaagcaatctccaaactctttcctcatactctcatgttcagaaagaaggaagttgtttggttaggtcatttgtacacaagtaatcagactggacgtagctggaaacaaagtatatggcctactatatcacataagaagaaactgtttggttgttttctatcttttggcaagaagaacacccagagatggaatccagttgggaatctaaatcataattaagcacctctattaacggtctgcaaatgctcataagcatccgattcatcttagggaacaaacaatgtaactgttgttgtttcaaaacaagactggagagtttaattaccacctatttaccatcctagagatagatagaaccaaaacataatgaactttgtttggtaaacaaaacagctgcaccttaatgaatgacgtgaacatgttccctaataagtatctcctcctcctcctccttggtcgtggtcgtcgtgaaactctttgaggacattgagaatctgagcttccattctcctgacacgagcaagcaatcggttgcaggatctgaggtaacccttgacgttgtccttttggcatttatcaatgtaaacctccatgtccctgagaatctccatgagctcatcaaccacctgagaatactccatgacccgaccagggtctctctcaaccacctcctccaattctctcctggcagtttctaaccactcggcggataaacgaatccgggctttcaaggagtcgtagctgtcggagtcgaaaacgtccaagagtttcaagacggtacctggcttgattttgtagaagtgaagagctttaacgtaaccaggcttgctctccaaaggaagctctttgatagcgccttcttcttccaaatcgaggtggagatcaacgggggaggtgatgataggagggtattggtgtagacggaagaagaaccaggcggaagcagcgacggcgatggtggggatgatgaagtggccgccgccgccgaattgaggaaggggatgtttaacaggaggagaaggaggttcagaggaggagggagaagtgatggcgaagagggagatagggttttgaaggcttgaaggtctgtaatggtgaaagtgggggatgatgctgctgtgatgcatctggttacagtaatatgctttcactaaactccccatttctctctttctctgttgttgtttcgtcaaattttgatgaaccctaaacccccaatttcatcgagcccattttcgatttcgccaacagatttcgcccgtcggaatacctttttcttccttcaaagttctaaattgggcgactgcgatttttgttgattaatcgggaaagaaataaaaaagagagtagagaaagaatctgattaatgggctcatcaagcccagttaaaatgttaaaacttaggacacaaattttaggccttttaaagcccattattaaatcatttaatacgtttggttaacatacatatgagagatgaggagactaattattatttacttctcattctcaaatgaggtttatcaacttaattaccagtaccaaaatgtttcttgaaagtgagaaacatgcatctctcttctgtaataaagagatactacaagaagaaggtcaaaacacatataataaacaaggtcaacatgtgcagtctgcaccgaccttagttttacatcctaattattattagtgatactatgtgttttttatttcttaattcaactttgattaaatctataatcttaatctaattattcttttgagatatgaacttattacgctgaaaccagtatcatgcagccctactaattggtatatgcatctaatacagtattatcagtacgtaatcactaatgttttgtaatatggtaaaaaaattatataatctcaatatctcgagaaatattaacatttgtttac

SEQ ID NO: 65143 - DNA, 1627 bp, Arabidopsis thaliana landsberg
ctcctgaaaattgccaaaggaatttgtgctattttaaaacatagaacattaaactgctaaagttgtggccttattcttgtcacatttggctcgtgcaactaggcgttgaagcttgaagaatttggggtggaaggctcagatgctgaaaatgtttgttacttacgagatctagctgatgcaaataggcttgccactgtgattcaatcaagctccaacgggaatgcggttgttatcggcggtggctatatcggtatggagtgtgctgcatctttagtgatcaacaaaatcaatgtgacgatggttttcccagaggctcactgcagtaagttctctcgattattactaaacttacgtgtacgagagaaaggttgtgtatttagcttgacctttttagtttcttatgacagtggcacgtctctttacgcccaagattgcaagtttgtatgaagactactacagggctaaaggcgtaaaatttataaaaggaacggttttgacatcatttgagtttgactcgaacaaaaaggtaagatcgtttcttttagcttgagattcaactcgaaaaatgtctggttcgttgcatctatgtatacaactaaggatggcaagaatcagtagaaccacaaatacttctggtccagtactcaaactatgaaatcttgagccttgttcaacgtatttgtttattgatatgaggttttttggttttcgatttacaggttactgcagttaatctcaaagacgggagccacttaccagccgacttggttgtggttggtatcgggatacgaccaaacacaagcttgtttgaaggacagttaacaatagagaaaggagggataaaagtgaacagcagaatgcagtcaagtgacagctcagtgtatgcaataggcgatgtagctacatttccagtgaaactatttggcgaaatgaggaggcttgagcacgtggactcagctaggaaatctgcgcgacacgcagtttcagccatcatggatccaataaagaccggagactttgattacttaccatttttctactcaagggtcttcgcattctcatggcaattctatggagaccctacaggtgatgttgtgcactttggagagtatgaagacgggaaatcatttggagcgtattgggttaaaaagggtcaccttgttggatcttttcttgaaggaggcactaaagaagaatatgaaactatctcaaaggcgacacaattgaaaccagctgtgactattgatttggaagaattggaaagagaaggactcgggtttgctcacacggttgtgagtcagcagaaagttcctgaagttaaggatattccgagcgctgagatggtgaagcaatctgcaagtgtggtcatgataaagaagcctttgtatgtatggcacgcagctaccggagtcgttgtggctgcatctgtggctgcgttcgcgttttggtatgggaggagacgccgtagatggtgaggaaaaaaaaaactcttcaagtgttggattcattggaaatggaacttgctgttgtttgtagcattggtgggagaaatatagaagggagagtccaaactactcaatgtgattacattggtatacgattattatatgcttcttttaaaatgcct

SEQ ID NO: 65144 - DNA, 225 bp, Arabidopsis thaliana landsberg
ggaacggatagcagagatcgcctgaaataaccaattaaacaaggcctatatgaagggaacacgaggagtcgaacggcaaaaaaacccccagggacattaaaaacccacgagatagaattgaaacccccccacacattaactgcgtagcgatctaaacgattcaatcccagagaagtgaccaaagttgcctaaccaatgtgcgcgatccaaagttcataacgcaga

SEQ ID NO: 65145 - DNA, 401 bp, Arabidopsis thaliana landsberg
gttatcattttttataaataatcaaataagttcattagattactaatttcaaagaaaataaacaataacatctaaccaatcaaaagagaaacagaatcgtccggttgaaatgtaaagtgggtgaaaattacttcactttttttttgttcaacgggtgaaaatgacttgaaattttaaaataaaaataaaacaaaagtgagatctccgaaacccatttgcattttttcttcttctttttttgttgtagggtaaaccatttgcatcttccttgagtactagtccatcttttggttggcccttaataaaataaattgaataatcggaattaattaacgggctaatatttaatcgcgatttgaaagctaattaattattgatctaattgactttttctatagtct

SEQ ID NO: 65146 - DNA, 584 bp, Arabidopsis thaliana landsberg
  unsure (1)..(584): unsure at all n locations
catgccaagccttcgaatagattcttcgctccgctcataatgatataaactgaatcatcctaaaagccccatggccgggttggctcaattgatcccatcaatagcagcagaaataatgccacccgcgtaaccggcaccttcagcgcatgggtacaaaccagctacctgcgggtgctgcagcgtttccttgtcgcggggtattttaacgggggatgaggtgcgcgactccacccctaccaaaatagcctcattagtataataccccttcatttttttaccgaatgccggcaaggccttccgcaggcgttcgttaatacgggcaggcaacacattttgcaattctacacttttggtgccgggcagatacgagtttttaggcagatcgaccgaaagccgtctttccacaaaatcaaccatacgctgtgcggnggcaaccaaattaccgccgccagccgcgaggccagttgttctatctgctgctgaaaagcaacagtttaaacggatcattattttttcggctacatcttccaggtaatttcactaccgtacccgaatagcataggattattttgttagagggactc

SEQ ID NO: 65147 - DNA, 260 bp, Arabidopsis thaliana landsberg
tttgtgacatgccacgtcccatccaaggtgcgcgcaggtcacctggttatttagtctatatttgactcttgctgtccgatttcttacattggcttgactgtgttccttggacaaacatctttacacagtatagatagaggacctttgggtgtatgctgcaggtccatgcttcaattgagtaccctcgccagggccccaccaaatctgcacttgatcatggaccctgtttgggccacgtctacctccatcgagatagtgca

SEQ ID NO: 65148 - DNA, 394 bp, Arabidopsis thaliana landsberg
ctgtattttaaaatgaacaattctcttcatattcgggaatttatattgttaagtttaatttctctggccgacaagaaaaacacaaatcttagttgcacaaatcttaatcactataaacaatcatacgaacataaatattcttcactaacactcaattatctctagaaagtgtgcttttacagagacttagtgggacgacatatataccgttttcttgattactttaaagactaatcaaatttaaatccgttgactctagtccaccattttttagtttgatatagcggtcaatttttccttttatttaaaatttatgtaataataaactaagaaagaggctgtggtatattatttctaaactattcttgcattaacacagaaaaacaattctatt

SEQ ID NO: 65149 - DNA, 436 bp, Arabidopsis thaliana landsberg
  unsure (1)..(436): unsure at all n locations
gagattctggggactggaccatttagcgactaacatcccctcccctgtgacgaataaatagcaacattaacggctgtccattgagggcttcggttctttctctggagaggacgtttacgtcacatgtaagaccagaggagaacagtgactatagatagggattaagctataagaaatataactagctggaactaacacaaaaaaaattaagagtcttggaccagtaacaactgaaacaattgtctcctaatcctacaccagtgaatatactgcaattgccgcgnnnnnnnnnnnnnnnnnnnnnnnnnnnnnnnnnnnnnnnnnnnnnnnnnnnnnnnnnnnnnnnnnnnnnnnnnnnnnnnnnnnnnnnnnnnnnnnnnnnnnnnnnnnnnnnnnnnnnnnnnnnnnnnnnnnnnnnnnnnnnnnnnnnnnnnnn

SEQ ID NO: 65150 - DNA, 857 bp, Arabidopsis thaliana landsberg
ggcttgtctctgtttcgtgtgcaatagatccctgttacacaaaccacaacgttaatgttggttcttctctcaaatgaaacatcagaattagaaagaaagaagaaaactcacattgcgtcagtgatgaaaaacatatccaaaactcttccatctggtgttgtcatgactttgactctttgtattgtaaactctagctctgtcaaaactttagtaacatctacgaatcaccaaaaaaacacaaacttttaatcaaccatataaagaaaacaccaagcacaagacaaaagacaataactttacacataccatgaagcaatcctttcctatcacggcaaaagaacttgagaagataaagggaaggaggcttagagacattggattgaaggcagaagtagaaagagcctaagcaagaaggacaagctgataaaagacgattctttaagctgtcccaatcaattttaggagagctaatatctggagtaacccaaaacactatataacaccatcttccatctgttgaaaaatctgcaaacaccatttttacaaacatattaattaccctcaaaataagaaaaacagaattgaatttttcgaatcataaagaagaatattccgtgaagctaaacgacaaacagagaatattcccctaaacagatacgaagtaaaattgaatattgacctgctcgggtaatggagagaccaaattcgaggatgattctacacagagttgaaccgagaccggattcatcaggacaattgacggtaacgacggtgggatctccggagatttttcccggttcgattaaaacggcgtcgtcgatgagaattcccattttcgttttagagccaatgaatca

SEQ ID NO: 65151 - DNA, 634 bp, Arabidopsis thaliana landsberg
  unsure (1)..(634): unsure at all n locations
aacttgtattatttcatattaactaaaatcttaaattaattgacgagtgcacaaaatgttcaacttgttagaagtgttatgagttagttttagtaatttactactgaaccactagaaagttttaatagttttttacagacaaaacttataatatgatcgatatcacggaaactactatcgaccattctaccggataagtgattaagaaagtattatctgaaattattttaataattaaaaataaatccaattaccaaaaacattaaaaatatttttaagctaattatctcctaaaataataatccatatgctcaacatttttttacatgcacctctcatttttcactttctcaataaaactccaaaattatttttatttataaataaatcccaactctttcctatctatcaaattaacccaattttagtttagagagcccaaaatttctaatgagacccaaagtttctcaattttcgtaagggcaaaaaagaaaagtttttagaccgtccgattttgaatcctttaatctcttccaagaattctgaattcttctcttcgtagtctttgaatcctaaagtaacaatctttcgtttcagagcacgtctgtaangatgacaagagggacaacgatga

SEQ ID NO: 65152 - DNA, 581 bp, Arabidopsis thaliana landsberg
agacaaaagcagaagaagaagaagaagaagaagaagaagaatagagtttggtttatttgttgttgttagagaatgaataaaaagaaaaaggagttctggaggtttatataaggaatcggtccaagaatatagaacgactcacgggagcctaaaatggaattttatgacgaaatatttttaaaatattgttttctcataaacttagaaaaattgcactacatactagatatatacgacactaatttagaaaatgacaatgggacttctttgtccaagaaacaaaatggaataatcttgtacgatttttactgatatgtgttctttctgtaacatgttattttctattttgatatctaatcaattggtggttttagaaagttttactcatgtagacatgttatttaaatgacgcatgatcttttttttttttagtgcaattatataacctcgattatattaagttctatatcaaattttgagaatactaaatcaatatgttcttaatgattcactaaaatatgaagctaatatccatcccaaattttgggccttctttttgtatcttcaaaaagtaacttatg

SEQ ID NO: 65153 - DNA, 623 bp, Arabidopsis thaliana landsberg
acaccctgaaaattttgaggcggttagggccagacagcgtgtcggctctgatgaccacaacggagagaagcctgtccaagccgcgtgaaatcgttgatgagtacattgatgctggctttcaatcaatattccttcgtcccttgtcaccgtatgggtttgccatcaagacacggcaaatggagcgttacgatttcgagcgatttttcacgttctacaaggaagcgattgactacattctggagatcaaccgcgctgggctgccatttgtggaggcgtattcctctatagtcttgaccaaggtcttctcggggaagccaactgcctatgttgaccttcaatctccctctggaatagtaacgggggcgctggtgtacaactacgacggaggcgtgtatgtcagcgatgaaggaaggatgctcgccgagatgggtgatgacacttttcgggtaggtgatgtgttatcgagtagttacgaagaggttctacttaaccctgtttttcatgccgcgcttgaggagtcgctgatagaaggcgctccggagtgttgtgagtgtgctttccagccgtactgtggcagtgatccggtataccattatgcgacgcaaggcgattgggtagggcac

SEQ ID NO: 65154 - DNA, 311 bp, Arabidopsis thaliana landsberg
gaagaccacaccaaaactgacagccccagcctagggtatttttaggaacaacccaaagcagaggaaggagcagggcaggaccatgccgcagcgcgccgacaggaacaaaccaggacacgctaagcggaaagcccgagaatagacccacgctgaagggaaaagaccggcgcaggcccatggcaaaaagggcaggaacacgccacaccgagggcgaggaaggaaaaactccaccacgcaaacgggacatgaagagggagcccactccaagaagcggcggaacagggaaaaggaacccaaagcggcgaggaagc

SEQ ID NO: 65155 - DNA, 531 bp, Arabidopsis thaliana landsberg
gaaggtgatcaagggcgtcgccgacatgaagggcatgaagctgcgcgccgcgggcttggcggtttacagtttcgccaggctgggcgcctcggtggtggccatgcccggcgaagaggtctaccaggcgctgcagcgcggcgtgatcgacggcctggagttcaccaccatgccggtgaactacggcctcgggctgcacgaggtcgccaagttcgtgtcgatgccgtcctattcgggcggcggcacctccgactggatcgtcaaccaggccttctggaacaagctgcccgccgacctgaagcccaggatggaagcggcgctgaagaaggcgagcgaggagttccaccgttccgccgtggcggaggagaaggaactgaccgagaagctcgccaagggcggggtcaagctggtccggtggcccgaggccgagatgcgcaagatggaagcggcgcgcctggccgtcatgaaggagaagtacgcgggggagtcgtcggcgtacgcccagaagctggcggcgcaacttaagcacctgca

SEQ ID NO: 65156 - DNA, 467 bp, Arabidopsis thaliana landsberg
cctcttctgcacctaataccatatccctcaccattttaaccttctttccatctggaattgtcaattcatcaagctgtaaattgtcgtcactaccagcagagtctcgggtccaagactcaacaaaactatcatctgaatccacaatccaatcctcccatttcttggtcacatcagcaacaacaccactatccacaatctcctcctgaccttcccgtagctcgacaatcgcctctgctcgtctcttccaagtctcgaatttctcttcatcagacatctcatcatcctttgcaagctcagtagtctcatcaacaatgtcgtcgtctctcaaaccaagccaattcccatcatcatcaaagaaaaacctctgccaccagcttcttctcctcttattattattacccgtatgactgttattcttctccgcactgggaacaaatctccaaagcttcttccttctcttaccccac

SEQ ID NO: 65157 - DNA, 918 bp, Arabidopsis thaliana landsberg
  unsure (1)..(918): unsure at all n locations
gttattggaacagtaacagctttgatttaacgtttgttatgagcttcagttctggtggttgctcttaatgaaagcaaagatttggacatttaccccaagaatatgtcggtgatcaggatgatgagaaatgcctttcccgtgtctgaaatgttgtttatgattttatatcctgtaaatttcaacaaggctacctgaaaaaagttcatgaagtaacccaaaaaggtacatgttaacaacatagcagcttgaaaggaaacttagaatgccattttaggtgggcttaatcacggttcgaaacggaaacttactctaccctgattggcgtacaaaagaacaaacaaggagatcccaaacaccatatcagaccatatgttggcaaatgctttccggttctctagtctccactcatcacgcagtttcaaactgttgaagaaaccaatgggaggaacacaaaaagaaacacagtgaggctatcaaaagaaactatctggtacacgatcaagatgggtttacgacctttgacatcaaaagaaactaaaaatgtggagtcgagtcttacgctttaccccgcatctcccaccataaatcatcgtcagaaagcggcggagatttgccaatctcaacttcaagacggtacctagctttttctctattaagttccttaaccatttctagcttctgatttcgtctcacatcaagcgtctgggcagcaagtggtacagtcttcacatatctttaagtaaaggcacagactaaataatcaaactggggactaacacaacgtaaatagagacataacctgnggaattaacagcaaaaatgaagaaaatcacctgtctaagaagggcataagtagataatcatgagccaaaaagtctaatgcccatggaatgagaattaagaccgccaaaaactttg

SEQ ID NO: 65158 - DNA, 392 bp, Arabidopsis thaliana landsberg
aggcggcggacagcacgccgacccagttggcgccctcgttgtacagcgccgaatgcgggtcggtggtgccgaactgcacctgggtcacagtggcggtggtgtagatccacatcgcgaacatcgcgaaccacgagaacagttgcacccaggccagttggcgcatcgccacgggcatcacgtgcaggtcgcccagcacgtggccgagcatgccgcgcttttgcgccagcaccggacgtaatgtcagcgttgcttcgtagccgatcagcaacaggccgtagaccaccaggccgtcggcgagcaggtacatctcctggcgcagttggaagtgctcgatcagcatcgcgccgagctcgccagccagcaaccacgcggtgccattgtgccagtatgcc

SEQ ID NO: 65159 - DNA, 439 bp, Arabidopsis thaliana landsberg
  unsure (1)..(439): unsure at all n locations
nnnnnnnnnnnnnnnnnnnnnnnnnnnnnnnnnnnnnnnnnnnnnnnnnnnnnnnnnnnnnnnnnnnnnnnnnnnnnnnnnnnnnnnnnnnnnnnnnnnnnnnnnnnnnnnnnnnnnnnnnnnnnnnnnnnnnnnnnnnnnnnnnnnnnnnnnnnnnnnnnnnnnnnnnnnnnnnnnnnnnnnnnnnnnnnnnnnnnnnnnnnnnnnnnnnnnnnnnnnnnnnnnnnnnnnnnnnnnnnnnnnnnnnnnnnnnnnnnnnnnnnnnnnnnnnnnnnnnnnnnnnnnnnngacactgacacggattaccttagtcactgtgagcgaaccgagacgcgcccaggttgaaaaactgacggcttaggagtctgcactgtgctctggagaagcgctctcagcaggggagcggaactacgctccctgcaaaggggctctagacagg

SEQ ID NO: 65160 - DNA, 488 bp, Arabidopsis thaliana landsberg
ggaaacccgccgggcgagtttccgaaaattatcggaaactcccctaaatcctaattatttaattacatgacgacaagatgcgaagtgatggagattgccagacgatgaccgagtggccacgcagcgacacaagtgctggtcgtgctatacctgggcagggacgccaatccgcggtcagtgatcgccgggtgataggtgtccggcaatgaggtcggcgtaccgggaccggacgcgcgcgagaacgtcgttggggtcggcggcccacacgtccgcattgaagatctcgacctcgacgtcccccgcgtacccggcgtccgcgacggcgcggcagatgggtccgaagtcgatgacaccgtcgcccatgacggcccggccgagcagcacgtcggcgggcagcgggcacaggaagtcgccgacttggaagctggcgatgcggccctcgcggtccgcgcgcgcgatctgcgtcgtgaggttcggctcccaccaca

SEQ ID NO: 65161 - DNA, 1583 bp, Arabidopsis thaliana landsberg
atagtatgctagcctgttcagcagttcatgccctcacaacgacaaacatcttgcttgaggtacaagtttttcgaatagtgataatacgtggttacaataatcacaaatgtgtttccgctatgtttgtctctattttgttttgttcagactcgtattgatggtgttttccacatatatttaaataggctatcacgtatagatacttaaaagggaaactggaaaagccgcttttcaagtttgagaacttaagagaattcaagattttctttaaggctccaacattttgcactctatttgatatcgctgaattccttaaagagtgccctaaactcgaacagtttatcattgacgtaagtctctctctctgtccccctccctgcctccctatggtctacatataagttactactaaaacttttgattgttatgtgcagattcagaatttcacatttgaacctcaaatgtatttttgggagatacatcataaggcgcagattcagaatacttcgaataacaactaccttttgaagtgtctcacggacgtgaagatcattggctataaaggccactggcatgagcttgatatagtagagttctttgtcaagaacgcaccatctctaaagaggttggagttacagatgcctaagaacgcgaagaacgatgctcacaccccagatgttgcaaggataaagctcataaaaaccatattttcaggggttaaagttaccgaagtttaaactcaggttgtgcccagcccaagcatgccaaactataacttcaattcatgtgtttgaaacatcaaaagtcatctcagattttatgttttttttttttgtttttttttagtttttatgatgttctcttagttttaaattctttgtccaaaaaaaaaaaaaaaaactcttattttgaaattctattgtttatgactttgtttaatttcaggtttgaactctttttccaatttattttatatgaaatgtgaaatttattaatcaaattttttttaacagtaaatcaagtactagacaaagaggcatttaacaatagagctgcttaaataaatgaaatatagcctaaaattaaggcctagatagtaagttccatctccatggcagctcctcaagaacattgtccgacgaagatatgcgggtggagttcactctgttaaaggtggatatgagattgtcagccggtgtatagtcacattggtgacgtctcccattgcgttcacgacatatataggtggtacgtagatcgtaggttgaagaaacaaacggaggaaaataaaagaccatggagtggtctttcgccagtccgaattagctctgtgtctgaggatactgagccatacagtgtagctagctaggcctttttttatttttactaaatttggataaagaaaatggaaagatagaaacataaaaagttgaaataacaaaaaacaattggtaacttagaaaatttagaggaataaaactcacatgtgttgctatataagaccatctccaaggagaaaccaaaacaccatatttggtgatctcaactccaacgagactctataatggacgacatctgtttgt

SEQ ID NO: 65162 - DNA, 536 bp, Arabidopsis thaliana landsberg
  unsure (1)..(536): unsure at all n locations
aaactcttgaagccatgccgctttctcgcgcagcgcgcgaaaccgacccgtccctatatgacttttagggttgtcacggctccgtgatcggaatatccaagccgccaaccgacagacaacgccgataagaggtcccccttgatgcgacgccaactcgccggaatcttggccaccgcggtcatctccgcgttcgcccttcccgccctcgcacacgccgtcgaagcagcgcccgcgcccgccgccgcgcctgcgcgcgccgatccgctgggcgacctgatcaacaccgccctgggcggcggcctgccgggctcggccgagttcaccatgcgggcgacgatgtatcacgccggcgccaagggcatccgcgcgttcgactcgctgggctgcaaggtcgcggccatgcgcaccgtcgccgacgatcccaaggtgatcccgcgccgcaccgtgctgnnnnnnnnnnnnnnnnnnnnnnnnnccatgcccgacggcagcaagcatgacggctattggtacgcgtccgacatcggggcgcgatc

SEQ ID NO: 65163 - DNA, 122 bp, Arabidopsis thaliana landsberg
  unsure (1)..(122): unsure at all n locations
ttttgtggaagcactgcgaacatctctctttttctcgtagtgtgcacagtttgctngctcgccgccttaggcacatctttctttcttaggttcatgcttgctaatggagcgaaagtcagtct

SEQ ID NO: 65164 - DNA, 394 bp, Arabidopsis thaliana landsberg
caaggaagtatgaagcagataatctggggcctaatggtgttattctcacgtcactcaacttgttggtactggttactttgaggtaaacatgcctccccccttagtacatatgaaaaatgatctcttctcacattgagaaacctatctacgtttacatagattgatctgtgtatgtttgctacacgttttaggctgactgtgtgattgagaaacgcgcaaaccatctagagtatggaacgtgaggacaactaccggacagattgagagactttacatgctgctactcctggggatataggacactgaagcgtgctggaagaacctatgtcagtgttgcaacctatgaagacgatactgcctaatgcttaaagaaacctacttatatgagcgccat

SEQ ID NO: 65165 - DNA, 496 bp, Arabidopsis thaliana landsberg
ttagtttagagaacaatgagaaaaaaattaaatcaagaagaaagtttatttgataaggtattattactggtcattgacttgtaatttgtaaaaattcacaatactctgtatacgaaacgagatgactttggttaaaacacaaatactgaaccgacaaataaataaattaccggtttaataaaccgttcaaataccggttcaatctgatagttatacgatgaaccgagcttgagtcgttaaaccttgtttctaacatcagaagctcgaatcctccgatttgatctctctgttcgtttcttccaaaccctagaaaaatccttagcaatggaggatgctgatggacttagcttcgatttcgaatgctgtcttgattccggacctgttcagaacaccgcttccgtcccggttgctccgcctgaaaactcttcctccgccgctgttaacgtagcaccgacctacgatcattcttccgcgacggtggctggagctgggaggg

SEQ ID NO: 65166 - DNA, 384 bp, Arabidopsis thaliana landsberg
catctcttgactaactcacaccggatgtaaagaaaaacttgtgggcatgttaccatttacatttgtatcaggaacttaccatttatttctgatacgggtgtgtttagacaggtctttatctaagttttatatatagaaaaggtaatagcaggtaactgctttagataaactcgaaagaaggtgatagttttatacatatgtgtgggttcgttggctacttgccactgtgtgtaaattgcactctccactaggcaataaagagtaaagctattgttttgtttatgaaaaaaatatgaaagttgcataagccgaccttacatatgaatttcattcatcctcaagaatctctgatattaacaaaacttttactggaagaacctctct

SEQ ID NO: 65167 - DNA, 440 bp, Arabidopsis thaliana landsberg
acgagactgtaattaatttgactttgtatatttatttttcgttgcatagtgacttcttcacacgaaagtatgcaatttactcttttttttaaaaaaagctttgacaataatttttttcctttagtttttggtttggttaaatgtaaatgtgaaaaacttgaacttaatttgatttggtgttcagttacctttttccgagtgtgaatgtaaactaaatcgattcaagttacttcgattgaacacttttgattcatataaatttcaacatcatcaatattttgaaaacattgcaagaatgataaatttcaactctctttttcttttgcgttttaaaaaaaaaattattgaccccctttttcgtcgacacacttttagactcttaccttaaaaagacaaaataaattttatatccactatgccgtgaatccaaaggaaaataa

SEQ ID NO: 65168 - DNA, 683 bp, Arabidopsis thaliana landsberg
ctgacgctggtgtctatgcttatacaaaggtaaaccaaacttttccaattgtttcttcatcttctttatctcggtggttgtgagtttgctgacataatgcttcttggtttcagagattggcacaatacagagagaagcttgatgcggcggcgaccatttaactaatgtcttccagaaataaaccagaaaaatcatttgtttttgtgtttctctggcttagctcttatgtagtgacaaaacaatcaagaacagtttaaatatgtagtagatacacaaatcacattcatttcatgttatttcaaatatatatgaaaaagccaattcaaaaggagaatgtcttttttcttgtttatgtttttcagattcagacattaacaataagagggagctctgaatctccaacggttaagaaatactttccttcttcaagaaccattactccaaattcattagctctgctcaaatgctcacaaagaccaatctcaaactccatctctgctttctctccattgcttaacacaatgctcttaaacccaacaagctgtttctctgctcgtttaccgtcttctcctcctcgctcgtgcctcgcaaacatcagcaccggatgtttccctgccatctccccttgattttccacctctacagtgaccttagtcttggctacatcgcaaccttctttcccc

SEQ ID NO: 65169 - DNA, 1526 bp, Arabidopsis thaliana landsberg
gaggatcccagatcatgaataaatgtgctaatcttgatgtcttctaatgaatattaatatttacgtagaccatcattatctattaattatgtgtgtcatccaaataaataaaataaaaggtgagtttggctgacttggcggagacgtaccaaccaccgttcaagaaatgcatagaagaaggtcgagccagtggcatcatgtgtgcttataaccgagtcaacggcattccttcttgcgctgacccgaatcttttgactcgaaccgctcgtggtcaatgggctttccgcgggttggttcctctcttcttctcgtctctttgcctctttaacgccacttatattgataaactctttttttttttttcagatacattacttcagattgtgacgcagtctcaatcatctacgatgctcaaggctacgctaaaagccctgaagacgccgttgctgatgtcctcaaagccggcatggacgtaaactgtggatcatacttacaaaaacacaccaaatcagctcttcaacagaagaaagtgtctgaaacagacattgacagagctctgatcaatcttttctctgttaggattcgtctcggtctctttaacggagatccaaccaaactaccttacggaaacattagtcctaacgaagtttgttcaccggctcatcaagctttagcacttgatgctgctcgtaatggtatagttctcttgaaaaacaatcttaaactccttcctttctccaaacgcagcgtttcgtctttagctgtgatcggtccaaacgctcacgtcgttaaaacgcttcttggaaactacgctggtccgccttgtaagactgtgactcctcttgatgccttacgtagttatgtcaaaaacgctgtttaccaccaaggatgtgattccgtggcttgctctaacgctgcgattgatcaagcggttgcaattgcaaaaaatgctgatcatgtggttttgattatgggactagaccagactcaagagaaagaagattttgaccgtgtggaccttagtcttcccgggaagcaacaagaactcataacaagcgttgcaaatgctgcaaagaaaccggtggtccttgttctgatatgtggcggtcctgtcgatatttcatttgctgcgaataacaataagataggaagcattatatgggctggttatcctggagaagctggagggattgctatttctgaaatcatattcggagatcacaatcccggtgagtcattctccttcttcttcttcttcaagaattagagacaaaagctttgatttgttttctaagtttcgttttcttataatcgtgtggtgtgtaggagggagattaccagtgacatggtatcctcagagctttgtgaatatacagatgacagacatgagaatgcggtctgcaactggatatcctggaaggacttacaaattctataaaggacctaaagtgtatgagtttggtcatggtcttagctactcagcttactcttaccggttcaagactctggctgaaaccaatctctac

SEQ ID NO: 65170 - DNA, 2406 bp, Arabidopsis thaliana landsberg
tttccctcttctttaattttttgacttgttcacaagtaatgatggagtaatggcacgtggtgagataagagtgtgagtgtgtaaaaaaaaaaaacaaaaaaaaagtggcatagacaagaagtagttggaatgtcttgggatcacggattagtgaatgttcttttgggggtttaaggtattgacggcgacacgtatttcatgttactctcctcaagtgtctctccctttcaccgtaggccgtagcattttccttttctttgtgaaactttttgcatttatgatggatatttgggaccgaaatccataggaatactagtttttaaacaagacacaaaagagaaagaaaacaaaaaactcaaaatactagccaaaacaaaggataaacaagacttggaagagagttaaagaaaaacgatattctttagtgaacaccattactacgactcaaccatcgggtgaatctccgaaattcccacttgaattatgtggcaaatccttctattcaaatttttattatttgttggttaaccacgtgttttctattatctagcacactatccaacctgaaatattattcctcatttttctaaccaaaatatttgaccgtttcaacactaacttggctaatctcatttctgttttccaaattgatttgtagtgttcgttttcgtaaagattagcgtaaagacatccgatgatgacatatgtgctctcatcacaatatttaatgtactccctttttattatatagttttgtccttcggattgtcatgtgctacaaaatgaaagagctactaatattttggatttatcaaaattggggaaaaattatatacaacaacgaagaatttaaaactaatttttctagaggtcaagtcaaaccacatcttgagaaatatagaaaaagtcaacttgatatatttcgcagaaaatattaaaatatgtataaaattaaccgccattactattgaacaaactacttgccaataaaataaatacagaatttattgacatgctagaaaaaaattaatgtagccgatttcatcaacatcttataactccatctttgaaatcatgtacagtaaattattttcatatacgactactacatgaactacatagtagtaaaaaaaataaaaaatgaactacatagtaaaaccatttgagctttctttataaaccaaacctaaatttaattctcaatattcaaatcatcaaacgacgttttgtgcattaattttttcgacataattaaagcaacacggtgttttaataaactcaatgcaaaatccagctaattttcattaaacaacaaatactcctttgcttatgacaaaagcgcgtaaaggcttacggtgaaatttggaaagtagctaatttgacttaattcggttatggaaacaaattaattttatttccttaaaaacaaacaattaaaagtttcaatttctttgaccgttgatttaacgtagcattgaagcattttctcagagagtagagaagacgctgcgaaactcagaaaattaaattttcaagctcggaaggaaactctgattcattattacagattcgaagtttcagagaagaagggacaagacaaagtttaactgcttacttgttgtgtttttgctctctggtcttcaattgctgaagttttataacggagatgtttcagttatgatcttacagatctgaggttattgcatatccactcaaattgggtaatctcagtgatctggaattttggtggaagcaaagcaaaatttgtgttttttttgctcggccgatctgggtttgatctattacatcgtcttctctgctttgttttgaaattagctgtgttgtgatttcgaaagtttgctacttcttcacgtttagtgttcttagttggtaaagtttggtactttcaggatactgtcatactcaaagtctgggacttttaggtgtttttgattgttcatttggtgattgatcatcgtctctgatcgttacttggaggaaagattccaaatttttgaatgagaagttgatttgttgatcggaattgagatggcaacaacaccggttcaacctccggtttcaaattctccaccggtgacttcgccgccgccgccactgaataatgctacttctccggctacaccaccaccagtaacatcgccgctacctccgtcagcacctccaccaaatagagctcctcctcctcctcctccggtgactacctcaccaccaccagttgctaatggagctcctcctcctccactgccaaaaccacctgagagctcttctccgccaccacaaccagtgatcccttcaccttctccttcaacttcgccgccaccacaaccagtaatcccttcacctcctccttcagcatctccaccacctgcattagtcccacactac

SEQ ID NO: 65171 - DNA, 518 bp, Arabidopsis thaliana landsberg
cccggatttgttttaaccaagacccggcaaaagcctttaagttatatttacctttctatggattaccgtttatgggattggggcaaagacggtttcagtcaacccatagttagcatacgcgcagctaaagatgatacgatccagctattattaggggaacaactagacgctagtcatcggattaacaggactcctcctggaacagtacgtttccgtcaaatcgtgcttcctgtcaaaaaaggaacccataactaccggattcctattgaatccgacaaaagaaatacaaaaaggagtgcgattaagatgccagcctatattggagaagttcttccctttcgctatctggccattcaaggggatcttagtaaaaatgttcctgtagccgtcaccagagatcttatccatattctttttgatcagaagactactaattttacaagttcggactcagttttgaatcaggtctgggatttatgtaagtacaccattgtggcgacttctttttaggatattat

SEQ ID NO: 65172 - DNA, 471 bp, Arabidopsis thaliana landsberg
gtttgggcgcattatgcaataaagaaagaaatatgtggtggtaaatacacggaatctttgatcccaagtgaggcgcatcgagtcttgtcctatctcacgttcctcttgacctactggtagactatcaatgctccgcgcacatcctatgtggattgctggccaccggcggaacaaggacatggtagagttcatatcctacgtacatgacctgtgcttaattactaatactctatcgggtgggcatgtgttaagccgaatgacattgtttgtgtagagaaccactgatagagatttatagctccgtcattcttgcgatgatgaatgatgaagagagatgggttacatactgatctggctagtctttgctaataaccacttgctactagtgcaaaataatttctatgttgatagatcccgagtgatagcgtgggcggtttgttgaaccgaacaccttgatattactatgctgag

SEQ ID NO: 65173 - DNA, 411 bp, Arabidopsis thaliana landsberg
  unsure (1)..(411): unsure at all n locations
ggaggaccaaagagaagatgatatgacgtatattgcatgttgtgtttaagagccttccattgcacatagtgcagtaagagatttttttttttttttttgacagcagcgtggtaagagatcctatatctaattatcactttttcatgcatactactttagtgtataaaattatnnnnnnnnnnnnnnnnnnnnnnnnagtttatcaatataccaattaatcgagtgtttataagaagtgtcaaattgcctgacaccaaatcgagtaaatacacggctaaatcaagatattggataacacataacggaacctttttcagatattccatgtcatgagtgattctctgagctgaactatactgaaatacttgcagtttaatcacaatgattgaaccctttttgcactatgattca

SEQ ID NO: 65174 - DNA, 411 bp, Arabidopsis thaliana landsberg
gctccaccatcaaatttttgtggtttgtgtaagttataacatgtataagttacaaaattgctatagcacattagattgtttaaagattgagccagagatagcattggtgagaaatattgttaagaatgtattgctaaagatatttatagcaattcacgggcttggtatttggagctcaataattatctcatcaaatccagttttagaaactaagtgtctgacagcattatttccttatttgcacatacaaaatgtcataccatcctctattcattggtctatgctaacgacataatcatcacatgaaacaattcggatgcatttgaacagattttacaaaatgtagctatcagtcttcacttaaagacttgtgcgagttaattttgaagaataccttacaaagtgattttt

SEQ ID NO: 65175 - DNA, 589 bp, Arabidopsis thaliana landsberg
aaagttaaggaatttacactgaataacatgtcatttttattatattgttgttaattattcctttaggggggggccaaatgtttgaggaagaaggtggatgcatcagaagaacaaatattattggatcagaatgaagcaagcatttgtagcatctttaaagttgctacaagaaggaagtcagcaaattcattgcccaacttttatttatacattagatgttaccaaatttgctcttaggtgtttattttgtttctctgttgtttctggttactaataaagccaactttacaatgtgagcatattcatggcccaacttttattaaaacattagatgctaccaaatttgctcttaggtatttattctgtttctctgttgtttctggttgctaataaagcatacacaaaaagaagtcaaccaagaaaaaatcttcttagcatcattatgaagacttatatcatctgacaatacagtgcagtaatggcttaaccagtgaaaacagaaactcatgtactagctagataaggacttgacttggcattacaataatagaggttaagtagagaaaaaaaaagtcaaaagtcaaaagag

SEQ ID NO: 65176 - DNA, 1484 bp, Arabidopsis thaliana landsberg
  unsure (1)..(1484): unsure at all n locations
aactatgaaaataaaactcaaaaatacaagactgaagcagaaaaatggttcatattttgagcttactttccacttaaatctatcatcaatcatactcttttgagcatctgtaagcttcccaacatatttccagatgtcagcacctgcaataacaagccaaacaataagaaacgagtgcaaatagttctctcaagggaatggataaccaagtgcgacattcgtttcaaaatcatagttagattccaggtttttatgaaacgttgagaagccaaaattgtgcactaatcactgcgagacatggagcatgttttgagaaaattccactataacttcgcaatagctcatgaatttcatgtcctaccaagaatctgataaccagtagccatggtgttcaaagcagctttcctgagttcaccatctctttctgctgtcaagcttgcaacgatatttaagtatttaagtagtccacctatctgcttagaaaggcatattagaattcaaacagaacaggagtacaggactatcagatcatttgtcaagtcttgctactacctcagttccacaagtctcgagtagatatcctatgagatcagtacactctatcctcgtccggttgtttttggaacgtaaaccttccaaaatatagggatacgtctttcctacagaatatgcctgaatgatctgcttcatcagctcccgcattttttctcttactttttcaatgttatgccccaactgcaccaaggacaaggagttaaatataaagacactgaagcaccaatctttttctaaaacagaaagataaacgggaacgattagaaagaggccaacaccataggaaattggattaatatcagatgcctaaccttctccgctaaacaaggcagaaatattgcagcttctgcttccgtcatgcagtattcctcatccctcaatgtgttgaaaagttctggaagaaactcaagcacctattcttacccagagcaaataaatttcattgttcttgcaagaaaaacagtgtcaaacatgaactacaatagcagaagattcattacaaattacctttagcagacaggttgtgttggatttacagaattgcaacacaaaccacctgagaagtacatctaatacttctataatttccttcgaaacagatggaagtgcctgtggtgagaaggaaagaagaatactttaaagaaaattacaaagatctagcagatgaataagattccaacacaagatatccgcattctaacataagatagctgctaccttctgtaggatttccagcccatctacttgtttcttgaagtcgggactcaacaaccgtttttgcaagtcttccctaaaaaatttcatcatatcattctgcaccaacaaccacccaacattggttataacaccaacaaccacccaacattggttaaatgctctagaaaacaaaccttatgatcctgaaggtgggcnggncgcagctcctcaaa

SEQ ID NO: 65177 - DNA, 547 bp, Arabidopsis thaliana landsberg
  unsure (1)..(547): unsure at all n locations
gacatagatantttttttgggctagtgcgttgataataatggcttgtccacacaatctgcttattagagatattactttgcattttaaatatttacgatataagttttcaaatagaaaaattatttagttttgagactaatctttgctcggactcaaagtcagatatttatcaacaatttttctttttaatgaatgtaaaatttatttaactagatggtttttgtgaaaactaatatagcgcagtaaggatttagaattgttaagcccaagtcgagaatgaaagatatataattccgaactgtgtggttgatgacttggatctgataagtattgtcaatgatgtggcttactcaccatgttgtttcttgttgcgttctcgccaaatagtgtttatgaaaactaacatagcgcaaaagaaattgagttatatctttgaacatgttttccgatatcagtaaattcaattctccgtctaaaaatatgtttcttcatgacattttaaaaattaaataacagtatttttaagctttgtatctttaattggac

SEQ ID NO: 65178 - DNA, 525 bp, Arabidopsis thaliana landsberg
  unsure (1)..(525): unsure at all n locations
cccgtcatgcaagggcctggagtttgacgccgtgttcgtttttgttatgcagaacgccaacgtcgatcaatgggccgtggatttcttcaagatgggaatgtatgtcatgtgctcacgtgcccgaagttcgctgtacctgacacacgttggatcaccagaaaccaagtatccggcgctcgggctaatgcccggaccggaaatcatcacccttgcgggttgaggactccatcgatgtacgtagtttcgaatcaggaagatctgcttctttgcggcgccggcatgaggctgtgctatcggatgctcgcagggccgcatgtcagcagccaccgacaggtcgtgcctggtctttcgcgggaagactgccgttcggtttccgatgattcaattcgtcatttccctatcctggtaagtctggattcacgccctgctctaggcatattgggtgagttcatagaactctcccgggttcgcgagctggnnnnnnnnnnnnnnnnnnngcgggaccggatcgcccatgtgcgaatg

SEQ ID NO: 65179 - DNA, 570 bp, Arabidopsis thaliana landsberg
  unsure (1)..(570): unsure at all n locations
gcacgggcttttcactatacaaattcaagctattagccacattccgtttcgaaaccgattcattttccaggatgtgatgcgcagccttcaaaagtttctccgnnnnnnnnnnnnnnnnnnnnnnnnnnnnnnnnnnnnnnnctggccataccttcgccgatttgcgcggctttttagcagaagcgctttcgataactgcgtggaaattagtccctccgaaaccgaatgcgctgatccccgcaaccctgcggtcgtcggtccagagcgcaggcttggtttggaatgcgaacggactcgtttccggattatagtaagtgtttggcgttttcaggttaatggtcggcggcttgatcccgtgatacaccgccaatgcagccttcatgaggcccgcgagacccgcggcgcatttggtatggcctatttgtgttttaaccgaccctanatgcgtctggttgatcaatgcgccggaggccagcatcatttcggtcaatgcgctgagctctgttttgtctcccaccaccgttcctgtgccgtgcgctttcacaaggcccagctcggccggcgaaatgc

SEQ ID NO: 65180 - DNA, 141 bp, Arabidopsis thaliana landsberg
acggcgaacggcccaacaaaacaaaaaaaaaaaagaaatacgaaagcacggcagacacttacggattcgaacaaaccagcaccaacgcaccggaacggatgaaaacaccacggccaagcaggctagggcaaaagcagaaca

SEQ ID NO: 65181 - DNA, 442 bp, Arabidopsis thaliana landsberg
  unsure (1)..(442): unsure at all n locations
cgacgacgctgactacaaagatgcacggggggcggggaaggatgtcaaagggacggacaaggaatatagtcttggaggcggacagataactgaccagatgggaatcatccggagggaagccatatagaggcataaacataaatgagaggnnnnnnnnnnnnnnnnnnnnnnnnnnnnnnnnnnnnnnnnnnnnnnnnnnnnnnnnnnnnnnnnnnnnnnnnnnnnnnnnnnnnnnnnnnnnnnnnnnnnnnnnnnnnnnnnnnnnnnnnnnnnnnnnnnnnnnnnnnnnnnnnnnnnnnnnnnnnnnnnnnnnnnnnnnnnnnnnnnnnnnnnnnnnnnnnnnnnnnnnnnnnnnnnnnnnnnnnnnnnnnnnnnnnnnnnnnnnnnnnnnnnnnnnnnnnnnnnnnnnnnnnnnnnnnnnnnnnnnnnnnnnnnnnnnnnn

SEQ ID NO: 65182 - DNA, 108 bp, Arabidopsis thaliana landsberg
cacattcaacctcgcgacgagtttctccactggacagaaagagttatcaccgttgtatatatcggatccggaagcatggaaagccgaaaaccgataactgactgaaac

SEQ ID NO: 65183 - DNA, 466 bp, Arabidopsis thaliana landsberg
gagatacaggcactgtaggctgctcttctgaaacagtatccattccctgtcctttttaggaagctctcgccagggtgtatccacatcataacccaatgtcattaagatttcacgcaagttttgtccctgccatgctgttggccaggcggctactgctctttcccttatcgttaatgaatcatccggcaccatcgatttttcggttacctcgtataccttccctaatccatgacatttggtacaggcgccttccggtgtattgggcgaaaaggcttcggcataaataatctcctgccctgcagggtaatccccggctcgtgaatacagcatactgagcaggttggataaagtagtaacactgtctaccgaagaacgggtactcactgatccacgttgttgctgtttagccacagccggaggcagtccttctatttcgactacttcgggtaccgacatctggttgaac

SEQ ID NO: 65184 - DNA, 332 bp, Arabidopsis thaliana landsberg
  unsure (1)..(332): unsure at all n locations
ccaatggctcctgggcgtaaatgggggggtaactacgctctggcgatcggaaacacgagataggctgatctcggtcttgctgtcaccataggattccctgcttcgcctgcataaggtcgtctcctgcgctctctcgtgctcaacaccctttcattcannnnnnnnnnnnnnnnnnnnnnnnnnnnnnnnnnnnnnnnnnnnnnnnnnnnnnnnnnnnnnnnnnnnccatgaatgtgtcatcttcatagcgtattgatcatcgtggcaggtttatatgtctgatgccaaagctatctcaatgtgtgccgaacctgaatgacctttgaagccag

SEQ ID NO: 65185 - DNA, 706 bp, Arabidopsis thaliana landsberg
ttggtaaaggggtgtgtagactgacaagtagattatcattatattatatgatatatatatatatatattaaatgcagaattccagaattttcgaaaaggaagaatcttatctatcaatctaccaacaatttatttatcatattttgacacgagcataactcaaaatccgtaaaaccaaagctatttttctgattcgaaactatatgtagttaaatactttgagttatataagatgatttcgatcgtcatatttgggacgtaattgaaatgccatatcttttctatggaaattgattgaaagaatattatactttcttatttttttggtctttgaagaatgttatacttattccgatatgcaaggagataaataaatcaaaattagcgtgggaaatttattcagtttgaatgttagaatatttaaaaaatgggtccacattttcgaatctcttcttctttttccattttattatgtttgtgtggttaatttatctcttttctatatataaaggaatctttggtaatatttcacaaaatttagattcttgtcgtaaatttgatatgcatatccgagatatatggaactgaaatacggcaagaaattctagtttgcatgagctaaatatgacgtaacatatcacacatatgtatactaagatcggttgttatgctatgagtgtcgatcagtgtcttttttggtttctga

SEQ ID NO: 65186 - DNA, 558 bp, Arabidopsis thaliana landsberg
  unsure (1)..(558): unsure at all n locations
ttcatgaagctcctgttttcaggatctgtttatgagttgctttcttctcttatcccttatgttccgaatgcgtttctnnnnnnnnnnnnnnnnnnnnnnnnnnnnnnnnnnnnnnnnnnnnnnnnnnnnnctgataacgaccttgatgctatcttagctgaaatcgataaggaagtcagcgttggagatctcatgggagaattaggttgtggattcactgctgatgcccaacaatgcaaagaaatcttgtctagttttgctccactaggagaggctactatctcaagaattgttggcaatgtttctcggacctgtgctgatcttgaagataatcaaaccaccttttcaacgtttactgtagcccttggttcctgcattccaactgaacttcccacgccaaggtcgtggaatgttgatattctagttgacacaatcaagcagcttgtaagtcatctgaaactcttattactttgtctaatcaatatcgttgatagtttcaaaacttcagttagcctttttttgtgtgtatgtgtgtctcactagcatgcatgattatgt

SEQ ID NO: 65187 - DNA, 864 bp, Arabidopsis thaliana landsberg
aataatttatctaataatcctttcagacaagtggacattcctacctcctgagatgatctttttagcattcgatgtatgtactggttaaaaaagggtttcagaatcaaaatgatgatgatcgtatatttgaaaagaagccaatgatctctactttgaaagaagagaagatgaaaagaagccaattatgaagatgaagaaagggcataacagaagattgagtgttatcctttgttgaggagtgcccaacacaaattaaagaatgcttcttttcctttgttggatataatgtattcaaagacaattgaaaatccagacgagacgagtccacgaataatgtgggccttaaaaagagtcaggtaagggaaggcccaataacgaaaataatgggcttattattagcagcggcggtgagttattatatgtgtggaaagaagggccaaaatcacaactcacaacccccaaaacgcaaaaaacgcaaaatcgcagaaagaaactttgcaatcaaatctctctctcggatctctgagagagcgttctcgtaaatccctaactatagctactctcgtggatccaccgaaaaccctagaaggaagagcccctctcccgtcgtccctggcatttcggatctcggatttccttacctcatgactccctccaaggtcgccggtcatacccggttcttgctccacagctttcatgattccgatgtcgactccatcgccctccagctttctcaggtacttcgttttctgtctctcacttgccgtctagttcggagatcagcatacgaagaaatttggttgggtttctgattttttttaaaaaaaaatcaatttgggcagtttgttgattttggagtcgaga

SEQ ID NO: 65188 - DNA, 2747 bp, Arabidopsis thaliana landsberg
ttgtaaaactaaatattagtttttgtccaatattataattttctcagattaaattcttttttttttagaattacataaaactaaaccatatatacatgattattaaatatttttcaaatagtaatttttttgaagatatgataaattttcatactctacatgcttccaaacaacttaaaatcatccacatatccatttatctccttcacaaggaagacagcaaatttggcgaaaactaaataaagaaaatacaagatctatctatcttataagacaataccaaaatccagctcagctccaatcgtggaggatctctaatcgggacaaatggatcccacagccacaaagggaccatccaaagcaggcattgtcggccagacacccactcgggttacattaacatttaaaatcaaataaaatcacaaatctcttcttctttcacacgtagagttgacatcacgacaggaacctatcatgcaatccccaaaacacccttggtctaaccacgtttatatccataatgccattggcccctctagccctcgtcgttcgtggtcactgattgatccaagacagtctctcgtcacactcatttgtcgacaataccggaccggagccgtgacgggttttatatttgtgttccctcaaccactggtgctagtttgggagtttaaacgaaccgactctgacaagtcatgggacattgttgtttgtatcataagtcttatgttttttaacttgagccatatatatctttggctctatcaaaagacaaacaatttatatatatttattctttgttcaccttcatttcaactcatatttctcctcatttggtaataaaaacaaatatcagctttcgtctttcttctacatctttctctttgtaacttcgtttttggataattgaggaatttcgggccgatacatcttttcatcggacgaattccttctcaagaaagttttgaaccatagtttatggaagataagcttttttcggaagaaaacaactaccaatagagctacatacgcttgatcattgtaagtttttttcaaaaaaatccttaacattcaaacaaaatgatttttattggatttttttggttcatgatgatatttatcgactgaagcattgcacccaaattggaatgcttttgatcttaaatcatccaataaatgttgtgttggggaagcttaattaagaaaagtgatagttagatatctttctttaaacccaagacttgtactacgattgagacatatattattactctgtttattttcttttcaatatagacttgtgataaaattggaaacctcgatgacatgaatcaaaggaaacggaaaggttatatattattatatataagttagatggctcatatttttaattaagatggagcacatagataagataactccacttcaactgttaaaagcgatccaaccatcaaatataggacctatttctctagacgactatatagttaatgttaggctccctaactttttagtcttgaccagagtcacataaatctatcttatatcatgcagatatatttgtttcttttatcaagaaagggtaaaatgcaatctgcattatttcagtcaaaagtaattatttgtatagagatatgatcaagtttaacattgcgtctttctttgaaaagtaatccactctcaatgatttgctgtgagcatgcctccacttttctcaaacaatactaagcatagatgggtaattcggtattttcctctatattttatatcttcaaactaaaatgtgagaaagatttatccttcgcatttccttagtgatgaatatatatgcatacaactctatttgcttataacatttataaatgcatatttttccccctactttcttcataaatgtgtacactcattaaagactatacgaaaaagaggttattgtcgatttcattgtcgcactttgatattataaccccttttgataagatgaggttgaggtgtatggactatatggctgcttaaaattcaatcttccctttttaatgatttagttatattttattggtttatctaagaaaataaaaagtaattacatgaaatgtcaaatgtatttaagaggtaagaacgatgacaaaatagtaaattaggaagaaaacggaaatggcaaattagtctcccttctatgacttggacgtaaaccgatgtggaccatgcaatttcattatagaacaataatattattatagaacaatttacactctcgctcatgtcatgtcattttcataaatatatacatgtaatatatcaccactcaaataaatatatatcacgtttttctgtttagttggttatatatttacataatgaattgtatattgatacattgttcacaataatatcacttgctatgattattatgaatagcattgcagtaaatatcaggttgaattttgaaaatgaagtcataaaagaacaataaattcagtgaacccaatagatgtaagaaacctgtattaaatgccaaattcaactttatcaaatcatatattttaaccatacattactccacgttataaatctatcaataatcataagtctttttacaatttttctaggtatgcaaaccattacttatcatgtcttaccatgcaaattatatattacgttaaacctaaaagccaatgattattctttaacaaaaagtaagaatttgaatttatgagttaccttgtagttattttgcaaaatcgact

SEQ ID NO: 65189 - DNA, 1992 bp, Arabidopsis thaliana landsberg
gaacacttattaactggttttatcttgaataataaaacttccatagttattccgttattgtttggtttttgtaaaaaatcatcagcaattagtcattaaatatactatcaaagcttgtcagtcatttctcatcaattctagcaaaattattcgatatatccaaatccaaatgtcttggtttggtcatgactcatgaccgtggaaataagttcaagaatgcaaaaagtaacttatttgtgggacagaatcaaattctttgatccagttacttacgtctttccgtagccaatcaaattgaaatattttctttaggggtattcgattatggtggtcctgaagcctataacaattgttttccgataagatttgatatatataaataagggaacaatccccaaaaatgatatctagttaagatagtcgtagaatttacagaaaaggctacttatgtttttggcctgataatgcaaatactttcaaaatgttttatttgctaactagcttttagtttcgttctcgtatctaaagttagagattaacttactattcttgtattacgataacgttttgaatgaacatgtaatgatgcaagggtgtaaccaaaaatgataaaactttggggtcaatttgataatattgactaatagtgtggggcttgacaagaaccggaaactccatgatatttttgcagtctaaatatcttttcatctctcttctcttcctccactgaaatattccccacaagaactaacaatgataatgagaagcgcgtcttcactggaccttaacctacgcgccgcccagaaaccgtctgttccaagggtggtaaccacggctcgaaccgtctctgctgcttctcctcgtgttgctaaaccgattacaagagcttcttcagatggaaacctctacaagattcagtcgccggagagcataacgaaaaccatcagcgtatatcacgaagaaacggcgtctttgagggttttggaaggatctcgactcccccaaggaggttccaacggtggatttggtggtagaggcggagatggtgccggaggtggcggtggaggtggaggtgggagcgtagatggttattacgaagagatgatccaacgttatcccggagacactctccttctctctaactacgctcgtttcctcaaagaggtttgttttaatctcctctgtttttcaagataagggtttttaattatacttgctaatttgggaaacttttattttactcttttgacaaaacccacgtgatactttatatagagacaaactcagacaagttaaaactaagtacgtattattgctattaaagaagtcgagctttgttcttgattttaggtttttgattggttgaatctactaattcatgtattaacattttggaaacgtaaatttatagatttcatccattaacagtttttcagaagaagttaatgtgtataaaaaaaaaaggacattgaggagatattattaaatttaacatgtcttaatttgtgaaggtgaaaggagatgggagaaaagcggaggagtactgtgagagagcgatgttgtctgagagtggaagagatggagagttactgtctatgtatggagatttgatatggaaaaatcatggagacggtgttcgtgctcagtcttactatgatcaagctgttcaatcttctcctgatgactggtaagtttatcgataatctgctttagaccgtagaaccctaatgatcgatatccgaaaactatgacttgactttagatttgggatttcctaaagtctctccatgaagtaagttcataacttcaaaccatgttttgtagatttttagattatatcatatgaatgggttcattgaaagagactgaatgtttttgtggatcaaatgttatttcctctatatccaacctttgaagaagtgattggtcaatttgtatcagaacaatagcctcacacgtcaaatataaagagacatcattcatattattttt

SEQ ID NO: 65190 - DNA, 1272 bp, Arabidopsis thaliana landsberg
tacggaaatttcctgctcccttattaatgaataccattcacttttttattcaagctgttttatcaaagatgataacatggtattggtcggggagatttcagcctgatgttaccatatcatggagagactatttcgttagaggtaaactaacaaaaccagggcattcctttagccattactttctactttattctcactacatagtactgagaactttctgcaatttatgcaatgcaattatcatctacagtatttagtgaggacgagaggggaagatttagtgtgttttttctgtttcagtttttcgaaagttgaatatattatatttccataaactgatgacccacatggactgtcctttcacagttgtaccaacagcgcttggaactgctatggatataaacctaagtaacgagtcacttgtcttcatatcggttacatttgcaacaatggttagttattttatatactatggtaggtctatgcaacttctttggaatttgcgggtgaaacaaggtgagacttgtctaatgatatgcatgtgttttttccacttgcagtgcaaatctgcagccccaatatttcttcttctgtttgcttttgccttcaggtgctttatacataacgattaattgtttattttatcctgatttgtgctttacaattttttgtactccatgtgttatcctgacacaatatttcgctggttaggctggagtctccaagcctgaaactttttggcattatttcagtgatctcagcaggagtgttgttaacaggtatgtttttctttgtcatttatattgctttgtactccgttgttcctggacctgtttgctacaaaatctatctagaagtttttagttgaattttttttcctaaatcaaagccattaaacttgttattttctcaccatcagttgcaaaggagacagaatttgagttttggggtttcgtttttgtcatgcttgctgctgtcatgtctggtttccgctggtgtatgacgcaagttcttttgcaggtatattctttaactcagtttttaatttctgttaaaccatacattggatctttatatattaactctttacctttactttttgtggtttttgtcttccgatgttttgctccattctgacgacaacatgatgtgtagaaagaaacatttggtgggttctgctcttggtgttttcaaatctataattgtctttcttagtttcttataagtcacaagacctagaaataaatttatacttgtttttgttttgtttat

SEQ ID NO: 65191 - DNA, 1878 bp, Arabidopsis thaliana landsberg
aaacaacaaaacacatgcaccattagaacaatgctcaaaaacatttaccttttctgttttcaataacatcatgtctcaaattcaatatttttgatatcaaatgttgttaatgagctgtctagatgaatacatcagatcatattacttggaattgaagaaatcgagatcaaaggttcaaactttcgaacattctaaactgagagtagtagattgatttcaattattattaaatctaacagccatggaagcttcaaaaacaaattatactaaattgcaacagctacgaaagaagaaggcttggaatcgaaaaagacatacctcgcttcgacattttcgacggctcaagctctagggcttctgatgtttggcgtctgatcgaagtagaaaaatgaaggagaagaaaggattagggtttaaacctatggaaaaggccttttaggcccatgatagcccatgaaccattttaatcatgaaatgaacaataccaaattcttcttattagtctttttttttttttgtaacatcttctcttatttatataactttgaaacatagtttacaaacacattaattatacaaatccccaaactgaataacaagacgaaagaagctaaattacacaatgcttttcttcaaaaagctttattcgctaaccaaacacacacattcttagtcttgtttgcgagaattggccctctctttggcaatttgttcaaataaacttccatcaaagcaacctctcacagcttctttagataggaaaccatcttcgtccttagcaagaatatagagtagtatccattcaactttgtttgaaagcctgccataaccaacacaacaaatttagcagatttcgttaggatttagtgttaacttattaccgtgtatgtaaaatcaactaataaatttcattcaaaaaaatcaactaataaccaataatgtttttagtactaaccatccaaaaggatcgattgccattcgatttccctcggttacattccaaacctctttaaatgataacttatctttaaccgttagcgcgtatttgctaaatatgttctcgaggttaactgggacatacctataaacaatcgcaattttacaaaattgagtatcatcaaaattctatttaaaattattggatattatattttacatatatgttaatgttaccttccttcggtgtcataggtgctcgaatcactcccatgcttggctttgtgtatgttgtcgatataaaccggcaataatggtgatggcacccaactctttttacataaaattgatcacaacataaattaaaatcacaaaataataataaaattcaaattaaattcgaagggtctctggattattttccataccggaagtgtaacgtagctgaacgctaagtttatgagtaaggtccaaaagatagaggaaattgggttgaaaccaaggtcacgaaatcctgcaatttttatacaattatttgaattttttttttttctgaagattgaagtctttgaagagactataacaagtaataattacccttataagtctcccaaggatagacgattccatcgtcgttttggtcgaagaaagcaacatgttgttgcataacactcattcctttgctatcgtgaccttctgttccattcggatgctctgtatctggagctgctaatgctcttgccatgtctgtttttcatttttgtacgttagattattatgtatctttttcaagaaaattacattttttctttaagttattgtgacttgtgttgaacactacaaatcttgaaaggtacacttaatttgaaacatgttcatgccctcaccataactttttaaaaatggataatatacgatttggtcatgttaatagttggatgt

SEQ ID NO: 65192 - DNA, 2227 bp, Arabidopsis thaliana landsberg
cgagccgggatcactggacttggaaagttatatgttctagtattctccaaaaatttaaaataaatatttaaaacatagaataatttataaatgcctagaatattaagaaatatataaagtttcaatattatggaaaaatcatgtttcttgtaaaatatataaaacggtttttagcctattgacaaaaagaattcataacgcttagttccaatgatatctattgacaaaaggaattcataacctttctctctttatttctttcacgtttaagatataaatggcgaatgataccatgaatgttgctggattcttaagcttattctaccttttttttttttcataggcttagtacttacttaaactcatttgttgttctaaatctaagtgtctcgcaagagtccaaagaaggagatgggagtgactcaaggtcgacgagggaatggggtgtaaatgtaatcgtgttagtgaacatagaaatacattatctctatgtggtgacatgtgaattttctccaagtgtcaaacttccatatgctcattaacaatccaataatttaagctttttgacaaaattgtattttttttggtcaattatctccaatgtggttttaaacaaagatatatattaaataaagatttacatgccttttccaccttgatattttgcaaatcatgagaatctcttccttttaatgttgccagttatataggttaaaaacatatttgcatttcaaaaggaatattaaaaaaacttaattgttctgctacattttggctttcaaaagtcatattgtgagtctaaaactattaaactgtgaacaaaggaaaataaaatagtatttatatgctatatgtaaaatatgaaatgaatagactcacactttttctctagatccttaagttaaactgtcacgcttccggtacgtggcttatcgatcaggaaatgccaagatactgatcccacctcacaagtcacaagtcacggtctccaaaatttatttctcaatattatccttcaaatttgttacgatatgcaaaaaaacaagaagaaggaagttatcacaatatgggtcaagctctcaataccggttcgtcctttctctttctcccccaaaatcacgtctttcattgatgttcacttcattaataaaattatcatttttttgtttggtatacttaattatggaacgaagcaaaaggtaaaggagaggtagacgcgaaagacttggaagctatggctgaaaattgctaccgcaaacgcttagaagaaaaaaatgacgatcaagaatggtcctttggcgacttctaccgcattgtggctgaagcagtcgagtaaaattcttttacttgttaagtgttataatgaaaccaatatgagtcggaaaggattagatttggttattaaaccattttcaataacgattttctttcgagtttttgagacaaattatttaatgctcatgggcggtttataagtcaatgatttaagaaataaaaataaacgataaagactcgagccatatagtcggcaccatgatattatgattatggtaatgatatttacatgtgatgtgatattcgtattttatgtatttggtgcgacagggaaattaacagaagactcggtggctctcaacttaaggtgccaagtgttgagaaactacaacaagcttatgaggtattaaactctgtcaatttctattcttcattatataagtttaatgacactttttttgatttgataaaattaggtaaggaatttgcaaacatttggtctcttaaccttttctaaatttaataacacgaaaagaatattaaaaatgaaatatatacttgagcaaaacataatttatacctagcgattagcgaatatgataagtattgttatgcaacgataaacattaaaaaataacttcaacgcttttgcccaaatctaagtctctgttacatagagaggcttagacttggtttactataaaccaaaataagattttacaattgaatcacaatgttttaaccaattggtttaattactgggatcaaagatttatcatcttcttcgtctcttatacttttgaaacgagcagatacacaatctcgggcaggggaagaagctatcgaaggacgagtttcagaagcttcttaagaggttttaatcggagttgggttcaccggcgtcggaggagtaaaggaatttctacttttcatcttcggagttcctgcgatc

SEQ ID NO: 65193 - DNA, 465 bp, Arabidopsis thaliana landsberg
actcgagactgtgataacgatacagcgatcatggcgcttgctcaaacaccttatgcgttttctagcggtacccgtcttgcattttggcaacggtggatatattcttgtgggtatacttaccttatgctttaaaatagatataacgttttttgttattaggaagtttgattttattaggctttaattttgttgatggtttttctcttgaaggtattcacatagagaagattaataactcctatgaagtttataatcatcattaccaccatttatataggaattcgctggatcatattttgatttaagagatgatgatgttacatcttaaatattttcgatagctgtaatttccattctaatttgtttctctcacaacgtttttgacttttatattcttagtttattctttttattgactgttttactttttatttgaatgttattcttcctattaagtttgttcta

SEQ ID NO: 65194 - DNA, 661 bp, Arabidopsis thaliana landsberg
tccttcttctagctaggtattttgtattctcttccttctgctttgtcattaatttatttcttctcttgtgttattcatcatgtgtagtagttcttgtttatgttttctcaacttattttggatttttgttgttaaaaagcaatctttaaagcttcttcttcatgttttgaaatgaacaagaacccaaaaaaaaatctggtttttatgttcaggttttcaaacacagtctcttgaattcagagacttgttattattttttgttctttcccataagaaaaaccaaagattgtctcttgcgttgaaaccaaacaaagtaatttttatatttagaatcatgggtttcattaatttcttggatgtttctgcttaagtgttttttctttctccactactctttgtctgtacatagatctgaaaaagtgtttgtctctttattttattctcatatataacgtttttttttggttttcaagggtcatgatgatgaacagagacatattatttcatcaacaacaacagcaacaaatggaagagaacatgtcgaatctaacatcagcttcaggagatcaagcaagtgtgtcttcaggaaacagaactgaaactagtggctctaacattaatcagcatcatcaagaacagggttttgttccacaatcgtctc

SEQ ID NO: 65195 - DNA, 612 bp, Arabidopsis thaliana landsberg
  unsure (1)..(612): unsure at all n locations
aatttagaactctgccgctatttgagtgtcctctggcaccggagccacgcatcttcaagaaaaaaatcgaaaaacgtcgccaaaagccgtcgggcaaaggaatatatcctttaacgttcaagatttagatactttcttcgcaagaacacaaaacgttgcagatgattcttgatacatatttaggtttatagttagttagttaattccttattaactgaataatttgcaggagtttttattcaatttttattttaactatcatcttaacataggatattatcttcccctttttagtatagttttgggtagaattagtattaatatcgaccaatgatgaagaagaactaactcatattgttttgaatatttttctttgatagtttttttgatggatcatgtgtgatattattaaatttggttcttaacactttaaatcaaataaattcgtattggtaatttaataagtgatatatatatatatatatatatatatatatatatatgtatatcttttattcgtacaagatgtttgcaaaccagatttgggttaatgagtggatcaagctngatacaggatatatatacttgcattaaactatagagttactttag

SEQ ID NO: 65196 - DNA, 1063 bp, Arabidopsis thaliana landsberg
gcagaaacaacaaagcgagacagaatcccgtcgatttgacaataactaaaaggtttgtctatagaatgtgtaaatagagttaacagggaattgtgtgtataatagattattctgcaaataataacctgagcaaatttaatattagagccccatatatatttttctcagatgaaattatgttattagtagcttagggagttttaatttgcttcaacatcaatggtaatgtcttatgttaataacctgtagcccactctaaagtacataaccgttatgttgttgctttgtttcttatgaagacaaatattagaaagtacacaaatttggggatagtattacattttctaaatattgggaacaatttagagtctgaaagtagaagaaaacattgaataaagcgggggtgtcacggaacatatcaatgaaaaaatgtaaacaagtgttttaagttttcaaagtgaatcacggaacatatcaatgaaaagcacaagatacattagacaggagcttcgaacctcccaaccatttctccagaacatactccttcactttcttctcatcatttccaaacacattacacatagccttaacatagttagatggaaattttccggttatcctcacatagaacatgacggcacgagccatgtctttgcacaaattgtccctcagagattcaaacattgacgtcttggccgtttcgagtgaagaagatcttggtggttgcgacctgttgatatttcttcgtatgcaagcttcttgggggtttaagggagcagcagagatagcgaggaaggtcacaaagaagactacggcgacgatgctcatggaagtcttcattgcttttggcttcgcttgttgtttctgtgaagaaagaaagcgtatagacatttatatacagtgagtaatgagatatttgaaacttgtttcgcattaaaagaaagttcagttttatatgttaaagtgaaaattgggggtttcaacattcaaatgtttcatgagtttcacttactagggagtatcagtttggtttataatgataataataatatcataggtggtt

SEQ ID NO: 65197 - DNA, 2027 bp, Arabidopsis thaliana landsberg
ggaaaaatataaagaagctaaaaaaaaaactcattgcaaccacaaacaaaatggtataaagagataattgagagtaatggacatggggaattacaaagaagcagaaaaccttgcaaccacatgaaataaacaaatgtctttgtcataagataatgaaatcacactgttgtctcaatgtttgtttagatctatctgatcatatatcgctgaaacaaccacacaaaaagcaaagccacattttatataaagacccatcatatatcaatcaatccccatctctcttcacatgcccatttgaatcgtatctcctctcatttcttcttttgttttgttggagttagataaaatcaaaggtctaataaaagtgtcaaaacccttatcgctataacctccactaccatcttaaacttctccttataactcacgcttctctgctttcttctctcaaagtctaactgctcaaataagaaaatggtgagttaaaaagttttttctctctgtttttttttttgtttcctctgtttcttatgttcttaatggttttgcttgtctctaaaggttcatgtgtcatcatctcatggagccaaagatggctctgaagaagcctttgattacagaggaaacccaccagataagtctaaaaccggtggatggttaggcgccggtttaattttaggtaaagtcttaattcttaatgtgaaaaaagagtgactcctctgtttctaacactcctctgtatcttcttaatgtgaagggagcgagctatcagagagaatatgcgtgatgggcatatcaatgaatctagtgacgtaccttgttggagatttacacatctcatcagctaaatcagcgaccatagtcaccaacttcatgggaactcttaaccttctagggcttctcggtggttttttggctgacgctaaactcggtcgctacaagatggttgcaatctcagcttctgtcacagctctggtaagctcttaaaccacgtacttgtagctcgattggcttgagactttctagctctaattccttgtttctgtgaaaacagggagtgttgcttttgacggtggctacaactatctcaagcatgagaccaccaatatgtgacgatttcaggagacttcatcatcagtgcatagaagcaaacggacaccagttggctcttctctatgttgctctctataccatagctctaggcggaggaggaatcaaatccaacgtctctggttttgggtctgaccagttcgatactagtgatcctaaagaagagaaacagatgattttcttcttcaacagattctatttctccatcagcgttggctctctcttcgccgtgattgctcttgtttacgttcaggacaacgtcgggagaggctggggttacgggatctctgccgcgactatggtggttgcagccattgttttactctgcggaacgaaacggtaccgtttcaagaaacctaaaggaagcccttttacaacaatatggagggttggtttcttggcttggaagaaaagaaaggagagttaccctgcgcatccaagtcttttgaacggttatgacaacaccacggttccacacacagagatgcttaagtgtttagacaaagccgcaatttccaagaacgagagctctcctagctcgaaggacttcgaagagaaggatccgtggatcgtttcgactgttacacaagtcgaagaagtgaaactcgtgatgaaattggtaccgatttgggcaacgaacattcttttctggacgatttactcccaaatgacgactttcacggtcgaacaagcgacgtttatggaccgaaaactcggatctttcactgttcctgcaggctcttactctgctttcctcatactcacaattctcctcttcacttcccttaacgagagagtctttgttcctttaacaagaaggctcacaaaaaagcctcaaggaattacaagcctacagagaatcggagtagggctagtattctcaatggctgcaatggctgtagccccggttatagagaacg

SEQ ID NO: 65198 - DNA, 557 bp, Arabidopsis thaliana landsberg
tatgaaaaagggatggataatcagagaaattagctacatgtattactgataacgcaagattcacaaatgcagttaacaacgaaggagaagcttaccctgacatattgtctctttgaaatgccttttaacgatggaaaaatacacaagtccttattatctgccaatataagtcatgcaaatgagcttagcaaacacctaaacaattaattctactagggaaaatataacgaagccaaatcggcggcggtaaaactaagttcgacagtcatatacagagcctaagatagaataatgcgaaatcgataagatagtatatatcgttcaaggagctgaaacactgacctcagagacgaagacggcagcagcggaaaggatacgaatgaaatttggaacaatttatatggagagttaaactaaaaccctaatttcagattttaacggatcgtagcggaccagggccacaattctgtattatttgggcttaaatgggcctattaattgggctagacgaccgttgtgtaaggacattattttttccgcgggtcccttctttccca

SEQ ID NO: 65199 - DNA, 174 bp, Arabidopsis thaliana landsberg
aaaatcttaattaactaaataaaaattatattaaaatataaatttacatgaaaaaaataataaagaaaaaaatataatatgtttttttccttagattcaatactcataaaaactctccgaaaagcatagtggtaacaagcatttgaaatgtaaaatatctttcctaacagtaat

SEQ ID NO: 65200 - DNA, 149 bp, Arabidopsis thaliana landsberg
aaagcataaagcacagcatcggcgaagaacacgagaaggagaaaagcggacacgaaccgcttttattttccacagggaaaaacaccgaggagaggggccctgacaggacacgaccacagagatcaacgaaagacaacaactccgagagg

SEQ ID NO: 65201 - DNA, 1243 bp, Arabidopsis thaliana landsberg
ctgccacatcatgcctcccagcagcgaaatcaaattctgtaataagaatatcaacatcagtcggtggaaactcaattaatcccttttttagctaaaatatgttcataagaatatagaaagaaagacagaacaacaccgacatgatccatgcacgatcccataactatgactgttataagaacaagaaaaacaaagacatatttcagctataagaacaataaaactcaccgagctcgtcgcctacacggaaagttttaccggtagcccaagtagtatagaactcggggtccataggtctcgtccattccgtatcatcaccaacatcgtagtcctccgcgaagacaacaacggcagcgaaaaccaaaacaagaaacgtaaccgttttgaaaactccggccattatgttatgtgttgaagaactcaggtcacccccttttcttttcttggtcgagaactatatatgtcgtctcttaaaagatagtaaatgaccccttttgatttttgtgtttgttgtggtttcaaaagtcttgcaagagagacttatatttataggacaattaaagagaggctctcaaggagtcatacgcaagatacgggaagacgcgttacgtgttgtgtcgttgaacaaatccaaatttagatattatcacttgtggtcaattttgtctgctaagttttttttgtccacaattgttatttttagcgcgtaaagacattgtacatttgtaaatttagatcaagtaaaaaacgtgactaattactttttgggtaatgattataaaatttagtgttcagactaaatataactacctaataatacccatccgatattaaggcatcgaagaatagtagcatactaatgttagaaaaaacaaagtgttaaatgtggatatagatgagatgttaggtgtttatagcatttatatggataagtcgataattgttcagaaatttctaggctcgattgtcattctttgcatgggtccgttgtaccaattcaggtcgtattcaagaaaaatcaacccaacaagtatatatacttgcacgtaaacgaatgcggtcataacccgaaaccaaaagcggtcaaactcacttcagtttttgtttgagtttagatagttcaaaaaagaccaatcgggactcaagtgattggtccgattataaacccgaaatatccatccgctaaaaaggacttgtcagtgattggttatttcagcttcaatagcaaaaccaagcctaacca

SEQ ID NO: 65202 - DNA, 1549 bp, Arabidopsis thaliana landsberg
  unsure (1)..(1549): unsure at all n locations
ggcgatacattttgtatgataagaaatatcagcactctgagtctgagattgttaatctactatatatagccacatgttgttcttttgctttaaataaacataagctaataaatgaaacctttatctatctgcgttttaggaaacattaattgataaatgcagtgtgaaaactccagaaggagaggaggtcaggtgtgtttcggtctaatctcttcaactatctcttacgtgttgtcatctccctgatttgtaattacccctattgccctagcacacatatattttttttagtcgttaagaaaatcagaaaaccgaatcaatttgataagttacatttctatatatattcacccatctaaaaaatttttttttggtaatgtcaaatttattaaataacagaaagaacttacaaattaaagtggggaaaaaagcaatggttattttgttatttttatatgttggaactaaaaatacaaattaaagtgtgggattggacatatgggttacgtaaactttgtgactaaacagtgaaaaaaaagaatgatgtgaaaatatataaaaaattataacattggaattgagccgataaaaaactttaatgttggaaaggtagccaatgaggaaacgacaggtcaaatcgaagttctgagagactggcattcttaatgctctcagtctgttttattttgactgtctcactccctcagtttcctcttaccttttctttgtcctttctctcatttagtttattattaatctttaacattacaagtttacaacatataaattcattactattatatatcatcatcttcatcattgcgagtagcggctcgtactcttgatactgttttcaccactgttatttaactgttggagttttagaatcttgaaaagactgaataatctgttctaaagcctcctattactaccctatttctcagtatcattttcacattaaagaaaaacaactcaaaagtgacttaattcagctatttattactgtttcaaaattcaatataccggataaacaagaccgaactacactttgcagttacaaaagtttacaactaggttcacaagaacggaatcacactttaacccaaaaagaaaacacttttgcccattaaataatgggctgcgtttatatcttctcggtcagcccattacattgttattttttaaagtggaaaagaggctgacgtggaatgttcaagtccccaacgactttcctttgcgaaaaatggatccnnnnnnnnnnnnnnnnnnnnnnnnnnnnnnnnnnnnncttcaactttcttcttgctttcttcgcatcttcaaatgaaaatcgctgggctctcgctgtcaacgctgggcgtgagtgagatctaacaatcggtagcgaattttgtaaattttgttccggttttgaagtctcaatctcggggttccggttttagcaactacttcttctgacatttcagctgttctagttgatctttatatactttatatgatctgggattttgaagagtttttagggaggaaccaaaatttctgagagaga

SEQ ID NO: 65203 - DNA, 1143 bp, Arabidopsis thaliana landsberg
agataaagtctttactaattatatgagataaaaaatacgtaaaattaaattcactaatttttcaaaatttaaaaatgtaaagcaagatacattaagagagacactaatattcttcttagttcgacatcatatatgctttagggtattacataaggctatactacacataatgaattaaaacattgtaaaatgtaacacagtaaatgtcaccaaatctgcatgttcttcttagtttataggattatcttgttaataaatcctattaatcaattaaatatataaaaccatactaaactctatgtcaaatttaatatctactagatgaactaaaattcttggtctaatacaccgccttcaatcaccaacatcacacctcaaacttgagttatgatggaatcttgaaagaataatgtaaatatatctgttgatatcttttgagaactctaaaacaaaatcacaacagattacaaaaacatttttaccacaaaaaaaactctacaaataataataaactaatacatttgagtcaccaacatcacttttcatagataagttatgataaaatctcttaagcataatgaaattatcttcccataactctaaacaaaaaattctgtagattacagaaacattttttatcacacaataaacaaaaatcccaacaaaagatagacccctttaatcaaactaatacatttaatcacccaaatcactcttcatcgtcaaaactcggtaactaatcctttaaacttgcagctcaccagctagtctttaaagtgaattctactatttaaaaaaaaaatcctagtataaacctacaaagtgaaacattttccaaactatataaaatctccaactttttttgttgtccatataaaacaatcaagtataaacacttttctaaagaaaatcttaaatatttgtttccatgaaaaatttccaactaattaactttgtctaaataaactttcaagttgcgaaatttgtgctcgaacagtattggacttagcgataattttgtttataatagtaaacggtcgctggcgacataattttttgtttatataggttccaaaatttctatgtaccttaaaaattagaaacaaatgtattctacatagttcgtatttaagctttttaact

SEQ ID NO: 65204 - DNA, 137 bp, Arabidopsis thaliana landsberg
atccttggcctttcaatgatggtgtacttttttttgatagttcaactggagaagaagaagagaaatctccagtttctggtggtgaaagggttcctgatacgttggagcattttagtgatgatgaaagatttgctatt

SEQ ID NO: 65205 - DNA, 563 bp, Arabidopsis thaliana landsberg
ggttttgaggaagccctaaagaatcacaccgcctttaacatcacgggccttttgttaattctacgatagagcccaattaagcccattaggtttatttttatttgtagctttattgatttttaagacccattcaaattgttgtaaattgtaatatgttgttgggccatcagactgaataaacaaccctcctaaggttgtacacttttacaagttaggaaggtgacactgcacatgaggttactaatcccatctcggtctcggacttgtgtaatgtaaagtgtgggtctcatgcagttcacccatgcttataaaatgtgtgtgtgttcagtgtcgacttcgacttaaatttcaacacattgttagtggctcctagttcattattattatttttcctagcttaacattcggccaacgatttttcaatgaaggagttttcaatttacgtcaacaaaaaaaacatacaaatgtaatttagcactagaagcctcgcgaaccggttacacaatatcaagttttatgtaagatcctctgagaacaatggttagaaccatactaatgtaaat

SEQ ID NO: 65206 - DNA, 525 bp, Arabidopsis thaliana landsberg
cgctttgcgagctgaaggatgacaccgtgaccagtgtgagctttatccagcgaggcactcatctgggaatcttggccggcaagggcctggtgcacatctgggatgcagaacattgtcgacgactgcggacaatggttggccacaccaatcgtgttggtgctttggcgtggaacgaccacatccttacgtctggatcccgagaccgccttatctaccaccgtgatgttcgttctccggatcaatggcttcggcggttgtctggccacaagcaggaagtttgtggattgaaatggaataccgaggacggccaactggcctctggtggtaacgataacaaactcattgtgtgggacaagctggacgaagcccctctctatcgcttctctgatcactgtgccgccgtcaaggccattgcctggtcccctcaccaacaccatctgcttgcttcgggtggtggtaccgcggaccgcacgatcaaattctggaacacatccaccggctcgctgataaggaggtcgacactgg

SEQ ID NO: 65207 - DNA, 448 bp, Arabidopsis thaliana landsberg
  unsure (1)..(448): unsure at all n locations
cggaacaacgtaaaatccgaaacttaactttatgaaattccgccgatattttggtggtcggttgggaaattgctttccaggctctcttcacccccagggagactatactttgaaaattcgtggaaagatcaatttgctggtcagcgtgatggccggcgttgcgctcgttatcggcgccacggcattgttcgctatgaacgaatacaacaataagctgaccgcatatgaaagcgcttccagccgcgcctatgccggtgagcgcctgaaccgtttcgtgacggccgtcgtcatggaagcccgcggtatctacgccgccaaggacgtcaaggacgtcgcacccttcgccaagggcattacaaccgatctcgacgagatcgacaaggttatcgccagctgggcnnnnnnnnnnnnnnnnnnnnnnnnggatacctaaaaccatctcgtcgat

SEQ ID NO: 65208 - DNA, 494 bp, Arabidopsis thaliana landsberg
aagaccacagaaccacaccaaaaacactgccaaccaaaaaaatgtcctaaaaacaacgaccaaaaaacaaatggtaatacaacaaaccaagcccccccaacaccaacaacaaagagcacaaagaaaaccaaacaagaacagaggcaagagagacaaacaaagcacgaagagaaaaacaaaggcaagaaaaacgaagcatacacagcgagaaaaggaaacatcgacaacaaaagctatcacccgaagaaacaacacgaacaggaagaacaaacggaacaacacaagaagagacaagaaacaaaacaacagggaaatccaaacgcaaacccaaagaagagcagaaaagccagcaagaacagagacggacacgacaagcggaaagaaatagacaaagaaaacaagaaggaacacaataccacaaaaagggagaaaaccgacaaacaccaacgccgctagacaccaacagaaacacagatcacaaaaacgaaaacgca

SEQ ID NO: 65209 - DNA, 485 bp, Arabidopsis thaliana landsberg
ggggatgagacccatatggtttcggccacggccatgtctggtgtgaagaagcgccggtcgcttcctggggccgtatccttgatgccccctccagggaccggcacatactgggcaccgccgggccgcggcccgcgtggcgattcttgttccccgtgctcttgggggtggccgacttggcgtgcctgggttcgtaccgcattgctgctccttcttccgtgtcagagtgggttctgttgtgccgagaccgtgtgggcagaccctcgatcgcccgcccgggcatagcggcccagcagcggaaggcgctcagcaggttcccgtgtccgccgcgggctccccagggccaccttcggcggaacccgctggcccccgtccttccgtaggtatgagcgtggggaccccggatcgccagctttatccgagatttgtcggggtgcctcatttgctctgggcgatagccctagggatgcgtacgggccggggaaaac

SEQ ID NO: 65210 - DNA, 221 bp, Arabidopsis thaliana landsberg
caacaaaaacaccgcacagccaacacaacacagcaacaccccgcaccgaccccaaccaagcaacgaacacaaaaaagggccgcgctaccaacaagcccgagtgttagcaaaagcccacaaacaaaaagtacacaaaaaacaagaaaaaagaccagccgcgcaagggaagccccacgacaagagcaacacaaaagggaaacgacaaaacctcagccaaaaca

SEQ ID NO: 65211 - DNA, 484 bp, Arabidopsis thaliana landsberg
cctaagagcacacacagaggaaacagataagccaaatctgaaagtacgaactgtttactttttcattgatacaacttaagcttaggttgtctttacacacaaaccttagtcgctgtatcaagctgacgactgttggaggtgacagtcccaagcgtcgattgcggcgaaattgagagtcttgaatcaccttccaccgtcgtctcaccgtacatcatcggaagattcaaaccggcagtcgaaagatagctgtccatctcgccgccggtaatcattgaagaatcggccaagaagccggcgagaggagaatcaaaggtgggatcgaggtacttgaggtgagccctttggcgctctaggaccgacatggcaggaaaattgagcaaaaggtcacctcctatagctccattcatcggtatcgtcttctttggattcagaaaacaagttgcttgcaacgagagagagagagagagtggagaaagaaacagag

SEQ ID NO: 65212 - DNA, 451 bp, Arabidopsis thaliana landsberg
agattccaagtctgatttgacttcagcaagaagtttctctgtttcttgtagtttggtcttagttgcttcaagatctgcttcacagcttgcaaggttgctctctgctttttctttctcgagtttcaaaccttcaaactcctctggtgaaaattttacaagttgcaagctttggttcatagccagatgttccgctgcaatcatccggaatctcaaaatctgagctctgagaacaaccattccggtcatgtccacctgaagaatctttctgaagtgctttgatttccggtagaagcgactttatcaatgcaatccgggcttggaatctctactgtggatgggtgggaaccctatcacatcagatctttacctacttacctttgacttaaactcgcgaaagttcaaacacaaaatctgccaatgtttttttctttgccaagaatccctcaatgtg

SEQ ID NO: 65213 - DNA, 211 bp, Arabidopsis thaliana landsberg
caaaaagacatctaatataatctaccctttttattaacaaacaaacgacctacaacaactgtaaaagttaaaaaggattacaataacgtagtggtttaataagtcacaagcaatgactgggtggcctatggggaaatatctaccagacgaagattggcttgcgaacgtgaggtggtacgagattcaaatccttgcaatgatgattatcata

SEQ ID NO: 65214 - DNA, 725 bp, Arabidopsis thaliana landsberg
atctcgagtccgacttaacacatatagtaacacctttacttaaactaactggtaaaatggatcttcagaagtgttccactggttttcccactgcagctttgcgaccatctgctcaaataaaaggatccattttaggatctacacaaattaaataattaactggtgtagatcctatatagtttgagcatatactttgaatcttaacaaattgtttcaaatccaatttgtaaaagcttgcaagagcacatatccacttagaaatcgacaagcatctacgtatctacatcacataaagcatttgttggaaacatttacaccaccaaagagtgttccaacaaataatgtcctacgactaacctcaaacaacgttttttttgcttgaacaatgctgaattttctacagtagattctggttttctcgcagatcttcacgcgaaaatcaaacatccttcgatactaaacttcaacgtttgaaactagtagcatctcttctggtactctgacgagggagcagacactatgggaatgcaagggcagttcccaaccttccagacatattttaataccaaatgaactcacattataaagggtaagagaagcgtgtaccttaccagtatttactataaaagttaggtttttataactttcaagactcaaagtatggtaaaaaactccatttcaattttttttcaaaatctttaaaaaattttcacctttaaagaccc

SEQ ID NO: 65215 - DNA, 650 bp, Arabidopsis thaliana landsberg
gattattttcgatatgtccaacatgcttccacgtgactgtaccttgtcaactctgagctttaacgatttctctccaatatgcataaatctcttaaccttttttattttctttggtcttaatacttgttccaaggaagtgatgcaacagggaagggatcgaaaacagttaagtaaacggtgagacgcagaaacaaaaagagatcggaatggccaaagtatttttgctttggaactctcatttttcttccttctttgttgtttcatctttttgagtcttttcattttgtcactttgcttttaatggttttctcgatcgtgatacaatgtgcaattaatagtctccaaacaaaatgcatttttcccaatttcaaaaactttttatagcgaaataatagtgttttgagatctgttggtatacacaactacacatatattaaaatatttgaagggcacaaaattttatcacaaacccaaagtattcgtaactaaaaagttttggtaaaggattcacaatggtaaaatgctccatcttcaaaataccaaaatcaagacgaatttacgacaaaccactcattttaactacgattttgagactctttagcagatcgcagactagatgcaaaccttaatttttggaattcaactactga

SEQ ID NO: 65216 - DNA, 399 bp, Arabidopsis thaliana landsberg
  unsure (1)..(399): unsure at all n locations
actgggaacacttggcatcacatttattgttcatgcatgggagactatggtcacaccnnnnnnnnnnnnnnnnnnnnnaaaattgtctaaagacaggagaatagccgggtggctattattccaaaaagaccaatgtattctgcaacaaagccactcctgcccgcttatggctgggaagccatgcataaaatagtgaacatctgaaatttccatggaatggggattgccattccacccatttcatccagagccacaacccgaattctctcctacctggtacctgacaagaaaaaaggcgcccggccaattagtccatgagaaataatatggaaaataggtccattactgctcaggatgacgctattgaactaatacctattgttgttagacccatcttac

SEQ ID NO: 65217 - DNA, 218 bp, Arabidopsis thaliana landsberg
atgctaatttctcttgtctctcgaaaaattctagttccaatggaaagaaacgcccaacaaagagccttgtgatatgctaaattttgacattgaaagagataatcctaacaatgaattttgtcctttataggccagaagaagaacaaaatcctgttggcctgtgactatatgatttaaccttgaaatgatgatgtcttcctttgcatttcaccagagtc

SEQ ID NO: 65218 - DNA, 725 bp, Arabidopsis thaliana landsberg
  unsure (1)..(725): unsure at all n locations
gctaaaagtggagacaaagagaatggaattgcaagagaatggcctatcaaaatatcgagattgtatcattctaatgattgttgttactattttggaattgcaagagaatggcctatcaaaatatctttgcaaatttgttatctccacctttctaaactagcttaaaattgccctcatctacatcaattttgtgaaaaaagctatgttcgagtctactttttcgtctcataatatgattttttttatatagacattattatcaggcgacaagttatctttgaaaatctatggtattcatacatcgacaagatttcatatcaggtctttgttgttcatcagatgtaagaaaacaaaaaacaatttgaaaaatcatagactacattgatatggagagtccatgcatttaaatttgtgcctaactgatcaatggccaattaaaagccacttggtcataagttggccaccgcaccaatatgtgaccatttaggcacaaacttgaatgtggatggtcacaaattaaacattttcaaaacattatggccacaacgtgacattttgatggccacggttttgcatgtcacggtagtggctaaattgtaatattcttgtagcgagtagaactaaaagaatataatttaggcagatgaatgaagcggacatggcatgatgcctctggttgtcattntgctttttattcaaataaccccgaaaagaaaaaaagaaaa

SEQ ID NO: 65219 - DNA, 576 bp, Arabidopsis thaliana landsberg
ctttgccatatgaaaccagctttgtcgttgtcctttttgttcttgataacaaagtttccatcatcgggaagggttttaaccaacgatgagccaacaactcccataaaatttgtgccccaaacacggataccagcttgatcatcaaggacaagattattgttggaaaacttgaaggttccgaaagaattaaagggttcactagactacctcctcacgtacttatgtagtataaggccgggtttttaaggtttctcatttgtttcaagggtgaaatacaaaaatgtacctcacctaaccaatgagaggctttgctcgagtcatacaatcctatgcccttcttgccgcttagaatttcaaagagcgagactctcaaggcatagacaacaaatttaggggaaacttaatgtccctattattgcatccacgtaccagtgccatgtaaccgctgcataagtacactgaaaatcaagagactggttttaaaactaaatgatcgttgttgtttctaacgtaaatacttactaactaagtttcatccctctttcttttggttgcctttatatcatcctctcgaat

SEQ ID NO: 65220 - DNA, 662 bp, Arabidopsis thaliana landsberg
cgcaggtcttatcttcgtcattgctttctctacttgaattctcacgccaacatccatctgttatttcaaatggtaccgataactttagggatatagacaagacaaattgatattaataatataacaaggttgtaaagtagaaaccttttctaaagagcattgtgtgtctaagatgtggcagaagtatgacagttgcttgtacaagtctgcttcagtgtactgtaaagtcaagagttagtctgtgaagcaatagagagataggagttataaggttgatgatggtatatacctttcgtaagagggttccgttacagttaggatagtttgggcaaactgtcccccgttcacgttcaccgagtagacgaaagttgggggagcgggttgtgtgcttgcatgactcgtcttcacactgttgaaggcaaaatgtacaagaaaacgtcttagcataaattaagaaggacaaatcacaaatgttcagaactatgaggaaaaaacaaggcgagaaggttttacataccaccattatgcctttgtagtacattgacacaaatccatcgatctgtctttttacctgaaaggcatgataatgagttaataactgaagcatttgtcctgcaggccaaatcacaaggatacatattttttattctgagaaacttaac

SEQ ID NO: 65221 - DNA, 1499 bp, Arabidopsis thaliana landsberg
agatatctaaaaatcataccaaaaaaaagaaaaacattttatgatttaaaaaaaacaataactagatataggggaccaggtaaaataaaacaaattactttaacatagcttttgtcaacaacattgaaatgaaataaaataggtgattacataccatatgggagactagttcactccctttattcataaaattaaaaacaacaacgaaacttattcaagaaaccacgaaaaggtttcacttaaacttaagcattggcgtttcttggcccctgactaacaaacctcctgcagtacatgggacgtccgtagacagaaaagcaaaccttttcataaggccccagcacaaaatctggtatgaaaggagaattgaacatcaccttcccgaacaagccttgcccagcaaccttcgctgttggcgtaggcttgtgcacaaacacctccatcacactccccgggtacatcctaatcatcatcatcacacatatacacataattgaaccaattgaatcatataaaagatgtaattaaaaaaacaaattgttcgtataactaattaataactattgtatcaagaagcgtgactgtgagatgcaagtcgagatctattagtacaaactaaaccaaaattgttatcaatctatagacatcgtggatgtgtgtctactacaacatagccaaccttctatgatgcaagtcgagatctattagtacaaaactaaactaagatctttatcaatctatagacttcgtagacgtgtgtctactttctacaacacatagccaaccttctaagatgcaaggtaaagtaagtttcacgatagtgtaaaatcgccttgtgacaaatcatttgcactacataaccaaaaactatcatccatttaatagattttatgagttagggttacacttgccagttgaagtaacagaagatttggtattctgtgagaggaaacccgttggagaaggtgacaaacagagaacgtaagtccggatttggattatacgcaagcgcattagcattgagcacaaatcccgccgaagtactcatggaggccgtcgctctaatctcttttcttcccactccttttaacaccaagagaaacgaaattcctttttttttttccttcttctatatgctacgtctggatgcaacggttggggttataaggaaaaaaatatcattgactgcatagtatcaaaagattgaaataaatttatttcacatttcacggtgagtgcatgcatgtacaacgttttagaagaaatataaatcatttcagctgttattattattttctcattttaaaaataattttcggggttatgttgaattatgtctttttgtaaccgaatctgagtaatatatatttctacatatgcatcatattttttctttagatttaagagataccagctgtacatagtattaaattattaatacaatatctccagttgtattttctttattttgcttgtgaggccaattttaaaaatcagaa

SEQ ID NO: 65222 - DNA, 1014 bp, Arabidopsis thaliana landsberg
gagaaccttaaaagaaattataacataaaatgtgtaaatatttcctaggtatattcttggtgaaatatatttcgtaggtatttaattatgtctaatagtattgtatatcatcggaatatgtggtgtcttgttcatattaaaataaacaaaaaactataatatatatataagaatatgattcaaaatcattatgattatatatattcatattaaactggttagtttagccttcactattgaaggaaaaacaaaaagaatataatggccacagagatacggtcactgtatattaaatatttatttaccaatcaggccgacaagagtaacgtaagtacagtaatctaaattacatcttgtaatatataaaagagaaagtaaattatagcaatccataaatagccaataagggaaacaaaaccaatcatttgtccttaaaccggaatattttaaccggtgatgatgtctcagtagccaatgatttgattagtgaatattgttggtttactagataagcaaatgtaaaagaagttgataagatttgacaagtcagaccccaaaaggggataacaatatataatcttgattcttgaacgtatttatgtttctagaaatattgatgtttgatgttcgaccttttgtttctttataaccaacttgagttttgatatcttagacactcacatccatagacgtttgttaatacctattaaaacataaattatctcctctaaattaatactccaaaaatactcaacttccatcccaaggtgagtatttttggtgttacaaataatactccaaaatatctttaattctctgtcatcattgcatatattaactagaaatattgatgtttgaaatattaattagaaatattgatgtttgaaatattaactagaaatattgatgtcatttcaaaaaggtaaatcagctgattagtactataaatttagttctttatatttccaatattctttaaaatgaccatatatatgtggaatgattattttaaaa

SEQ ID NO: 65223 - DNA, 582 bp, Arabidopsis thaliana landsberg
agagatgaagcgttagacgtcgtcatgtttgatgtcaattttatggcattgctcaaaagaggtgttaacgggcttacattctggaagtctttgatttggtgatgcattgaatatttgaatgatatagtgttacaaatagattcgtagttgtacttctctcacaaccacaaacacctaatccgaatcaagatttttgcacttgttttggatatatatgtcataccaaaaaaaggcaacgagaaaaaatagggtcaaaattttgattagatatagctgaagctagaaagcaaacccatgatgagaagaacacaataaccgtccaatttttctgaacgtgagggatctgagtaagcaagtttaaaagattcaagaagctttctaataatatcaaatttatcaaccccactgatccctgttaagattcagcttgtgtgttcgaaactcccattacaaatgcatgcatatacctatgagcaatatctataaggtttttctttaaaagcacaaccattgttggtagagaacgaaacacacaccaatctataatatgcttcatgacttttgaattttgctgcataaatg

SEQ ID NO: 65224 - DNA, 757 bp, Arabidopsis thaliana landsberg
aaaattaaccctgataaggaaagaatcaagggccaagttcagtaacttagaataacaatgagagctacaaggacaaagaacctgcacctttcggcctttattaagctgcatatcacacatgttgcaatcgatatgtctgtgattctccataagctctcctttcttgcatatcggacaccatatctggctttcctcctgacaaacacatcaaaccagttaactggtttctaaggtcttgagaagaacaattctactctgtgaaagagaacctacctgttcactgtttaaacacatattctgagaaactaaagcggccaagtaatcatcttcctcgtcttcccatgtttcaatctgaacaaatgatcctaaaagaagaagatgacccacaaggcattcattcgaaatctcatggagcaattgtaaaagcaaagaagaatggtttatgtaccatttacgttagtctctgataacaaatccttatagaatatctgttgcatttctaacaatatctcttcactatcaccttcataaacacctttaagaccttcctcatattcccataatatatcatcacaatcttcagtcagagtcttattccccgaaaggtttctcgacgaatcctcaatctttttcaattcatcagaaacaatatcttggaaagcacaatttataatctcctgaaacaaaacaaaaacccattaacaaagcaagcttttttcttccattgttgagattcaaagaagagaaaaaaaaaaaa

SEQ ID NO: 65225 - DNA, 273 bp, Arabidopsis thaliana landsberg
gacagttcaacgacacttgttgggaccgtaagtctttgtaacgttcttcaagctcattcttctgggaacgagaatcgatttctgaaatggtatcaagaagagtgacatgaaatcaatatcaagtcgacgaccaaacaaatcagatgaatctatctcggattggattgaactatcattaattttttagaaaatggttccgggaaaattttgaaggaagaaaactagtgagggaagtgcaatgaagggcgaagaaaaacgtagcaagttgtttat

SEQ ID NO: 65226 - DNA, 322 bp, Arabidopsis thaliana landsberg
  unsure (1)..(322): unsure at all n locations
nnnnnnnnnnnnnnnnnnnnnnnnnnnnnnnnnnnnnnnnnnnnnnnnnnnnnnnnnnnnnnnnnnnnnnnnnnnnnnnnnnnnnnnnnnnnnnnnnnnnnnnnnnnnnnnnnnnnnnnnnnnnnnnnnnnnnnnnnnnnnnnnnnnnnnnnnnnnnnnnnnnnnnnnnnnnnnnnnnnnnnnnnnnnnnnnnnnnnnnnnnnnnnnnnnnnnnnnnnnnnctccaaatttgaccctttagagccttctcccgccttttccgggattgggcctatttaccggccccaaaattctttttcaaggcgtggtttccgattttttt

SEQ ID NO: 65227 - DNA, 671 bp, Arabidopsis thaliana landsberg
ttaacatactacgaaacttactttggttatggcatgaatctttttctgatttttgtttaataattttttttagcaaaaaataaataaattcagtggtgtaatgatcattacctcgttatattgaagttcattttaaaatattaatccaaaaccaagtgcagaacttattttcgacttttgagttagttaccattctcaaaacaatatactttcaaaatatatatctactaaaattgatgaacaaggatacgatttagagacaagaggatctaatagtgtatggatccacggacgaaacaatcgagacgattttcgatacatattgtcacagctactgagattcaaaaacaaatagtaactccataaataaattccaaattttgagtctctttcaacacatgtacttaattaattaagttcttaactaaatggtgtccttgggtctaggaactagacgcaccaaaaaagtcataaggaaaagaagtttaaatgatttttagttcctcaataattggaaccaaagagataggatcggcttttgatcctatcttcttggttaaattattaaacccaataaaccaattattgatgaaatcactcttgcttcctacaaatattattggataatatatatacgtattattaagtatttcttaatgatatatataacc

SEQ ID NO: 65228 - DNA, 1321 bp, Arabidopsis thaliana landsberg
gctccttcgcgaaaaaacccagtcccatgtggagttgaattataagtctctgtgttatcaggtcctctgccccaaaagctgtggcctcttagttctgcagcctcctttaagctattcatcaaatatttatcataacactgcgcagataggacagcacagcagagaagatatatcggtaagtaaactaataaattagttgtccaaatagcaatgtaagataataatgtaattttgtatacgcttatgatgcgtcaaaaagattacctggaattcaccaataccagggtatttccacccaaattgtgcagggtatgaaggatacctcagctccccacatggacctagtccaacttcaatttcagggatgattttctcctcaaagaattcatcaaattccacacgaaagcttctcatgtaatcaaagtaaacctacataacaagtgatttcatagagtcagtaaacacttcttattacagatcaacttctcattcttcctactacaactcgctgcagattacattcttcgaatgataatttgctacagattttttagcatggagtagtagaaagccatacctcaagagcagtccgtcctcttaaaacacgttgcttgtcaattccccaagtaaggcattcagtgttacgcctgccagcactgtcagtgaagtagatgtcaggattgctttgaccaatttctctcacccactcagggatttgtatatgcacatcatctccaacattgcctccacattcgtgaaacgacataacaacctgaagtcaattcaagtcaagaacactttaaaaaggttcatcctcaactctgcatatctttcactaaactgaactgagactcatcgatcaaataacattacctgaatcttaagtccaagctcacgaatcatctgaaaaagtttcttgtaaccactccagttataaacctgtggtgtatgtgactcaacaattccccaccagcagtcaaccataacaccatcaacattaaccgactttaaagttcttaactgatccaaaagctcctccggttccaccacttccgagttcatatcaatcactcccagctacatcattcaacagccaaatcaaccaaacacacacacacatctctagacaacacaaatactgtcacaagaagactcactggtcgcataacatatacaggcacacacgctgtgccagcaaaatcacgcacttcgccatgcacaattccttcatcaaccgtaacaaacgacgagtacaattgattctggtcacaaccgagtgaccatccaaatgaaattcccacttaggagctgatcagtagaa

SEQ ID NO: 65229 - DNA, 1528 bp, Arabidopsis thaliana landsberg
  unsure (1)..(1528): unsure at all n locations
ctgtaaatacgtacctttgtgaaaatatccatagcttcctccattgtttttgttttcatcacatacaatgcttcttctcgagcattttctaattgatcgagatgcaatgtcattggctctgtctctatcgaagacctcctctctaacatctccattctcttgcttacttccatatctctcagattttatagcttgaaaaagaaaacaaaaagttttgatgaatatctctcagtctttgattgattcttatatataagaagaaaagagtggattttgttgaatgtaatgaatcttcgaaaatatctcccgtttttataagtacgatgtggggacgtaagtgagagacaagaagatatatgacgcaacgtggcgtggtggggcggattacggcggtggattgggaacacgtggcgtgtgaaggatggtggtgaccatgcacgtggcggattagtttgtgagattgcgaatgcgatttttcgatttgcatgaagactgcagatagataacgtaacgagataattcttctactacttcttcccacgatttttattctttctagtattttattaaatggagttggtcggcgtgatgagatattttcgtttctttttaataatgatacaagaataagtacgtggaacaacttaggtgtggcggtcatccacttgggactcatttgataggtcactagaaatagctgtccctgatttaaatatataagcaaaaaccataatcatttctgtttacataactttaattttctaatcaacaatgtttacaatgatatttttacaaaagaaaacataagtaggcaggcagtttaagacgactaagatgcagaacttctcaaacaaattcaccttataagcaatgaatgcttttggctctctgaattgcatctcgcacctttctcattggttcatcgtacaagtaagctgggttatcaaactctgatgccaagctatcttctccaagcaatgctcgaaacgagtctgccacagatgatgaaagtgattcaagattgtatcctccttccaagaaaaacacacaccgccctccgcatacttcttttgctaaccgctttatatcttttgccaatgagtagtatgttgcggtcgtgaactgtaaatttgctagtggatccaggacatgagcatcataccttaagcagattaaagcaatgaagcagaagtgtttgtaagaatacgatgatatattcagttcaaaaatagatgaaaaacgttataaactcactcacccagcagaaacaagaataatatctggcttgaaccgttgagcacatggaacaatgatttcttcaaaaacggttctcattgcaatatcacctgaacctccaggcaaaggtaaatttagagtggtaccttcaccttttcctttacctatgtcactgattttccctgttccagggtagcttccgtcctgcatttntcagaaaataaataacttttgttgatttctgaaatctaatcctaactatgcgttattcaatcaatgatcttaacacttt

SEQ ID NO: 65230 - DNA, 555 bp, Arabidopsis thaliana landsberg
atggatcaccatataacaagaaccactttttatatattttaagatatataaatctttactggatatagaggttttaaccatcaagaaaacaaaacatatttgcttcgtaaaagtatcacaacaatgtcttcatcacaattatttatactttgcatcatcctgatttcttcatttcctcttcatgaatgtatgcctatgttgttttctttttgatcatcatcacgtatagaatcacataaccatatctttcataatcgatattctcaaattattgtgttacttctttttatacaggtgaaaatggaaaaaatgttgaagcgagcaatgcacctaaaccactttgcatgtcagtgaattgcgataataaagacagaaatctcacttgtgcttgttgtttggccaaatccaagaataggtgttatagtagcaaatcagaatgtgttgctgactgcaaagattgaaaggcataacttaataacaagctccactaaggaattaagaaacttgattagcgttatataatactactctctctagtattggttccataatatg

SEQ ID NO: 65231 - DNA, 196 bp, Arabidopsis thaliana landsberg
ctcactctgcaccttggcggcagggcgctgtggacaggtaggtactctcacttatcattctcactatgcaccttggccagcgttccgggtgtgcaaatcactcgaccaggtgctgtatcttaccaagtcataacatataaccttgagagacgaggtcgtgtccgttgtgaattcacaagtgagcacggggcttgcc

SEQ ID NO: 65232 - DNA, 610 bp, Arabidopsis thaliana landsberg
cattaattaaaaaataagaaagatatatatatatatacatatatatataagagtagattataaatgaaaaaataattaaggattaaaaataatgataataataatatgtataagatgggtaacctaactttacttggacggtcgacaaaaaaaaaaaaaaaaactttacttggacgagtatagccgacaaattcattattgggaagtgccaaaacaaataacaaagctgagaccaaacctaatgaaacgttacacataaactttcttaatccattactccaaagattttaggttattgttgacgaatcgtattcacccatatcatttttttagtttctacccacttttattgaactcctcctttgcgggtcctcttgataatactaatgttacgtcaggtaaccaaacaaaaagtgatttaaaaggtgagcacccattttttacaactgttttgaccacatattgcaatttgaataaaaaacgggtaaaataaacctaactacggacttaagacttttgattatatctagcgatttagcctgcccgagtctcaaattgggatgtaatgactggctaaaatttaataggttggaattccggcttttaacac

SEQ ID NO: 65233 - DNA, 325 bp, Arabidopsis thaliana landsberg
gagtttgctctatttatttttgcggtaaagggaagtggacacacagcatagtataaaccataagagacctgtatcatgttcaaaagatggatcagtgcccatgctttgttaaagaggatgatggtctatgcgtatgtagaataaaactatgtagcataaaaaatgttggtatacaatataatcatctacttgggaattaagtactaccgctacacgtgattttttgtttcgatgcatactactgaatcccttggctgcttgaattcaaaagtataattttgacgactgactgttcacttatacataccgatggtgatgttagggg

SEQ ID NO: 65234 - DNA, 579 bp, Arabidopsis thaliana landsberg
tacgagatccaatcacatgatcttcatccaatctacaaatctcatcaacgtccaactccatttgatgaaaagacgcgattttccacttcgcatccgccttgttgatatctctgttttccgaatcaagctcacgtatcttcacaactctgtaacgcaacgcgaacagaccactcactagtactaccacaacaattgcaagagccaagaacaagagtgttccatcgagtgaactattcctcttcacgttttggtagccactgcaaatactcaaccccaagttctgatttgttttagcgttctctttatcaacacagagcttctcgttacgtgagaacgcggtggatcctcccaccgctaaaagatccggtggtattcttcctgaaagttgatttccagacaagtcaatgaaactcagcttcaacttcacaagactcgccgggatttcacctgttagcctattccctgagaaatccaacgagtttaaagaagcaatctgagataaactgttagggatttctccggtcaagaagttcttagcgagattcagatcaacaagtttgacacaattcttcaattcct

SEQ ID NO: 65235 - DNA, 2722 bp, Arabidopsis thaliana landsberg
ttggctgtttcagagtttaaggttcatggtgaataacgaatatgatggtttatacattcccaaatctgtacaataatatggatattataacttgtggtattcgtttcatgatattcgtgcttgtcagtgttagttaatctgcagtaatctgtcacttaaccaaactcttgcagtaatggtctttggtagttagtataccttgtgttctgtcttacgggccaataagattgagaagctagttagtataccttgtgttctgtcctttcaagtttcatatattatatttctcaaatcttgttgtttcttcttgcatctagatttcaatatatgttactaataagaacacaatgaacagggaaaaatcgaaagcaaagggctaaacccgggactgatcgtccttcttgtaataggagggttgctactgacattccttgtaggaaacttcatcctttacacatacgcacagaagaatttacctccgaggaagaagaaacccgtttctaagaagaagatgaagaaagagaagatgaagcaaggcgtccaagttcctggcgagtagcttttgttatatgttgtcgggattatcctttgatgataactcactctgctggactagaacttgtatgactccgttactctttagttttttgatgttttcgatgtagcatgcatgatattttcttgagttgacaatctataagctttactgagataatttcattagaagacaaaatatgaaactgattgtttttttgcaattaatcagaaaagtcaacaaagccaacattgactctgtacaagcaaacacactaacaaaagatattttgaagttcccaaattcataatcgttagctgtagtactaaaattagcaatctaaatctctagacaagtcaggactgatgatttctgatggtcttggattcttctggtgatatattatatataagaataactaatcaactgagtcaggtctagtttgcacagaccaccacctggcatgacttgatgatacgaaccttcagagatttggatcattttggtgttgcaagatggagtctatgaaagaacttactatgtagatgttggaataattaaggattatgtaaagttgtttaaacatggatacatgatgactccataggccttttcatcccaatgatctgctttcttgcctcgtgatcagttttgttatgttggctccatgagactgagagatcctgattcaggtcctcttcatgctcatcatctgtagaaacatcaagaaatgttttacgctgtgagagactgcttgtctttgcataatctaaagtttgatcaccgccaaaagaaatgcaagcaagcaaatgatttggaacgtttctaaagaaaagttcttgtcaatgagaaaaattcacaatgagatttcaattgcacctgaacggtccaagagaggaaactctgttaggcgtctaacgcagaccttaagtgcttgaagctcagcttccttctcttggagtttggactgagtagtttgtagttcagcttcaagctcattgatctgtccttcttgttgttcgatgagaaggtggcttagtttcttgtccagctctgatgccgatattccaccacattggtatgactcagctccattaaccaaatccttacattcctccataacatcacttgtctaaggggaaaacaaaataaaagatgaatataagcttcagccattgaacccacccaacagcataatgaattgttggaaaaacaatccagatgaaattcaccttaatagatttgagaggagactctaggaatatatgtcaatggaaaaagataaaagcacactcacctcagccaagttcaatttctgcagctcagattcaagttccatctctaattgttccatttctactgcctcttgttctggctcctcagttaggacgctgctagcatattctccatcattgcctgacttgatatcgagagatactctactcaccatctctgatctattgagatctatctggccagatttctcagaacttgctgcacagccacgaaacttgaaaccctgtaaagatttaatcctagaaagttcatcttttagctcttggatgactttggtagtttcttctgttgctgcatgcagcttactgatttcacctttctctgctgacatcatatacatcatgcagacacccagtgctgagctgaaagaggaatgatctgaaacacagaagaatgaagcttcaataatggacaatgccaacaggaatatgaagagtcattgttttactgaaagaagtccaacaaggtacaatcaaacctcaaagcagttaatcaccataacattgaacccataaataaggcttattagatgaagcatttatggggacttaatagatgcagtaagcgaattagcacttggaaaacacatagataaggcttattctactctatagaagcataggcaataagtgattcccctcttatccaaccactataaccacaaagtctcttgcactcctacaaaatctagaggtctgaagattttaccgatcaaagagtactttttatcactcaaatctcaagaagtctaggaagcaaaacctaacgccattatatatcattctataacacaagatccctgaaagcttttccccaagcttaacacccctatatatcattctataccaaaaggtccaaaactagaaaaactcagcacacgatccaatcatc

SEQ ID NO: 65236 - DNA, 206 bp, Arabidopsis thaliana landsberg
  unsure (1)..(206): unsure at all n locations
tgtggtcgatgatcaatggccacacaacccccnnnnnnnnnnnnnnnnnnnaggatggcccatttccattattccggaggctaccagcgaggaccgtgcgcgcatgcgttggcctggaccaggcagccatcgtatgtgatctacgattcggctcactatgtcaggtgagatatgtgcgggtctcatcgaggatcaatggtgaggtg

SEQ ID NO: 65237 - DNA, 276 bp, Arabidopsis thaliana landsberg
tcctattcctttaggtttacatacaactacattgatcttatcccgggggccttgagatgcacgtgttttcaatttaatgccagataaaaaggatttcgggtatagttgtccttgccatggaccgggacgaggtggtacttgcgatatataggcttgggacacgttatatttggcagccctgcgcatgtcacaccctggaggttgatttatctttgtatattgaagacaatattaaactaaatggcacggtcacagaagacattggtggcgattgcc

SEQ ID NO: 65238 - DNA, 436 bp, Arabidopsis thaliana landsberg
  unsure (1)..(436): unsure at all n locations
ataatacaccagaataaaaattttaagttttttcaacgccncgctaattagccaggtgagtggtcatgtaatctatgttatcccccccccgttcgaaagttcaagaaatgttttgatttttggtccatgtgttaacaacatagtactatctggtaattcaaaacgacgtagtactgacttaatattattcacttatttcaagctctcaaagcgagcgcgtgtaactctttcaacacgaacacgttcttcttctctctgccccattcaatacatgaagaagaacacagctgatgaagctacttccactaccctttgattccaattcgaattttcccccattgtaatcatccgatgcagcagaaaaatacctacaaatttcgattctttttgtaatccatnnnnnnnnnnnnnnnnnnnnnnnnaagtgtgtgttttt

SEQ ID NO: 65239 - DNA, 693 bp, Arabidopsis thaliana landsberg
tatttcgacggtgccatatatgtttttagacctactaatagagtgatcgggctatttcttcgaccgaattaacaaatcaatgtatgttggaactcttgctataccatgttaaagtttataaacgttcaaattaaattaactgataatagatagattgattaatatcttataaatattactcaaaatcttttcccattattttcatgtggaatagattatttgagctacactttgcaaagtctatatctgctcacaaaattaatctctaaaacatcgacaaatgaatttaataatataaacaaaagcacgataacaaatgaatggtgatgattcataaaaaatagttggtcgtacacttatacgtatattatgtacacacaagtcaagatgactgtatctagcgtgcgttcaactatatatacatgtagaccctgccataccagttgccaccatcaccatctaccaaccccaaccccattctctcaattcaaattccaaaccatttctcctttatacgcgtatgaaatacatactcttcttttctttcccttttttactttttatcatatgaaatatgttatagcaaatttggtgaaatacatcatccgatcgtgaagaaaaatattgaataaccaagctaataaacaatagaatttcttgagaaccatgaaatataacctatatatttgagta

SEQ ID NO: 65240 - DNA, 337 bp, Arabidopsis thaliana landsberg
  unsure (1)..(337): unsure at all n locations
aacgaaacaaaggggaaagagaaggcaaaaaacgagaaacccccacaacccaaagaccacaaaacaacggacacacaaaaaaaagaagacacggaacaagcanacagacacaaccacgcaagagagaagcacaaagagcgccggaaaaagaacgaaaccaaaggacacgaaacacaggaacagaccacgcaacaaaccccaaaaaaaaacaagaagagagcccgacaagcgcaaacaccagacaccaaagcaaccgacaaaagccgacaccccgagaacaaaaaacaacgagcccggcaccaaaaacagacaaacaaacaaaagcacgcggagaaaa

SEQ ID NO: 65241 - DNA, 2475 bp, Arabidopsis thaliana landsberg
  unsure (1)..(2475): unsure at all n locations
catagaaagggatattaccacgaaagcagcggccattgacgaacatgatacaattcatcaagctttctcttgaaagccctttgatgtcataagctcttgaccttgtccaaagactcttaccatgagaattcactggttccgacaagcaaagagctcttgtgcaatcacttatggccgcatctacatctccaagaagtaagtaacactctcctctttcgctataaagattcattctctttctcctaagttttaaaggacataagcctattgcttcggtgtagcatttaatagctccctctatgtctcctacatgaagaagttggtttgcttgctgcttaatcaaatatacaacaacacttgtctctctcagaaaatcttgattcttactcataaactttctctccctccttctcctttctactttattcctccatagttctttcaaagctttttgggccttgtgagagtaagcacaacctttctttgtcttgcagtaatgcattaaaagaaccttagttattctatcacctaagttttttctgacgttaagagctttaagctcaactaggtctactagataaaacaatgacatctctaagacattgtaccttgttgcttggtctttaagaagcagcaaaaggcaatctatccccatgtattgccaatcatcagaagaccgggagaggttacatagactcagtatcatttctctcgataccgatacatgccttcgcccttgtttactataacaaagaatccggattagtccgatgcccgaaggagaagtgtggttaaccaatccaccccacatttgactaagctccttgagaaatgttttgttgcaaataagagaaatacacttttgcttgtaagcaaagcaattgagtaaatgaagtgaccagcattggagttggcttgcccattcctcggcttttcggtcttccatctctaaccctccaagtcctctagtaagcaagtcactgtgatacctcactcttccttctttttcttgaacactcacaaactcttcatatacaacatcaacacatgtcattgcaatctccatagctaatctcaccacctcatcctcgtaagcagccactgcctcaaacgttgtctcgtagctcgccaagtgacctaacgccctaacgacgactctttgctcgacccaactcatctttcttctcataagctcaagcaatggagctatgactccagactccacagcttttgtagcaaaatcgggcttcttcatggtgtaagatccaatgatatgagctgcatagtaaggaacatacacattttgtccagtcattacccattctacatcctcaagacctttcttcatcaaccttgtcatgcactcaaagacaccgagagacggtaactcggggttctcggggtctgccatggcgtatctccagatgacactgagcgtgagagcaagctctgtatcatctcttatcatgtgcatatctctcagagataactctaaccatgcttttctaacacaagggtctttttcctccatggcacaagagaaacaacagggtctggaaccgacaacaacgtgggtcctgaccatcttgtttgtattcctgtaagagaagtggtccatgaaagatctgagatttgcttggtcttttggctgttcttggtgattaaagaaggttaaagacaaaaagggaaaatagggttttgtatgtgatccaggtggatatacagatcaaagtgggtttttgtgtattaaaaatgtgaactatagtggcctagtaatgtgatgacatctagcagccgcataagaaagtgaaatgcaaatggtccttttcgcttaaacaattcaaaaaactatgtggtttttaactttgtagtacatttctttacaagaaaaaaataacttggtagtacaatagtttatactattttatcattgtaaatcgatagtatatgtgtaacagagacatttttctactattttctataagtgttgtctatgtattactagagaattcaaattcatcaaaacatagaaattaacataaataagcaatgatagaaaaacaggcctggcctagtaaatctcaacaatacaaagacattctgttttgtgatagcatagtcttgatgtgttaagactaacctaagatttaacaaaaactaaaaaaaaaaacattaagaacccgcacctaaaaaagaaaaaaaaaacaaagaaaaacaacacaatgaatcaatcaaaacacattcttaggttacacattcttcattctaccattcagctctctctagatattgagtttctccagaactttgttcccaaatttgttgcacctcatcattggaatgttacgctctatatgatacctcaacatccggcgcacatcgtcctgcacacaccanacaagattctcataatctcgcanaatctctatcagatcacctcaatgaaaaaaaactntaagacttacgtaccataga

SEQ ID NO: 65242 - DNA, 732 bp, Arabidopsis thaliana landsberg
ggcttctgcctccccgtatagcctgtaaagaacccgcacagtcaactcatgtccctgaaaacataagaaaggataaatctttaaatgactttttaatcaattagggatgtcatccaacattagagtaagatattctagagtcgagccagttcgaaacccatcaaaattagaaaatatactaagttaggagaagattagaacctaaatcactatctctagcaaaaggatttcattaccaaaattgggccttttgatgctatcaaaaaagtaagcgtgtatcacaaatacataggaatcaccaatctaattgttcaaccttcaagtcaagaatacaaattctcacctcatgattcaaataatccgagagaacgtgctcctgtaatattttccaagggtctaactctgaaggaaactgcaaaaaaaaaagaaggcaaaagtataggtatatatattaggaaagtatggcactctgaaggcaaatgtgagacagaatgccatcatacttcaaacaaacatcttgccatctagcatgcatttgatataaaacaggaaagtataaacagccacaaacataatacaatggtaacaagggcacctgataccacaaaccaggctcttagagtagaggcaagtgaggtaagaatcatgcagaggccgatatgttcatatttatcgaatttcacaaaaacttatgaagagtaataaatcacaagctgaaatgtcagaaaatat

SEQ ID NO: 65243 - DNA, 443 bp, Arabidopsis thaliana landsberg
aggtgcccattcttgtactatagtctacttagggaaaccgaagctgcttatccatcaagtgcatgaaggtagtaaatattggtagtatatactgccttccatgattctgtgatagtgacatttcgacagatttttttgataaggcttgttgagacgttgacatacctcgccgtatccacatgctaaatgcaaagcagacctttcctcagagtcttctacatctttgttaccaccagatgccaaggcagctttcaaaccctggctggttcaggaaatcaatgcgcagagagtttatgagctaacctcgatcaatgagtccgacttaagtataaaatatagaccgtcagaaacacgagagactaacagtgtatgaatcagtttacctcgacatcaccaagactagcggtctggtgaacaatagactcttcctcttccccttcttt

SEQ ID NO: 65244 - DNA, 764 bp, Arabidopsis thaliana landsberg
aaacacgcttagaattcataccatcaattttctagacctggcaagtgataacttcctagtcctcacaaacctaattgttgcgctagcgatagttcaaaagcttgtggcataaatagctaaattatccaactcattccagattcttttgcccctagcttcttagcagcttctctcactttacttaactgatcccacatgcctaacgtagcataagcattcgaaagagatgtataaaccgatggatcatccggaaaccccttgagtaatttctcagcaattacagtaaccagtccggcattcttgtgagttccgcaagcagtgagcagagacgtccatattgttttgtcgggctccaacggcattttatttatcaattcgttagcctcttggaacagcccggcttgaccaagaagatcaactacacaataataatgctctagatacggttcaagaccatattcagatttcatcgtttcgagggttgatcttgcttcttcaagtagtccagaatgtcggcaagcagaaagaagccccaaaaaagttacctcatttggttcaattccaatattgatcatcttgtggaaataccgaaacgcttcttcgactcgtccgttttgtccgaatccaacaattatccctgtccaagagacaacatctctttctaacataccatcaaacaacactacaccattatctatctcaccacattctacatacatatctactagtgctgtcgctgtgacaggttctgattcataaccttt

SEQ ID NO: 65245 - DNA, 134 bp, Arabidopsis thaliana landsberg
tacacccaaaaccatcaagcgaaggaccaacggtaaccccatcgtcagcctcgccagtttaactgaccgctacgcatgccgatcaccagggaccagaaagcgtaaacaacacagcacaaccagtccatggaccc

SEQ ID NO: 65246 - DNA, 568 bp, Arabidopsis thaliana landsberg
ctataatatgtaaacacctacgaaacaaaaaattagaacttagatactccagaaccccaataatggatcgagagagtaatactagattcaccaacctctacgtacgtggttttagataacttctaccgactagaaattctgttgaaatccataatttctttacacaaaaaccaaattcgttaaactaggttccctaacccaaaataaatattgttttaaacaaagtcatgtaattactattatatgcatgtcatcagcatgtgatctgatttgtaaaagaagttttgaaaaacgaaagcttgaaaaagtaaagaaaatagctttaatgtttaaacaagaaaagttacaatatgtactagagagaaaacaggaatatgataaatatcaacgtattaaaacattaattgtatctagaatactatttttccaaaaatgataatgggaaatatcattaaaaatgaatgaaaataataagcaaaaagaaaggaagaaaagagaagaaagcatatgcttgtgtatcttccattgctttaattccagcaatgaatctacaaaatgtaaagagtga

SEQ ID NO: 65247 - DNA, 1426 bp, Arabidopsis thaliana landsberg
tgcttttctaatcttctctctgttgttgagtttgctctttagcagaaaggcaaagattgtgcaatttagaagttatgatatgtctggatgaatgtaaataactaaatattacactgcaattcttcttgtctaacatgtcatgctttattggtcatcacagataatgcccacttgcctagttccataagatcagaattgaggctgccttcatagcaaaatgatttagaaagacagtgagtcatcaatgatcggcaccatggggctctgccccctctagcctttattcacccatgactccagaccccaagtaaaataaacgggtgatgaagaagaagagcagacccatcaccaacactaattcagctaatagtatgagtattcagtgtggtgcttttgtttcaccctcactttctcctattgtagaatgtgtttttttcttttaattgtttctgtaacattgttccttcctgacgctattctatgtttcattgttttggttcatctcatatttctcttctcaatttgttttggtcatttggactccaaagagtgttggtcttctcttagtgagttttatgcagttactgatagaatatagttctatcagttacaaggcccatgtttattacaatttcaaacaaattatatatttgaagggcccatgtttattatgcccacgagcactgtatacgcgcgaaacgtcttcggacacactctcagtcgcacgctctttcacgcgccttttcgatttcacattcggatccgatttgttcacccgccgaagatccaccggcatcttctctaaacggctctgtcgagaaggatcggcgctattattgctggaggacgattgggtgtttactttttactagtaaacggagtaatttcccaagcgaaaggtttcatttttgagctccacgttgaacgaactaagcggtttctcggagttctcttgcttcctctccacccaggttctcccttcataacttaatttacgttccttacgttttgggtctctgagcctctgttgcccacaaagtgttcgacgaaatgcctgtgtgaaaactcacaatactcatatcatgaaattgtcagcgcaatggagaaaacagacgaagagaggaagaaggctcagatgctggacgctcgggccagaaacattagccacaatgttcgctgcactgagtgtggaagtcagtccattgaagactcgcaggcagatatcgctattctccttagacaggtgtgtcctttactccgttttttcttccaaagattaagttgaagatagttttgctgtctactcttctaatacacctgagttttgtagctgatccgtaatgagataggagctggaaaaactgaccaagagatctacagtaagctggaagatgaatttggggagacagtgctttatgccccaaaa

SEQ ID NO: 65248 - DNA, 1988 bp, Arabidopsis thaliana landsberg
taaagagcttactacaagcattgaagtccaaagctttatcattcttttctaatgctgagttgttatatgcagatgtgtgtgattgcaaatgcttcttcagagagcgtagatgaagttcttgcctttattccgtcgctgaaggtgaggcttttagaactaccagagtctgactctgatgtgtgtgttgttattctttgagatcttaattagctttgggactcttatcaatcacagactaaaaaagaggtgatcaatcaacctctacaagatgcattggaggagctatccaagctgaagaaatcggaatgatgagcagcagactgctgcagtgaatggttcaatgctaggagtagtttgcagctagacatcataaaatgtatttacgtctttgcctttctcaacattaaccaacctgtgcaatggcaactttcgtctagtttggtcattggcactttctatcacataattttcaattaaccatctgatttttcattcttaacgagattacaatgtatcagaagatgttaagccgccaaaaaaatcagccggtttatagacttccattatttcttcttctaaatgcatatactgtatatttatttaatagtctttcatagacttccattatctttatagtttatactaaatattggaattttccatatatcaaattttctattttagtttctttacgatatcttaattagtggaatgcttattttccattttaattgagattaccatatatgaggccataaattagtatatatatatagacacacactgagacacatagatgtataggaaattaaagacaattatcgtagcaaggttttttgaaactctcacagaagaaaacttttttgagaaaaggatcgatcacaatgtcgctgttacgttttgctatactttgcataattttcgtttccctctttggtatgcatgaatgtaagtatatttataattctagttattgcctcattattgctttcgatcaccaccatcatcaatctattataatcatcgatgtctaataattgtgtttcgtataggtgaaaacgtggaggctttcgtggagaagaagataaatgtacccgctcatccatgttaccatacttattgtggaagcatgatacgcaactgttattgctgccttggaaaaaaatttgattactgctccccaaaccaacaaaactgtttgtttagatgcgaggaggttaaccggattccagatttcccgaagacaaacggagtaagcaaaggattagggcccccactctatttatttttcttagggcaatttatttattttgttttaggtttatagtttatttacgggtgtttaattataaaaccctcgactaagataaattgtaagaaaatcctccaattatatatttagtgaaaaccccctcaattttactattacacatatttttgaggatttcgtctataagaacatcaaagtgaaggattttatcaactgtatgccctaattctaaatgttggcgcttgatacacatataagcaagagaatgtagaagcataaaagctggatattcttccaagagtctagaaacagaagagaccaaaagaaggaaacttgatggtttgtgtagcatgtaacagaacagatgattaaccacgtcaagcttgcaattgaacaagtgacaagaagaacacaactgaataggctaaaacatgcaagaaaacgatttctatagaaggaagaaatataacgctttaatcgttttcgtttgtgacaaataaagcgttttatttgctctgccctttcacatgataaggaagatgtatataactctttattcctttttgtttgtgatttctaaatacaatttagctctaaaaagtaagaaaatagtcgtgaatgtgtttacttatctcgtcaggcctttcctcgtggataaaatgaccaacgcctttaattaccacaacttcgtccaacaacgggacatggctcttaaacc

SEQ ID NO: 65249 - DNA, 395 bp, Arabidopsis thaliana landsberg
tcacttgtttatgagaagagatgattagacagaggatttttaatttgttcttacttgagcccgcaacaacttaatatgctcttgggtttctgctgtgtgatatgtcaaattcaggtgctttccaacgttttcacgagcataaggaaagagaacatctgtgacgaaagtaatgggcgtagttgttccttcaatgtcgaggacaatccatcgctgcatgcaaccaaataggttataagtaaatttagacttctagagatatatgacaagagacaacagtcactttttacccgaggccattctctttcgtattgtgaatccttgatctgtgaatgtatggttctccggataggcccgtggtctggggtagcagcatccagacccagttgatgaagctt

SEQ ID NO: 65250 - DNA, 699 bp, Arabidopsis thaliana landsberg
tctgctttcacttttagattaaaaccaaacaacaataggtcgtcattagtaactactatcttgaaagcagcaaatgggtagcttgtttttttttccgcattcaaacatggaatggataagcagaataccttttattttcgtaaaacacatatcaatgggctttatagtttggagcctaactgttttatttatttattgcgctctgtatttattttgaaaattaggatgctgctatttgagagttcctcctaggtcaagcatatgaaaaggcagttatcatcaaaccaccggagaattccttagcgaaaggtacatttcatttctctaaaatagcaagtttttacgagtctctgtattttgtttctcattgtttatgtaggtttttctagggttttctacttgtaggtttttgttgtgctcgctcatggctgaaagagaggttgtggtgttgtgttactggaattgtcatatcaagcatggccctgatggcgtctactttgaaggatcgactcctaaagagatgagagtcaagaaaaatgctgactttagcagatttctggatgagctttatctaataactggatttgataagcaaaaatcaaagcttgaaatagtcgctaggtaccctgttgttcaatcacccaataagtttaggtatctacttcatcccgtggcgaacgacattcattgggagaaaat

SEQ ID NO: 65251 - DNA, 571 bp, Arabidopsis thaliana landsberg
ttacgaaaaacacaccctacatagctaagaaaatgatgatggttttatgaacctgaagggaactttaggatataactgattgacatgaagccatgaaattaacttatatcaacctatacactagactaaaacatgacagaactaatatttccaagcttagtaacaaagttttcagcatctagctgacagaactactggtcgaatgcagtagtatctaacatgaacatctatttcaccaaacaaaagaaaacatcccatcctgattttcagacagaacaagtttaggaaatagaatacttaccgggaaccgtttgtcagaattatcaaacacaatctccacgaacgcggacacgacttgatgaccagcaccttcctgtccaataataacaaagctcagagttagaaaatattcaggatagcatgaaaagcactcaacgaaacaacactaaagcctgtagcaaacttgtagacatacatggagtaatgcatgcctatcttcactgcgcagattttggtagatgtactcaatacaaaacgaatcgctgcatccaaaaccaaagaattcacttag

SEQ ID NO: 65252 - DNA, 547 bp, Arabidopsis thaliana landsberg
gccatgattgtcggcatcggtttttcgcggggcttggccaggttcttcggcaagcgtgacacctggggtggcgggctgttcatttccacgctgcgtctgctggcgtttctgttttattcgccgacagcgatatggctggtcatgctttcctatattatgcatggctttttttatggcatcacgacgccgttgctgtgggccatgatcgccgacgtggccgattattcggaatggaaaaaccatcggcgcgccaccgcgattgtcttttcggccatgctgtgcggcttgaaggccggcttgagcattggcggcgcactggtcgcgatgattctcgcggcctatggctacgatgccagcgcgccggtgcaggcgctcgacgtggtgcacggcatctacctgaccgtcagcctgtattgctcgattccgttcctgctcggcgttggattgttgttcttctacgagatcaacaagtcgatggaaactgcgatcgagcgcgaattgcatgcgcgtcggcgcacgagccggtcgatgacccgatgctcccctg

SEQ ID NO: 65253 - DNA, 349 bp, Arabidopsis thaliana landsberg
  unsure (1)..(349): unsure at all n locations
ggcccaacacaaagccgggcaaaggggaagccagaagccgaaagaccagcccacccaaaaaagaaagagaacacaaggaaccacccagcagagaaagacaacaaaccccagaaacagaccaacaagcaanacacagaaaaccccaaaaggcgaccacaaacaggaaagaaccagaaagagccagaagccaaccggcaaaagaaccaaagaccaaaaagcaaaagaaagcccaaacaacagagacaacaaaaaaagaaacaccgaaaccaaacaagagaaacggaccaaggacaaggcgcaaaaaaaaaaacgccaacacgggccaaaaacaaaggggcaagcaacccca

SEQ ID NO: 65254 - DNA, 131 bp, Arabidopsis thaliana landsberg
  unsure (1)..(131): unsure at all n locations
acagagcacggggccaacgcgggggagaacgaagcaccgaggggccacgacacacaaaggnggcagacgggaagccaggaaggggcaaccccccgggaaaaagagagcaacaccgccccccaaaaagaaaa

SEQ ID NO: 65255 - DNA, 125 bp, Arabidopsis thaliana landsberg
aatacaacaagagcttttttctctagctaatactacatataaaataagtactaatgtccagaaattcaaatttctcattacttgttgaaaatccttggaccttaatgacaagtaactgttctatt

SEQ ID NO: 65256 - DNA, 401 bp, Arabidopsis thaliana landsberg
agaaagaaaaaatgaaaggcacagagaaaatttttaatccttttattacagatgcaaatagttggaagaacgagaattcaaatgaatggaagacatctaataatgcttcatcaaagcttgacagtggcaagagggcaaatcccacacataaaattgtgcagccagataggccaataaacacgggctatgcttctaatcaaggaggtgttgaatatatgatatccaaactaaagcctcaccgtgaagccgctgctgccattctcaattcgtatctgatcccttcacataagcctaaaccttcacagcgaccattgttccgaaggtcacccgccagcgctcatacaagatcacctagtgcgatcaacggtgacatttccttacatatgcaacctgtttatgtt

SEQ ID NO: 65257 - DNA, 146 bp, Arabidopsis thaliana landsberg
tataaaacgtgggccttctacggcgagcatgttcgtgtatatcagacatccctatcacctgttggttttaccatcccgagatgagggaactattgaagcttctaaagcagccctttccgctgctcctacatctatctaggaaggaa

SEQ ID NO: 65258 - DNA, 773 bp, Arabidopsis thaliana landsberg
ggatgactggaactggcgcatgtacgagcactattacaatgagctgacctccggcaggcagcaaggcttcgacaagctcttctgggaggtcttcgagcaagcctttgaccaggccttgcgcgcggaggcgtgatgaagaacgccatcgcgatcctgttcgctgcaattctactgaccggttgcagcaccgtgggcaatgtctttaagaagacgggccagatcctgaagaacccttccatccaggtcggggccgccgaggatcaacccacacaggtcgccctgagcttgttcgccagtccggatgtaaaccccaatccggtcagccgccctaccggcgcacctgtcgaagacactgagccgctggttttggcaccggaggaggaggggccgttcgcggttagtctgcacagcgcaagcaggaacgaactcatcgagcatctccgtgcgttgcttggtcatctgcaggaagagcaaacgaactcgcccagcgcacttgccattcgccagcgggcatccatccccggcttgatcgttgacgaccagtacccgccattgaccttgggcaaagcccttcctgaagacttgtttaccaagtccgtgacttcgcgcgggccataccctgcaaactggacgctacggcagatgcatcccctgtcaggagctgaagctaaccaatggccccaggttgcgcggaacccggaccttggccagtacagccgtggcgcaggcttggccccggccgtcgccgacgcgcgtgccatgccgagcatggc

SEQ ID NO: 65259 - DNA, 457 bp, Arabidopsis thaliana landsberg
  unsure (1)..(457): unsure at all n locations
ccaaaggtccagagaaaggcaggagggccctcaagggagccccggacgacaaccccctcaaaaactcgagcggcancaacccgagacgcaaactcgagaagccgagagcagagagcccacccgggcaagacggcagcaacgcgccccngcaaggaggacccgaccggaagccaacgcanccccaccccggaagccggagccaaccccacaccaggaggaacagcaggaggccccccaaagggagggagacgagggaaccccccaccaggagcaccaaccccnaggcccngagagagccgaaaccgagggcgaaagacaggaggggccacgcgggagggagcaaacgacgcagaggccaccccaaacggccaaggcagagagccccgaggcccccccagagcggncaacacgagaaccccagacacggcggaacacaaaaaaccgaaaaccaacccaa

SEQ ID NO: 65260 - DNA, 751 bp, Arabidopsis thaliana landsberg
  unsure (1)..(751): unsure at all n locations
ggatgatccggagcttgatcaaatgatgaaggaaagagttagatttggagatccaatggctcatttggtcaaggtattgaaaatacttctgcttacgacaaaattatgaataaccatgattatcttgtcataacagcattatcctaacgtattgccgagtttttatatcgcagaaaagaaagtacgagacaactcttgtggatctaggagacgatgaggagatgaaaaaatctgggttcattataccacaaagtgtgcctaaacatagttggttgacgagacggttggaagctgcatcaaaccggtatgggattaaaccgggtagacactgggatggggtcgaccgtagtaacggtaagctcctctaatacatttcttttcattattcacattcaaagattcctttagaagattatttctctgatctgttttatctttggtgtattggttcaggaactgagaaggatctgattaagaagaccaatgagaggaaagcaacggaaatagaggcttatctctggtccgttgcagacatgtgaatcagattttgttcggcaaaatgtggtttgattcaggagataaccattctaaactgaggaagtttgaattctggttctagtttgaaatgtgagataactatacatactagtatggcctgagtcttgtccggtctgtctgatgcagccggtaagtaagaaaccagtaaaaaaccaaactcaacgttgagaaaccggtacanaaacagaactcg

SEQ ID NO: 65261 - DNA, 631 bp, Arabidopsis thaliana landsberg
tgccggtttattgagataggtaagtagcttcttcatctcttctttctcctttttcgaaggtattgttttgtgactctctggaactaaaatgagagctattgttgataaagttagcaagataattagtttattggaatacctcatgatgaatcaaggatcttaatctatatttttcaaaagaaaaaatgaagcagacaactatatttattgtgtcacataaatctgagatcatttataaccaacaaagaacctatacacagtaaatgacaaatgtatctccctctatctctattgcccatatgtagatgctaaagtaagatttctcctttttttaatgtacttttttttgtataaagtatattccataagaaaaaggaaaagcttgtttatggatcaattgaccccaaaaaaagtttttagatcaaagcccaatatataaaaaaaaaaacacagtagtgacacaaaggaacttaaataaaccatgaattgatctataaacagtagagatcgataaggcgaacattttccatgtgaagtggtctgtctatctataatatctctgacacccaatattttcctctataatatcattcacatattttgatgaaaccattcgttttaattgtccacc

SEQ ID NO: 65262 - DNA, 1815 bp, Arabidopsis thaliana landsberg
ctggggcagcgggtgcagttgcagtggcaggagcagctgttgtctgctacatttaccactcgaggagggtttgattctaggtatactttttatgaatttgatttctttgctttgaaagtgtttcctacgtaactttcttgttatgtgcttgagaatttgattcattttcacaattatggagtcttcttttttgtgtgtttgcttactttatcttcattacaaatgttcttggcaacaatcaaaagattgaaaaaaaggaaaaaacagcaagaggaattaagtaaacacacaatccgaaattactctcaagaaaacggaagtaaatagttagaacatagtttgaaaaaactttttctctgctctgtttcttcacatggaagttgttcttcaagtagcagatgatgatgccttgagaagatcaagaattccacaacagttcttccaccatggcgtctcggcctcgcgatcacctgctgctaggagtggctgcaatcatgttgaataagagtattagactctgtcttgtctcctatctaattttggcacaagagatataagaatatgaagttttcttttggtgtttcgattggaacctgattgtcagtggatacgggtaagtcacggtttgcggttgtggctgctgagtcagcgctaccagtaaagtgtgtaacagctcccatgattttggaagagacttcatctttcttctcctctaatccgtgcaacagggttttggctccatctatgcctcttgacaccacattgtcaactgcatccttgacgacattggtcttggcggtttctgcagagggcataacagtttgttttgcttcaccaagagcagaggtggccttttgcaaaagggagtctgccatttttttactcctttgtctctgttggttgttttattcgacaagacgctggaaattataagaaaaaagagaggagagatatatagtgagaagaaaattgagagataaaaggggtaaatttatagctctccaaattggccgcggctgtttcaacgacctaaacgttacttcatttgtctaatcttaacactaatattaaactggtgattagttttgtttgtgtggagaagacatcctttgaaaatgataactactattgactattattggtaaaaactctaattatatcatggcgacccatgttttacatataaaccttatttaatcatcgctgcatgagtgtgagtctcaagcaacacattatgtagcaatacaacacacgtggagtttcagtttttaggataaagtattaaaattggaacacatatatggtctagagtctatactatcctcgtacagatgcgtagcctgaagtctcgtatttgcctccccacctgtgaatttccaatggtacattatcaaaacctaagggattgtttcaggaatcattcagatcaaaagaaagtttcagagttgagtttactatcccttaaaccgacctgttttcttctgtttcagggatttgtagttcaatatcatcatcctcaaagagcttaaacaccgagttgattttctcatcatccacctcatctaatgtcgctggattccactgcaccaaacccaatcatagaagtttgtaagtatgttagatgcgatctcggttctaagcagactcaaattttgctttctcgagtggacacatacctttggagaattgtctttgtctatggtcagagcccttataccctgcgagttataacacagaatcagaaaaagaatatatagtgagagtagcatgatgcggcgattttcataaaacaaaaagccaaaaatcgttgcagta

SEQ ID NO: 65263 - DNA, 2225 bp, Arabidopsis thaliana landsberg
  unsure (1)..(2225): unsure at all n locations
atgtaagaagagtatgagaaaataattaattacatagattttcgaaatattgattcagaagattaatatgttatttttttccactcacactactcattttacaagagatactccagagattatatgtgcaactctgtaatttgattcaagattccttcactggaatcaacataaagatggaatatctgagtcacctttccaacgaatattcgaatataattatgagaatattcgaatataattatgagaatattcccactttaatattaaatataataccataatcgtcaacatctcagtctttaaaaaaacagaaaaaaaaaatcctacaataccaccaaaaaatattacttttctctctgtttcgccttcaaaaaaacgttcaacaacaataacgaaaaaaaaagaaggtgcacatgataatgataatactaatatagaaagaatctctgacctcttaaggaaatgcagagattagtgagtatggtttctctgtctctcaagtgtgtggctttagaactcgttaaaaaccattcccaaaaccatcaaaaaaaccaaagccttccctctctctctctcttagcatgtgaccccaatctgagtcttttccattttccatcaagagaagaagactcgactctctatcttcaatcttcaagtccggctttagccttaaggtgcctcttgaagtccataatgtcaccattccatttagtgatgcattgtttctcgcaaacccatatctcatgagccacttggttgatcaacctgaagtcgtgactaaccagaaccaaaccaccatcccactcattcaatgcctcagcaagcgagtcgattgtctcgatatccaaatggttagtaggctcatcaagaagaagcatgttaggctgcttataagctaaccacgcaaagatcactctgctcctttgtccgtcagatagattcttcattggcatcacttgagccttaccagttagaccaaacctaccaatcgcagctctcattttctcctcttcagtacccgggaactccctcatcatgtagagaagtgcaggcaattccaagtctagcttctcagccagatgctgatggtactgagcaatcttcaagtggttgtgacgtcgcaccattccttcagttgggtgcaattcaccagtcatgagcttcaaaagtgtactctttccagctccattaggtcccacaagggcaaccctcgagtccaagtcgacaccaaagtcaatgttcttgtaaataagatagtccggtgtgtaaccaaaagacacttcaacaaactgaagcactggcggtggaagcttcccaacatcagcaaaacggaaaacgagaacactgtctctagcaaccttttcagtgagcccacctctctccatctttgccaatgttttctccttactctgtgcttgacgagcaagtttggctgaaccgtgaccaaaccgagcaatgtactccttcatgtgagaaatctgctcctgctcccatctgtattgtttcatctggttctcttcaagttcagaacgagtctggcaatactgatcaaagttaccagtgtagtacttgagctgtttgctctgcatgtggatgatgtttgtacacactccattcaagaaatcctgtgagtgggataccacaacaaggatgcgatcaaaattcttcaggctctcttctagccacacacaagcttccaaatctgttccaagagacaacaacaacatcagcgacacgatacttaaggaaaaccatctgaagcgagtacaaagaagagagattaccaacctaaatgattagtcggctcatcaagcaaaaggattgtcggcataatgaagagtgctcttgccaatgcaattctcatcctccaaccaccagagaaatctttcgtcttcttcgcctgcatttccttgtcgaaaccaagtccaaacagaatttcannnnnnnnnnnnnnnnnnnnnnnnnnnnnnnnggcgtctaacctctcatagatagattgaagacgctctccgcctccatcatcctgctgtacaagaatttcaacttctttctctaacctcaacctctcctcatcacagctaacaacagcctccagggaagacatgtcagtagcttcaatctcgtgagacaaatggtagataccatttgatccggaatcggtatctctctgcgtccgattgcagttaaagagtggctttcccaccattcaaccaaggagacat

SEQ ID NO: 65264 - DNA, 360 bp, Arabidopsis thaliana landsberg
agggtggaaccctgggatgggttttcctttttgacctgtctcctacagacgctagacgctctatcatgctggactacggtagcattgtaggaacaaccgaggttgctggtacacagttagaccgcgcttgtttgccatataccgaaactgatgattttttgggaaaagaagatacagacccgttggccatctccctacacgcgtgcttgttaccttagactgtcgcgcaatgcggaagatggcccactgctgtctacgggacgggttgggtccgagggtgaagcccagggtggatggtcatcctaacgaagcagctactgcatatcgacttgatgcgtattagccgcaccaagtgggtaa

SEQ ID NO: 65265 - DNA, 681 bp, Arabidopsis thaliana landsberg
tctatgtggtgtagcgggggaaatcgcgatccatgtcgctgcgcgcctcgtcgggaagctgcccgtgggcaatcatgaacgggaagggttgctctgcgacatgcgtatccgaacgatcgagacgggcagggtcaagcagggcagtggcgttcatggatatcgtgcggggcaatgatgctccagtttaacgtgtgcgacgtgcatagtggatgacggcgggatatttcgcgtgaaccgccgttcattgcaggagagtgttcgacacggtggacagaatggccgaccgggcctatcatttagacccgaccgtgaactctcataaccgagatcctcaagcctgctctctgcggcttgcggatcttgctgtattcgaaaaaaggcggcccatgccatgcccattcccgctctgcttgctctagaagacagcagcgtgttccactgtcacgccgtgggcgcgactggcgaaaccaccggtgaggtggtgcttatcacagagataacagggtatcatgaaatccttacatatccctaatactgccgacagcttgtcaccctgacctatcctgatatcggaaacacaggctgcaatgccgaggatgactagtgcgaaacggttcaagccgtcggcctgatcgtgcgcgacgtggcccgtttagccaactacttgcgcatcttcgagag

SEQ ID NO: 65266 - DNA, 590 bp, Arabidopsis thaliana landsberg
caattacagtacctgctctcaaatgttatacaaaaataaagtttctttaacaaatacaatttggttttgcatcattgcctaattgagatttcaaatgaagttgccagtgttattttttaatatcaatataaggattttgttttgtggttgtggacaaaagtaatcgttaagacatgtcaagaatgagtcatcatgatcgtccacatcttgaacaaccaagtggttttagatatggttagggtactaaaagcaaacaatgagattaccaaagaataatttacttacgtagcatcactaaatcacgttagtggtttgctgctattagttgctctttcaattttggattttattccaaaactgaaaaaaaacattaaagtgatacattttacaaactagttacgaccgctataattaagaaaaatgttactatccacatgagttgcatcagaatttgcctgcatgcagcattattagactgaatcaagagaaaatatacagctctttgatcttcatgcatcatatccaacttacccgtaccccattcaaatcgtgcagaaggcataacattcctaatatattttcagcagggc

SEQ ID NO: 65267 - DNA, 324 bp, Arabidopsis thaliana landsberg
  unsure (1)..(324): unsure at all n locations
aaaaaaaaagaggaaaagaaaagngggaagaaangggaaagaagaaaaaaggaaaaggaggaaaaaagagagaangaaagagaagagaaaggggagaaaaaagagaagaagggaagaaagaaaaagaagaaaaaaaaaggggnagagaagaggggaaaagagaaagaaaggaaanaagggaagaggaagaagaaaangagaaaaaggggagaaaaaaaanggaaaaaaaggaagaagaggaaaaaanaaagggagaagaaaaagaagaagaagaaggagnggaagaaaaagaaagaagaagggaaagagaaaaaaggaaaaaaa

SEQ ID NO: 65268 - DNA, 1424 bp, Arabidopsis thaliana landsberg
cacattttggtctggacagggttaggttagatggatggtatatatataaaataaaatacatatgtatttaaagtgtcgttttttttcttttccagaggagctcaagatcaaacatgctcggccttattcagtagtttttataatcttttctgcagctatactgctattgtttaccctcctacctattagacctcccaattgtttgtcatcttttattcccctaaaacagacccaataaacaaatgtagaatatatacccttaagctgaagacaaacaattttgagtatattatcttcacaaaatattttgtaaaacttaaagttaggaaaatatcttgtaacttgaatccatgacgtaacaatatttttaccttagacggtaaaggtaatgcaacaaaaatgtcgatagtgtttatgaaagtaaagaaaacgtctacatcttcttaaactacgtcttcattaaaaaataaataactacgtattaattcacaattattatattctgatttcaaagaataatcaaaatttgttaatttatgacaatattcgttaatactatatatgcagcaattgaatatcagtgaaatgctaatgccaaacttaaatttgtgttcgtcaaacccccaaaatagcttaccaatgaaaaggctttttaagaacctgagactaacacactgatgacgaatgataacgttagtgcatcgaagatcgaacacggcctaactatacgtatcatttatatcacacagttgactgtgaattacgtctaactttttcagataaaatgtgtattatatgctctattaattgcgtcgaaataacaaggaccatatcttttgtttttcttcttttggtaacatttcgagaagcacgcaaagaactttatttttttcaggatgttactaagaaatgacatcaaaaaacaaattgaccattatatttgttttctcccaataattgcatttatcttttcaaatggtcagatccttctaactctaaataggttgattctttgggttttcgtgtagcctaattttttatttttaaaaaaatttatttaaaccttttagttcttctttcttgtctatatattcctcctaaacaccaacctcacctgagtataacttttcatatcccctacaaaattataccataatacataattaacatataaatgtttcaaagtatatatcgtacgtcatgcttcaaatcgtggaatccaatgtgtgttaagaaaaaaatcaccgatcgtacatacatgaatatgatataggcaaatagaataagaaaaaggaaatagtgtaaatcaataaagaatacggactgcaagaagtagaaaaaaagtaataatgatggaaaaagataaaacatcacgcaaaaccttaaaaagaaagaaagtcttctggttgtcgtgagttgctctc

SEQ ID NO: 65269 - DNA, 2355 bp, Arabidopsis thaliana landsberg
cgacgttcatttcaaggcctaattacttcattaactttttatttgaatcatcattatcattgctataaacaattctctattttttccaacaaaatctaaaaatctcgttttttataaacacttttctttacagtctatatattctagaaactatgaagaatcattgcagtaatgagtaaatacatggaaaaacaaaagcattactctttctcttttcatactattgaaatggaacatatttgcttaaacaaatccgtagtattactcccacttaattagaagaataacaacaattttttctctgtaagaacatatttttcaatttttagtaagtttatttcctagattggcacgaaaaagaaaaaagaaaaagtgtaaataaagaagtatggggtccactacatgcaaaagatccagctagacgtttgaccatatgacagtgtgtgttgctttgactgtacgcctcgatcgtgtctcggttgtctttgactgctctgtcaccacttatatccttccacgtctctcttttcgttcctaatcttcggtattaatgaatgtttgttaacttttattaatactacaaatttaactaaatgaagataaattttaataagcgaaaattgatgggagtgtcagcagagagatctgagacccatgtgttgtttttgttggagttgagtactctgccagaaatgcagaattttgatattccaaccaagttttcaaatatcacacggattcaatcttaattatgtgttattaacaaaagtatgattcactcaactagttttagttctacaattaattgctagtttatttttgaattcttagtatttttaatttatagagtatgttatcaatggatattgataggcaatgaattcattgccaatgaatgatctcaatgttgtcgatgttatgagtttcccggtcaaactagtaaacttaaagcggaccggcaagagttttaagtcgatgtgacgtgtttgtaataacgactaaaaccatgtgaattttcatattgattgtgacgataatacaattagtatttttaactaataaatggctgtttgtatgtgctagagaagggacctagtgaccatgactacaggctggttagggttgttctagatattgtttgatgaacagaacacatatcaggacatttatataattgttgtgcctagagttgccctgcataattttcaatttgctaaatttgtttgattatttaacttagaaatgagttattgagattgtcgtatttgaataattacatcacattgcgctttgtattttgtttctaagctacatagactgtcacgtgagtcctaaactcgtagattatttaacatgttgtttcgctatttttaggttagtgatacaaattatgattaatttttcagcagatcataatttaacttgatgaattgatttatttttcgggatatattcgtttgcgaattcatatagtatcgtcatgataattggataacatagaactcgattcacgatattattgggtctaaaacttaaattttttaccatccgtacgattatcagaaaatattagaatgtttctattgttgggctgtgtgggcttcgaaaaggtacatcaaaatgctgcacacggcttcgtgaatgataggatttaagaagcccaataagctatgcaaaaatataaagatgcaaaatcgagaatttttgttgtcgttgttaaagatgcaaatcaaaaatttaatacatttcgtgctagacgcacacaggttacaaattgactttcgaaaactttatttaggtggggcaagttataattggaaattataaaagtgcagatagatatgtcagcgatgaatttattgctttcatttcaagttgccaacaacatattgaatccattgtcaaatatctctatagaaacaaatcaagttgaagcaaaatctttcttatttgactaattggttttaaattttgatagtgaaactggtaaatcaagtcaactgtaaccaccaatttcttatatactctcttttccttccaatgaatctctcactccccctaaatcattatttcagtatttttaatgcaagaaatttggtgccatatctcaatccatattaattataatattaatttcgactttgataattttgttgttgtacgctttgataacgtgtttaaagacatatagacgtgtactttggcaattgttatttgactattgagcttgtaagcaagtttaagcttcaatggataaatacttcaaaatttgtattaaaaaattaataaataaaactggcggcccttaagattacaacttcaaccttattttgacttaaccaaaagtaattaaac

SEQ ID NO: 65270 - DNA, 2587 bp, Arabidopsis thaliana landsberg
ggcacaaaaaagtacagaattcacgagacgttatgactcttgaccgtgttaggccggatatcgtacggaatattcctaggatcgtttacacgtataccgtaccacttccactaatcgtactttgatgacaattcaactcttagacttgactttttattatcacttcttttcttttttcaacttggaaacgattgttcaaggagactcagacatacactacgtggctaaatattccaacgacgactagtagcattccagttcacacttcaaatttcaaaaagtttgaacaaatcagagaagtcataacaaaaacttagcgtttcttgacttttaaaaatactttgctctccaacatcgtttttcatctactatcagtatttatcatacttgttgatttgtgcatatgcactgatgaaggttgaatttaaaatgtatcttgatgtaaattacaagtcctataacacttacttttacttatgtaaagtatttgtttatgtgaaaagatcaaacatgcaaatatgctgaaacatcaactggattgattccctttaaaagagggtaaaattgggtgtacatataaaggggaaaaaaacagagtgacttacaatgtgtcaaaaatacagcaataaaaacattacttgtgagaatacatacaatgtgagaattcttctatacagagtgtgatctatatgtttgttacctgcagatttgattcaacgactcactcgctccagctatctgaatcgtgctcgtcgtcacttcccgccattgcctatttatatgtatgtcacaaaaccactttatcgatccccaagattattatatctttttctttgtgcaacagattattatatcaagtgtccaaatttaaccaagaaggagagagggagagacctggcgaagagtgttggctttctctagaattgcagccaccttcaagttggttttgggaacagctacttgaaagtttggtctccctgaggcatctgctggtctcaggttgaacgactgctaaagtttttttcaagttaaatgttctataatagaaaactgaataaagtgaaaaggaaaagatgaaatggtgatttgaccttgctccgtatgatctctagtagtgaatcattctcgtccactcgagctccaacgtgtgtcctgttcccttcagatactttcctcaactgtaatcaaacacaaattgagtctcatgattaacgcgtgagagagagaagagaaaaataagccattgaagtactaaccatgcttctgtcaatgccaataacaagcgtatcctcgtctcttttaagctttccagctttctgattctgattatatgagttattgtctcgcaaggtttgtcgaaatttggtttgtccaggtttttctagtgggtgatcaacctgaggctcttcctcttctaactttgcagggtggggattgttatgctctcttaagttctgactaaaccattcaagtgccattgcttcagtcctccagtcagcttctaagccttgggccgattctgccaaagaaaatgaatcctccggagttctatttaaacacttgtgtttactttccatataggtgtcgcttgtcccattgactcctgaaggagactgttcctcggttgctttagattcttctgtataaatatgaaaattatggttttcaccatctgtaaccgacacttctgatggatattgtgcctcgttcgcttgaactgatccattctgtgtgttttcatccctctggatgttgaaactgttgtttccactgcctgcaagtgatggcatttcggttgattcaaccagcttccccatccaccattgtgtcggaggaagaggcggaagcggaggtgttatctccggatttgcctgaggtgtttcatggagggacgtggagaggggtagtatggactcaggggatacgttcaagaaatcttcttcatcagtcagacccttggaaagaacagactcagagatatgatcatttaatgatgtgaaaatttcctggtatggtgcatgaagagcttctatttcagttatgcttgaaggaaaaacatctaaaggtgaactttgaacaccaacagatccattttgtgtaggaggagactcgtctgatgatgttcttgaatttgctgaccctgtttctgatggactttcttgcctttggttctgtatctgtaagcaatactcagatgaaagacattcttctgtacctaaaagactctcctgcggatcactaatagtttccaattctttctggggcacggtctcaatggccttattattcaggccagtctggttatcgcgatcgacatcacctgcaaaacaagtaccatcaggaattggtacctcagggtcactactatcatctgaaacaatagacatggtttgtggatcctcctgtccagaatatgatgatatctcagccagatcagggttggtcactccgtcttccagacaagatgaggctgagaggctcccgtatcctgtgtgaagatctcttggagtatctgacatcagagttccattttctgaactgatttcagaagttgaaatgtgttttgactgtgcaggattcatggaag

SEQ ID NO: 65271 - DNA, 320 bp, Arabidopsis thaliana landsberg
accctgtgattgaagtgctctctccaccttcattcaaacccgaataaatatctaataaaccaaaaccattgaacacaccatgtcgaaacttaaaattggattcttgataagttacttacagcatcggtcttactgacatgaattttttgcccgttacacaatgctccaccacctaagaagtgaactagttagacaaaatttagatatatagccaaacataagcttgtcacatagtacctgcagttgcagaaaaggttcgagtgttccagcacatcggaccaccgacaaactctacctgcatgatgagattttgttgttaa

SEQ ID NO: 65272 - DNA, 1310 bp, Arabidopsis thaliana landsberg
cttgtttctcttttaaaaccgatcagtcttaacgccaatttcaccatatttcaaaaactcaatttattccaatgaagttaaactgaaacataaagattttttgagtaccagtgagcaaaattatctggtaaaaactggaagagactggctttcatcgtaatcatactgtttcatgctctatctctcaattgcagaaattgagtttcttcatgactttcgcatatgctggtggtactagtccaggttgtctcaatctacgctttgatttctttgactgcatcaattaacaaaacaaattctttacactcaacatttctcaacctgactcagaaatcttacacaatgatgaaaccccgaagaggtccaacaacagagatggtattgtaaaatacaactttgcctaccatttgtccatttagctaaacaaggaaacacctaaagactcgaagttcaaaactagttctatccaaatttaagttcactatcaccagaatcagctgttgggcaattttcgatcagttctatccctaggtattatcatactgttcctctagaggcgtaggccaaagaatgaataaaattttctatcatcgatatgaggaataaggtgttgttaccttcaaatgtgcgttgtggcgcttgccttctttccagcgacggatggtaccatcatttagtggtttaaacctgtctttgaatgacctgagatatagattcaacacaaaaaaaaattgttgagagagacgcccaaactattactaacaagatttgttgataatctgggaatcagaagtttcagcacgtacgaataaaacttaatcttgactttcttgacttttgatgtgattggagtcctaggtctccacttcttcttccattttgccattttttccttagaagtgatatttcgtacttgaacaaactgaaggcagagagaatcaaacgtacataagataagcaatcagatataaatcaatgttggtacttcgtagtgatgatactcaagcacaccgcctttatcatctggcttaacgaacatgatatcaaaatgcaagagctactatgaacaaataattctattttcggaaaacacgcaatcaaagccatgacgattcttctttcctatgatcaaacaaggggcacaaaattcaagaaccgtacacaataaatccgaatgttaagattccaaagaaaacatgtatgtatcttatgagattgagtaagctctttttatttttataacaaaagagatttagtaggtttaaacttgcaacgtagtgatataatgcaagcactgacttgtatcagtc

SEQ ID NO: 65273 - DNA, 1353 bp, Arabidopsis thaliana landsberg
aatatagagaagttgctgaaacctttgagaaaatatttcgtcggtgtcatgagagaattgaagcactcaagtggggggtacaggtataagctgaatgactagaaatttcttcttattgttaacccctgttatgtggtttctgtagccaggaaaagaaaaatctggttaataccaattacataaactgatttttatatttggtctttttagtatttccttaaatccggtgagggtgaacgagcagcgagcatcttagaggatcatatcaaatcccattcatctgaagtggggcacgatgtcttggatttactggcttctgttttcatgaaaattaatgcgcatgatagagctcttaagtatattcacgatgtgcgccagatttacaatgttggaaaagaattgtcttccagcttgaaaatcagacaagccatctgtcatgttcaccttgaagaaatggagcaggcagaggtttgtatgtctatattataaaactccgttatctcagtggttgctttaaaactataagccatatcattttccccaaattttgggttgcctggaacccgtatcttctgcttttaatgacccagagttgcaatccttattttgtttgaaacccgaggatcggcaagcataaaaaagagagtgaggactccctaaggcatagtaatttttgcaataggtccttatcatagatcgttattttgtattcttctcaaattccatgtttcacatctttccaccataagaactatttcagttctcttatgctataacttttgatgtgatttacggtcttttagatgtctgtttgtgtgattttgtacctgcctatataatttactttgttgctgtcagatgttatgtacctattcttgtgaatgatgctgcttccctgatctgcagagcgtgttaagcattctaccacaggaggctgtatctgaacatccagagctcatcaccaatttggctgatgagctaacaaacattgggaatttccactctgctctcaaatactatatagaagcaatcagtgaacctgtgaatggcaatttgtttgtaaaaattgctcgctgttatatgtcattggaagaaagaaaacaggccattgttttctattataaaggtacgttcatattttcattaagtaggttgatttagttgttgtatatatgtgttttctaaaatgaaagagctcgtacatacttatactctatctttagccctctcttttcaagagtagaaagattgaataatttcactatgaacatgtgatattatgaggtctcaaaactcaatcttttattattttatatgtcttgcaaattgataatggtatcgtctatagtcttt

SEQ ID NO: 65274 - DNA, 367 bp, Arabidopsis thaliana landsberg
ttctattatcaacgcttggaagatggtgactatcatcaatgtagcatgaattgaagacatatttgtttaaatcacttacgatttccatatcttgaaacaccgagctgcatcctaatactattctcactcaaacatatttatttgcaaactttggattagatctggtatatattagtattgggataatctgatatgtattagtattggtataatcgcatttaaaaatatacgtgattgttattgtctttttactccctgttatcacaatgtaacaaaatcttctttttttttaatagttttaactttttctgatgttcgaccaagttccataatccatagttttatttttattgatttagagcgtcgt

SEQ ID NO: 65275 - DNA, 1387 bp, Arabidopsis thaliana landsberg
ccatcagacatttcatgagctttcaaaggcttgaaggttggtttaggcggcaatggcacagatccttctgttgctgtctcaacttccatctgagtagactctgccatttcttctatggtaaattattacctacaagcaatacataaattatccaaagtatgaattacactcttaaatctgaaattcatgagtttctaatgaatcactggccatcaatcaaattcgcacagataaagctagatcagatttgataccttaaatactagtaattgagctacaactagtaatctgaagataaaaattgtaaagaagaataaacacaaccaaatagataaaactcgaatcgttacacagatatatgaaattaaaaacatccgactaattgagctcgtagagagatttcaagagagaaatcgatcaaaaattttggggaattcaaaacatattattgaaattggagaatacctaaatctttgattgggatctgatggcgggacggcggaacaacaactgaggaggagtagctgcttcggaggatgttttttgttttatgaaggttttaagcttagggtttatctatgtagccggacaaaaacgacatcgtttcacaatctctatttatattaccaattgggtttataaagcccataaaagttttgtcaaactttggcccttttattcattaggtatgtatgaccttatttacaactatgtaaaccgaaattaaaaaatgaaaaagacataacaacatgtaacgattgaagatattattcttctacattgctcgttgaaattaatttaccaagctctgattgggctactaaagataggtaaggtcacaattatgggtctgagtcatgaagatccaaacttagaagcaatctattcttagtaaatcacaaacaaacaaaaaccttcggtttcattagttcgtttcaccaaacaaattaaggtcatcaaattttctcttgagaacaattcagagttcttaaatctccagatgacaatcaaaaacctgaggccaagcctgtgggttttgttcatacctcgtttagaccgataaagatttcaagaaacaacacaacgtacgagaaatgtttaatcaatccagctctgtctcgttaatctacgtagttgaaatcgccaaaacaccacaaaacgtagacgtcacttggtctaaaaccacctcctcacattctttaaccatcaaaatcgagaacgtcaaagacgagcaacagaatcatcatcaaccggtgaagatagatctttcaggttcttcgttttgggccaaaaagggtctcaagagcttagaagctaacggaactagagtaaacgtatactgggattttcgtcaagccaaattctcgaacttccctgaaccttcctc

SEQ ID NO: 65276 - DNA, 594 bp, Arabidopsis thaliana landsberg
  unsure (1)..(594): unsure at all n locations
aaaaaacaactaaaagctacaatgattggtcaaataaacatattgttataacggttacaacaactcatttaggaattaaaggttaaaaatttatgtacttacaatgttacatcaaaagacgtaattttagataactaaatattacaacgattcataaaataaactaaaagttacaatgattcagaaaccaaatgttgtaatagttcaactaaatggttgtaacaattcattttattagacaaatgatgcttttctacaactaaatggttgtaacagatcatgtaagccgttcgacatattttaacacacatctaacatccccatacaatactgattcacttgctcctatatgaaaacaaaacaatggtaatttttaagtcattctgagaaagaattttgatgagattgttcttgaggaatcatagaatgtttttgatgaatcattgcaacttttgactttgttttacgaaccgctatagtttttagtttatttgatgaactattgcaactttcggtattattaacatatacgaccgtatctctttnataacttttcatatattttttaattttaaccattaaacaaattttgaa

SEQ ID NO: 65277 - DNA, 285 bp, Arabidopsis thaliana landsberg
  unsure (1)..(285): unsure at all n locations
cggagagaaagggncctctcnaccacacactgtagcattattcacagcaaaaacacaaacccgaggagaaatcaccgaagcagacccaacagcgccaacacccncgacaggagcanacacncgcggaacagngccaacgaaaacaacancancagcaacaacaagagggnnaaacagagaagcncacnncacacaccccaanaaacgagcagcagcagcaaaagcacaaaccctagcaccaaaaccaaacgaaaacgangggaaanacccagaagaagaaccaac

SEQ ID NO: 65278 - DNA, 555 bp, Arabidopsis thaliana landsberg
cggagtctcacaatcagaaagctcctcccacatcatcttaaacaactcaaaagcttcaacataattcccaaaattaacaaacccagagataatcgagtaataagaatacaaatttctctcagggatttcatcaaacaacctacgtgcatcaataatcatcccacacttgacatgcatcaacaagattctgttcatcatatactgctccggctcaaacccattactcatcataaacccataaacccttttaacacaccgaatcgatttcaaacgaatacaagcttccactaaagcatcataagtactaacaccaaccttaaaactacagcgaatctccagaatctcaaacaattcaaaagcttctctgaatctattacacaaaaccaacttctctatctgactacaaatcgctacaccagatttactgatctgggtatcatccaaaatctgatctttcgatttcttaacctcgattctaattggttctggtttcagctttggtttggtttcagaccttgaactacagaagaacaactgagtctttcgatgggttct

SEQ ID NO: 65279 - DNA, 316 bp, Arabidopsis thaliana landsberg
  unsure (1)..(316): unsure at all n locations
attattatgcttatcctcactgttgttgagggttttatggagagcagaagggagagatgtgttgcagacgnccatctctttaaccaccaaactgcatactaaaactattctcactcaaacacatttattatcaaaccctcaagttaaatctcctatctatcactatagatattatctcatatgcattatcaattatatcttcacatttaaaaaaataattgactactcttttctttttactacctcttatcacaataaaacaaacactatattcattatcctacttttaactcattcctatgttcctccaaccccc

SEQ ID NO: 65280 - DNA, 436 bp, Arabidopsis thaliana landsberg
gcggcccccacggtcaggccggggaactcctttgccagcattcgcgcctgcaacgcctgcagggggtccttggggccgttggtggcgtggaacagccgggagccgtccatgcggctggggccgtagtgcgcgcggcgcgtcgccgtggtccagcccggctccatctggcgctggttgccgtagtggtgccagccgcaggagccgaaacccgtcaggtgccccatccgcaggttgccgcgcttgctgtggtcgtaggacacccccaccaccacgctcgacagcggcatgttgccggccagcgaccacgccaggcaggggatgcacgggcccagcttggcctctgtgacgtgcgcggactcggcctgcgtcatgggccgattccccggccggcggttcttgcggtagggcttcagccgtgcgtggcggatcatgcgcg

SEQ ID NO: 65281 - DNA, 703 bp, Arabidopsis thaliana landsberg
taatttaccaattggtgcatgaaaaggtttaaaccatacaatgaggttggtcggaaagtagttcactattgagtggtaaccacattccaaattatttttgtggtcactaggttaacccaaaaaacaaagaaaataaaatcaattgttagaagttcgtataaactgtaatcaactgtatttatattaaaaaaaaatattatatatttatttgttaaagaaatatgaataaatgttgtccaaagaaaatagatacataaaattaaatctgaaagatggagaatcaaatcaattgttatatagctagagtcattatcagccaagaatagacacataataattaatggagatagagatttttacgtgttcgaaacttccaatacacacaaggactcgaactaactatacgaaactcattttcgtgctgaataattataaacatatacttaaaccaaaagctcatacatacaatttcgtcaaaagtatcctaactaaaactaattaagacactcttcttcttctttttttgacaagaacatcaatcagacaatcaacaccattatcattttcagttaaaattttgaatttcgtaggcttacaaatattcttatctttagggtaagttggattattttatcttgggttgggtcggctaaaacatgatatttaatcatggaatttaatagagtacctagtacctaaccta

SEQ ID NO: 65282 - DNA, 727 bp, Arabidopsis thaliana landsberg
gcgcagatcggcgataacgtcacggtagggcccctacagcatcgtgggcgagcacgtcacactgggtgaaggctgcgtcgtagggcctcattgcgtcattgacggccacaccacagttggccgaaacaatactttctacaggttttgttccattggcggcattcctcaagacaaaaaatactcgggcgaacccaccaggctggaaatgggcgacggcaacaccgtgcgcgagtacgtcaccatcaacacgggtaccgcccaggatgtcggcgtcacacgggttggtgatgacaactggatcatggcctatgtacatattgcacacgactgccagattgccagccacacggtcattgccaatgcggttcagcttgccggacacattcacatcgacgactgggccattattggcgggttgtcggcgtcgcatcaattcgtgcgtatcggtgcccacaccatggtgggcggcaccagctccattcgccaggacattcctccgtacgtcataggagccggcgatccgttccggccggtaggcattaattccgaggggcttgcccgccgtggattttcagttgaaaccatcgccgcaatcaaggaagcctaccaaattatctatcgccgcaagctcgacatgccgcaggctatcgaacaaattgttgccttgcagcgggaacagcgggttgcccaccacgcccttgcaggtttctgatcacttttttttgaa

SEQ ID NO: 65283 - DNA, 197 bp, Arabidopsis thaliana landsberg
tcatacgtgttacttcctgctgctgcctgagcagctgtactatggctgcggataccatacttaatgcctgccacagggaacttatctaatagatgatcctgttggtccggttcatgtctgagattatttatctgtgttcatgacctgttgtaaacggctatgcgccatattgatgccctgtgcaaatggcagctgca

SEQ ID NO: 65284 - DNA, 360 bp, Arabidopsis thaliana landsberg
tgttgacaatggggacacgaaaaatcatatccctcaaccacattggtattttattcattttatgaaccagatgcacatttggggagaaacggcaagacacataagttctatctgaaactgaaactgtggaaacaaaacaaaagaagtgaaggctgttacttgggctgatccttgagacatgatcggatcaaacttattattagtggcatctcagaagaaacagcaactctggaaatacttattagatctggcctaagaagacttctgcccctggtaccttgaattcagacggtgcttttttcacattcaccggcttaaccttccccggttctacataagccgaccatttgaacatggaca

SEQ ID NO: 65285 - DNA, 285 bp, Arabidopsis thaliana landsberg
caatggagaagtgaaagacaggatgttcttttaaagatctttagaagtggtgaactcctcttgtggtcacagtcttgagaatggttagttcatctgaacttggagaatgcataatgtgtcttgtgtcattattatatgaataaataaaagtgacgttggttctgccaaaaacttttgactctatccaggttctgccagacattctagtcgccgtgttggaggtcgcaatagaaaagaagaggtggtgattggcgagggtaaaacctcccggagaggaagtggtgg

SEQ ID NO: 65286 - DNA, 371 bp, Arabidopsis thaliana landsberg
  unsure (1)..(371): unsure at all n locations
agcaaaatgtgatgtcgtggctgccgcttgcagaaggcgtaacggacgttgacgcttttggttgttagagagtcgaaatcccactgggcgaccaccgatgtcaaggcgaaagaggtggcgatgccgagggtcgcggttgaggccagagccagaatgccagatcgatgctgcgtcttcatgggttctccttcgcggtgaaacaggtgataggaaacatgatccggctactcgccgagagctctgatggtagatcttagactagatagggagggcnnnnnnnnnnnnnnnnnnnnnnnnnnnnnnnnnnnnnnnnnnnnnnnnnnnnnnatcgacacgagatcaagtcccactgcaaaacaagcatgtgggcc

SEQ ID NO: 65287 - DNA, 555 bp, Arabidopsis thaliana landsberg
taacgtttttataataaaaacctcgttttcttaaatttatcattaataacgtttattttcaactttttgtatctttcttatctaacataatatgtaataatataatatttcaaaatataaagcgaagatatttttttctctggggtacaaaaagggaaagaaacgtgcatgcgccattgtccacaaacaatttcacaaatgagacagaatctcataaaagcggtaaggtgtgaagtcattttcctataaaagtctccagtttgggtccaatactttccactttggattcatcccacgtacgaagctaatcatacacaataattgtttattttcaaatttatagaaatataccgtaactttaatagacaggtattataaaaaaaaaaaaaaaaaagcttttatagacagacatttcttttcaactgaacatcgttcaaatatcagatgacagagactgtgattattattattttgagtaaaacagactgatatttcatatccagagatattccgaaaacagcattttatatactctaacaacatcctctctttttt

SEQ ID NO: 65288 - DNA, 662 bp, Arabidopsis thaliana landsberg
ttcttaccaaaacaaatcctgattcttagctacacacaatacaatactctaattccacccactaatttgatacatgaatttttatatattattttgttaccctttatatcaaaagccataaagggacaattcttaatcagttttaagacgttaaaaaaaaaaaagtaatataaaatagatttttagtcaaaagtcctatgccacaaatgtcttatataatttgattccttgctggtgagagtcacaaaacccaacagacttcacactttcactttcattcgctttttcttctctattactgcaatcacttgttcacgataatggcggacctctcctctgtcgatgagttcctgaatcagtgcaaacaatccggcgacgcagcttatggcgccttgcgatcggtcttggagcggctcgaggatccgaatactcgatctaaggctcggatcttcttgtctgacatctacaaacgcgtcggatcttctgagacgtctctccaaacctaccattttcatatccaggacatctatctcgatcaatacgaaggtaacatcatcgatccgattctttgttgatcctctttcacgatccttgagaattgttctgtgattatttgtcaaatggatttgattcagctgattatactgatttggtgattccct

SEQ ID NO: 65289 - DNA, 346 bp, Arabidopsis thaliana landsberg
  unsure (1)..(346): unsure at all n locations
aacccccactgcccgatccaacactttaccgattttaatcgaggagcgacgggggtgtcgnnnnnnnnnnnnnnnnnnnnnnnnnnnnnnnnnnnnnnnnnnnnnnnnnnnnnnnnnnnnnnnnnnnnnnnnnnnnnnnnnnnnnnnnnnnnnnnnnnnnnnnnnnnnnnnnnnnnnnnnnnnnnnnnnnnnnnnnnnnnnnnnnnnnnnnnnnnnnnnnnnnnnnnnnnnnnnnnnnnnnnnnnnnnnnnnnnnnnnnnnnnnnnnnnngaagccggcgtgaaggatgcctccgtagctagtgcaggctgagctcgttcgtaacggattaaccagacaatcgctc

SEQ ID NO: 65290 - DNA, 627 bp, Arabidopsis thaliana landsberg
aaactaatgtatttaattactaattactacttttttgtcgttgagagattgttttgggaaagcgacttatcacattgcatgataaatttaagtcggtacaaaaaaactttctaatcaaggaagtgttaattaacacaaattaaatatgagccgacaaaaaaaaatataaataaattgagagagtgaaacaaaaaacgtggaaaatttttggggagaagaagacaaagagggtggtgagcccacacgggaaaagggcaacaaaatcttgaccggactcgaccgcgacttccaacttgtgagaagcttttattatgaggtgtgaacaagttgccaccttgggcggcttcgacaccgacctctatttttcttgtcacttttttttgtttgtttgctcaaagttgtgaatttagtgtcatctttaattattccgtttctttcaaactcaatgatacaaatgctaaccactattccatgaagatttacaaagatcgattgttcgatgagattcttagatctagttaaaatgagttttgattctattgatgtaagttgacaatcttgattaagacggcatcatatagtataaatattaaaactggctttcaaacttatctgagtttttttacc

SEQ ID NO: 65291 - DNA, 371 bp, Arabidopsis thaliana landsberg
  unsure (1)..(371): unsure at all n locations
ctacctgaatgaaacaattttttatttttagatgcttgtttacactgtncggaccgcctagttatttaatagaacacttgaatgggtcgcattcttttagtcagttgtgaactgttaattactatcgatatctcatggtatcctcatacggaacacgacttgcagcacaaactaagtcacattttcaattgattggtcaacagtcatacacaataataggtattaaacgctctcgcaaaactagaagtccatgcatgaagattggtttgtggcattagactgttttcaaataggttcttctcgaggtggacattagtacgccaaggctggcttagcaagcgcagatgtgaggaaacgggagcaatgaaaca

SEQ ID NO: 65292 - DNA, 411 bp, Arabidopsis thaliana landsberg
agtatacaacactatcaaaaaaacaatccattcctctcacttttcccgctgacgctgcccaagaccgttaaggggtccatatatgacgccacaaaatgatcaaaaatacttaaaacaatatgagaggtatataaccaacttatccaagagacataaataactgcataaatcataaatgataccacccttatagatttctacttaacctaaaatagcatgattcatatattctgactaacgtcatgcttccaaggatatatgtcccaattcaaccaactcaagaccaaatcattaaaaccctttatcggttataacaattgaacacgcacatcccaaaaacacattgagttttctccaaaaataacttatgcattcggagaacgcataaaaattatacctaaacctgtagaa

SEQ ID NO: 65293 - DNA, 629 bp, Arabidopsis thaliana landsberg
acctttacatgtcaaaaacttttattcactgtatttttaaccatttcttcgatatatccccatcactcttttttttacccctctcaatctatccacactacacttacataaatcatatatgcgtgtaagtatacgtttgttcttacctatatgcatgcatacaatatcaacaagttataggaatttgtctactcgattagtggtgttatccaatacgcataatacaaaaaataaatatatgatgtcatgagtttacaaactcataggtatcaaaaagtaaaaggaaaactaattagcaaaaaaaaaaaaaaaaaagcgatgtaagttcaatgatcacatcgtattagactattaatactggtccaaatcatgtattggttcgcactaaacctatttttcaatcagaacacatttatattggttttattacaaaatgttatgattatgccaaagggtggctcactacatattatcaatccctcagctagcgtgggctagacagtccaatgggcattttttttaaatttgttaacctgataagggataatgggctttaaaacatctagtatgggccttttaaataagaaaaattcaatgctttgttttttttcctcccttacttttgtttt

SEQ ID NO: 65294 - DNA, 434 bp, Arabidopsis thaliana landsberg
catacctatcctttgacataattaaaatcaccatatggacccgaggagaaatcttcaagcacacaactgaacaaataggagaacgccgactgcatatccgactgtgggagctgttgatccttattatgaaaacaatactggtagccctggatattgtcatcgatgaccttgatgtcgccataactaaaattatcaatcaaaataaaatgcagggcgtccttgagctcttgtccccggaagcaaaaataattttaggctaaattaagtgcgaaacttaagtatcttaatacacaggaaatgaaaaagctgattctttatttgtccattaccttcatggcaggcattgcctttgccaacctgtataattcggtcggggataccacgagttggattagcgacattccggcgtccgttctcgcttttaggcaatatta

SEQ ID NO: 65295 - DNA, 422 bp, Arabidopsis thaliana landsberg
aaaaagtattggcaacacttaatttgaaatcgaggactaacattttatctttgagaacgaatttcatctgctatgcagcatgttattattagttttctaaataatcataacatgtcagaaaaatggtcatggtctgggagactgtattttttatttttcataatgagtaaaaatggtgagagaaatgatggtcaattgagagctgccggaagaggtggagaacctctcgccttgcaatctcaatcctaccacgcctcaacgcctcgtgaatccccgcaggagccagagccggaccaccaatctttgcctccagaactcggttaatgcttaccacgcgacagcaatctgctgactcatggtcgttgcgcaatacctcttccatcctccataccccctaggtgggccccaattttccccttcta

SEQ ID NO: 65296 - DNA, 389 bp, Arabidopsis thaliana landsberg
  unsure (1)..(389): unsure at all n locations
taaaactcgacccgaccaaaacccanacaaaaaagaggcgaaacaaacgcaacaaacacgacgcaacaaagacacgggagggccaaaaaccccaaccacaccagagcacgggcacaacacaaacacgacacaccaacagaagagcgcaaaaaggataagcaaacgcgaaacaggncaccgccacacgcccgcgacagaccgcaaagaaccacaccacaaaaacagagcagaaccactacaaagaccggggccatacaaaaacagcacgcacacacaaaaaaaccaccaaacacaaaaacggcacacctcgctttatcaacaacttcttcttctaagctaaaacaacattcacaccaaaagcttctcagagtctctaatggaacacacta

SEQ ID NO: 65297 - DNA, 1690 bp, Arabidopsis thaliana landsberg
cgccatggttaactacagttccattaactagtccagctagatgatctgagacatgatattcatcattttcatgctcatcgtcatcatcatgaaaagattccccagggtcatttgaatcaatgtctaataaactactggcttcaaagtcataggaagcatgttcgatttcatggggagctggaatgtcattcatagagaggatcggagaaccatcagctgcttgcttcttcgatccatcacaaaatggagggaatatgaatggttccctgtttgacttaatgtccatgaaagaatgtctagcacttccgatattcacaaatgcaccacccatatggggcacaaacttagtgattacgcccaggtaaacactatcacactgcacattggtcttaactggttccaacaataactcgaccagctttccaccttccaatacagcaatcctttgcaccgtacatatagaagaattgatcagtatcgtagtagcaatggattctgattggaaaaatccaccatctggtaagagagtctcagtcagctggtgattttgttcatcggtatttaagttattttcattgtcatcacagctttcaacatcttgttcgctatcagtctgcatattcctttcatgttgtaaggtaatagattcttgaatcaaccacggttcctcgataggctgatagttgtcagaaaataacgcacttaagtttgagttctctgacgaaaaggctgcaagctcatcacataagaaagattcagctcctacttgcttatcattcagatgtgttctcgggacttctatagcactatcggcggaagtgcattcatctgccaaaccactggaagcatttaagttttaaaacattttgcaaaggatgaaaagagactgaacaaggaggaaccaccgagattttaccttcgctttgagctggggtaacacagtttggaaaaaggtaagcatcatcaatccaagacccccatccgtaggattcttgtgattttgaggaaatactcatactcatccatgaatcccttataattatttttctgtcttgattgacagaggaaggaactgataacgaaaattgtggccctggtctccagatgacatccgatgaagatccatatccagcttttaacagataattatacctgaaatttacaccagaagcaatctgccaagcatattaagttaaaagcaaacacgacatctgaactcactttcaagaattgaggttggttccttttgttactacgactaaacgttcaaacgttttatgtaaattaagatacatctctacttatgttcgctacggcttaagtgaaacaaaagaatagattaccttgactttagcttcccattcattatcattttccgtaggatacattgagattgcgcagtctggctcccagctacctaatgtagaaggatctccagtaacgtagagatgttcattggctgccagatcagcttccacaatccaaacgacctcgcataatcctttgagacgactaggtggctgttctgagaatacagataacaaaaatctcagtggctgaaaatgcaaacaaagaaacttcacaagttgaggcatgactcaactgaaattccatgaaaagaccaacttgagaacacccacaggaaaagttaaaccatgattatttctcttgaaaaactttttaaagtttt

SEQ ID NO: 65298 - DNA, 353 bp, Arabidopsis thaliana landsberg
  unsure (1)..(353): unsure at all n locations
attcaaaccagcaaaacatccagcgcccacttttggtttcgcaccagcgccagccaaggacgcgcccaacagcgganaagaccgcaaaacccacacgcaggnggcnnanaaccgaaaccgcggcacaacggaggggcccngacccacgacgggcaacaaagagaggaggaacgcaagcgcgggacccaacaacgacaaaccacgcacggaacgaacgcaaaccgaaaccaaccaggagcancaccaacacgaaacgcgaggacaacaaggaatagaccacaccaccaccaccgaaaccaccgaccaggccgggaagaaaaaaggcncggacctcacggccaaaggacaaacag

SEQ ID NO: 65299 - DNA, 559 bp, Arabidopsis thaliana landsberg
  unsure (1)..(559): unsure at all n locations
gaagcaaggtgtgtgcaatcaaaactctcaattcacaagggaaggccactgtactgcgtgcccttttacaactttgcatgcgaatggcggacccaaggttgcggagaccgtgagtagtcgatgaaccctgtccctgactcttctagaggaaaaattagttgggctcttctgaggctatgtgatagaatcgccacnnnnnnnnnnnnnnnnnnnnnnnnnnnnnnnnnnnnnnnnnnnnnnnnnnnnnnnnnnnnnnnnnnnnnnnnnnnnnnnnnnnnnnnnnnnnnnnnnnnnnnnnnnnnnnnnnnnnnnnnnnnnnnnnnnnnnnnnnnnnnnnnnnnnnnnnnnnnnnnnnnnnnnnnnnnnnnnnnnnnnnnnnnnnnnnnnnnnnnnnnnnnnnnnnnnnnnnnnnnnnnnnnnnnnnnnnnnnnnnnnnnnnnnnnnnnnnnnnnnnnnnnnnnnnnnnnnnnnnnnnnnnnnnnnnnnnnnnnnnnnnnnnnnnnnnnnnnnnnnnnnnnnnnnnnnnnnnnnnnnnnnnnnnnnntcactttattttata

SEQ ID NO: 65300 - DNA, 417 bp, Arabidopsis thaliana landsberg
gatcctaacttgtaataaaatcctatcttattttatattatttcaacacacaatcctaagaaagagatatgtacaattaaaactccaataccacaaagaataaaacatggataactatgctcatacctcttccaaacaaaccatccatctattcttcttacctaatccaaacatccctactaatctgacttgataccattattggccgacttaatcttcataaaattggatctctaatgttaataacccttatattaaaaatgaagtttgtgtccataaattttccagcgaataaagtaatatataccacatatagggtatagattaatttcaagaaaccataaacttctcttgttaatctataattacctcataactttcatgattttgtaatatttatagtcaacgacatattat

SEQ ID NO: 65301 - DNA, 451 bp, Arabidopsis thaliana landsberg
gggttttatgttaggtgtactcaactaatggagggattatcaatgtggaagatgaaatttataacttgaatacggcgtatattggattttttctatttatatgaaaaacttagataaaacttttcataagttgctgatctaattaaaatatgaaagatgatacgagtagatgtttaaatgagcaatcctatacggagttcttaattacttatggacttatagcattcttatttcctctctctcattagtcattaccattaaagtcatatttttagtatcgacggtcaaaagttccataaattcagaaatcgtattcttcttacaacagaacagaaaaatgcggtcttctggtcgttgaccaataccattccatcatacattcagcctatggaagaacgaatataacgggtcttatcaatacgttgttatctctcgatgtctacgagtaaca

SEQ ID NO: 65302 - DNA, 241 bp, Arabidopsis thaliana landsberg
  unsure (1)..(241): unsure at all n locations
cagggagaccagacacgcaagcgcgacaaggggnccgaccggacccccgcaaccaaaaagncaacccccgcggagacaaccggagacggagacaaagacnccccaaaaagnacaacaagcggggacaaccccggaaaccccncaaaggaaacnccaaagcccaccgagnccgaaaacnccncagaggaaaaaaaaaacccncccngagagagaaacnncagaagaccgccaagccaangaa

SEQ ID NO: 65303 - DNA, 335 bp, Arabidopsis thaliana landsberg
  unsure (1)..(335): unsure at all n locations
agagacctcacaagctcccaggccagcggcccggaaggaaanaggaggagacgacacgcgnacgcccgaaaacacaaaacgagaaccccaacgagancccaaaaagaaaaggagggccccccagccaaacgaagcaagaccaaagacacacaagagcaaggacnagaccaacaaagccccgagaaccaagaagcggccnggccagcggaaccacaagccaaaaaccgaccaagagccgccagggaaccggagagcaaaaaaaccagaacgccaaccggcccccagaagccaaagcaggaaccagagcacaaagcccaggggaccacgagcccggg

SEQ ID NO: 65304 - DNA, 590 bp, Arabidopsis thaliana landsberg
  unsure (1)..(590): unsure at all n locations
ggagcaaggccctacaacctctgtttcacctttaggcggagctgatttcttactcttacaaccgatgatcatcagcattgaaggaggggccagcatgaatgacgaataagtcaactttttcataatgatagtgagtattaagttaagttagaagatcaaaaacaatttaagtaccaatttttaatatatcgaaaaatttattgcaatacggttgtgagcatttcaccgatgcgctcgttttccagtgtttccaatgctttattatacgcatcaacactgcttctgtcataatccagtccgtatcctttaacgcgatcgagggtcgttgcgtagatctcctttccttccttcatcgctgtaacgcggattacaccggtaagataggtgatataaatacttccggaaacagaacccttctctgaatccgctttaacgtcgaaccacagatctgccatgcgcttgtcttcagtgaattcaaagccattattggcgagaagatttctcaactattagtgatctgaaattgctcctcatcgaacccaggctttttcatctgagctatgtcaccancgacgctgaccttcatgcac

SEQ ID NO: 65305 - DNA, 701 bp, Arabidopsis thaliana landsberg
ttgtctcttatttgaataactcacaaaaaactcttgagacattatgtgtctataattgatctatctttttcatcaaaaaaaattgataatttaatttatgaaaatatttaatttatattattatttagaaactcattttggtttctcaccgtctgaagtacgtactctcgttgactgtgttaatatttgaataattaaattgttgattagtgataataacataaattcttagaaagttattgtctacttgatgatctttaccagctttggaataaaatatcaaaaaggtcttcattagattaatagaataacatttaatttgtcatcagatttagatactaaattagcatgttgggtttaaggaaacgataaccataacaagaaaaccttaatcatttgcataagacaatgattttcaggtaatcgcacgctaataatactttattaggtctaatattagtctttatgcaatgctaaatgatctgtaatcactctctatatccgtgtgaaatttagataaataaataaatagtgatttaatagatgcagtatactatatacataattaaatttggataataatatgttgacgtcattagtacaagtacaaaccagtaggttatgagatctgaacatatgtatataacttatggtttaaagaaatatatagattgttacagttttttaaatgacttatcgaa

SEQ ID NO: 65306 - DNA, 421 bp, Arabidopsis thaliana landsberg
aagcgcgcgtcggccgggtcgacggtgccgactgtcggcgattatgcgcccccagttggggtcgcgtccgaatgacgcggtcttgaccaggttgttgcgggccaccgcccggccgacggccaccgcctggtcctcggaagcggcacccacgacctcgatggcgatctccttggtggcgccctcggcgtcggccagcagttgggtggcgaggtccgtgcaggcggcggtgacggcgtcggtcagcgccgcgagatccggggcggtgccgcgagcgccggaggccagcagcagcacggtgtcgttggtggacatggcaccgtcggagtccagccggtcgaagctgacccgcgcggcggcgcgcaacgcggcgtccagatcggcgggggtcgccgcggcgtcggtggtgagcactaccagcatg

SEQ ID NO: 65307 - DNA, 534 bp, Arabidopsis thaliana landsberg
  unsure (1)..(534): unsure at all n locations
gnnnnnnnnnnnnnnnnnnnnnnnnnnnnnnnnnnnnnnnnnnnnnnnnnnnnnnnnnnnnnnnnnnnnnnnnnnnnnnnnnnnnnnnnnnnnnnnnnnnnnnnnnnnnnnnnnnnnnnnnnnnnnnnnnnnnnnnnnnnnnnnnnnnnnnnnnnnnnnnnnnnnnnnnnnnnnnnnnnnnnnnnnnnnnnnnnnnnnnnnnnnnnnnnnnnnnnnnnnnnnnnnnnnnnnnnnnnnnnnnnnnnnnnnnnnnnnnnnnnnnnnnnnnnnnnnnnnnnnnnnnnnnnnnnnnnnnnnnnnnnnnnnnnnnnnnnnnnnnnnnnnnnnnnnnnnnnnnnnnnnnnnnnnnnnnnnnnnnnnnnnnnnnnnnnnnnnnnnnnnnnnnnnnnnnnnnnnnnnnnnnnaatgttttttcctctcttaaaaaaaaatagaaaaaacactttcaaaaaaatggcctagacctaaaaggccttttgaaattgaagggggttttaaatctcacggttttttttttttccccccccccctttt

SEQ ID NO: 65308 - DNA, 722 bp, Arabidopsis thaliana landsberg
ttccttttcaacatctcatgtttgtatttataagtgtgtcgtgtaattaatgcaaagctggttttaaatttccatgatgtttccgggatccttcacttctttgtttttcatttttaaaagaagataggcccacaattttatatttatttgttttcaaaatgtttattatcgaattttaattaacacttgttcgtttatgattagtcgtcgtgactaataagctaattttgatataaaaccatttttcagcatcagtagataagtagacattttgtttatgtgtgaatgaaaaaagttggtagggtagatgcaaacattattaaatttataccaaactttttgttggttttagttatgagatctggagtggttactgtgttgtattttataaatggacggcttagatgtagtaagatctcaagtcgggtccacctaattaggtaagtcggtgggccggtgttattgggcctttatactcaaatttcctccgaggtcaatgcccatctggcagttgctcattacacttgtctctgctttcgctagtctctagactttcaagtctttcatgatcaacattcaaacccatgtagaatttttttttatattcataatttaacaatcctaaattattgataaaaaatattctgtcttcaactttctacagtgattatattttggaagaaagatcaaatttattatcttatgttgtcaatcatacacca

SEQ ID NO: 65309 - DNA, 664 bp, Arabidopsis thaliana landsberg
caaatgatggcgcatcaagccgactgccgacccactatataaatacaacgattcaaaatagttaaataaacataagtacataacaaacaaagacacatttaaatatttgtggctgtaagcaaattagagatactataatagttacacgatacaaaagataattaaaaaatgaagattaacataaaatgcgaaaaagacatatgtacattacattatgggtattaatatagtaattacggcaaaaatgcgttacaacgtcgtggtttcgttggtgcatgacaaaaatttcaaagtaggttagttagaatggtggagagactattttatttccaattttcctcttttgaaaaaagaacaaattcacatttaattttcttatttcaaaagtcaaatttggttgagttcttctttccccgtaaccgtaagttttatgctttttcaacgcatcgtaaggttaaagttgttgaaacgcatatttagctttgagtatgtagttttatttttccttcttctcgttaatgatattcatattaatatagagttggtttgatattgttgagctaagattttgatattcatggttcttattctgagcgattgcttttttgatatatagtaaagcctatctaaactggtgattcttttttcatttcaactttcacaa

SEQ ID NO: 65310 - DNA, 680 bp, Arabidopsis thaliana landsberg
ccttgatctctctccatgttttcaaatttggagcttgtcagttttcgaaaatgtgaaatagtgagtgaactacaaaactatcaagcaagataattttatttgtagtacgcttcttacatgggcttaagggccgataactatttttattcaaggcccaatatagatcgttctcgctcatcgcaaaattaacctactaaaccggaattcggttcggttgtggtattgtttagccggattggttccagcctcacccgatagaattagcctttagggtttctaacgtcgaagcttgaaacactatcgaacctcaaaatctgtgttgccggaaattttcttcaccgaaactgaaagaagtcgaaagagagaagagaagaaattgaagcaatggagggagcagaggaagctggggctgagatagcggttgattcaaaggacttgcagcaacaaagcaaagctttcgacaagctcaccgatcgtgtcgaggatcgccagctcgattcctctcgtgttcaatcggtatgtaactctttcgtgtcctgatttctgaaaatattaggaattgcgaaatttttttagctcgattagtaaattgaaaagtcggtatcgtgtttcaggctatggcttcgattgctgcttctagggaggctgatctgaatgctaagaggttgaggtaaaaactc

SEQ ID NO: 65311 - DNA, 264 bp, Arabidopsis thaliana landsberg
ttgcccacgggggtagggccgccgtatttgttatataatatattccaatcgcaccatcggggggcgtcgtttttaaagtcatgcagcatggattcaccgtacttttctccccaatgccattgataaatgctgtccaggttgaacgggtaattgcaggcttccgtcagcatcaactttttatcagggaaagcttcgtgcacccgttttacattctcaaaattattttgtacataccagtgaaaacccacgccccacacatacttt

SEQ ID NO: 65312 - DNA, 398 bp, Arabidopsis thaliana landsberg
  unsure (1)..(398): unsure at all n locations
aggaacaagcggacgcccgaaccccaagaaaggggaagaacaaccaccttccaagctcctccccnaagagcaganaggcancggaaagggcaagcggcnccccccgaacacaaaacgcgaggcggaagcacccgcagccgaggcaaaaggcacggcaaaaaggcaacacacagccggaacaaaacccggagcaaacaggcaacacagagagcagaacccgaagaaaccacaaagaaccagaagaagagacccacacgcccggagagagcgcaccgccaagaacccaaaaacccgggaaaagcccaaaacacagaacaacagccaaggcaaacgaaagggacaaagccagacaaaaaacacngcaccaaacagcagcancancgagcccgacccgaagc

SEQ ID NO: 65313 - DNA, 1843 bp, Arabidopsis thaliana landsberg
catctttccgtattcttcttccgctttttagagctactgatgttcttctcttgcggggttaaaccaagctcaatggtgttgctaagatcttctacagatggtctagcattagaactttcaaagacaagtacagaatgtgaaggggcttctctgtctggaaagaagaccgaacttctccagtcgttatcaggttcttcctgagctttcagaggctctttacttgtatcgcctgattcctgagtcacttcaacagcttttgatgagccacttatgtgaatcacgtcactctctaggtcaatgatctcaatgtttcttgttcctgtttcatcgctctcacttttattccaattcttctctaccaaactatcacttgcaggttcacagtccaggttgatttcaacagttaatgatccagtcaaaccggggatctccctcgccttatcatcacactcaaccataacaccatgcgaggttttcttttcaaaagactcgactaggttagatacaacatgaccctctcccaaaccatttccttcttttgaagtctcagcttctggaagtttgttgtcactgtcactactcagatcctcatctgcacagacaaaaactatgtgtgtctatcactaacaaacaaatatggctgtataattactctttgattccttttctccacataccttcaaacacacattgtgtttttgctcgagactccaatttctgcattctttctggctgtgaccgtagctacgataaacaaaacataaaactcacagcaatacatgttcaagaataaacataagaaaagtaaaaacaaattcacttacaggagtagaggttatgttagagaaattctccacattttcgacatattccctctctgaaaaatcttcttcatcctcctcaattgcataagtcttgtaaaccataaaattgtatctatcagctatactacaacctcttttcaagatactaaaactttcaaataaaatcatgcatcttacaatttcattacacccggtttcgtatacttcacccgatgaatcttcagattccatagagttctcatctaataccactgtctcctttggattggtgttaaaatcatttgatgtgttcacattcatctaccacataaaaaccataaacaaatctctcactctcaataacaaactaaggcacaaatggctagtctgttataccttgtaagggtttccaccaacataaccaatctccaactctgctttcctttcatccggaagccacgacggcctttcacttgcggtctctttatcttgtaaggcttttaactgcaacaagagaaagaaacattatatataacagaacaaagaacttgcaaaagtctagtcaagaacatgatcatacacttgctttattcctcttgattcctgcttctcgtttttctcgtattttctccattttaatgtactcaagaacttgatcctttgtagataactttttccctgttctcaattgcgtgtatgtctacaagatgaagtaaaacattgggtgcatcaacatgcatacaaaccaactaaatctacaattagaggtctgagttttcataaaatttctcaatcacaagtcagctttctcaaattggtcttgaaattatcactatttatggtcaaatttcttgaatgaagtatgggtgtgtgcatggtgatcaaagtactaaaaaacagaagcaaaaatttcacatcaaaaaagctgagaatcagtgtaaattggaagatgaaaccccagcgcaacacaaaaaggctccacatttagaaagtaaaaggtttaaagtagttaccctagtttgacgaccgcgtttggaact

SEQ ID NO: 65314 - DNA, 537 bp, Arabidopsis thaliana landsberg
  unsure (1)..(537): unsure at all n locations
ttccagagatggagtgaagtaaactgtttggtgtgattgagacgaaggccactgacactttgagtcggagagcgcgtcgcgccgcggccaaccgcgaggcgatcatcgacgccgcggaggcgctcctcattgaaggcgggcttgctgcggtcaccgtggaggctgtcgccgagcgcaccgannnnnnnnnnnnnnnnnnnnnnnnnnnnnnnnnnnnnnnnnnnnnnnnnnnnnnnnnnnnnnnnnnncgtgccgtgcaggagaaccggcgctacatggcgcccgcgttcgcctcgccaggtacgccgctggaccggctccgcgcggtagcccgtgcgtacgttgcctttgcgcaagnnnnnnnnnnnnnnnnnnnnnnnnnnnnnnnnnnnnnngatgagcccgacgcgctggaacgtatcgcagtgaaggtggacgagcaggtcggccaacttcgtgacgtcttggctgctggggtggctgatggaaccttcgattcggcgttggacccttcgtcgcggcgacgcgttgtgggcg

SEQ ID NO: 65315 - DNA, 2107 bp, Arabidopsis thaliana landsberg
gatgcaacaagccggagttgtattacgaagcagagattgtagcgtttcgaggtggtgaatcaacaatgatgtgcattgggttctcacatgtaatgggttttaatgacgctcttcagaaagcaatagctgatgaatatttgaggttttttttttttttctctactttgctgattattaatctaaaaccctagttttgatttttgggggttttcgatttttgtgtgtgaaattttggttttaggtttgagccgtatttgaggaatgcgtgtaagagatttgtgattgaaatgaatccttctttcatttctgatgatactccaaataaagatatcaatgtttctttctacaatcttcctttcactaaaaggtaacacctttaaatatctaattaatgattttgatattatagtagttgttatgaatattttggcttaactttagtctgtggtgattgtgatgatgatgattttgtaggttgagggagttaacgacggcagaaattggaaagttagtgtcggtgacaggtgtggttactcgaacaagtgaagtgagacctgagcttctatatgggactttcaagtgtttagattgtggtagtgttataaagaatgttgaacaacagtttaagtatacacaggtaattgattctttgatttttggtgtttttttatatacactttgtagtaggaagaagtagtagcttgttttcttttggtttgttgagtgatttgtggccttgttgcagcctacgatctgtgtgagcccgacttgtttgaacagagcaagatgggcgttgcttagacaagaaagtaagtttgcggattggcaaagggttagaatgcaggagacttcaaaagagatacctgcaggttccttgccacggtctttggatgtcattttgcgtcatgagattgtggaacaggccagagcgggtgacacgtaagatttcgttttgtgtcagttctctaagttatttcttccatcattataataataaagtgtttgcatttgattgtgactccttttgggattgttctcgcagggttatttttacgggaacagtagttgttatacctgacatatcagcactggcagcacctggagagagagcagaatgtcgtcgagactcatcacagcagaaaagctctactgctggacatgaaggtgttcaaggtctcaaggctctaggagttagagatctttcgtatcggcttgcctttatcgctaattcagtgcaggtttgtcaactttttagtatctgtcaagccataacttaagtgataccagttgatcaatatcaatgtttttttctttctagattgctgatggtagtaggaacactgacatgaggaaccgccaaaatgattctaacgaagatgatcccccgcagttcacggtgaggcttcaaataaactacctataagtcttaagagttaatataccgcagcatcctggtttttctcttacatgattatttaaactttgcaggcagaagagttagatgaaattcagcagatgagaaatactcctgattacttcaataagttagttggaagcatggccccaaccgtttttggtcatcaagacatcaaacgtgcagttctacttatgcttctaggcggtgtgcacaagacaactcatgaaggcatcaaccttagaggagacatcaatgtttgtatagttggggatcccagctgtgctaaatcccaattcctcaagtaatgattctcattgaaaatcaaagctgtctgtttttttttccttttctgaaatctgatcattcagttttggtttgttatttgcaggtataccgcaggtattgtaccacgatctgtgtatacatctgggaagtcctcttctgcagctgggttgactgcaactgtggcaaaagaaccggaaactggtgaattctgcattgaggtaattttagagttttcaagttacctaaactttataaccgctttaaagaaggatagcctctctttgtaaatatgatttctatgctctttttctattaaggatatctgactcttaacaggctggtgctttaatgctagctgacaatggaatatgttgcatttgacgagttgacaagatggatatcaaa

SEQ ID NO: 65316 - DNA, 573 bp, Arabidopsis thaliana landsberg
aaacaccccttaaatcaacacactcccacagtagtagccgagcagatacaagaaccccctatcaaaccatagcaatggtaaaagaacagaacaccaaacgaaaggactcttgaaacccaaaagcccatgaaaagctcaatacacatctttatcaaaaaggcctacaaccacccaatgacatagggggaacatcacgaacgaaacaaaaaactaaaccgcatctacaaataacaagaaataccgcacctcttccgaacacacaaccttaaaacccaacttcacctcgatgcataccataaaccacaacaacacgaatagcatcacccacaaccctatgggcaacaaagagagaacctcttctcgaaccccggaatccacaaacacacacgaaaaaccaagaaatcacccgaccccgaacatcttgaacggatacaaggggatatgaaaaactcactagaacataaacaactcccaagagcatactacatacaagctgacatgaaccacaacgggaaagaacacacaaaccacaactgaacataaagactaccaaatgacaacaccgcacaagaa

SEQ ID NO: 65317 - DNA, 554 bp, Arabidopsis thaliana landsberg
cgttctccggccggatgcgctcgaccagccacttgttgtaggccttggacagaacgattcgattcgtcctgcggagcatgccgagcggagcatcggcgtgggaacacgatctgatagtcgaggcccatcggtcatcgagcggcgcgcgagctgcgtgaagtgatggacctcgccgcctttctccaccggctccatcagcgatgcctgatgcggcacgcggccgtagagatattgataggtcatgccgggctgcacgttgagcagcgcgccctgtccgccgggccgcgccagcgccgcctcgccccactgacggatcacgtcattgtcgatcatcgcgatgatctcgggccagaactgcgtctcggtgacatgtgcgtcgatatcgacgaggaaatagtcctcgaagttttcggcctgcttcgtcgcgtgggagagaatgtcccgcgtgtcggtcttcatcgtgatttcttccagctcccgatagggctgggcgggcacgcgctcgagcatgtttctctcccgtgaagtgactctagagagattctacgtcaatc

SEQ ID NO: 65318 - DNA, 681 bp, Arabidopsis thaliana landsberg
  unsure (1)..(681): unsure at all n locations
aatgcacgatataaaggagtttggtacaaatatttcattcaaattatctattttaacatttgcactatgataaacaagctattgtatcattatattgtttcatgcaaaccattaaactaatcactcctcaaatttctttgtgagtaagtgaaatgaactaatgtaactaagagatatattaacatttgttaaaaagtcgaaaaattacctaataacgttggaagcttcaacctctagaaattccaaaatttaggaagtcgaagatttgtagggttagggattagcatgctcttaaaaacacacatccacatgtttacacaaaaactcgtagatacgtacgtaagtatacataaatatatggatgtgtgagaaatgtgaatccatagaaccaaaagaaaaataaaaacagagggaagagagaatagaggaaaggtgaggtcgtgagacgtcattgaagagggagacaaactacaatctcttactctctctctctctcccttgctttacgtcacctctgtctactattgaaagatttgttatnttgtttgccttctcctacttntatattntgcatatttaataaagcatgtttacctatatttcaatatttttagtaatagataaattagcctatatttctttcttgcagatctgtgctatatctattaaaatatacttata

SEQ ID NO: 65319 - DNA, 307 bp, Arabidopsis thaliana landsberg
  unsure (1)..(307): unsure at all n locations
atgatgtttgctctattggctatgtatgtagagcttgagaactgcttcaagagagcactagagtcagaagatgtagacgcacgaaacgtacagcaaatacgccatcttcctgtggaaagttcggaatgatctctgggctgctgaggagaactttctagaagctatatctgcagaccctaccaactccttctacgccgtcttttacgccaatttcctttggaataccggtggtgaagagacgtgtttncctttagaagattctactcaggaaatgtgtttgagaaggagccgatttagtgaatggatg

SEQ ID NO: 65320 - DNA, 491 bp, Arabidopsis thaliana landsberg
catatacaaaaactaaccaaccttattatcactcctcaaatctatcataatcataaccaaactccatatgaaacatacgctttttatcttctaacaaataaacacacactatgcctactcatatcacaaacgttatatttctttatacccaataacacacataaccacacgacattatcgtattcaaaacactaaccaacatacttcttactactaaaatcatcaacggtttaaacaacatccatatcaatactaacctttgtaaaacctaacaaagaaactctacttaggatattaataacgggaatcatattaaactcttactcttaaatatccacatcataccacatcaacttccactccaatacactaaccacactacttattcctactctcatattaccatgtgtaatatctcacaatattatccaataaataagcttcacttaacaaacattcactatttacaaatctaaacataagctactttt

SEQ ID NO: 65321 - DNA, 720 bp, Arabidopsis thaliana landsberg
ctcatcacatgtagcttcaatgactgcattaatttgagcagaaaattaattcaacatgcaagcgaggaagtcataaaagtaatttgaagtttccagataagatattatttacaggacaatattgtcatgtcatggattttttatgattggttctttacctttcgacgttgtgcctccacagaccgcttcagcgcctctctcttactgagaagtgtttgaggtcgtagacattgaggccgctcataattctttccacgatacacaatgattgcatagcccttactaaccatctccacagcaactagtatgccaccactttctgcttccaagatttctgctactttgtgagcagcttcaatgctatattcattacaaatgatcttcacaagttccctatacttccagtgaagatgcatgttctctattgttccatcaaagacgcctcttctaccttgagaacacaacaagatacgtcagaacaggaagtttacataaaccatgtcaaagagatgagtccatgacagttactactcatttaccacgagtatttacatgaaagacgggaacagactgctttcaattggaaaaagaggaaaaacaatgacctacctagtaaaaggaaaggcttcattttcaagccaattttccggagcatgtacttttcatcattagtaataccctccttgtcaatatcagaaagttgaggactctctctattct

SEQ ID NO: 65322 - DNA, 491 bp, Arabidopsis thaliana landsberg
  unsure (1)..(491): unsure at all n locations
ttacctcgtcgtcgtcgtcgatcactccggctcgatggctcaagaccagcgcctcgacaaggtgaagactgtcctcaacacgctcgtcgataacctcaccgaaggtgaccgcatcgcactcgtgcagttcgacgatcgcgtcgaggtgttgagcgagctcagcagtgacaaggccaagctccacacgatcattgacggcctctcgcccgcgggttcgacgaacatttatgacggcctcgacaagggctttcagctcgcatcgaacgcgttcgacgccgagcaccagaatcgcgtcatcttcctctccgacggtctcgcgacggccggcgacacgagccagacnnnnnnnnnnnnnnnnnnnnnnnnnnnnnnnnnnnnnnncattggccttacgaccatcggggttggggctcgactttaacgtcaacctcatgccccggtctcgccgagcatggcgcgggcaatttttatttcctcgtggacccgagcgc

SEQ ID NO: 65323 - DNA, 686 bp, Arabidopsis thaliana landsberg
cctccaaaaactcatttgaaaattcctctcctgtctgagaacagttattaccgcaaccaacttctccattgaacctatccctacctaaatgctgattggagctgccaggaaactccattctcatgttctcaagaaccaaaaacgctttattctttcttctgcacaatctcttgtatcacagattctgagtaaccaatttctgttcttcaactccccaaatttcaaaacaaaaaatgttgagaggaaaatacaggattctcttacgctctttgaggaaatacagcgaacaggtaatggagattcacaagccacaagcaattttgtctatcagcaaacctccaacaaacatcttcagggtatattgctacaagatcataccaaatcaaacaaagaccagagtctcattcaaacgaattagaccagaaattaccctgcataacaacaacaacaacaacaacgagaaacaaatttcaaaatcaattttttctgcaaatgttgatcacacaaatcaattgtatatacatatataagcaacgagatcattgatgacaccgaatgtggtgtaatcgaattgaaaaattggagctttagatgaatttgattacctagggaaaaatggccaatgagattaacaatgaaggagaagaataacaaacaaacaaaagatgagatttttggggtaaaaa

SEQ ID NO: 65324 - DNA, 1972 bp, Arabidopsis thaliana landsberg
gaccaaataatcaaatcatatacagacgaataaatcaaaatcaaacccacaaaatcgatcgaatgagttcgttcatgtaaccagtttgaaatttgcttagatgttgattaacaccaacggtgatagtgtctataacctttagccaaacggtgtggatacaggtgcaggtccagcgagtgcatcagagcgtttgatgcttcccataccgcatatgatacaaccgggcgacgaaagagcagcaaacttagcaccacagagatcacaaacatcgtatccaatagtcgataatctgctgagcgtagctgagcataactgagaaggatcttcaagcgggtcaatggatttgttcgatgtgcctctctggacacagagatcgactagtcctcttaattcctcttgcttactcgctggtgcctttgataaaagaagttccagcatctgctttgagtagccatagttttgaacttccatgtttcttttgattgcagtacgtatgcagtttatacggtgcttggctagtagtggcagtgaagctagatgccttgaaagtcttgccatttcgtcctttgcgcttaatgcacttgcaccttggactctttgtagcctcaagatttcctgcaaatgggagagaggagaaaaaaagcattgataagatggtctcatcgtttgagcagaatctaaactcattacaggggagatcgacaagagttagttacccgaaggagagttacagctatcttgtactgagcacagattgtggcttgagctttgatatctgcaccacgcgattgatccttagccagagccaagaatgcttcgtcaaagcaagacagtgcatctggaagctggttttgttcaagatgggcaagtccagtcttgaaacaaaccggagctgcagctccacgtggaacctgaggagaaaagcaaacaataagatatgcacttttacgtgttggatttgatctatatatgtaataagaaacatcagaaagattaattagtgaattccaaaatcaaattcacatttacctgtccaggacgaactgatgcaggaggcgattgaggttgtccaggaggcttaccagaatcgccggtatttggaactccaagaacgctaagatcaagaggctgtgtagaaacgggaacctgagatggcacctggttctgaccaggatactgttgacgaacaccgccgtcaggaagtccaacagtctgaaatggcgcaccaggttgttgacttgtttgttgaggatactgttgaggaacaccaccatcgggaagaccaatatcaggcagaggagtattatttgcttgatttggaccaccctgtgcagctattgcagctcgagcagcttggtccattttcgaaagataagtgccaggaggaggcaatgtcttggcaacctcaacagatgggattgtgttttggaaaaagtcttccggtatcggcgcggctacaccaggtggagctggttgagaaactggttgaggttgctgtgtccatgagctcattgcaaaaggatcaacaggagcagatgcagaacttagagcagttgtagttgcaactgttgaggaagaaggctggcttaacatctgacccaaatcctgagatccagcattaattgattttgttctactcattgttaagcctagaccatctccgagtttaaacgttttagcagcttctttaagcttattgacgtccacggtggtagatgttggcttttctcgtattctaatctgcagcttcttaggttttgttacacctttctcgtcactgctgctgccatcaccagtagcaccatacattgttttcttgaattcctcagcagcctttgcctgttcatagctacgttttgttttccaagggattccagacccatcatcgaacttgattcaccagcatgaagtgccagaggtttatccgatacaggtttacccaacaaactaagcccttcaggtttagaaacta

SEQ ID NO: 65325 - DNA, 539 bp, Arabidopsis thaliana landsberg
  unsure (1)..(539): unsure at all n locations
aaagcggcataactaagaaaagtgggtcactcacttgcctgtcaaagttggccatatgagagcactttctcggggaggagtggtaccaacttccctctctacacaatcattggtttctcaagtctatcatcaaaagtaaaattgattaatggtcttttgtattaattatagacttttcttcaaaaataatctttacaaaaagtgttatatgaagccgtaaaacacatccgatttctaactaagtgtataagtaaaacatatatatacccgttacatctgtccaaaaaaaaaatatatatatacccgttacacatgtatatggtgttggttgaaactaatggactaaatttagcataagatgaccaaaggacatacatgagtttggttgttatgctattttagcgcttgtgtttacgttgttacataatagttagattctgaattagatatttcacatctacctagttccaatttatatctgaatttgcttctgcaatatatgatcatgcatggcactnttacatctcattaacattcat

SEQ ID NO: 65326 - DNA, 437 bp, Arabidopsis thaliana landsberg
tcacgccgttgatgcgcgctattgagcagactgctcgcgatgtctttgcagagcagaacgaaaaggctcatgccttcacgcatctttcgcatgtgtatcgccaaggctgcagtatttattccacctttgtcttccgtgccacaggctcgtttgaggacgatatggaacgttggcgcaagctgaaaggtcgtgtttcagaagtcatcgttgcccatggcggcaccatcagccatcaacatggtgtcggcgtcgatcacgcgccatatctgcaagcagagaatggcgcgctcggcatgaacttgattcgcgcaatggcgcgcgagttcgatccaagcagcatgatgaatcctggcaagctcttcgtttgaagcacacgtgagccagaacaccaacgagttcgcagcgatttatcaatggctgatcaagccggttaaggg

SEQ ID NO: 65327 - DNA, 665 bp, Arabidopsis thaliana landsberg
aactataaccatatacatttgtaaataatatatgaaaccgttgtcgtcattgtcggaaaaatacagccgaaggtgtaggaatagatatagtgattctatcacgtgacgctaacgccatgggtggcgatagctcgtcccatctttcgttcgtttgtttttgttctttgatactaatagattctctctatcagtttcgtattattatatccttaatcaattcataattacgccgtttattttggatgggtcgaatcattttcttatttctaaagcaactacttgattaaacaaatcacagtcatggcggtcaattaacaagctccattgtaattagttcaaaatgttatcactttgtctacatgttgatgaataaataaaatagtgatagttgtgtagatatgtaaaatgttttctgtacgtagttgaagccaatggaaaatatattgaaaacttattaaaaatttgacattgttcttgacttcttgttgtccaccaatgcaatatttggaaaagggcgcatattaggtgttgttttaccccttgcgaggataaattttataaataaatcttcaagttgtgaattattgatattgggtattcgcaatgacatacaaaaaatatttacatttttttcttttgaaaatatagtcaaatggcttgaaaca

SEQ ID NO: 65328 - DNA, 713 bp, Arabidopsis thaliana landsberg
ggccttatctctctatgttctcgatgccctctctccttctcattcactctgcgtttatccctctcatcctcttcttcaacgtcatcttcagaatcactactcttccttctctcagaccgtctcttcaccctatccttatccctccgtctccgctccctctccttctccttacgcttctccctctcttcatcatcatctctatcgtaatcatcttcagaatcactactcttaactcgtttcttccgcctatccttctctcgacgcttctctgaacccttatccttcttccgctcattactccgatcacgatctcgccgactcttcttcaaatcagcctcctcctccaccacatccaaatcttcgctcctatacttggatttctctacctccattcctaaattcagctccgataacacaaatccggatatgtaacctcgcagattcaatggaaaatcaatgaaattcgcccgccccgaagatccacagcgaattgtctgattcagaatcaaaacgagtgaggaaataatctcagattaatcgaatcgaaaaaaaaaaaaaggttttgaagcttacagagataaatcttcgatgaagaagacgaagctaagcgaagaatcgagagtgaataagaacgacggaaccctaaaactgtctggaaattgtggaaaaggtttgctaaaaaatctgagattggcggtttttcttaaattaat

SEQ ID NO: 65329 - DNA, 556 bp, Arabidopsis thaliana landsberg
  unsure (1)..(556): unsure at all n locations
ccattaaaaatgagcaaaggtgaaaagagtatatatacattttttaacaaattgacttgggcagaagcgaagacggttcatttctaattttctgagaacaatataagtttctgctcattcattaccttgtcgaacaatacagataagtaaagacaacaaaaacgatttatacctgtaccgtaggatcagtttcaacctgctcctcaagcaattctggagagacatagttcactctcatagcagatatgtcaactttgggaggtttaccaattctaacacacatagatgtccctgggtaactagggagctccagcttatacttttctgcaacagaaggtggtacaaatctcccacctaaaaagtgatgagggccacggaatctctttgcacataattttggggcagtcaaagatacctaaaaagagtaaatatgttcaatttataaagtagttttcattatatcagatagtaacaaatgagtacaagagaaaaagagaaacacangctatttcgctaagacttaccaacatatcaggcttaattcctccatcttcat

SEQ ID NO: 65330 - DNA, 372 bp, Arabidopsis thaliana landsberg
tcatataaagatcaaaatcaatatttcaattgctaaaataaatatagcacaatgaaaaaaaattactaaacagaaatacaaatacaaatccaaatattttgtttaaaatcgtaaatcaaaaaggttagcaactggcatgtagataaatcacttttcgatcggaacttaaaagccaaatagctacaaaaaatgaacataatctgccaattctcgcagacatccaagtttgcttatctagagttataatcgagaatcataaccacgacctgaccataatgtatctactctatccatcatccatgcagactgcgattactcttaaaatactagataattcacggtaccttaacaactagctttgaaacattcccc

SEQ ID NO: 65331 - DNA, 610 bp, Arabidopsis thaliana landsberg
  unsure (1)..(610): unsure at all n locations
aaaaggtaaaatgatgataacatataacttgtgattctgttgtcatgtgtttaatgagagaagtatgggggggcaccatcttactatttgttatgtgtgtttaatttgttctaactatctaaatattgtattagaaagtaaataaataaaaacctgaannnnnnnnnnnnnnnnnnnnnnnnnnnnnnnnnnnnnnnnnnnnnnnnnnnnnnnnnnnnnnnnnnnnnnnnnnnnnnctttccacccaccagcttcatttatcgccgctattctccatattccggcggttcctataatattatttttgataactttagtacatctacaataatttttaaatgatttatgacaaaaacacatttaagatccgccttccatttgcttccactacaagtcctagtgtaatgaatgtgtccccttacactatctactaaataaaattgaacacatgattttaaaaactaattaaattagattcttcaagcttgcaaatctaacttataagacaaggaatgactataactcctttaagtatatataaatatacacctacttgcttcacatttcagattccccacttctctcgattaatgattgattatatataaat

SEQ ID NO: 65332 - DNA, 2462 bp, Arabidopsis thaliana landsberg
  unsure (1)..(2462): unsure at all n locations
aggacaaacatataaaaggcgttatcaagaatggattgttttgggtttaaaagtgtgtcccaaggggctacggggcctgactcacactactctaatacccaattacaccgtgaaggccttaatcgctaactggtgtgagacaaacgatgtcaagctgcctgatcccaataaatcaacaagtttaaatgagctttctcctcttttatcatgtacagactccattcctagcacgggtgctgatgtttctgctcgtaaagttagcaacaagtcacatgattgggatgcttcttcaagtgaaaccggttagccctcgttctcaagccgagcaactgaaagagaaggtgcttatacttcacgtcctgcttctgccttgggtgcttcttcaccgggtatatctggaaatggttacggtttggacgccaggaggggatcactaaatgattttgaagatagatcaaacgattctcgagaactgaggacagatgcacctggtaggtcatctgtatcttcaactacacgaggctcagtagaaaatggaccaacatctgagaaccaccatcataggtccccttctgctactagcactgtttccaatgaggagtttccaagggcagatgcgaatgagaattcagaagaatcagctcatgctacaccttacagcagtgatgcttcaggagaaattagatcagggcctcttgctgcaaccacttcagcagctactcgccgagatttgtctgatttttccccaaaattcatggatagacgtacccgtggtcaattttggcgacgtccatcagagaggcttggttcaaggattgtttcagcgccttcgaatgagacaagacgtgatctttctgaggtcgaaactcaagttaagaagttggtggaggagttgaaaagcagctcattggatactcagagacaagcaactgcagaactaaggttgctagccaagcacaacatggataatcggatagtcattgggaactctggagcaatcgtcttattggtggaactactttactcaactgactcagctacacaggaaaacgctgttaccgcacttctcaacttatctatcaatgacaacaacaaaaaagcaattgctgatgctggtgcaattgagccgctcattcacgtgcttgaaaatgggagctctgaagctaaggagaattcagctgctactctcttcagcctctctgtatagaagaaaacaagattaagattggtcagtcgggtgcaatcgggcctcttgtagatctactcggtaacggtacccctcggggtaagaaagacgctgctactgccttgtttaatctatcgatacatcaagaaaacaaggcgatgatcgtgcaatcaggtgctgtgagatatcttattgatctgatggacccagcagctggtatggatggataaagcagttgctgttttggcaaatctagctacagtcccggaaggaagaaacgcgattggtcaagaaggcggaatccctcttcttgttgaagtcgttgagttgggttcagctagagggaaagaaaacgcagcagcggctcttcttcaactagcaaccaacagtggtcggttctgcaacatggttcttcaagaaggcgccgttcctccactcgtcgctctctcacagtctggtactcccagagctagagaaaaggtacaaactttataactatatcatgatgcttttgatttaagaagccacttgattgttttgaagagttctttatttggagaatcttgtaacttgtcaggcacaggcgttgctcagttacttcagaaaccaacggcatggaaacgccgggcgtggctgattgatgatgttgatgatgatgaggatgcacagattctggtctctcagtgcctatttttatgttttgtagtagcgattttgtacaaaagaggtttcttctgcaaataatttttgtacccaagattttttgttggctctctgtattctttaattttctattgattctcataataaactttgatttggaatagaattattttttttttctttctgatttcataaaacaatgtagctgtgaatatgaaatgagtgaaaatattttaccattgatgtgataattagcaaattgagaacagtaattttgcagaaaatagcatgtattaaaattattatttgtatacataaaagacaaataatatatcaaaatgctgaatagaaaatgtgagctgtattgagggagacaaattgtagaatcaaaaaaagatataaataaataaaattaagaattgaaactaaaaacaaacaaacaaaaaatttattagaaggcaagagcaagtaaatgccatgctattgccgcagctcccaccatcatattttgcattacacttcttctttctgctccgctctgcatcaaataattcgatttcaaattnttagaaaatcaaacctaacaaaatgtgatttcagacataaaaaatca

SEQ ID NO: 65333 - DNA, 1681 bp, Arabidopsis thaliana landsberg
gatggatcccatcccggcggttttatattgggccaatcgccacggcatcccaagcgtatgtacaaactcttcttaccttcaatatcataaaagacgcatttaattctccaaaacatttatcagattaaagcatcaatttacaaatgggtttcttctatttattacctggaagtcccttgtctgagatgatcagtagcttaagtgcactcaaggaagcctgagccacgctctttgcatgcgtcgggtcccaaccttggagcttcaccacaacgtcggcgtttgaatacccaatctcccttttttgcttacttctcctcgcttcttctttagctgactcttcatctacattcagaaccaatcttgaatgtataagcagtgattctcgttttctgtacagaagggttcattttaagtggatggagagagaaattgacctgtggcttcagtctgtgatacccaaacggttaatccggagtaaagatgtctacactgatcagctctccccgcagctacatgtttacctaccatggtggagacaacagtacgcacatggctgcaaagacatggagatcagtggctaatctcggtaactggaaagagattgaacactagacatgactatagacctgctcaagctttccaataccgaactctctgcttcagctacagaatccggcccttctgcaagaatccctaaaatgaagacaaacaaaagggtcctgagaagtgaggaagattcttgttagatgatgaccatgatccaaaagcaaacttacaagaatcgattgtttgcttggaaaagctttccagcaattcctttgaatctaaaggactgtacctgcagatcataacaagtgtataagactctgaaatactattcatactgagctcatgaacgaaaggcgggaactgaattcacccactgagaagaatctgaattcatacccaaggccaacggctagctctcgagacactttttggttgatttcagttgaatctccaacaatgtagattgatgcacctttaagaagttgcatcattcctgcagtcaaagactcccaggactcgacaatatcaggccacttcaattccccatccaccttcttcatattcacaaccaactgatcttcgtctatgtacctgttctggatcaaaaccaaaacttcagccctcaaggaaatgtcacacatcacaaaaacaagtcatataatgcaagatttacacgtagctaaccatattgtttcagagggcataatcttctcaaagagatggttagtctctaggagtgtaatcagcaatccattccgcttttctttaacggctaacgatgttccatctgcgtcaacagatatatcctttggagaaagtatctcacctgtctttaacctcaatcttaattccacctctttgccaccatccgtgaactgcatcatatatgaaaacgattcaatttttctctaactaatgtacaacaactacatgatcatggtatatatacatagaccttggaaccagccatttatacgcaattctccattttatcactcagactgatagaccagcaacactagtatagacgtgaatacgaaaattcacctcgtaatcgatagtgctggtggatacggcggataagcaattacatgagaagctattaaaccggtcggggataacattttgagag

SEQ ID NO: 65334 - DNA, 657 bp, Arabidopsis thaliana landsberg
aatctatcgttgaaacttggttccgaccatcgcctccaacattaacagaaactggtgatgaaactcaactttctatactttcaccacaagaagccaaaactccaccgtcttcgccgtcaatgatgttaaacgctactgaagaattcgagtcccaaccgaaaccaccgcttttgccgtctaaatccatagacgaaactcggctccgatcaccgcttatgtcgcaagcatcgtctccacctcctttgccgtctaaatccattgatgaaaatgaaacaaggtcccaatcaccgccgatttcgccaccaaaatctgataaacaagcaagatctcagacacactcatcaccatcaccaccgccactgttgtcgccgaaagctagtgaaaaccaccaatctaaatcacctatgccaccaccatctccgacggcacagatatcactatcgtctctgaaatcaccaattccttctccagctacgatcaccgcaccagcgccgccgttttcttcaccactctcccaaactacaccgtcacctaaaccatcgttaccccaaattgaaccaaaccaaatcaaatcttcttcttcaaactcacaaacactcgatctcacgctttaccagagcagaatctagtgaaacctgacgccacctcatgaacaag

SEQ ID NO: 65335 - DNA, 604 bp, Arabidopsis thaliana landsberg
  unsure (1)..(604): unsure at all n locations
aactaaatgtttgtgttgacatgcatgatacttttgaagaaatgttcccttaattctcagcagtttttttttgtgattttcatacattgtttgtgatgagtatgtaagttaccattagacgaactatagcaggtctgttctctttctgactaaccttccatttatgataattttaatagggacgaaggtcttgatgaagatgattatttgcttctacaagataacaacgtcaaattcaaaaaggttagtcatatttgtgtatataacaatacatcaggattttgtagatacactaaaaatatatgtgcagtactaatacatttgacttttttcttgaaccatgacagaggcagtataagcggttgaagaaagctcaaagggaacagggaaatggccagggagaatcatccgatgatgagtctgatagtagaggtggaactaggagaagtgctgaggataagatcaaagacaggctgtttgatgatgttgatgttgatggtaggttctctgtgccttctgatactattatgtngactgttggcacatagttgactatgtacattttgtgtctactagatccacctgatgatgtatgtgatgagga

SEQ ID NO: 65336 - DNA, 245 bp, Arabidopsis thaliana landsberg
  unsure (1)..(245): unsure at all n locations
cgaccgggccagagcggcactcggccctccggacagccaagggccgttgggggcttccccggacaccacgcgacgagcggagctggaacagccgaaggacccnacccccggccgagccgnnaccagggagggcaggcagccaaacagaaaagacaaccccncccgaggcccccgccgacggcaccggaccccccaacgaagccgacaaccgccacgacccggacccggaaccgaaaccggagccc

SEQ ID NO: 65337 - DNA, 313 bp, Arabidopsis thaliana landsberg
tggttatcacatagaacaggacagatcaagaaggaagaagagtaaagaagaaagccaataagtttaaagaacaatgtgggcacggctacagaggccaaaacaagggagatgagagaggggacaactacattgagcttacgtaaaaggaaaaaggtatgaaggtataccatcagcgaaaaattgaattatagcgaaactaccgcgcaggagaagcacgaaaataacgagtggacacaaacagacacgggatattgcgtgagacaaagctagcggttgggaaaaaaaagatgaattccggcgcatgaatgcaaaa

SEQ ID NO: 65338 - DNA, 1461 bp, Arabidopsis thaliana landsberg
  unsure (1)..(1461): unsure at all n locations
aatctggactaaatatttagatanagtttacatatttggttcgtctaatacatgaacacaagacatgctaacaaataaaacactaccacaaagggatagtgagagaatgtgttttgcaacaagacataactttgattgcttgatgtgttaaaatgattatgtcagagacagagagcgatcataggctttctttatttctaataacgtcgattttcttcttcttttctggcgttcaataatgtcgaattttaattcttgatttttgcaactctaaatatccttaacgacattgaagcatggtgcatgtccatcgttaataataaagttgaacaaaaatcttgttgaattaattacaagcacagcttcaatagcataactttacgagacgaccacatcttatagacgagtttcgcttttacttttttaatgattaaaactttcatcggagaacataagtctttctcttaataaacattactacccgtgcataacttcattttttaaaacatcaataattaatatacgattacaaccctaaaaattagtcaccctatagtacatatcaatgatgatagttttttctttttggtgtaatgttaaaataaaatgttaaccatattaaacgatagttcttttaacttagccattgtaagatatttcttactttagtttttccgtagaagatattcattatggtatggatagtatataccttaactgagtttaaatattggatcaataccatctaataacacatatctgatgttcaatacttaataattttgcataaatgttaagcgtgacaacttaaaaaaaaacacatcaacagagtaaaaacatatccgttaaattagaaaaatgacatttttataacacttaaaaaaaaatacatgaaacgtttcatagttttttttttcttcaaagtaatgtaggcgttagatatttcttacaattttttgaaaaatattttttatgttgtgattggctgatatcaggtaactaaaacttatttaaagaattgaagaaaatttgaaaagtaaatagatggattcctatattgtcatttcagaaaaacagtagggacaacttcgtaaatgaaattcgtattattaaacaaataaatttaaattagaaaaaaggaaaaaaacgcaccacttttctttttcgctgatgcacagcttgtcggtttgcgtgcaaatcctctgtttcacaattttttttcttctctttctctctctttctctctctttctctctcttcctcttttattcctctgttccaaagttcagcagaagcaaacacacacatcacttactatctctctctccttcttcactttctcacataaccaaactctctctttctctcttttttttgaagtcccctctccaaactataattgccctttagtgtaagtaaagagtcttcaaaacttttgcagcttcaattgtactgggtttc

SEQ ID NO: 65339 - DNA, 142 bp, Arabidopsis thaliana landsberg
ttgatatcgaattcctgcagggggggcggcgctgaggttctgctctcgtgaagaacgtattttttttgactcatcaccaggccgtagaatcgtccgcatcatctcagccagcaagagctgagtggattccactcgtttgata

SEQ ID NO: 65340 - DNA, 605 bp, Arabidopsis thaliana landsberg
  unsure (1)..(605): unsure at all n locations
aagaatcatgttttcaatcctgtctatccacgatggtcctgcacaaccctggaacagttactaccttcagtctgaagcttcccatgtcctcagatctctgaactaagcaaacagagtcaggcctggttagtactcagatgaaaggaaagcaactcatatgcccaaagaaaaatctgggtcctcagcagcagcaggaccgagttggtgtgaaatcagtgcttcccgcgccacactcttgagcccttctgccctatnnnnnnnnnnnnnnnnnnnnnnnnnnnnnnnnnnnnnnnnnnnnnnnnnnnnnnnnnnnnnncttcacgagcccatctgctatcatagagggaagggtgaaaccagctaaccagccgctcaagcactgggagagaattgagcctaatgccaacaacagagggcttggctttctggctcttgtccctacttcaggaagccagacagggagtccttcgcagagcgttctcctgcggtttcccagttcctatccagcaacagtgtaaaccttcccctcaccctttcttccattttcaaaaggagtttttttttggccagagaggccaccaaccctacaacctgagttcatccct

SEQ ID NO: 65341 - DNA, 543 bp, Arabidopsis thaliana landsberg
gctgttgcgattcgatagtggtgctggattcagagaatttgcaaaatttgcggctggctttgcaagattaaacacaaggcccggagtctgtcgaaattgactggaccgcacaccctgtatacagcgatttgcacacccgcttgaaagtgagacaaaaccaacctgacttgttattgccagagcccaagacgcttcaaaccagtttttccaagttctacagcaaggcttgcgacatggctggatctctggacaacttgattgacactgcgacgacacgatgaacggacgactgaaaacgcgatggatggaattgctgggctacgccggtttaatcccgtttctggggcttgcgggcatttcagcctggttttaccacaccccaatggctgacttgtacggcggctacaacctggtgtacggcgcctgtattctgtcatttctgggtgccgcgcattggggcattgcgattgcccaggctgcgcagaccgaggcaggctaccgggcaggcctgagcgatgacaatatgaaatgctggcctttggc

SEQ ID NO: 65342 - DNA, 642 bp, Arabidopsis thaliana landsberg
tgctggcgcacgtgcgccagatctggcccgggccgtacacctggatcttcccacgcacggcagaagtgcctgattgggttgccggcggacatgccggcatcgcgctgcggatcaccgcgcatgagccttccgccgcactgtgtcgtgcgtttggtggcgcgctggtgtcgaccagtgcgaatccgcatggcgaaccctcggcgcgctcggcgcagaccgtggtcgactatttcggtgacgcgctggatggcgtgctggatgcgcctttgggcgaacagacccggccctccacgattcgcgatgcgttgacgggcgctgtcattcgcgcctgaacgccacgcgcggcgagtcggttgcgattcagcggtggcagcgaggatggggaacctcgcatcatcttttcctcggcgtgcgacggccgttcatccttgccgggataaaagggcggtcgttccatgggcatacgggagctcggcttggcgattgttcaagacacctgtcaatacgacgaggcagcccagatgctgccgctgctggccatggccgatccgcaacgcacgctggcctggcgtgatggtgtggcggtgagcgcggcacagttcctcgatcacgtggaacaggtggccgcacgattgccccgac

SEQ ID NO: 65343 - DNA, 118 bp, Arabidopsis thaliana landsberg
cgcaaaggcgacgcaacggagagacccagaaaccaaacccgagagagagcgccgcgcaaccgagaaggagaagaaacggcaagaccccgaaagccaccaccacaaaaaggaaaagacc

SEQ ID NO: 65344 - DNA, 459 bp, Arabidopsis thaliana landsberg
  unsure (1)..(459): unsure at all n locations
aacgcagacggccatggtaaccatgnactcgaatacaaaccaacaccacctacgccgcgggacgccacacagacgccgcacggcaacgagcacaagcgccacnccaccaccacaancactcgacctcggttggcctcaccagcgacaccgactgctccactctctccaaggaagccactggaccacgagactctgtctgacacagacagagaagcaacacctctagaactgcactcaaacgcaacacccaaagcaccatagtgctatcagcgaccaccattcactgaccctagaaactacgtcgatcgaaccacctccaagccaccgagaaaacactcgaccacaagacccaccaaaccggaataaaacaacaagacaacagatctcgggacacactggcggactgaagtataggtaaagacgggactaacgaaataatgacaaataatgagtgacatt

SEQ ID NO: 65345 - DNA, 1579 bp, Arabidopsis thaliana landsberg
aatctataaagcttcaagaagcgagttgaagaaagcggtgatcctaaggtacttatcaatgtgatttgtctttttaccctgtcctgtaacaattagatttcttgtagtgtaggaaaggataatatcatttcgattaagcttatggtaataaaactttgaaagttcagttatgtgttgttcctgaaatcttgaagttttaatgagatgattggtgtgttctccaaaaaaaataaggtagccacacaaataaagcaactaaaaaaaaacaaataaatgaaggcttctgtttatcttcctaacatggaatttttagttttcaaataaatgacttctgcagctcccaagctatctcttcaactaactctactccttttcatttttcctattattacaaacacaagctctccttttgtgactctaaatgtttctctaccactggaatctcattctctaaagcaatccactcgttcttgcccttcatgtgagtactacgctcgaaagaatcactttccatgttgggaattgctttcttcaccatatgcttctgcaatgaatgctggtagaatatctttatgcctctgcagattattctgtatggtctcatgtgaccatcaagactaaagttctctcaggccttggggagctctcttgggtattcttcttccagcgttttgatatcatttctgaaatgtgtattctttctcaattttccgctgatggagaaccggtaagtttggtgtctgttgaatccttaatgctggtctcatcagttggtgaggtgacatttgtttcttctgtattaccgagaatccccatgctagcgagaatttcttctcttggctcatctggatattttactctataatattctaactccatctcaagatcttgtatctccttctccctatcagccaagacatcgtttgctctctcaagtgcatccatgtcgtgctctgcttgctcatccatcattctcaggtattgtaaagcttccatatggagagctgctttctcctcctgcaaccgcgtaatcatcgccattgcttggttggtagcaatggctgaggcatttctttcttcctcgaattctttattcaaatctcttagggatttcctgccatgctctagttgttgcttcaatacttcaacaagactttcgccctctatgtcactgctaatgcttacaaaagattctacagaagcagagtgctttagttctggtgatccatttgaagtattacgagtctctgttatcttcaaggagtctttatcactgtgttctaatgaaggttcttctttggaaatgttcagtgacgtcaaaggctcagtctcttcatgatctccatgctcttctttagctgagtgttcttctttgacaacaccagtcacattgtttgatgtcattggctcagattcttcgttatccacatcctcttcattactggaatggtcttttgcaaccgaataaatattacttccatcttcgtcctcactagattgttcttcagcaaatgaaccagactcactttttgatgtcaagggctcggtatgtccattgacctcatcttcttcttcatta

SEQ ID NO: 65346 - DNA, 495 bp, Arabidopsis thaliana landsberg
tattcaacactcaggactcgtacacttatggtagaagaagcatatacataccatgtaagtgatcttttaagctgccatttttcatatagtcgtagaccaagaacctgaatgattgaaacaatataaaatgagaacacttatggtttagataaatgcagaaggcgaaaaagcaatgtatggttcttcacctttctttcttgttgatgcaaaagcctttcaaagcaacgaggttacggtgatgcagcttagctaaaagccctatctctctacaaaaatcttgttcagcttgttcagagactttgttcatcttttttaccgctgcaatcagaccatcgttgaactcggctttgtaaacagtaccaaaacctccctgaccgataaccgtgttgaaatcatttgttgcatttgtcatttccttgtagctgaactttctgaaagctgaggaagaatcatctgcagaaaaaagcgttttcaagtcatttcttaggtatctta

SEQ ID NO: 65347 - DNA, 638 bp, Arabidopsis thaliana landsberg
  unsure (1)..(638): unsure at all n locations
gacttacgactgtatgcgagaattcaatcgactaccagaaggactggatcgttgattcaggttgttccaatcatatgacaggagatatgtcaaaattggtgaacatcnnnnnnnnnnnnnnnnnnnnnnnnnnnnnnnnnnnnnnnnncacacaattgccaatagctcatgttggcaagacacacctaccacaaaaattttggacatgaagaatttcaactccaaaatgtttatcatgttcccgggatgaagaaaaacttactatcagtgccccaactgacgagtgcaggcaactacgtattgtttagcccagaagacgtgaaggtgtatcgagaattaaaagtcattggtaaaccgttcatagaagggccaaaaatgaaggctatttatgtgatgtcagctgaagaagcctatgttgagaagacaaggagaagtgacactggcgacttgtggcatgcacgactcggacatgtcaactacaggaaattaaaaattatgatgcagaagtcaatgctgaagggacttccacaacttgagattaaccatgagatcgcgtgtgctggatgcaaaaccagtaggcgcatcaattggcttacaaggattcaaaattaaagcgaaggaaccgctggagctagttc

SEQ ID NO: 65348 - DNA, 457 bp, Arabidopsis thaliana landsberg
cttaatcttgttggggtttctcttccattagtatacttttgacatgactctggttttgttgcttgatgtacaagcacacatattaagttcaattgctagtgacttttaggcctactttagttactgcattggtaatatctgtgatttgctatgatacaaaaagtttataactgtgggacgaaattggtccaatatggtatttggcacattcctccaaaatgctcatacagaaactgtaagggatcagagattgtactcatgttaaagcagaatccagaaggttcttgagttcttcgtcgaactcaatcatcagattcgaaggcattgaggtgaatttgagttcctctgatgatagcgctgtaaaactccgacccttgtaaaaagttttgagtgtccaaacagaacactatattctcttttctatcccaatataaagtattacttcaaatacattctg

SEQ ID NO: 65349 - DNA, 306 bp, Arabidopsis thaliana landsberg
  unsure (1)..(306): unsure at all n locations
tctatgatccacacttaacgtccttgttttccacatagccatgattgtcctgccattttcatgaataattcacattcaatatagttgcaaacagtaaactaatcgctttgggtcgttgatgatcacgtaaaccaatacctgctggtggcatcaaatgatacaaatgactggaaatagaacgaaagtcttccttcatctttttgagatggaggtccatgctcngcatcaagacctcgggtctttttcagaataatgagtagcagagggcttccctaagaagcaaaagttgggggatgtcctaggatg

SEQ ID NO: 65350 - DNA, 1400 bp, Arabidopsis thaliana landsberg
tggcaagctggtacccggagaacctcaatacttttatgctccgtctacaatacttcatctttgggatccttacgtgatctttgtgcagggctaacagaaacctatctcttacatacgcaagtctttgacgtatccaaaaaatcggtatctgttgatggataagctcactgtagtcataatcgcatctgcaataaaacttctgccttattttcagtcacaaattgtaattgtcctaaccagtcaaccgcttcgaacagtccttcataaccagaaccaattaggtggcaaaatggacggtagagctaagcgaatttgacacataatatcgaggtcgaagttgccttaaggcttgcgtaaacggcattttgagctcccactagttatgggacgatcatcgtgtacatgaaaattcttagatatgttccggttaaaaccattcactagttatgttattccatatttagtctagtgtttgtccaatttaaaatagaactcacttacttttggtaaaagaagattcaaaaagctctcaatctgtatatttcaagtgttgttttgcaatatgggtgacttattacctatgagagatatttgtgctataatatcacattcggaaacattcatgtcatatgtatgcgcacatatgataataacataaccacaaatccttttttgccttatcaagaacacatatatagaactaggttctagttcttgattctcaaccctagagtcttgcaggatttcagtcacaacaccaattcacatactaattgaataagcaattctatctaattgatatacttttatttctacctatttgttttatagttttcataggtttttaataagtggtctatatggttatggtgtttttaaggtgtttttcaagtatttgtaattttaaggtattttatctgtctttggaaaaaataaacacaaggtgttgaaaaacaagaaattagacagattatgggcatcagaagtttgtcactagttgaagaacatcacgaccaccaatttaagtgaattttggacacaagaaatccaactgagttagctttcatcgagaggtggaatcaactcatttccttcagcggttctatagttatgccgatatactaacgacgcacgtgtaacgtgtgacgtgtcttacagtctcgcgaaagtagcaagctgagaacgaaatattggcaaatgctcctcgttctggagccgcggccaaaagccacatcatcacgggtatccacaacgagcccgttgcaagctcacatgtccatccctttggcctaaacgacaacacttcttccttctagactaaaagaactttgaagatatctcaaacccaataatacattgtcttaagcccctaggggtacacacacatgcccaacacacac

SEQ ID NO: 65351 - DNA, 115 bp, Arabidopsis thaliana landsberg
ttatgggattgccatgaggacgtccgcctgtttttgactatctgtacattagactgtggctgcttgtttgttctgcaaccttagatctttgacatgtgaaagaatgaaatgttaa

SEQ ID NO: 65352 - DNA, 442 bp, Arabidopsis thaliana landsberg
tgtcagtagaaatgatatcatatatgatgatgacagttatatctacataatgctaggggggagactaggcattgttgtaaataatgctcgttttgatcatggtttgcattatacatatcaataaatatatttgcacatgtttaaatcagacatgatgagttcatgatataacacattctcattcgtgcgagtttacaaaattacagatgcttcttttgtatatgtgtatgtggatgtatatatatgggaaactttatatgtatgcatgaatatgtaaaatttagcaacaaattaagaggtactattttgcttaattttaacacacaccgtgatttaattgagcaataactgtagagaagtcatcgcatgtgtgtagatcaaaattattttaattctttctacgttttctcttattttattctttgggatataatttatgctg

SEQ ID NO: 65353 - DNA, 279 bp, Arabidopsis thaliana landsberg
acaggatcggtgttctctaacgagcgggtgcgatttcttgattctctaattccatttgactcacatttcttaattctctcatatgtatagattgattgactcggctgaaaattgatttaacttcactaactatggtgtctttttcataattaaattatcatagttctgttacttttttgttgatgagaaactccatctacagtgctggagacaaatgaccctgcggactgcccttgcccgtgttctgcattctttctactggaaccagatctgaacttg

SEQ ID NO: 65354 - DNA, 164 bp, Arabidopsis thaliana landsberg
  unsure (1)..(164): unsure at all n locations
cccttttctcgtcaacantctttattgtttacaatttaaataacaagccttaccttaaatttaattttagctcatgaaaaatctagggttctttgtacatccttgctgctcggtctaacaacaggaatccgtcatgcatgcttgatcaattcattctcgttata

SEQ ID NO: 65355 - DNA, 1547 bp, Arabidopsis thaliana landsberg
  unsure (1)..(1547): unsure at all n locations
ttcgtaatcgtagttcatgcttacctatattatggggctatactatataattataataatttggtgttctcccgtgtcaagtttcttacgctatggaacatctctccattagccgagttaagcatggactctgggttgaccggtgagctaaactagaaattcacaaatttttgtgctatagtttgaggtaaaaaacttttatctcgatattgtttacgctttgactctctttataagttataaataaaatggtgtactttccgttcaattcatcgggcaacccatagtctagacttgacaattatagaaccattataacttgatgttttctcacatcatgttttttgcagtgaacttcttaacccatagtccaagtttagcttggctaatgagaagatgtaatctcgggtgaaaaannnnnnnnnnnnnnnnnnnnnnnnnnnnnggtcatataatatagccaagataagaatgaattattggttgtatgatgaattgaacataacgctccatatgtaattgagtagataattcacaaagtttgcttttgtaatttacaaaggtacctctcgtgggtagtgggtagtgggtagtattgcttgaggtaggttctcatctcaatgttacgccttcactctctactcacatcattctaggttattgttttctatcatttgcatgtttttttttcttaaatcatttgcatgtttgtttagataatgccatgttttcatgccaatgcctcattgtttctatttacgtttgtgttcaaccgttctattatctttgatgataaggataactttttcaaaaatgagagcacgacattgatagcataattaacttaatatttagtttacaatacataaacgtttaaatggtttatccacgtaagcaaacactagaattgacttttggtcgatcaatcgatagtgaccataacatatcagaaatggtttgtgaaactctcactgtacataatagagttatgaagctgatgcaccaaattaagaatccaaattcagcaaaaaaaaaaacaaaaaaacgaaagctcaaagcttcaaggttagatctggaagagaactttccatatccatcgcttgcttgacgtccaagaaatccatttttctttcacctaaattatcattacccgcttcaaccgcaaccgcattcgtagcttgccggaaactccccggccagagcatctcggcctcgtcgtcctccacgtaaaaaggtatacaattaccaaaatacccctggttgaacctggcaatgtttcaaataagtgtttctggtgtctgccatgtcatgctgacgtcgtgcaccgagggaatgagaccgaattcccaaaagtcctgaaagatgtcatgttcccgtttccgcttccgtaaagcggcaaacacgagagagcggctgctgtggcagcagacgcataattgctacttgatcctctaccggggaagaccccagcaagacccatacgcatagcgcgtctcggcgagtgctctctcacgtttgtgagcgttttggtgaccacctagcgatcg

SEQ ID NO: 65356 - DNA, 943 bp, Arabidopsis thaliana landsberg
ggccaggctttgtaattgggggaaccaatcaagttcctcaagttatacccagtaacatttcttgttggtctctagtgatgaagggttctcctctaacaccgtcattgacaaattcactaatcacaactccagcttctaggtatgttacatctatgatcgatctctgtttatgtttctctttaggacattagtttaaacggggcattgatagaaaaaatactatatttcaagtttgcatgtttaaattaaaatagcaatttcaattactagagcctgttttttagttgactattgtctatttccaagactctgtaagtggagttctccgtttttttaaccttcccagctgtaaagcaactgaattaagctcattaatgttatggaagcttagcagagattgaaaagatgtacgaggttgcaactactggttcagaagatgagaagatagccgtggcttctattctctgtggagcatctctgtttcgtggttggagcatacaggtatgtttggcacttagattcaacttctgtgatcttctttttctagaaagttttattgctcccattgctccacctcagatcttctttctgcagcctcctcatctcttatggttaacccgatctctgattaatatcaggagcatgttattatcttcattgtaactttactttcgcctccggctccagctgatctttctgggagttatagccatctaatcaattctgcgccgtttcttaatgttcttcttgtcgggatatcacccatagattgtgttcacattttctcattgcacggggtggtaggttttacttttcctcttcaacttgtgttatttgacaatgaacgaagaatgttctgttttcaatgggttagtatttatgcttcttttgccaggtcccattacttgctggtgctttgatgccaatatgtgaagcgtttggc

SEQ ID NO: 65357 - DNA, 1255 bp, Arabidopsis thaliana landsberg
cgttttgatatgcattcaataagagagacttttgagtttctgtatatgtgagggctcattttcgtccagactacaacgacctagggataaactacaaaggttaatagatatatctggtggttaatgcaattgtactcacctttttatttgcaatatgcaaagtaagactacaagcgtggcagctccatcatcatcttctgaagcactaacaacctccaagaaagaggaaatgatgaagagaataaacttcattgtacatgtccaaaacaaagttcaaccgtgtcaattatgatcattttgtactatataaaagagatggaaataataaatctcctaattttattatatcatttcgtttagttaaactcttatgtacttcgtattttcattatcatgttcgttgtacatcttatatgctttaacacaagagtaaaaagtttttaaaatgagtcgaaattatccaaacatgattatattttaggtgtgataaaataatgtaataactaatttcataagttgaataatattctccactgtaatattgggattaaagttagatattaaaaaaaaaaattgctaacggatttaacatatttttttttcagtttgtgtttcacaaactttgaattcttaaattcaaatttgtggatattgacattacacatgtaaacattaacaaacacacctatattttttgtattttatcatattatcttatgttttgctcatatttttattaatttttgcttaataaaacaatgcattttcttttctctcatgtcaagctagagcattaagaggggggtcacttgaccccataatatttccaaatttttttttataacaatattatgctaaaagttaaaatattagtagacactttttaaatatggttagtaataattaatcttcatttgtacattgtgagttgtgactttttttttattgtcggccaaattccattaatatggaagcccaatgagcagtagtactaagcccaataactaatagtacagtgatgagaatacagaagcccaaccccaacatttacaaccttaattgaaataacagctccttagtcgatttcttttagaaaagactaaggaaagaaggtgccacgtgtaacatacgtgttagcacgcaagaaggagaagatgaaacggacggtgccgaccaaactccacgagttgacacagctccgccgccggcttcgggaaaccaccaccactccctttctacagattacgtctatgca

SEQ ID NO: 65358 - DNA, 851 bp, Arabidopsis thaliana landsberg
  unsure (1)..(851): unsure at all n locations
actatacaataaatagtttcatttcagcatctttggttagggtttttcattcgatctctcggttaagctaataatanagctggttgagcattatatatgttccaatttattgtttacacttgcagaatctttctattaaatgtttttccattcaacgacgaagcaatttaatggttgtattgtgttgggattatcttctgtctaggttcaatgtactttcctaaaatagatgttttagaaaataaatatatttttttactagggaatgatccgagtttttaccatacaatcaattatcctaaccgtcgattagtccattgacgcagttgagagaaattgatgtattgcctagaccaataggatacctcttagttaatattttacaataatagaggaaacaaatactgaaatacatatagtatcatatagtatgcattttttgtgaatgaaaaacgtaaaacagaaaatactaaaaacaaatgtataacaaaaaaaaaatgatatatagtttgtatttctgtaaaaacaaatgttttaatgacagataatttgtatttttgcgaaagatgtataataataataataataaaaaataaggatatttcagatgttacaaaaacttttttttaataagttgataaaacaaaacattttttatatgcgtgaaaaaaatttacgattgtatggaacggatggcggtactacacaatagaaactacaatcacaaaatttaaaatatctaagccatgatactaaatcataatagaaacttaactcgtgtttcatttactatacaaaaataagattacgntgtaaaatacatttacacatttacttgaatcttaaatata

SEQ ID NO: 65359 - DNA, 335 bp, Arabidopsis thaliana landsberg
gagggctaggacattatcatcgccgagctacagtagcaacagcaaaaacagatggaacactcacataaggaaggccaagagtgctcatcctgctcttgaccttgctggtctcactggtggtgctgctcttagccgagcctctagtgcttctcttggactatccttctctttcactggattcaccgtgccacacgaagagataattgcttcagagcgctgtagcaatgacgatatttgtaagaaaaccattagataccgcacatgattgaagccttgatgttaactttggactttattgggttcttcttctggtatcattcatattgcagtggaag

SEQ ID NO: 65360 - DNA, 432 bp, Arabidopsis thaliana landsberg
ccaattatttgaccggcgtaatcacaatattcctgtattccaccgggccatgatctccttgtattagaatgggaccgggttcgccttccctgctgtctatggcgccgccggtaataccgggaatgatctgttcacagatcactttcctgccgttggctactacggttaccaaacgacccacaagcgtgatatcgtacgattgccattctcccgcgcttttggccgccatttcattcggtgcaagaaaaccgtatatggcgctgaacctgtcaacaagcggttcttcgcctttgctgtcttccacctgcacttcatacctgccccttaagtatacaccgctgttgctgcctttgggatagcggaattcgatatgcagggtaaaatcggtaaacgtgcggtctgttaccaggttggcgcccgatctcgggctgc

SEQ ID NO: 65361 - DNA, 511 bp, Arabidopsis thaliana landsberg
taaaactgaggatatggaatctaacgcataaaagctcagctcttagatttgtgaaagctttacggacttctagatgtcactcccctatgattatattgaattctgtatcgcaccactgatctttctttgaagatcacctttcaatacattctgctattcagcagtagcgcgaagagagcaaagaaacactatcatgcaccatattcaatccgaactttataccaccacccaggtttatatacgctgaagagcatgtctgatccaggcataaggacaacacttcctttatggtctctgggaggccattgcgacccaaaactgatgaaacaggcaacaccattgttgctgcaccaagcgaatcacagtgccactctccattatagatacggagcgtacagcaataactatatgcaatgtcaatcaaatggattggtaaaagaggagatggatatctggaactaagcttgcttattgagatcacaggtgattcacagcctaatggcatttcact

SEQ ID NO: 65362 - DNA, 662 bp, Arabidopsis thaliana landsberg
tcaaaggtgggtgaggtctttgattctgaccgttcatagagggttaatataatcgattgctatttttgatttttgccgttaagtctctctgtaaggtccagtgcatgttactgcttgtctaattacacgaaacaaatactggttagctatgtgcttagagcagaatgcttaataacaagtagaaagacaaatctttattggtctaaaagaatcaagatccacgtgctctcctcctaccctcttctttgtaccgaaagtcaggttttggccttttgctaattattgtatcaaataagatagggagataagaccaatttcctcttttaaagttaaaacctgtatctgtaaaatgcatgagccagatattagcctcgtagatcatgctatcatgtctatcacgtgtccaaggtcaaagggtttagcatgtcaatcaatccaattttggagggtatattacagtatattcgtctaaccctactctataaataggtgatgtgtgtgtccaagctccaaacaaaacaacacaacaaggagcttctcaaaacctcaacacaaggtaacttttaacccttttaatgagtctagttcactcaattaatggttcaacaaaaaacaattcttttgaccattgattctgaaacgtacagaaacaatatggaaat

SEQ ID NO: 65363 - DNA, 151 bp, Arabidopsis thaliana landsberg
gggatgtgttaaaggatagtactatcgctgcttgttgagaatttttcacaactggtcatctccttttcagggtcaccgctgcagcaatcactatcattgctacagttacaggagtggatcaactctctatgttaagacctgtttcgtgctg

SEQ ID NO: 65364 - DNA, 1527 bp, Arabidopsis thaliana landsberg
cttccagaagtttcttatgtacacactctttctcctaattggattaccaatcaaaaagtgaatttttaactagtacaagattgaaaaaagaaacatttatataatatccgtttagattgaaagaatttttcttttgttaatctttatctcttttttatatttcgatataagccgtttctcggaaaattaaaaattctaagccgtttatatggccataagtaatgaggcagctctaagcccgaaatagccggtggccacacatattcacttgggacttggcccttttaaaacacctaatttcatgccttttcccgctaaacttgccactttctcctaaccaactcatttcttcatataaaaccaacaacatcacacaaaaagagccctcatttattcacctttcttttcccttaaatataatctttataaaaaaaattaaaaattaaaaaaaggaagtaaattgaaaaaacaaaattggtcccctgtcttcttttgttcactggacccttttcttggcttcgctaaatcatactatctctatcttctcaccgacactttcttcttctttgatcatatcatatttatcttcactacaaaaaaaacaagtaaaataaagccaatcttcttaaatatctccagaagatctatcagcatttacgtattcaggtcctccaatgtaagtttcttttttactttcttattctatttgtgtcaatctggtttcattagtcgtggcagctgggcaggtacaaatgctgatggcacatggcatcaaaactatcaatttatttatgtcctaaagacaaaatttaatgataaaatacaaaggatttaggtgatactatgttgtctcttaatgctcatcgtgtatctcttaaaaatccaaaatcttcttattttccttatatttaattaaatgtgtcttgaattttcaagtgtgtctctctctcaatactctggagtttttgtttgtttgtatctgatagttgttacaacatcaattttctgattattctatctttcaacttccctataaaataattatttagagaacaacataaagtttgtattttaaaaatatttaatagccattgattacttttgtaattgcgttttctattagttcttctcacaaagaaaaaggaagaaaaaaaagaagttgtgagagcaaaaaaaaaatggcagtggataaagtgattgtgaagcagaggaacattatattggttggaattccaattgatgaaagtggcgtagaggttttaaaatgggcacttgaagaagttgcaaaacatggagattgtgttgttgttgtccatgtttgtttaacttattgtaagctcttcttcttctccttcttgttttgttcttttgaagttactaaattttgatttatggatcttatttttgagttatgattgatacagaccgtgccttgaaaagcaagtcatcgctggatcggtacttaaaaccatacattgaattctgctcaacaaagaaggtatctttcgatctttttgccgcgtcaaa

SEQ ID NO: 65365 - DNA, 536 bp, Arabidopsis thaliana landsberg
gggttcattgggtggaaataagccaccaaaaccaaaggctattaaatgacagtattaagctggtatcgccatggtctagggaatatggcacctatcggctatcttcaagacttatggtacacacatccgccggattatttatttctttccgaacctaacaaagcttctttatttctgggaatattaggcggtcattctggtccttaaaatttaaaaacggtggaccccattcgttgccctggacgactaactctgtgttatactaatgattgcaatgccacattagcatattcctcgctagcgactgaccgaatcagatgcctgatactaaggcagaagcaatgatctatagacagatcacgggcatccgcttaccaccatgagagatcacgtatgggaacgttgcacatggtgaacggcgtctctggatgcaccacggcgaataagtggtgatgaggataggctacccggaaatgatagaagatagtcgcgcgagcttagcgacttcttcttttgtgccagccccatatactctg

SEQ ID NO: 65366 - DNA, 388 bp, Arabidopsis thaliana landsberg
  unsure (1)..(388): unsure at all n locations
cgggggggatatttattaattctttttttcaccgaacccgctagtgcccatagngctggacctagactccggggggatttccgctgccccggaggtgacctacgccgggatcgtccggaccagtggagagccatcggagggataccacctcgttcggcgcagcgcggacattggggccaacttggagacgctcaccagaaccgggtgctcactgaacgcgctcaccagctaggggagctgttcaccggcggcgcctcccccgggaggacgtagaggaggctctggcgcagggcgcccagctcgtgcatgcggaccgcggtcttggtgatcatggaagatgggccgtttatgtatatgacggggtcctgccattcgaccgaggtcagca

SEQ ID NO: 65367 - DNA, 122 bp, Arabidopsis thaliana landsberg
ccgcggatttgtaaattttggtaaatgagataagaagatttctcttgtataggaccgcaaacgaccagaatagtagtgttgcaaccgaaggaaaacacttgggctttaccaaaaagaatagg

SEQ ID NO: 65368 - DNA, 383 bp, Arabidopsis thaliana landsberg
acataatactgaagataagcgttttaacctttaattaaaacaggtaatacagcacgatgcataggtatgggaagctgaaaaaaagcttgcaaagaaacatctaaaatccgcatcactcttgtaagaagacgagagcatatcgcaccttcgacagatctccacgggttgacaaacctacacagctaatgcgcgcctacttaatgactatgggtggcaagaatcgctaaagttggaaattgtgagacagagatctgggatatcgacactaacctcttgctgcaaaatactgtgaacccagcccttaagtgtgaccattgttgcccttatccaacctttgacacaaagtatcaactactgacataacttcgaagggaggcatttca

SEQ ID NO: 65369 - DNA, 210 bp, Arabidopsis thaliana landsberg
tgtgcatggggaggggccgctttggctcgaatacatttactttttctttggaaaaaaacccaaaggggtcagggtgttgtgcattataagctactataaaccgatcacacatggaatgcgcgctttgatatcgatcacgatcattgcgaatatatctttatagcatactatatctcagcttatatacccacctgtgaattctggtcgtct

SEQ ID NO: 65370 - DNA, 1047 bp, Arabidopsis thaliana landsberg
gcccatactgaccgtggacgatcatttttcctcctatcaaaaacagtaatttattctttaaccaaaaaaaagcatagtaaggaattggatgatagatttacagaaaccgtagaagaatatataccaatcaataattggtgatgataacgtcaaaaaaaataaaaattgatgatgataatcttttaaatcaccataattgtttccggccggaaaaaaacagataactaatttttaacattgtggtccgaatatttattagattgacccattctgtttatatatattattaaaacccattacaactttcttttacataaaaagagatgataatataaagtcggctttacaacgaagcaaagaaagaaaatgtaatggtgctcgatcactcttatgtgtataattaaaagcgtgtgtgtggttcatttcaattatatgtgtttggttgcattatgaaccataatattccatagccaactgtatcctccttgttttgttctcttcttctcctacatctaccaccgccaatctcgccttttttttccctctcatttatttattaatctactcattttttttttttgacattatctactcagtcctttattttattaataatccaatatagaaatttaaaataagttaattctttcaaaacttagaaaaatacatgattgtcggatttttttatttgtcaataacatacaagagtttgaatccgaatagcaacataacaaaattactagcacaaaccattatacaataatgtcgattttctaattttaattttatttgtcagatttttttcgtttttgacattgttttatattttttctaggtattaaagtttagatgttggatttataacatagtttttaggatttagatttagaatttaaactttgattattttgtcttataaaaatatagactaagactatttaatttcttaatgacttttcttcttttcgagactattccttaattatgatttgaaatatacactaaaaaaaaaagttggacacaacaaaaaaagtggaccaagacgta

SEQ ID NO: 65371 - DNA, 589 bp, Arabidopsis thaliana landsberg
  unsure (1)..(589): unsure at all n locations
ccttatacaataacatgttgattttcatgtaattatcttaatttcctcatcaacgtacgaagtccagtaagacgtgattttggtctatcattaacaaaactgtgtaatagattaagaatgtgtttttagaatgtaaaagcttaataaagatttctgttgagttattaattaacattgtatcaaattaacaacagagaaaccaacatagagaacaaaatggctcacaacatagccattccaactcagttgattcagcgcgtaaaccgataccaactcaggcttgaggcttcagggcttcatggaattcataaggtctctaataaattatcagtaccttggagctgcaccaaaaaaaaacagccaaaggttacaaaagcgaattcacatagtctaataccatagtagcagtagattcagatgtctcagccggaagatacatacctccaccaagtgtagctnnnnnnnnnnnnnnnnnnnnnnnnnnnnnnnnnnnnnnnnnnnnnnnnnnnnnnnnnnnnnnnnnnnnnnnnnnnnnnnnaaaagttgataatatccaaagacttcagccatggatataaacaagagcact

SEQ ID NO: 65372 - DNA, 511 bp, Arabidopsis thaliana landsberg
  unsure (1)..(511): unsure at all n locations
gagcgggtccggaggggcaaaagccgcggagtataacgcggtcacacgccgtggtcgcccggcacgctggggggcgatacttctggccagccctgcagcccatgcagcggccattttcgcgcccacttcatcaaacgctggatgactgcgccggtaggccgacatttctgccattgcctgcgtcatgccagcctgcaccctgcccagcaactcattgcagcgagcttcagtaaggttgcaggcggtacgcccgaattgcaccagcaacttgcgcttgggccaggctttcgagccccccagcagtagccccatgatatcgtggctgctgtacaccgtggtggtcaccaagtcataggcaggtgcgagccaaatgtctgcgtcttcggcgcactgctcataaagcaggccgaagttcttnnnnnnnnnnnnnnnnnnnnnnnnnnnnnnnnncaacgctaccagggtgaaaaagtcttacagcgcgcgtggtactcggctgggcgtgacatac

SEQ ID NO: 65373 - DNA, 1923 bp, Arabidopsis thaliana landsberg
  unsure (1)..(1923): unsure at all n locations
aatcctgaactaattggcttaattctgtgtctgtttacatttatcaaagacatagctaaggataggcccttaattatctttccttctgtctgaatttgtttaacagatatagtgatttcttgcagatatttattcaaactgggtatcctctagacttgccgtctgggactcttgggagttattgcatctatgagtaccacatggtacggtagatataatcactggttacttttatcaagttgttaggttgtttataattgtagcatatcgtaatttgagctaatatttgnnnnnnnnnnnnnnnnnncttgctcaatgggatttgcgactggtggaagaacattctttttgtggggaggatgtatgatggtatgtatataacatataacatggtatatagaatgtttgttttgtattccctgctacagctaattttggtttatgtttccaactatttgtagatgcatgctgatgatttcagacaagatcggtacggtgttgtctctggcttacgtgatggtggatattcagatgatatgacacttgcctctctagcaggtaacatttgcttcaaatttccctccaacttatagttgacagttttttcatgtttccacttaccttcttctttccaggtgctcataagaggctcattacatctcctcctgttgctgttttccctcaccctctcgcgagtgatctaagttttggacggtacattctcatatctacttgtttgaaacataagatactgaatatttcagatgcttaacaatttctattcttttttgttttatagatactggaactacttgagaaaacaaacctttgtgctagaatcatacatatcgaaagttaactggataatgaacaaggctttgtttgctgtccattgttatctttcatggggttttgttgcaccatatgttatggctatcattcacatcacatcagctttaagaatctacatcaagggctatcatcaacttgaagacacgacctctgcttctggtggtgagcatacttttcttcttatttaggtgggttatgtgtttaagataccagaaatttgttctagtgccacgatgattgctcgtgtgttgggggatcttagaactgttgtgtagaagcataatgatttgtcatcttcaacttaaattgtaggattgtctgtttttcttatgctacatattgacccgaaggatgaggttctatgtaggtatgatgcttgttataacgttggcgatctgcaccttcatcgagcttctgtcaatgtggaatttgacgagacgagaagttcagctatgcaatatgttatcccctgaggctccccgtctctctcttgcaacttacaactggggacttgtatgtgctttcaacctccttttattaattagaattagattaaactcttgagtaatagtgtcgaaagttatggggatgatagatatggaggtaacatattcgttttggttggggggaaatttacaggtttttgtagcaatgcttgtagacaacttcctatatccgatatcagctttccggtctcatttttctcaatccataaactggtctggaatcagataccacttgaaagatggaaagatattcaaggtaaatcatttgtgtctccaaatagttttctcgttatcatttcacttaatgttcacctagagaactgtgtaatgtatgtaattgattgcaatgtgatatcagattgagagacgaaaggatatgggaccaacaaagactgatttaggaggcaaacatttgtatggtaagaaaggagctcctcagaaagcttcattcttaagctcattgggaagaaatttggctcactggcgacaaccgaaaaaattcgatgtttaaaaaaaccgtatttatacagtagaagaaagctctaaagtcgatttttgcccggga

SEQ ID NO: 65374 - DNA, 2158 bp, Arabidopsis thaliana landsberg
tctggataatgtgcattgcaaaagcacctggtaagtttagccacaccacctttaggtctccaaaatcaggactttcgatctcctcgaacccaaacacctgacaattatacatatataatccattggtttcagaacaaaccacgaagatgaagataacactaacttaatcaaaaggattaaaggcatccaaaagtggacactctcaatagaaactagaaacgagataagtgacaagagaaagagacaaagccacaatagcaacacaaatctctaaataaaaagccaaattacaaaccatagattctaatccagatgggtaatcgactcagtgcgtttgtttttttgggtcgaaattggtagtaacaacacaaacccagaacagagaatacgaagagagataagaaaaagaaaagtgtaagaaattgaaaacgtcgattaggtatcgttacctctttgtaaaactgggcgaggcgtgtgatgtctgatgattctctggctatatggccaagactcgccatgtttggttccaagcggacaaagctaatcaagaagaacaactcagaaacaaaaatggtcgacaaaaaagagattagtaaaagtacgtggcatcggctccttataacacatctttaatcaaaccataaggttgaaccgatcggtttgactatcagtgaaactaaaaccaactttaaaaaaaaaaattattatacgtaattgcagttactccaagaaaaattaatctgttgcttaatctgaatatccgaccaatcagaaatgttcggaccccgaccaaacaatgtatccggtttaaaacatccggtccggtattaaacccttattgctccgtaatctctcacctccaccaattcctcattcttccaatcgcacttcctttaccagatcagacgtcaatttcaactcttcagtgaagagatttctttcaccgagttttctactccgatcgatcaattgaagattgaaatggaagctaattcaggcggaggaggaggagctgaaggcggaagagcggtaaccggaggaggaggaggaggaggagggagcgatgtggaattggtgagcaagacgttgcaagtggagcataagctattctattttgatcttaaggagaatcctcgtggaaggtatctaaagatatcggagaagacgtcggcgacgaggtcaaccatcattgttccttcctccggcatctcttggttccttgatctcttcaactactatgtcaattctgaggaacacgagctttttagcaaagaattgcagcttgattccaaggtttcaactttatcatcactctcttctggcgatcgttgacttttccactctctttaatttctgctgttgttgctttattcaggtgttttacttcgatataggtgagaacagaagaggacgcttcttgaaggtagaaatttttctgttttacttaatgaatctgaagttttttttctttggtatatgtgaattgaagatttagggagtactagacttatggttaggaatgttcttttcattttggttatgtgactaattatcctgaggtatccgaagttgtaggaatgttctgatgggttttggtgtggtgttaggtgtcagaagcatcggttagtagaaatcgaagtaccattattgttccagctggaagctctcctgatgaaggatgggcagctttcaggaatatattggctgagatacatgaagcatcaggactttttgtgatgccaaatcaggtggtattatcgtctcctttgattgaaaagcctttaactaagttctctggtctcattgtatcttcgttttggaaacagaaaccttctgatggacaggaacacttggttgatgatgttggagctggttttatacctggacatggtagtcagcagccatcttcttcagaacataatgtggatcgaacaattgactcgccaggccaggaagaaaccggaatgactggtgtttctaaagtaatcagagctgaccagaaacggttcttctttgatcttgggaacaataacaggggccatttcttaaggatatctgaggtaatcttggaagaacaatcttttgctggcttatctcttgagagcttgtatttaccatggttttaacattaaagcatttctcaatataggtggcaggt

SEQ ID NO: 65375 - DNA, 689 bp, Arabidopsis thaliana landsberg
ctagttgcaatacacaagttaactataaatttattggataatgtagaaattgtgtaaaaaacaaaaccaatgatggtgtcatcttaaaggcaatttagttgcaattctcttaagataagtaaatttcttcgataaagtgaacattttcgaaatacaaaatcattaggggagatgcggattgtcttctcagaagcatgcacaagatttcataagctatttgatacattcattacatattctttgatagcgacagctttgggtgtccccaaaacttgttccatgtctccctacattcattacctacataattttaatatcgtttgttagacaacaaacaacttccttttatatgtatttagatttaaatattattctataaatagttcttggcttcgtcttattcgttttgatagttaagaatttgtcatttgtatatattgcccgaaaaaaccgatggagtaaaattttaattagtaatctaaaggggaccattgtcgaagcttactaacgtacggaagatgctatgactaaccaattagtgtataatcacatgcccttcaaacctcaattatatatgcacactcacaagtcacaaacctcacttatctttgcttttttttgtatcttaaaatggtagattacacaccttgttaacttagttgggtccacttatctaaaatttttaaaaa

SEQ ID NO: 65376 - DNA, 2183 bp, Arabidopsis thaliana landsberg
gaacaaatttacatacagtacacagtagttgaaatcgcagagtcaaaatctcgtacagtaagtagttgcagagtcagaatttgcaatatggagaagctgaggaaggtggtgaacgaaatcgcctacacgcgagtccatacgaattcccctgctcttcaccgttctctcgttcccttcctaacaatcgcttcgtctctatacggagtcgctctccaaatccgccgctctctctaccgctactcactcttacagaaacaccggtgcgttttctctcgagagagagatcaattgaataatgcttttatcgattcctggaacttaatttgatctgtgggaatgaagattacccgttccggtgatcagcgttgggaatctgagctggggaggtaatgggaagacgccaatggtggaatacatttctcaattcctcgttgattctggacttacacctcttattctcactcgtgtaattcccattcttctaactagtatgtatagttaccattgaatttttggagtgtttgcttgtgtgtgtacttagactctaacatattgtcagggttatgctggtggagatgaagtcaaaatgcttgaaagacatcttcgtggtggaccggtaaagattggcgttggggctaaccgggcagctactgctgctttgtttttggataagtatggttgtgtagattcttctagtttaaggtcattctttgatcttcatgaaagagcacaagtttggaccatttctgaaaaaattggttgtatcatattagatgatgggatgcaggtatattctctagtttatattcacaaaattctagctttatgagattattttcaccttctttgtgtttattgctgttttgaagacttgtgctctcttgtttggtacatagcattggagtttgtctcgtgatctcgagattgtgatgcttaacgggctgaatccatggggaaatggtcatttgatgcctcatggtcctttacgagaacctcttctggcgcttgaacgggcagatgttgctgtagtacaccatgtggacttggtgtgtttacaagtttatacttgtttttttcctttctttttggtgatgactattgaggttagtggttttggatcatgcagattactaaacaaagcctcagagatattgagaacatgatacaaggattcaaaaagtcgataccgattttctactccaagatggtgcccaaatacttgttcgatgttaaaaatgctaggtcacatgtagctttagaagcgttgcgctgtgcctctgtgctatgtgtttccgcaattggatccgctgatgcatttgtcaagagcatcgagatggtaagttgttattatcctagttccatgctcacttgattttgtaacaaatattcagtttctgctatgctgactagtgggttatatatgtttgacagactggagcacattatgttgatagacttgatttcagtgatcatcatttatttgaagcagaggttactaattccatagctattcttcatgtgttattcccaatttgtttcactgccaaaaaattatttttactaaatcaaattggctttcatcaatatcataatgataagtgcaggatgttgaaactatgagtaggagagcaaagggactagaacacaaatctaattgcaagcctatcattgtggtaactgaaaaggtgaggacgttattaagtttcttgtttttgttacttgcaaacgttattaagttcaaaaagtccagcgacatgaatctaacttcttttttttttttttttttgggaaattaggattatgatagagacccggagatcctcaaatgtctggactcatacacagtcttggttctatgctctgagttgcaaataactcctattttggaaactgatgtagatagctttaattatacacttatgaaagctctagctgctaagttctatgtttccagttagattcaaggttatctttttgcattttgttattgttttattactcttaggaatatgatgatgcatttatattattcttagaatgcactatattataaatgaattttcttagatgatatactatatttgttaaccaccaaaatttcgatgacgagtcccaaaatctccacctacaaaaaaatgcatcaccatataaagtagagctaggaagtaggaacccaacaacat

SEQ ID NO: 65377 - DNA, 734 bp, Arabidopsis thaliana landsberg
taatggcgtctcgctacaattcctacgattctagatcatccgtaacctcctcgattcactcagatctatcatcctccgcagaattcaaatcgaacaagccaatttcatcgaaagccattgtcagatccaaatcttcctacttaaccaaaacaacgaagcccataaagcctgatagtaatcctggaaacctcactaatatgatgaagaagctaatggaaatgaagaaatctaattccaagagcaagagggtcgagcttgtgattcccgaagaactgaagaaaattgatactggcaaaggaggagggaagagtacattgggaacattgcagaggaagctattcgggaaggagaaggtgaaggcattgacagaggttaagagtaacactaggacattgtctatggttctgcgaagcgaaagggagcttctggggatgaacaaggaccaggaggttgaaatagctgagctaaagtttcagcttgaagagaagaaccgagaagtaaaatcttctttctctctttaaaccttggttttagtcgtttagggttttggaatgtgtcctgtgttagatccatgaaagattagctgtttgtaatcaaattaaggtgtttttgcaggtggagaagttgaaggatctgtgtctgaagcaaagggaagagataaagtcactgaagagtgcggttctgttttccgaatcgatgaatagtcaaatcaatcaaatgcaggagctgaatca

SEQ ID NO: 65378 - DNA, 538 bp, Arabidopsis thaliana landsberg
tctttcctattttcatcaataggtacaggtaaataacacttactgtatatgttaatgcaactgatattaattcgtatacgttaatttaaatttgtatggagtcgctttatctatagattaatataacatttttacatagctctatgattaggattaatatgaattatttttgtattggtgtattttaatagtttttctattttaggtaggatagtgttttagggttttgcacggattatatatggattttaaagttcttatagataatctacttatgttttctcaaacatgtcaggtatgtttattaatatgaattatttttctatagctctatgattaggattttgtctatttgtttattgatttcggcaatatgaagatatttcaacgaatctaaaaaaacatggtttattcataaatttttggattcagacgtatcatcatatatattttgattctatattattctcacaatcaagggatcactaatttattcatagaaaagttatatacttatacgtatatactgtactatttg

SEQ ID NO: 65379 - DNA, 576 bp, Arabidopsis thaliana landsberg
taagctgtcatttagaattttgataaaacgcataaactatagaaacgcatattttttccatcgaattatacattttgaacatcttgtctaggattagttaaacttatgatatggtcgaaaatacgttgcacatacgtcacgaactccgcaaagccaaggtgatgacttgtcaacagttctgtggaaaatctaacaactcctttcgtcaaaagaaacagctgagaagtacgaaaaactgacaaaaaaaaatggaccctcatggtgacaaaacgacatgacgtctccctttaactttacgaaacagcaagtcgttccgtcttttgttaatccacaacgcttttatttttttggaattatttattgctcaaaacattttattatcttggttaacggtcatcactcgtttccagctaattttaattatacatgacatcataaaaagcagccgtcggttatatacaaatattgaaataagagtttacttggtcaaaattttaaaatttgacgtcaccggaaaattcgccggagtttcgtcacccccataaaactcctcaccggtgaaagaaagaaaaagac

SEQ ID NO: 65380 - DNA, 555 bp, Arabidopsis thaliana landsberg
  unsure (1)..(555): unsure at all n locations
atacctttcccgactttatggtaacagaaaaactgctaactttattggttctgccaacttctcaatctatctataagaatccttctctgaatcaaaccagcagcctcatttgtgtcatagtatgagatactcttgagcttacatctgagcttgttttggccatatgatgtagcatcaacaagcattcacaagggaacatgtgaatgcttggcactcggctcctcctctaaatcagtcaatgtatgctgcctcttcacttggtcgtaggctaccagattgcatgagcgaggccactctatttctcataaagcaccgatctttttccatctttaaacgacttttttttactaggcactactcatcggttctatcagtgcaccacagatgaatcgacaagccatgagccaccatctttaccctcagtctaatgtgnnnnnnnnnnnnnnnnnnnntaagaggaactatccttactctctgccaacacagaatgatcatacgtacgacatgccagcatcagcatatcaggacatggtggtttaacaacgacgcctacca

SEQ ID NO: 65381 - DNA, 165 bp, Arabidopsis thaliana landsberg
tgatatagatccccatcactcacggtcgtatactgttggttttaaggacccaagagcaaccaactagtgtctgttgaagaatgctgacttttggatcccggataatggcgtgagccacgagaggccacgactggacgccttcacacaacgacgacaatcatcccg

SEQ ID NO: 65382 - DNA, 185 bp, Arabidopsis thaliana landsberg
tcgaaataccggtgaaaaagatggaacatataagcaaatctaagacgtatgcattacctataaaacctaaagagacactctagcccataatcgtaattgccagctgcatcctcaagagcaaacttctgaaagtcatcatacatagagagaacaaatgtgtctctgaggaaatacgaccaatattg

SEQ ID NO: 65383 - DNA, 2228 bp, Arabidopsis thaliana landsberg
catgcatgcacataacaatgcatttctttttaccgtttaacaaaaaaattagcactctcaaaccgacattaacatatttatatgagcaactccttattttctttgacactcttggcgagaaaaaatacttcttttcttttttttttcgttaagaaaaaaaaaacatacttcacatctaatatgatgatcaaacgtcaactaaagaaattaaccaacgtacatataaagatgtagctctcaagaaggaggaaggggtaaaaatgaataaggttttcttaggtttgggacgatatcatatcgttgtgctatctccgtgagaccccctttttcaagacaattcttcgaggatatggcaatatatgacgtctctttctactcaaaagccaagcttgttataagcttctgctactatacgtcttatatgaaaatgtatcctattattatttacactatgtttatggtcccctaccttcgtccttcttcctacttttgatgattgttacctctgtggtcttcttaggtcatttagtatccattccataggtcggctcattctattcaagtatcacttcctagttcctacgttaaaataattcatagttgtttcaatgtcgtttatataatctagttggttatgtgtataaaaacacttagcaagtaactgtttctctgagatattctgcggattcaagtgtaagaatctttttttgcaatgtttttcatatgtttatcacgttttgcactgttcatcaaagttttcggtgcgctgcagaaaactaggtcaaatgcattatgcatagcgtttaaaatatgtaattagtcccacccattcatagtttaagacaaagactagcaattagagcatatataggtccaaccttacaggattgagaaaaactctatagtacaacatattcgattcaaataatgttatctctgtactcaagtttttttggaccacgatatatattcccacttaagtactaattttgggaccatatatatattcagattaacaatgtttgatacaatgcatgaatgtgtcactttacgtccaattctgaagtcagtgtcaagttattacaaatacattctctctctggaccaagacaagttattacaatacattatacaatgcatcatgaatgtatcaattcctttttgcttactgattctttgcattattttacgagggtaaaaacaataacaattttattaattttcaacccatagtttttatttttaaattgtagtttttacaaaactaaacaacaaaaagacgtaacgtctttgtaagattttcatgtggatttagggttttaatcgtctgctttgtctactcacagcgggaattctttctgcaagagatcgagattccttgactcacaagcttctatcatgtcttgccttgatgcacaactgcattatgttttaacaaagttccaaaatatcaactgactttgtaagaaatcgcatcggaatttaaatggcgtttttcgagtttacgagcttatactgtaccttaacgagagtctcaagtattgccatgcgttatcagctttaggattcatcgcaagggcacggacataatacgggattgattctttgtacatcccctgttacaataacaaacatgatagcataccacatttcagttggttccagtccataaacaaccatcaaacaagaaacaaagactgaaatcaaacctggtttgcgtaactgattcccatgtttgcccaagcacgaacataatttggttttaaatctagagcctgcaagtaaaaaaacagtcagaaagagacggaaatataaaactttgagaagttttgatttctgtgcgtagaacagaacctgttgataagcagatatggcatcagcactctggacactgttggcttgcgttgcacctagcttattccacagagaataatcgtttggttttagttgtaatgctgtttggaaggatgtgattgctctatcgaactctctcgacagattgtagagcacgcccaacactatatgcacatcggcgtcctcaggattcaactgagaagcttcattgaataatctagcaatctgtttatagcatagacaaggaattcaagtttcaatacaaatattgagattcaactgtggagaatttagaaaagaaagagcacttacatcagcatggtacaaagaatccgctagctccggaagcgcaattgctccatactttgggtgat

SEQ ID NO: 65384 - DNA, 110 bp, Arabidopsis thaliana landsberg
agggggggaaagaaggaaaggaaggaaaaaacgagttaagcggtaacaaagaggaaggaaaaaggggaacaggggaaaaaaaggacgggagaagaaaaaggagtgagaag

SEQ ID NO: 65385 - DNA, 743 bp, Arabidopsis thaliana landsberg
ttttgtggtacaacaatcacatatgtttttgtagctgttcaacgtcaatatttgattgttcgatctcatgaattacgataatgttgcaaatgcataagagtaaagaaaatgaatgatgatgttgatacattaaaatagagatgatgcccatgcataagagtaaagaaaatgtttttcttctttttgaattattagtgcaaacaaaattacacagttttgaagctgaaaaacagtatagcagattgatggtaaaacatgatccctcagtgacggcgaaaactcgtgatttgtttattttgacgcaaagtgatgaatttacataaaatatgacgtgatttaaacaaggaagatataagtatttctcaatcacaataatgttttacttttatcacttaacgttagagatggacgtgattctaacgataagtcaatgaaattacccgacaatatgtataatagattcgtgacatatttatagttttaccctacttgatcatgtgtccccattttttactaaactttataaattctaaaagaaaaaaaaaaaaaaaaaaaaaaaaaaaaaaaaaaaaaacctctttctgcacacatagttaatggcctcaaccaccacattataaaatttgactgcagggatcactccttgacttgatcatgtgcccccataaatcttattgaagttcttcgttagttgacattttaagtaacagaagatagttaatgccttaatgcatggatcttac

SEQ ID NO: 65386 - DNA, 422 bp, Arabidopsis thaliana landsberg
acataattatcattcatgtgtacgcatgtgacaaacaactacttagataagacatgtgacatatttatatttgatagaaatgctagagagttgtcagccacttgaactaacttacaagagtttttgtttttcttgaacttaccagaaaaatctaaaaaacttaacaattttttcctacaacttgcaaaattttcaaacctttgaagaaatttgaacattttcttaaagtttgggtaagtgtttggatagctttagatgattaccaccgacttattttgaccaaaacgtgatatgttaatggctaggaggctagaaatcggctgcctatgcagtgtgggaaatatggttcgcgtgtttgtatcggttaatatattttgtgggagaccaaaaaacacgatgtttgtactatttaaagttaaact

SEQ ID NO: 65387 - DNA, 586 bp, Arabidopsis thaliana landsberg
  unsure (1)..(586): unsure at all n locations
ctttagaggcaacaacattaaaacagatcttaagtatattacttgtaaacaaagtaaccgtccattgcaacaatttttcctcaagacgctctcgcacgattgttaaacctcaagaagggtgcgatgtgacttgtgcccaatttttgtaattaggtttaccctcgttgccaaacagatgtaaaaaccagtgacatgctccaaagagccaaaacaccatcgtaattggaaatcatcgttgctttattcttctagttgtttctagatgagttttaatgtcaaagcgtcaaaggcagattaaagacctttcaaaccctaaccaacctagactttttcctcaagcaaaactcgtagagcccaagaaacttcaatgtccaaaatcactctgaacctaaaggaacataaacatttttatatacacattcacaaagacaaagttgtatgagtttcgatttgatctacaaaattcaatgtcnggtcttcttcagttcaattttttcccaacggatttctattatccgaagccaagtcgagtagagtgtgtcgagaagaccaagccttgtgttcatcagtttcgacacatatgcat

SEQ ID NO: 65388 - DNA, 157 bp, Arabidopsis thaliana landsberg
ctttcagttgtttggttcaaaaacaagtaccaaggcgcccaccgttgggtttgaactcaaacactaatgtctattaataagtgggggggcgaaccgcaccatagagaactgagtacccaagctacggaatgatatgtgctttagatgccccataaca

SEQ ID NO: 65389 - DNA, 403 bp, Arabidopsis thaliana landsberg
tcgggtcggatgcgcaaggtggtcgggaatcacgaactcggcttgcgaactgcgtgtctttaccagcttatagcgtgccaccagggccgccagcgccggactgcgccctcggatgatgcgcaaggccaagtcgacgtgggccaaagcggcacccgcggtggtgaagcgtgtcgagttcacgatcatgcgtgactcgtccagcgtgacgttcggatagcgctgccgaaacatcggccccagccaccatgacgtcgtcgcacgatgcccatcaagcaggccactctctgcaagcaagaaactaccggagcaagcggcaccaaagtgcgcgccagcggtggaccactgctgtagcgccgcgaacgcgtcgggcacatcggggcgtgtgagtcgagccaaaagcgtg

SEQ ID NO: 65390 - DNA, 935 bp, Arabidopsis thaliana landsberg
cgaaaaagaaaaataggtctgggacaccaatatagtcagccattacacttaaaattctcttttttaattacctttgtgctcatttgtttcttcttctctttctcttccaaatgccactcatatatgggagtaaagtcacaatcatccaacttctgtatcacatgtttcttgccaagcagtcttcgccagtcattccagaaattctcccgaaattgaggtttagtataataatctgtctctctcatcactgcaaacatagtcgcaacctgtatatcatcaacatagcatcagcatggataataatgctttcttggaatgtcatacgaaagcactctagatattgagatggacgaaaaatcaattaagaaacgggtatataacatttatcagtaagattgaggacgtggatggagaggacaacctcttcttgttcaatagttaggtcaacaggtttccccttgtacaaaatcttaatgccatgaggcttgtatggcggtggaaatattacaccgttgtgcaccaaagtagtccatttcttttgcccatctccagaggaaggtgatgattttgaagacgtggaatattttgagtccttcgttactttcttagtgtttttggtcattgctctggacctaggagaaacgacatttctcgcttttggctttgcagctgatgaagtagaatttagttttactgcttttggctttgcagatgatgtgttactgttggaggaatctgatttgaatctcttggatatcggaacatcatcatcatcatcatcatcagttccatcttctctggtagataactgtttagctttcatttttggtgaaaccaaaacccttcccttatcatctatctctttcttgacagaatcttgtttcatattcacaaaagtaggtgaagctgatattttggccttcttcaaggaagat

SEQ ID NO: 65391 - DNA, 2178 bp, Arabidopsis thaliana landsberg
gctgtatggattggaatctgtgtccacttttgaattcattgagagcggagttgtaaagtcactggcaaattatctttctaatggactctatcaaaggaaacttagcaaagggggtcctgaatgtgatagtttaccatttattggtaagagatttgaggtgttcacaagattgctttggtctgatggagaggcaacttcatccttgttaatacagaagctccaaaattccctttcttctttggaaaacttcccaattgtcctaagccaatttttgaagcagaagaactcatttgcggctattccaaatgggcgttgcactagttatccatgcctaaaagttcgttttctgaaagcagagggggagacttctttgcgtgattactcccaagactttgtcactgttgacccactttgctatttggatgctgtcgatcaatacttgtggcctaaagttaatatagaacctatagattctgtggaagcaaaagatcaagctatagaatgtcaatcttctcaattgcagtcaacttcgatatcttgtcaagctgaaagctcaagtcctatggagattgacagtgagtcttctgatgcgtctcagttgcaggtaatttctaaaatgacttaatttttagtcgtgtggaagtagtatgtgcaacctttctttttatcgtcgattaggagtgaatcaaacttatcctacatgagttcaggggaagcaattatgtactagaactgaatcatcttcaaatagtgaaagttttcaagatggagtaaaagtgatggctttgtttttaagctgcgcattaggtagtgttttggttgtttagttgagaagaagttgtcttcctaggtgtttctccttctcttcaagcttcttgttttagttattttagtaaatgaatcttttgtgtctctggaaactttttattgtgtcaagggatctcaagtggaagatcagacgcaacttccaggacaacagaatgcttcctcctctgaaacctcctctgaaaaagaggatgcggtacctagacttttgtttcgtctcgaagggcttgaactagaccgttctttgacagtatatcaggcgattctcttgcacaaactaaaatcagaaagtgaagcaaccaacgattcgaagctgagtggaccccacaacatcacttatgaaaggtctgcacaacttggggattctcgtgaaaatctgtttccacctggatctatggaagatgatgagtatcgcccgttcttgtcctatttgtttactcatagacttgctttgcgcctgaaggggtcaagtcatcctccgtatgacatattgtttcttcttaagagtctggagggcatgaacagatttctctttcacctgatttctcttgaacggattaatgcttttggtgaaggtaggctagagaatttggatgatctgagggtacaagttcgtcctgtgccacattctgaatttgttagcagtaagcttacagagaagttagagcagcagcttcgtgattcttttgctgtgtcaacctgcggtctgccaccatggtttaatgatctaatggattcatgtccgtgtttatttagttttgaagccaagtctaaatacttccgacttgcagcctttggttcacagaaaatccgtcatcatccacagcaccttagcagttcaaatgttcatggcgaagcgcgcccagtgactggtagtttacctcgtaaaaagttcttagcttgccgtgaaaacattctagagtctgctgccaaaatgatggagttatatggcaaccagaaggtggtcattgaggttgaatacagtgaagaagtcgggactggtcttgggccaacactggagttctatacgcttgtcagtagggcatttcaaaatcccgatcttggtatgtggagaaatgattgtagttttattgttggaaagccagtcgaacactcgggagttttggcatcttcttcaggactctttccacgcccttggtcaggtacatcaactacgtcagatgtgctgcagaaatttgtcctcttggggacagtggtagcaaaggctttacaagatggacgagtcttagaccttccactttccaaagccttctacaaattaattctcggacaggtaaattggtttcttcaagtatctcatttacatttcaataattccttccgactttgttt

SEQ ID NO: 65392 - DNA, 516 bp, Arabidopsis thaliana landsberg
  unsure (1)..(516): unsure at all n locations
cagttcgcanaccgtgacctccaaataccttatcaaattcgggatcagctatacctatgtggccgcaacggcaacagaggaagaatggaaagcgggcatccagcccaatacccgcatgatctacctcgagacccctaccaacccgggcctcgacatcctcgacctggaaatgatcggcagggtagccaaacaacacaatatcctctttaatgtagacaattgttttgctactcctgtttgccagcgacccattgatttcggtgccgacctggtgatccnnnnnnnnnnnnnnnnnnnnnnnnnnnnnnnnnnnnnnnncggcggcgccgtggtgggaagaaaagacctgatcaaagacatttatcttttctgcaggagcacaggacctgcactctcgccattcaatgcatggatactgagcaaaagccttgaaacgctggatgtgcgcatggagcggcattcgggcaatgcattgtttattgcacaggcgctggaaaaccatgataagatacaatc

SEQ ID NO: 65393 - DNA, 393 bp, Arabidopsis thaliana landsberg
aaaggacccgcttatcgtgggggctggagtaaaataaactataaaagctcggccgagatggaaaaacaggatattggttgttcaaaccttacttaaacttaatttcttcagggttttaaattcaaaatgtgcaaccaacaataatttttgttcgaccccaaattcatcaattactacaaagccgaattgtgacaccctaatgggcctggggactgccaaattccccccgaagaaagatagttcctgaatgagaaaccacaaaatcaaatttttgttatatcaaaaaaaaaacctggtcattccgagctaaactaaagatagattgctataatttccattctgtcatgtggagcttaactaaaagccaaaaacgcgaatgggggggtctctcgc

SEQ ID NO: 65394 - DNA, 367 bp, Arabidopsis thaliana landsberg
  unsure (1)..(367): unsure at all n locations
ggttggggattgagtgtatctcacgatggccatgttgcgaggtccgaacaggtctatgtcagagacnatgctgagcttgaggtacatgggtccgttgaggattgttgagagggtggggccagtgccatacaggttagagttgcctgatgttatgcgtgcgtttcacaaggtctttcatgtgtcgatcctgaggaagtgtcttcacaaggatgatgaggtgttggttttgattgcaaaggatctttagcccaacacgacgattggggcctcaaccacgatccaattagtggaggagctttagcctatcttttttttcttgactcttagatcacacaaagttcctgtgaaactttcaattttcccacgt

SEQ ID NO: 65395 - DNA, 245 bp, Arabidopsis thaliana landsberg
  unsure (1)..(245): unsure at all n locations
agacgcacagaaggaagaaagaagagaaagaaaaaaaaacncgaagcacccaccaccgaggcaccaancacccgagcgaccgcaggcgggccaccccgcaagcgcagcccggaaagaggaggacccaangacgacccgnacgccggaaccagaagacaaaaccacggcagacagggaccccacaaaaaccccccccgaggaaagggccaaacccggacannccccaagaacaacagccaagggac

SEQ ID NO: 65396 - DNA, 359 bp, Arabidopsis thaliana landsberg
  unsure (1)..(359): unsure at all n locations
gaaagaaacacccaacaatttcaaactcttggnccagggaaagagngagggaaanatgagagaagaaaacccgcccaaccccgacagacacanaagggcaagaacacacagaaaccaaagaaaagagaaaaaaacaccaaaagccccccgcccgcaacaacccgacaacgaaaaaaagggcacaaaaggaaaacaacaacacgcgacaccacagcacacaaaagacaagcacccaacacacgcaaaaaagaaaaaaaaaggacccaacccccaacccgaacaacgagccaaccgaccaaccacgaagcagaaccaaccaccgagagccaagaagaaaccaagagcaaggaagaaacaaa

SEQ ID NO: 65397 - DNA, 1669 bp, Arabidopsis thaliana landsberg
ccattgaaaaagtttaattgagaaaacacatattctagttagtttgaatttgacgaatacttgttttagatgattttttttaaatattgtttccatttcattcttataaggaatatccaatatatctgtataataaaaactctcatctccaaactggcaaaaagaaactggttttaacatttcacacaacatccttatgaaatgtcgacaagatcgtgttttgaatgagaattccaaattccatgtagaaaagtcgtttgcaaaaacaaaactgataaacaaagaatttgattgtttcacttcacatagctgagttggtcttggttctccacagagtataattgattaataatcaaaaacttcaataattaagatagaatggagctggacgtggacctggtcggtttgaccttcttcatttaaattaatatatttgctttcaaattattgaacctgtttttttgttgttgccaaaacattattgaaactttagcgtgactatgcattgtaaagcagtaaagtttatttatttattgtcttttctccttttggttgttaattaattatatgcactctatcacattattctaacaattcactaccccagaattaaggtaagttgactttcttcgttgacaagacacgtggcgagttcagtaccgacgccaagtggaggagcttagactttttaaccaattaatttgcgtatggttctttttcttcccatgcaggtattagttgtctagcagctggttcatgttggtattcgtttacgtctcaattattattcgtatgatcatactatattactatatgatgtttcaacctccatttttcaaagataagtacgtaagttcgtttactcaattgaaaaatcatataatagacaagatttttatgaaattagttctcatcttagacattttctatatccgtggtccgtggaatggttcgtaaacaagaatcgaagctgttttagataaatacatattggttcaagattcattttgctcaccattaattaatgtggtcgaagaatcactttgcgtgttactcgcttatgacatctattaacgtgagtacggctctgcacttcattaacatcgtttacaatctacaaaggtcataaaggtccgtttataagaataagtaagcttgtttgattaattgaagagattaattatagtattgaataaattaatcctattaacacgtcctagtagactataaacacgacttattttttctttcatttctccttagttgatactacggagaatatacagagtctctttgaagatcatttatcatttacatatcatccattcagggaaaagaaaataaaaatggacgtagtttggtttatgtgaaagaatattaataaagtgggctttgatagtcaaactttcatactaaaccctaacgacccaatacgatattttttcctttatttcggcccaagtctgctagtttttatcaaaatccaaacggtgtcgtttagaaacactgtgagtctgggacgaagtcaaaaaagatgtacaacgacgactaaagtcaatacgtgagtctcttctcttctctagtggtgcgtggtgactcacacaagtctaaaaacaatccaattctcgagaatcacaaaacggagattcaaaccgatgaacaaaaccat

SEQ ID NO: 65398 - DNA, 135 bp, Arabidopsis thaliana landsberg
tacaccaaccgcccacaaaaccgggggggttttttaaaaacaccccgcggacccccccaaaaacaagcacacacaccaaacaagcacaaacaactggaccaccaatgatcaaaatatttaatgggataaaaactg

SEQ ID NO: 65399 - DNA, 604 bp, Arabidopsis thaliana landsberg
  unsure (1)..(604): unsure at all n locations
cccccatccgtcaatggctaattaaaccccaaatggccggcgaacaaaacccgggttatcattgatctgatcgatagtatcagctaaatatctttataccaagactatgaacatcaagcctgtatatcttgtaatcacctttttctttaatacatggttatgcccggcacaggagaagccgggggcttacattccatggaccacttatgaagcggagaatatgcaaacgaacgggacggtactggggcctcggtatactccctttcaggtggagacggcctcatcagggcaacgatgcgtaaggctttcctctgaaggccaatatgttgaatttacttcttctgtaaaagccaacagcatnnnnnnnnnnnnnnnnnnnnnnnncaagcgcagggcgggggcgaacaggctacattggggatctataaaaatggaaggcttataaaacgatcttcagtttcatcacaatattcgaggctttatggattgtacccgttcaccaatgaccctgccgacgggaaaccgagggaattttatgatgaagtaagaattgaccggtataaaatttcanaaggagatgttatccggatccggcgggagaaac

SEQ ID NO: 65400 - DNA, 571 bp, Arabidopsis thaliana landsberg
  unsure (1)..(571): unsure at all n locations
agaggataaggcatgttgattttaccattataaaactttgcatcaaagtccattttgagccaatctgtaacatcagcgtttactttagacataaggttgtatcgcttataggaatcatgtccatagcgaagttgcccaccctgatcgtagtaaccaccggaaatataatagctaacatttttacttcctccacttacactcaggttatgcgtctggttcattgcccatggcttatagaatacgctaaaccaatctgtatttgcattggcataagcggtacttccccagttattaggcttagctggatcggggatagtggtaggagtattttgcggatctttcatatactcctttattctttgtatttgcgcatcgctgaaataaggggcttgtccggagttaatgtctgcctgattaaaggnnnnnnnnnnnnnnnnnnnnnnnnnnnnnntcggcaaaacggtgggcgaattccatccaatgttaccactatatgaaaaagtaacctttccatttcgatgtccttttttggtagtcaccaaaataacgccaaaagcagcgcgtgccccat

SEQ ID NO: 65401 - DNA, 622 bp, Arabidopsis thaliana landsberg
ccggtcctaaatcctcaacgttaccgatcatcgtattcctttctcatttatcttttagaatcctcgtgaagaagaagaagttacacgcgaaactcgaagttaccatagtatcattcaccagaactcgttaatcggtgcctcctcgacagctttctctcgcaatcgctctgttttccaatctccagcgacaatttcatcggatcgattcatttcgactttcaatttctctggttccggtgacgctgtcatcgattggttgttgcaatctgtggtttcgaggagttatgagttacataatgttgctgatgttcttgtttctcttaaccatttgcttgcattgatgaattctttcacattttctcaatggtaaggtttcacaatattacgtagatgattcataagaaacatgtttgatacgcttagattgagtatccttgctttgttcttgcaggtgggtgtttatcatcgtagcatcgcttttgattcgaggaatcacagttccggatatggatgatatgcttaacaacattggaaagttttttaaggaaaagtttcttcctttatgtaatgcttcacagagatagatgatgaaagctcttggtatgagtaattagtaatgctt

SEQ ID NO: 65402 - DNA, 180 bp, Arabidopsis thaliana landsberg
gtgttttgcatttttacacgaatttttttttaataaaacactatactgcatggacccgttatgtgttttactataattacagtattctttataacatttattgtttatttactacattaaacacatttatctttgattataaaacttttaatacactttttaagaacacaaatttgcctt

SEQ ID NO: 65403 - DNA, 500 bp, Arabidopsis thaliana landsberg
tttcctgaatgtccctgagttgatcttcgtacgttttcttttattttgaaaaatcatcattttcgtgatcgtgatagtaaacccgaagggcctccccaagtttaataagttggtttcctgcctttttaagataggctggatcgccaaagcaccgttcttttccgttgtaagttccgcagacatcatcatcgaatcttatcgtccacacgttatagccatcgccgatcacgaggtgcattccgccatctatttccgcaaacgtaaacgtagatgcgtcgatagcctccccaattatgtctttaacgtgatccatcaattcccgctccattgcgccacttatgcgccgtgaaaactgactgactatttccggcaaactatctctcagtgagtctttggcggctttttccatttttttcttaatggtcatttcggcacttccattctcctatccgatgataaagcgctgaacaggcgaggcccacggtttttgaggccccctc

SEQ ID NO: 65404 - DNA, 511 bp, Arabidopsis thaliana landsberg
ttcgggattggctcttttgaatttgacaaataaaaaaaaaagtaaaagaatgttaagacctatgtattaattttagacatactcgtttcaaaatgaaaaaaaattataaaagcaaaaatagttgagaaaggaaaaacaaactacagaattcaaaaagaaaaacataactaatgagtgaaagaaaactttgtaagtaattcatgcaagatttgttaaattgtttccattattttttaaaaatgttcattggatcccatattttaaaaataaataaagaaacgtaatatttttaaaaatcattcatttggtggtctttttggcgttacgaacccaaattggaagtggaaattcaagaccaatgtttaccaaacactgtttggataagagctaatagcaagtaacaaagttatggatgcacatcctgaatttttaggcataagtgagaaattttggatttgagtttatatatagtgtgtgataaagatccaacaagaaaactatcaattagcaa

SEQ ID NO: 65405 - DNA, 1707 bp, Arabidopsis thaliana landsberg
ccgtcgctactttgttgtactattgtacaccccgtcaagattttgtaacatcaaataactgaatttgaaggttttcatcgaagtctagagtaaacttaagtcacctaaagattcaaatgtttagagaattcaactatatatatcaaccacaaagataacaatcccatgatttgaaagtaaacaaattaaagagagacgctcaattacgaggacgagtgttctcaggagtaccaccgacgcctgacataactttagcgacatcacctgctgaagcttcaggcttcttcttgctgtacaacaccacatagccaattcccccgattatcaccgctccaaccgctgccgctctcaacggacatatccctaacgacttccgctggcctagcacttcacttgactgctttgctgcttgtgccggtcctgccatttcccttctttgcctatgtatatgtatgtatctttctattaaagtaaacttatcaatctatctcaaaagttaacttcttcaactgcttttgtgtttgttgaaaatttggaatatttgtagaagagatttgtggttattatggttaacccgcactcgtaggacatgctaaagactcgctccttcgctacatcttatttctagctttatctatatttagcttcataataaaaatgtagatgtcttagaaatttgtcatcgttacattaagagaatttcgtggaaactttctcattttgaagttaacttgcacgcaaattggagaataaaccattcaatttacttactaatttctgcttatgcataaaactacatacttattccacggtacatactagttttgattttaacacagcttagaatgagaaacctatattttcgaaaaaactatagttcgtgaagaacttgaggtaaaatgaaaaaacgagttacctattttctgtaatcttgagggggctgtttaaattccgaggtcgaaactcggaggatcactcattaagcaacctcttgtgctggccgatgaggtttcttgcaccattacttgttccgtagatgcttctgcaactcagataagcaaacaaagaattgtttgtagtgatgagattcttatagatttcaacaataaacccaaaaaaaactataagaacagttttgtattctgaaaggctaactatttatacttggattcaattaagctttacaagtcaaaaaggttgaaattccggagttacctttcgttgaaatagactccattttgtgtcttttgctggtttcagattctggaggtacttttgtcaaaagcacagatgtttgcatgttattatcagaacatgtctctgtagcattccgtttctgaagaatggagagtatctgatttactgcagtgaaaagaaaaagcttgtttatgtaatgttctcatgaaatggtattatgaagaaaccgcatggagaaaaacacaagcatttaaataaatatttaccatcacgtaaaggcttgggtggaggaacatccttgcttaacttacaattctctaaccttgaatctacaacagaccttcctgcacattcacacagtaccattttaaggaggacaggatatgtcacattaacctattgctataccaaacagtagaatgattggaatgtagaggaatgtggctttacaaacatgagttctacgattcaaatctaatctagtgattagtggcatagaattaaaaaaat

SEQ ID NO: 65406 - DNA, 1141 bp, Arabidopsis thaliana landsberg
catatgtaaattgtgattgctttgcttaacaaaacacccttttggtagttagtttcttgatggaagtttgagtttgggcttatgggtccctattgatacctcaaaatgaaaaggcattgataagacggcccaatcacgtttcattatgtttttgtcaacatccaccgttttgaacacaagtataaacctcccatgtgtaaattatacatatcaagattgatattagcaggagtaacatattagtactaaggtctatgtgatgcagtgatggtgtttaagattttcttcaagggaccaaaacacacaagttgatacacttgcaaagtaggcaagaatgtattcacaatctactttaatcccttggaattctttgtttagattatatacatcaaagtgccagaagacaaggaaaacacatcctatcaagtacgaggggattatataaataaataagaagagtatatgtgccaaattgataacttctaataaatggagggtgcaattaataaataaggagagacggaaaaagagacgccgttgaaacaccgcaaaacagagaagagccttttgattgtctctctcccggagatctctctttctcttcttctccatccttcttctctcggcgcgcgcttcatccccaccaccttcgaattcgtgtacgatctctaaaatccaattttgctatcgacttatctcttattgcgccattgttatgcataagaaggggatttaacaatctagggccggtgaataagatcatacttgaaaaatctgattttgtagatgaaatcgttgtgggcaatttgcttgtttggttaggtattgtttttgagctagaccctttagatataatcgccatggaagctctctgctttgtttagatcgagaaatatacaattaaaaagaagagaattggtctaattgttggaggggaattgcatgaatttgatgttggtttgtaatatggtaggtcctttggaatttcgaaagtatttaagttttttgagggaagcttctaggatgggtgtaaagcatgcttctaaggagcattgatgctgttccaagagcataggatcatttgttttaaaagacacaatctggtgctgttggtaatggattcttttttctattcgctctt

SEQ ID NO: 65407 - DNA, 183 bp, Arabidopsis thaliana landsberg
atacacataaaagaatactttggctacatccactctaatattcaacagttttctaataaaaaaatcataaaatctgtacattagcatactaaataaaaaccaccaatgaaatatataaaaactataacaagccaaatcctctataaactataactgagatactacaaataaatatagaactaa

SEQ ID NO: 65408 - DNA, 986 bp, Arabidopsis thaliana landsberg
ttctcttctattccagttcgttctttttcttcctcctatttacttcttctttggtttcaagttttgatttttatgttgtgtttcttaaccttataggagaatcgaattgagctttcttgatgcaatgtttgttggtgataattcggtttttcttataatatattgtgtgtatcaatctttgttgtgaaggtataatgaaacctttgatggagttctattggcttatgatgctactgtgaaaagcaaacaagctaaaatccttacaggacttcatccttactttggcgtcagggttaacactagactactcttatttgatcctaagcccaagagttttgtaggttagaagatctctattaaactttgtattgatctctgctactttttagtttcttgttagtgagcctttatgtgtttatggttggtgattttctcttctttgtttttatgcagaagggaaaattgtgaagatttctccagagtcaatccatgttattggtcttggtttttctgctgctgtcattacagacgttgatatccgggaagagttcaaatacagagtggtatgtatgactgataggtcttgaatgttactgtattcctttcttccgactttgttaaaacagactataaccttttctctctattcagagagatggtgaaggttctttcgtgagcagatcgcataaacggcatgcactaaagcttggaactatgttgcgccttcaagtccaaaggttaaacttttagcttctctgctctactgtttttttcttgtcaggatagttttctaggttaatgtattgtgattatttcttgcagttttgatgaagaggttatgcatatagctggatctctacttccggaaaacacaggatgcgttaagtggctcgaaaagaagtctgatgtagctttgccttcggataggttagtttagtttgcactagtcctttaagcttactctctactcatcatctttaataaga

SEQ ID NO: 65409 - DNA, 1114 bp, Arabidopsis thaliana landsberg
atatcattaatgtttgtatatcagattttcattttttctttctcctcatttctttaggcaaaacccacctggaagtgtatctggaaggcatctgggaaacgcagcacatcgtcttgtttccaacagcttacagatgggaacagaccgatatcagacaccaacagatgtcccggctcctggttatggctacaatcctccgcagtatgttccaccaattccttaccaacatggtggctatatggctccacctggtgcacaaggctatgctcagccagctccttaccaaagccgaggtgggtaccaacctcgtggacctagtgggagattcccatcagagccttaccagagtcaatcacgggaaggtcaacatgcctctagaggaggggggtattctggtaatcatcagaatcaacatcaacaacaacaatggcatggtcaaggtgggtccgagcaaaataacccacgagggtataatggtcagcatcatcatcaacaaggtggtgaccatgaccgcagaggaagaggaagaggaagtcatcatcatgatcaaggcgggaatcctagacatcgatattgagcaggatggtactactgctgaatctctcctaaccgtatcaaccatcaggtgtagttgaacttgtttcatacgtttgttatgaagtgtttgttgtatcattagaattgggctgctcttggtcttaagcttaatgggaataagagcagctgggagaaactataggttacattagttttcctacccttttcgacattttttatttggtgtatcatttatatacagatgctttgtattgtaccttgttttcaaactattgttttattcagttaaactataacatatatgcttcttcactggttccatctttaaactctctgcaaaaggatttaaaaacgaagacagcagagctggatattattattatggcttcataacttactcataactttttgattttgattaaaaagaacattcagattttaaaggacattaatgttagtattatgatcaaaaaagaagggtttacataaatggatttgatacaacaaaatttcagcatagctgcttctcttcatttcaagagtcttctactgtttt

SEQ ID NO: 65410 - DNA, 562 bp, Arabidopsis thaliana landsberg
  unsure (1)..(562): unsure at all n locations
gttcgtgcaacagccgaaaccgggcaaactgatcttcattttctaagggctcaagcccccgggcagccattacgatttctccggcaagtcgccgcagtccatctaccccaaattcgtggtatgggaagccaagcacatttcgaaaacttttgaaccgaacgatactgccgggatggccaaggctgccaagagcgccttggggagaacgtgcgatggagcacagatgagcgaaccttggacggaaaaaaggattccccaagcattgaatcgagaagaaagtatgacgatgccacaacggataaacaaacgaaatgaaataagaagatatgaatatgctcgctggatgtttctctgtctgcccggacaaattggcgacaataaaattacaaaattacatgtattgattgatgtagttgcctcaggcatggatttggataacattcccgccaaattacgcaagcaatccacaagcaagaacagtaatgaactttaggaaaattcatggtatttagagatgaccgcagacagcgctntatcaacgaaaaacactatacagagttca

SEQ ID NO: 65411 - DNA, 389 bp, Arabidopsis thaliana landsberg
atactaactccttgaactctgagaaaacactcttgcatacaataccacgcttccctgataatacagttcccactttgacaaggcctggcttctcaatttcagatctcgcctgcatatagattgtctatttcacaaaaacttttgatagactagtgataggaggcaatggtgaacttttttctgtacctgagcaatcacaaaaacggtattgcccttaaacttttcttctaattcgatctcagggatatccacgagtctctctgcacacccattactgattccggaaacgagagcaacaagagccgttgtgtcgaaattaatgagacagtcttcaccaagcaatctcatggaggagattacagtagaaaaagcatctttttgacttagct

SEQ ID NO: 65412 - DNA, 324 bp, Arabidopsis thaliana landsberg
  unsure (1)..(324): unsure at all n locations
nnnnnnnnnnnnnnnnnnnnnnnnnnnnnnnnnnnnnnnnnnnnnnnnnnnnnnnnnnnnnnnnnnnnnnnnnnnnnnnnnnnnnnnnnnnnnnnnnnnnnnnnnnnnnnnnnnnnnnnnnnnnnnnnnnnnnnnnnnnnnnnnnnnnnnnnnnnnnnnnnnnnnnnnnnnnnnnnnnnnnttttggtctccttccttttttctcttttctttattttttatttctttcctttcatttttttcactctctattttttttctgcttgtattctcttttcttttctttttttttacattcccctcttaactcttttatttttattt

SEQ ID NO: 65413 - DNA, 509 bp, Arabidopsis thaliana landsberg
gggctcgggtgtcgacgacgcagtagtacacgacgtcccggtcggccatggcggcggcgatggccttggtgtctaagatgtctccgtagtgccgctccacgtcgagtccgtcgatccccttggtggagctcgaacgacgcaacagcacgcgcacgtcgtcgccgcgcgcgaccagctggcgggtgacgcaggcgccgacgttgccgctggcgcccatcacgagggcgcgctgctgctcggccgccgatccatcgttcattgtcatacccaaggtccctggtcaactcgcggtatcgtacattactgtgagtattacaggtaataaactcattgcgcggaggttcccatgcagaagccattggctcccgacatctcgacctggccggaggagagcccgcagttggtcggcagccactgcgcgggctgcgacgccaccgtcttcccggcccagccacgctgccccgcctgcagcggcgaccagatgagccaagcgttgctgtcccgtaccg

SEQ ID NO: 65414 - DNA, 2055 bp, Arabidopsis thaliana landsberg
aatttctatctctctcttttttcctggttaattccaatttggatttgtaatttctctgaatttgattcctttatttcctttccgggatcgaaaattctaaatttccctttttttgttctgggttttcagggttctccggattgcgatcttggtaactagatattgaatttagggtgccaatcaaatcgcagctgctaggttttctttgattcctctgttgttgttgtcttcaattaggaattgttgctttcaaagatttagtcttaagatatagagatatttgcagggggggatattaggcagagaagaaaatgggggttatgtccagacgggttttgcccgcctgtggtaacctctgtttcttctgtccttctttgagggcaaggtctaggcatcccgttaaacgctacaagaaaatgctcgctgaaatcttccctcgtaatcaggtcttttttccttacccactctttgattggagaacttctttattttcaatttttttttgtgtgtactagttaagatctctctaattgtaagtggggaaatgtaagtggaatggattcccaatgaaactaaaatgaggtttgctacacggaatgatacaagtttcaacatttttctatgttgtgatttggcaggaagctgagcctaatgatagaaaaatcggcaagctgtgtgagtatgcgtctaggaatcctttacgaattccaaaggttgttgcatttttttttctgttattcccttttcagttttcttagcatacttctctcaattttattctcatgtgtttcagttttccattatgacagattacagagtaccttgagcaaaaatgttacaaagaattgcgaaatggaaatattggttcagtgaaagtcgtcttatgcatttataagaaactgctttcatcatgtaaggagcagatgtaagtcaactggttacttagaatcagtatatcatatttcgcttttgttaaattagatcttcagaaataatgcttacttttttctttcttgttgctcgatcatttactttcgaattcctgtatgttttataggtttctttccaggttccttatttacgttttactgagactgtctatttttcttgtaggcctcttttttcgtgtagtttgctaagcattgtcagaactcttttggagcaaacaaaagaggaagaagttcagatcttgggttgcaatactcttgtcgactttataagtttacaggtacattttagcatttttttgagacatggttttgcaagctacttttcctgctaccactacatatggtaacacatctgtttacatacagactgtgaattcgcacatgttcaacttagaaggtctaatccctaaactttgtcaacttgctcaagaaatgggtgatgatgaaagatcactccaattacggtcagcaggaatgcaggctttggcattcatggtaatgctttatccatttactttctcttttgtttgactgacagaaaacatgccctttagctgtatacattcctcacacgaaacatatcctattgcatgccctttagatgtgcaacatgttacgggttatgtgctcttcctattgtagatagccagaacttctgctttgaattatctatgttagtggaatgggttatatttactcgaacttaataattttgacctgcaaactgttaacggacacttttattaatgagttttttttcttgttcaagaaaacattttaagcatggtagtccttattcagctagtatagaatttatggtcaacctgtttagttttactagttagttccatttcagttcaaagggaattctgttgttagtttctctttagttgaaatcctattttatttcgaccttcgtcttatgtggtgcaaagtccacaactgtttctgcttggaacttttgctactaatcaatagttaataccaggtatctttcattggtgagcattcccaactatcaatggacttggatatggtaaaacatcggatataacaacttctgctgatccatacaagatttttataacaagttcttagttaggtt

SEQ ID NO: 65415 - DNA, 553 bp, Arabidopsis thaliana landsberg
  unsure (1)..(553): unsure at all n locations
gagcctgaaatcgctctgacgccgagcaaacccatttgcgtgtagaaattacgcagctgccgcttggaagggaaggtcgaatacgcaataacaaagcgcgcaatcggcaatgcttaaatcgcgtagccacaccatatcgctcataggactccctcgcgagggatatgctaccccgcgagggttgatcctacaagcacttccgtgtacgtcttaagagtgattactgcattccgcagacatcgccgctgctgggcaggcaaaggggcaccggataaggggtgaagttgctggagatcgccttggtaggtgcaaccgtcttcgcggaggtcagggaaggagccgtgaggccggcgaaggtgagggtcagaacaacggtgcgaacaaaggtggtcttcattggatctcctggggtaaggccgaaagtggcaaatttgagaagctctggttgtttgccannnnnnnnnnnnnnnnnnnnnnnnnnnnncctaagtctattggattgaatgccatacacatgtattactcagttatcgttactaaagtaatgtgagac

SEQ ID NO: 65416 - DNA, 631 bp, Arabidopsis thaliana landsberg
gggaccttcgcttctcgaagcccatttcatcccgtacaatcgaagtgcccaacatccgagttggtaaaaaatttcttactacgtagtaggtactaagaatcacttatcatatccatatattcttcacatttgatttatttcataccatcatttgaatatatatgtgttcattatcatttggttagtagtcgagttcgataattctgttctggatctagcaacaaatgtacagtgacaagtattaaaataataccgctgttcaactatatatatgtatgtatcagctcactagctgtttgtaaccagttcttgattttccagttggatatattcgattcaacatacccagaacatgtctcatatactgaactaatatctattggtaattgactcgattcagatatcattagtactatattatcttctgatatgcgacttcattcgattgtctttgttctggtcgggattccacttgctgagtaacattttcacctttgttcactatttgcaatctaaataaccctttatgtagggggtactatatatggccttaggatcataaggaaaaatataattgtctaccaaggtttttctaaaatatatttacggttggggaacaatttttttaact

SEQ ID NO: 65417 - DNA, 1315 bp, Arabidopsis thaliana landsberg
tataacaccaaggcaactattcagaatactagtccaccttgttactgtagttacgttatcatacagcatgtaaagaataggatgcgagtaagctccggctacctgagtcccggtctgactgtgaatcactatctttatcattccatccaccagagcgcccttcccatcttccatgggtgcctcgagagttagtacctaattcccccctggtgggaggcgatgaactatagtcattccgcctgaaaccatgcgacgaaaaatcgcctgaaattcttgctcgctcgggtgaaggatcttcgaagtcactactcaaataaagagtgtacaaatcaagacatgtcactccaacatgatcaaacacatttacacagtttctagaaatccaaactaaaaaaaaaactatcggatagagtctcacagcaacagtgcttcatcaaattcaccaggcagatttggcagcttcttgcaaacgtctttctcgctcaaggatataagaaacttcctcgtgtatgtaattcttggtttcctgaaaacaattgcaactgcagctgagaaatgtacaataagcagcaaaacagagacatggattttacaaaaaacagaaaaaacatacttttccgaatcatcattggtttcgacaagttgatccatggcaaattgttgttcatttgctatactcatcatacaatgcacaaaaatcttagctgattgaggccaaaaaacaccagtatctcttcttaacgccttaatcaagtaactctacagtagttgtctatagtaaataccgtgaaatatgattcttcgatattacagtaaccaccaataatatctcaactagcaaaacttaaaccacgattcaccaccacgcaacttcatcaggatctagctatatgtacagtgaaagatttcagagaagagaaattacagctcaaagccaaagaaaactagctcatcctaaactcacaaggctttaatctctcgtatcggattctctcacccaaccaaaataaataaaaacctcaaatcgggaaaagatgaaaacagattataacatttctgcagtaatctaaggtcttcgacagctagggtttttagcgctaatggggaattacatggattccagaatccatcagaaaaggataattagaaagaaaaaaaagtaagagtcgccgattctagaagaacaaaaggagaacggagaaaccaattagggtttcgatctgcagaaagataattttgctgttgctgtctgttttgatcgattgatgatgaaaaagagaagatcgaaaccaagtcttacaaagaagagcgattt

SEQ ID NO: 65418 - DNA, 913 bp, Arabidopsis thaliana landsberg
gtggtttatacagtaatttatctaaagcgcgaaaaatatttatggttggtgatatgacataagacaatcataggtattatgcatattagcattatatatttcgatagtactgttgattgtgaaggcgatagctatttctagataaaaattggatttaaaatgtgttataccaagttttctatatatataaagagcgttttatttgtaatttatttagccgtttaaatttatatatgtcatgcaattggtagagatatatatatatatatatatatatatatataaatttaatactattccatctggtaaagaagtttttgtaatttgattattcatctcaagtgacaaaaagaaggcagccacaaaaaatgctagaaagttattgaaacgtgagcgaactttttcaactcatatgcaacaaataaagtataagttggctgaattttggagacatctcataaaaccatcaatccaccaatccacccaaataaagttagtccacctaaacaatattaactttgtggttctacaaaaaaaaacaaaagaaaaaataaaataatcttagaaacaatatatttgtcgtatatataatcaagtagattattttttataccatcattaattaattatatttatttatacgaaatcgagtattacaaatcatcgtattagaactttctgaatgaactaatctttatgtatctaatatttttactaaaataatgaattatattcaacaccattttctacataactttgcctccctcctctataaaacccttagccctctctttctcttacttcaaaaccactttacacaacacacagaaccctccctttctagctctaaaaacatcccacaaactatctttcaacaacacaagacctatcacgaaacaaatcaaaggcaaga

SEQ ID NO: 65419 - DNA, 652 bp, Arabidopsis thaliana landsberg
gtctaggcttgctcgatgttcgtctgaagggagcgatgttacttctaactcgtcagggtcttatccttctaaccatagttatcagaattgcagagagagtgatgatgaagaggaggatgtaacggattgtgacgatagcgatcttgaggatactgatgatgatgattgtgggctgcttgatgatgactattataatgatgacaattatgaggacaagctgcacaactgggataaagtagtttatacggaggagattgcggataatgttatggatatagagagggtagaagaaaagggtagtgtgagtgttagagacagaagtggatatgtcaatgcagtactgaacccgattgagaatctttcccaatggaaagctgtgaaagccaaaggaagaacaacaactcaaacacagccttggaaggagaatgtgataaatgcttccttcagcttggagtctcaggttgatgatttatcatcaacattcagctttgaaccggaaatcaagagatgaaactaaaaaacagagaactctagacatagctgttgatgctagtctttcaacttgggtatccacattacaaaccaccaccagcggttgcagcagtgttgaaaaccaacatgtccgagaagaagaaaaactcgaaactggttc

SEQ ID NO: 65420 - DNA, 315 bp, Arabidopsis thaliana landsberg
aacttcttaactagactttagcataaaggtcacttcctgaagtcccttttaaaacacctatttccatagtcaaggccacggactcctttatagcttactgcatctaaactgacctaccattctcatcatccagtggaaacaacatcggacggtataccgtgaatatgtgccactgatatacacacacgacaccacgaatacgaaacagcgagacattattctttctacgggaggtgacaacaagtgagaacttatcatactatcaattcttatgctgcaacattctggacgcgactatacatggtgaagggggag

SEQ ID NO: 65421 - DNA, 582 bp, Arabidopsis thaliana landsberg
aacgactatttttatgtcggctcgcaaattatttatggggatgatggggggcgtttttcaataccccacgctactacaccaccttacaatttgagtaggttggtgtatcacaatcatggccttcgccagatagtcttggggctgagagattacttggacgatctggtgatgcgtcttgcgggtttggaggccaatacacgttttctagaaaagtgtgcggctcatcaaatcaaacggataaagagtactttgaatggtccggctggtgtttagttttgcggataatcagctcggtgctgcatctgacggtgagtaggatccatgaatctgatatatgtggctcagaataaaaaaagacctttcagcgtattttttggctactgtatgcttgattctgtgccgtttgggcaagatatgctttgtcaggatttgatgtcaggctttttgaacgcagagtaagcaggttcccgacgggatcttggtcagctactttcttactttgttccggctagccgatcgaggatcgcaagggcttttttgctatcagtacccggccgcccactgtcttgaattctcattttt

SEQ ID NO: 65422 - DNA, 190 bp, Arabidopsis thaliana landsberg
tactattttaataaattaaaattcaatctactatgagtacacactccacaaggaatgttgtggacaagacaatctctatggggaaggtagagggatcagggaccgtgggttaatggaaactgccccggccgtaaaggagcattcttaaccctatattcatgaaccgaaacacaccgtacttagcagcata

SEQ ID NO: 65423 - DNA, 496 bp, Arabidopsis thaliana landsberg
ataaacaaaactaaataacgtttctttagttcggggaaacagtcgaaaaatgataaaatatgtttcctaagaatctttatcagtcgtgcctccaagtggggataatataataaatgtaatgaaaaaactttattatatagtatatatttgtgatttggggtggtctgaaataaaggtactatatacttatccacataattgcacttttttcaatgttagacttggcgttcaattacttcttatccacaatattgcactttttccaaatcgacttggcgttcattagtaaccacaacttctaacatcgacttattacagccacgtatctttgatatgttgaagattttatgacaagaatataggcaaaaaagaggaaagaaactgaagatccactatatagttaatacttgtagcttcatttaaaaaaaaaaaagggatttcaatgttaatttatttttcctacaaataccaagttaaaactgttactaaatgacta

SEQ ID NO: 65424 - DNA, 522 bp, Arabidopsis thaliana landsberg
  unsure (1)..(522): unsure at all n locations
nnnnnnnnnnnnnnnnnnnnnnnnnnnnnnnnnnnnnnnnnnnnnnnnnnnnnnnnnnnnnnnnnnnnnnnnnnnnnnnnnnnnnnnnnnnnnnnnnnnnnnnnnnnnnnnnnnnnnnnnnnnnnnnnnnnnnnnnnnnnnnnnnnnnnnnnnnnnnnnnnnnnnnnnnnnnnnnnnnnnnnnnnnnnnnnnnnnnnnnnnnnnnnnnnnnnnnnnnnnnnnnnnnnnnnnnnnnnnnnnnnttcttttttttttgtgcacccggggggggggggggggggggtcctctttcttcattttattctttttcccctaatctaatctctcacttaaaaataatgggggggggggggggggtgcccataatataatatttttttttttgggcccccccggcggggatttttcctctctctttttgtncccccccccccgctactgaataaagaaaacactccccctccttctctagaaaaaaaagggggggggggcttttttttggaaatattttttttttttttt

SEQ ID NO: 65425 - DNA, 527 bp, Arabidopsis thaliana landsberg
tgattcaattacttgttggaagtgttcttcgtctctaacttgctgagaaattcatcgaatttgttgaacaattcttatggcgatttcgaaaggtagattgaaagtttggttcgataagaagatcagtgaaccacttatccagatcttgcgcaggttctatattctgtaactctcttcatatatttttttgttgaattggtctctatgtatcataaagttggttacttgttcatcgatgtagtttgataccatttcgtggaatcaagtagataacttgtgctacatgttcacctttagtattgctatgtgggtttcttattttcaacactagagaccattgtgaagagttgtgtaaccatgtagcttgtaaagactcgccattttctgtgttgtgagagtgctgatgtcgtaaaaattaaaaccaagcttgatttgtttcccctttagaggtgctgagccaaaagcagctgctttttctgcggcattggggtttaccatgggagtatttccaatctgtggtgcgttct

SEQ ID NO: 65426 - DNA, 1752 bp, Arabidopsis thaliana landsberg
  unsure (1)..(1752): unsure at all n locations
ttactcatttcaaatcatgtcataccaatccaatttcataattcaaaattcacagtgataagccagaaaatttgaaattttacctgaacagctctaatcacagcacctttagctaagtaaagagtcatatggctagtgagattgaaactctcggtcaaatacacccccggaggtatatacaaaagcgtgcctcctctcctcttcagatgctgaatccggtaaatcgccgccctaaacgccttagtattcaccgttcggccatctccaacgcctccaaagtcggttatcgagatcttatcgtaccggtaccgtaacggaactataccggaacacgtcgcctccgaatcaccgaacgaagacgaagaaacggcgagacatgagaagaggaaaattgacacagagagtctccacattttcgttgtagagaggtttatttaggaagagagtaaaatctgcagaattggagctaagattagtatgatatagtcgacactcgacaacgttcaataaaagaagcacgtgctgatacacgtgtatcaacgggccatataagctagaaacgtttgggctttagtggcccaataaggatgaacaactttttgttttttgtttttggcggatttttttaattctttgcttttctattttatttagggtttttattcttgttatataaagtttggatcggtttgtgaattttgtagctaagatcagaaatttcagcgatttggagattggagatggagagtcctttggtgcgtctatgcttaaaggaagcttgtaagagcggagatgcggtggaacgatggcgacttcagcggcggagtcttgagaggctgcctcctcaccttgctgatgctctcctccgtcgcctcctcaaaaagcggcttcttttcccttcgttactcgagtaaactcttcacttccttacatagttctgatcgtttctaatatgaatctgatttctgatctcgaaatgctgagctatatatatatgcttcgatttgagatattgagtgatcgcttgggatcttagtttttaaatttgattagaattttttttggttctgtattcatgttgaaataattattcctgaagtgtttagctgtagaattgtgttggtcttggtacatcgttgcggaaaatgcaatgattgcatggacactgaactattgtatctgtatcacacaactaaacaagactcttttctgtgcagaggattcaaatattctgtagagaatatagatctccgaggcaaaagctcagttaacgcagaatggatggcttacattggaggcttcgttaatctaattactctaaatctttcagattgccagagaatcaacagttccaccctctggcctatcacaggtatgttgagtgatatactccgagttttggaatggaagtttaagagaaatttaagtgtttaatatgtgatattggattttcaggattaacaagtttgacagagttggacctttcaagatgtttcaaggttacggatgctggtatgaagcacctccaatctgttgtaaatctgaaaaagttgtggatttcacagacaggtgtcactgaagttggaatttctcttcttgcttcacttaaaaaattgtctcttttggatntgggcggcttacctgtaactgatcagaacttgatttctctccaggtattacctgtgctctntctttattntgtagtcattaggggtgttttaattgcacgatgtatgttattgaactgtgtag

SEQ ID NO: 65427 - DNA, 1449 bp, Arabidopsis thaliana landsberg
acggtatggccgggatctaagattgaatcaggtatatctgccccaccccatttggcaattaatattttctagtgttaatgatcacaatgttcaatgctcgaaacgatttctgtagtgtgccatataaacttttgcatctttgtagctatggtcatgttgcattgttctaaattttttcataaggtaacttgtttgcttgtagtgcactctatacctcgtctcgttgactatatatatcaaaagacgtagacttacgtctgtgtcctctatttgatttggtgtctgttgcatcagagctttgccactactttgattttctgtattagaggatgattacaatgtttcatactatgtaattatccctcattctgttatgcgttgctaattggctattcaaatgctaccatctacccctataccttctataatatttaggcactggtattaactataaacccatattctttctcttgatgttttctttttctttttcattattccttgtcatgttaggttagacgtcttttgtgctctgcaagacctgtggtagttcaaacggctgctaaccctactatatcagatcaggagcagcaacaggtacaaatctagtgtatgttcatttacatgtaattctttttaatcatttaatatgttgaattccttctattattctacttcaaacatatttctacgtctaaaaaaattttaggagagcatgtttcaatttatcatcaaaaagtacactttcgcatcacacatcttgtaattattttaccaaattttaatcaattcttaattacttatttaaaaactgaatttagatgcagctgcacttttatttctcgacatggtagaagccagtggttcagtttctgctgaactttctgttttagatcttcatagactccaattctctcttaagtgtttataatgttgctttgtttttttcgctggggtaggaccatctttggcgcatagcacagaggactgctgttctacccctcgggcgtggagcattcacattatcaacgatacatactcttttaactgaggtaatttgctatctatagtaggagctagacatggttcttatcacttgtaattactacttgatgatttatatcctctctgaaattttgcaggcgtttactgtaccaaagcttgttttagctggtcgactgccttctcaacaaaatgccattgtatgtaaaattgtggttatggtttattagggggatcattacaaatttgaaacatgttatttactctaatttaaatgaaatagcgttattgcaatggattttgttattactgtgaagatggaagttacaatttgcatgaagcagcattttcaagacataaataatgaatatttttgcatacatttgttcttataacaaagaatttttttattctttcaccgttttagacactcataagttgttcctg

SEQ ID NO: 65428 - DNA, 369 bp, Arabidopsis thaliana landsberg
cgttcgactagcgcgcgctgactgatcccaccgtcgtgggcgagcaggctgagaacgccggcctcgggctgtttgagccccagcggatcgaggagctcgccgaagcggccgacggcgagggtgccgagctggctgaagaggtacgccgatccacggggtggtcgtgctgcgcttacgagatcagatgaccggattgacagaatcgttcataggagtaatcgttacagtcatgaatgaactcgacaagtcacgacacgaccgactcaagatcggctctctcgcaatgatcagctacatcttcaaggccgccatactggcagatcaacctaacgatgatgagcagcgacgcgctctacttcacgttcgcta

SEQ ID NO: 65429 - DNA, 553 bp, Arabidopsis thaliana landsberg
acctgttagtgccaatcaactatatctccgaatgttgtcgttccaactccttcccacacttctctatgtgcgagttgttccgagtcaacaccttccatatcacagtcccaccatcctgaaccatttgcatctgttggcaagtgcataagtatcgattacataagagtatctgtttcaagtaaataaaaaaagtgattgaaacttgttgttacttacaatggttgtatatgggtctctgcttcttactattgatgttgcttcttctttctctttccctttgcattggctttgatacctttgaattgtctccaaagaccataacggactttcccgttctactcatgctctccatacctagtgatcaatgtatactcttatcaactactgagatctcaaaggtcattaaacattagtatttaccatgaagactcagatcttaagtctaagccaacaagaagtagaaaatgcatgtgatctgaggaacagtgacatcaagtaaagttctcaattcacaccattctttcaaacctaatctagaaaatcgaaaggaatt

SEQ ID NO: 65430 - DNA, 788 bp, Arabidopsis thaliana landsberg
ttctcatatgataaatcacaagtatatatacacttgactgatgtttgtctaagccagtaatctataaagcgatttcaatctcaaataatgttagatgagtgggcgagtgatatagtctcgtaagctacttttatttgtttttgtatttcaagtttttcttaagagtcactaaattcatcagataagacaaatttagtttcacgtgtgatagattcgcatatcctctgaagtctgctttattgaatacttttcgtacttcttgtatacaaaaatcgaattaaagtataaatgcatgtagaataatgttgttatacatggcatccattacacattaagaatgggacaatatttttgtaaaaagttagcacaactaatattctgacaaccaaattcttatatctaaccattattactgttctgaatgaaataaatttattaaaaaccatttttattattaaaataacaccattactagcctatggataatgaatagagtttctgatatataccaaactatgattcccaacaacaacaaaattagaatagtacagtcatcactcatcaggatgcgtatgtatgtcgggcttgaagcccatacataatacctgattgaagcccattttccggataaccatgtaactatgtaagcttgattgctcccgcaaggccgcaacgaagtttaatttgatagtccacagatgagttattgtagattatagatagagtcgataaccttttctaaaaccaaaatttcattattattttttaatcaactcaactagaagtct

SEQ ID NO: 65431 - DNA, 514 bp, Arabidopsis thaliana landsberg
gagctcttcatcgaattgagcatccatcttaaggttaatctcatggggtatgttaaagttttagtctttttctctctaagatagctctgatgatgatgattagctcttctgctctgaaattgtgttctgttttgtatctggatttgatcaaagtcatagactttttttaatggctatttagaaattttctatctggtcccttgtgggttttggtattaatggtgttttgctaagtgaaaacgaatgaatttggagtttttctttctttttttggagatttgtttattcttcttggtttcttttgatacactgtttgattgttcttttgtgttattatgatttttctctgtatcgagcttttgctgatcaagcttttggttgaaacatttatatacatatacttgtttttgagtctattgttcattgtcttttcccaaattttgatttgttgccttcttgtgtgtttctctctggatagtggatacaacttggttgcgtttagatgcttaaactc

SEQ ID NO: 65432 - DNA, 592 bp, Arabidopsis thaliana landsberg
  unsure (1)..(592): unsure at all n locations
aaagactcaacttattacatatgacaatgcaggatctggattcttagatacaaggccctttctcttaaaacttgtgatgtatataattgtggtaaatattgtatatcaagacaaaacacatgtcttttttttgtgttttggtataagaatcttctctttcaagcatcagtttgataacaaagcctcccccactacgtttcacatcgttccaatcattcattgcagacattataataatatacaacagatccaccaacttctggttcaacagcaaccttagtcgccgtcatgtcatcctcaacttccagaatcattctctctttaaggatgcatctattcacccacaagactatctctcaccatcttcaccattgtcaaaacatatcgaaaacgctaaaaccgagagagaaaggaaaacatgaggaataaatcccaatcattcatcagctcaaagcttatattcatttgttgctcaatcttggtgttgttcattctcttcttgaaaagagcaagcttctcttccaattcaaccgcaaccattcgagacgaatatcaccagaanatgaagtgcccatcaaccccacaacaatgc

SEQ ID NO: 65433 - DNA, 524 bp, Arabidopsis thaliana landsberg
  unsure (1)..(524): unsure at all n locations
cggancttgtcgtcttatttccccaattcgccggcgttttccggtttcctcctccgtcgcttctcttgctcttctagactcctcctctatgatcgtcgacgacaatctcggcgcatttctcgaggtctaatttacttttaatcacctctctattcgtctttgttctcttctcacactttcgtctttatagattcttccaaaagatcttcgtcaccgtctcttgaacgattcaagaagaaaccagctcgtagaggttattgttactcttgtgaaaacaatttcaaaggctaaaaattgaaatgagaaagtttaatggtgatgaattttgaaaccttgattaggtcataatggatttaggaagaccacctgaagcacgttatctcggagaacctggaggtcaatatcttaggaacaacgaggtaaaaccaattattacgttagagtctttactctgttgggtgtttgtgtgtttaaatatggattcttgtatccatgaaaacactagcttaagtatctatggcaga

SEQ ID NO: 65434 - DNA, 361 bp, Arabidopsis thaliana landsberg
  unsure (1)..(361): unsure at all n locations
gcgccataggacaaaacacgcttctggacttgggaaatgggaacacacccagaaactcgcacagtttaagccccagaagcaanccnagcaganaacgcagcacgacgccccnccccccgaagcccccccaagccggncacaccaanagggacngaaagcnccncnaaaggagcccggccaccagaacgcgacgagaaaacaacaaagggcgagccccgagaggacgccacgggcccaacacgaaccgccggagcacaagaaagaggaaaggccanagccacacaacgccaccgcaaaanaaaaacccaaagcacagagcnaaaaacagagnccgaagnggaaaagaagaagaagaagaaga

SEQ ID NO: 65435 - DNA, 447 bp, Arabidopsis thaliana landsberg
tttcgattaattttcttaaaaaagaaaacgcaaaccttttttatcagggggttgaatgaataatcatttctttccttttgagagaagacaaaaacttggacaaaaaataatcgattaaactaagtccatgacactgacctatgattataacttgcaggatcgaaaagtaggggtgcggacatttcggatgaggtttgggatatttcgattctaataaatctataaaacttagtttggttctgttctgtttagtccgggttggactgaagaagaattatgaaacgatccatgaatctggctttgtgtcctcagatggttacacaatatgattagcatgatgcatcaaggattctagctacacatttctgaatttctaatcacattgaatgaatgtgatttttacaaaacattaccaacaacggcaacaagtcgacacagaggtttact

SEQ ID NO: 65436 - DNA, 516 bp, Arabidopsis thaliana landsberg
ctgggacgcccacgtcaccgcgccgaagaacctgcgcgtgctgatgagcgcgccgaacaatccgcagcatccgctcgacggcacgttcgacttcaagcagacgcatccggtgccgtcctatctgctggcgatcgccgccggcgacatcgacgtgaaggaaaccggcccgcgttcggcggtgtacgccgaaccgtccgtggtcgccaaggccgcgcacgagttcgaagacaccgagaagatgatcgccaccgccgagaaactgtacggcccgtaccgctggggccgctacgacatcctcgtgctgccgccgtcgtttccctacggcggcatggaaaacccgaatatgaccttcgccacgccgaccgtgctggtgggcgacaagagcctggtctcgctggtggcgcacgagctggcgcactcgtggtcgggcaacctggtcaccgtcgccagctggcgcgacatttggctcaacgaaggcattaccacctacgtgcagggccgaattaccgaagcgct

SEQ ID NO: 65437 - DNA, 645 bp, Arabidopsis thaliana landsberg
gggttttctgggttttagagttgatgtaattggttgcttggtggctcagtaaagctttgatttttgtttctgtcttctaggtttctgggttctttgttttttttggctttggctttggcttttgatgaccatgtgagaggagattaggggagagagagagagagagtctctttttccttttaacgcttctgagccattcagttctgaaactgtacaatgtttgatttactgcagcaaattacaataaatatttattgattgaaagattttaataagagtttatttgttgtttagcttcctttttaccacctactagctactagtgacctttgaatcttattccaaataagtatgtctctaatctagtttaaagtctaatcttgtttttaaagtcatttagtgacttactttgtgtaacattctggtttagtagttggttactttggaaattgggtttagagaaagatacaaactttcttgcacttacttgattgttgataccaaaaacatgtttaggaaatttaaccaataacggaattactaaagatgagctataaataggaaaaaaagaaaaaaaaaaggccagagagagagaaagagttggaggaagtgaaaagcactctgagattggtggggaatgggaga

SEQ ID NO: 65438 - DNA, 382 bp, Arabidopsis thaliana landsberg
ccccaacatcatctagccaagccctgttcaaacccaaaccagacacatgcaactcaaagaccccaacaataaacccttaatcagacacaccacccaacataaaaacaagataaacacaaacctcaccgctagatgggaacaaatacaccaatgggcactcatcacgcgtaacagacatcccaacaaacctcagcactgccaacaacatcagtcatgaaaacactactaactaaacaaattgcaccacgcaaccaacaagacaatgcgttacaaaccaaacctgcacacccgacccacccaaagatcacaacccgaaccccacaaaaacatcactgcccacatacgagagactaacccaacagcagacagcataaaaaaaaac

SEQ ID NO: 65439 - DNA, 239 bp, Arabidopsis thaliana landsberg
aaccattgcgaatcccatggctacctgggggaaatgtttcagctctgatccggtgattcaacggctcccggagacgacggaagcaatgcagccctccggtggatcagagattagcccgtcgccgccagttccgacggcgagtggaaaccaacgcgcacatgatgtacgttttcaaatcgaaacggtgtatgtcttctttacaaagaatggaatcggtcctctctatacacttaatcctc

SEQ ID NO: 65440 - DNA, 298 bp, Arabidopsis thaliana landsberg
accagttcaccactaaataaattaatagattaaaaactacagccaaaattcatctagaaatatgttacagccaaagaaacaccaacctcccaaatgccgcttacgtactattccctgcacctaagtttccctctcgcacctatatataccactcctttcctctcccacttaccgaccactgtactgaatctttaagcctctcaacgtgttttttatatatagtttgaaaatcattgacgccttaaaaggatcggcgataatgaggatgaacagggcaacgggaggcagcgcaacgggg

SEQ ID NO: 65441 - DNA, 495 bp, Arabidopsis thaliana landsberg
  unsure (1)..(495): unsure at all n locations
gacggccaccgtgcgcgacacgagccgatctgcaaacggcgtctcgactgatcgcgtgctcgggatgctcactggtcgcgggcgcgtgcggaaacgcagccccgagcccgtgctccgaattctcaccgggtgcggcgtcaggaacgccggtgaccgtcgcatagagcgccgcatcacgcgcgtcccataccgcatcgaagaactggctcgccggaacatctttcgcgagttgcacgagccagggcggcacggcatccgcgtaggccttgctcgttgtcatgccgccggcgcccgcgtcgtaccagatcgcgagatcgggcctgcggcccgcaacgagtgccgccgacctcgccttgagcgcgatcgcgacggaatgccccgccccgttcgtccctgcccgcaacgcatcggcaatgccgtcgacgcgcaacgcnnnnnnnnnnnnnnnnnnnnnnnnnnnnnnnnnnnnnaacgccggtccgaccgaaaacagcg

SEQ ID NO: 65442 - DNA, 514 bp, Arabidopsis thaliana landsberg
tacagagttgtcgaatgtcaatggcgtttccatgcatacccgacatcaaacaccgccatccatatttttgaagcatgagttttccatagaatcgccgcagaataaataatttttccgcatgacatgccaatctccatgctagtctggcataacagaccgtgaaacctgcctggcgccagcaaggcgcaaaggagcctgttttgacgattatccagtcccttgccgccatcacgccgggctcggcgcttgccgaagccatggagaaacgggcggagatcctgcgcctgagcgaggcggcccacgacgcggtgctgctcccccgcgatccgggtggcctgtcccatggcctgcgggccgctctcgccgccaggatggcccggcagaacggcaacgaggcccttgccggccactacgatgatctcgtgcagcgtgcggcggaaggctcgacggccctgctcgcgcagccccgcacgagcgtggacgacgagcgcatcgcacgatcgttcgcatgccg

SEQ ID NO: 65443 - DNA, 559 bp, Arabidopsis thaliana landsberg
  unsure (1)..(559): unsure at all n locations
tttgcacaagcagcaagcatatcttgactacattctctttacctattgtcctggttatggttattattggtgtggggaaacctgaaagcaacttggggagtgtaaagtttattttactctcacttccataaaacagttcatcatcaaaagcagtgagagcaggaactcaagcaaggcaggaacatggaggcaggaggcaatacggaggagggcaggttactggtgtgttccttatggtttcatcagcatgctttcttacagcatccagggccaccaaccatatagggctagggcctccaacatcaatttctaagtaagaaaatgccccagaattttgccagctgctggatgttatggagatattttcttacataagactcccttctttgtaatgactcttgctttggttaaattgacagaaaactagccagaacacccattttgtctaacattataatttctgtaaagttttacaacatcactcactatctgntaaatagaaaataccaaacacccacttgcgcttacattcacacacacacacacacacacacacaca

SEQ ID NO: 65444 - DNA, 1871 bp, Arabidopsis thaliana landsberg
aaagaatcattgaaatattaaatgatgaaagataagttttaaaattttcaaaatatggaaaaacatgcaattagtaagtattgattgcaaattttaatttattttgtacaaagaagcgttatttatttaaacattataattaaaatgataaatagtgaacgatgaatttaagaaaattcaaaatatgaaaaactagaatttataattgtttaatgcaaaatttttactgcaaaatttataacaaacaagcatttttaacgggtaatgtaaaggatacaaagtgagcgataattttaaagatatttagtggttttacatatagttaatgttttattttatttttttagaagaactttttttttcatttgacattttaatattgtttaatgaacttttgtgtattatatgtgtggattcaaaagggtagttggatagatttcaccatttgaattttgaagtagcaaatctcaaataaaatcaatgggactaagaacaattgataaatctatgggggaacaagtgtcacacctatctccttggtaaagccagcccatacatcacggtacccaaaaagaatcatccaacaagagaattgttggtacatattactgacattacaatacgatattataaagagtacagtacgtttatgcttatgcattaagcgcaagtaaaacccgatatatgctcatcattcaaactccaagtatcagctgagtcgtgtcgttttcatacaacaatttatgtatgctcattcttttaatactaatatatctgtgttgtgatgtgtgcatgcgtgtgctcgaatactttcaagcaagggtcaaacaaagtgcggctggtaatagacgatcagaagacacaatcaccagacaccaagtaagcagatgacaaaagacgatcaccacaccagaattccaacaaaacaaaagattatgatatgttttgtcgcctctgatatgtcacactacacagtacacacaacctcttataaacaacacttttaacgggccgaattatcagccttcaatataatgtttacttatgtgatggacctcaacattacatgggcctatctgttgcataattaacagttttaagacccttttatttttgtctcgaatttgaaatgaattgtttttttatttaaatgttttgcatatttggttgggtcctctcgagtcacacacgaccggagacgtgcattagaagagttacagagcagacatttgctggcatcttacaattatctcaaacataaccttcttttattattaggctattggccctacccaccaccaccatttttattttctttttctcaaacacgctttttgaatttcaatattatatactgtccttatcaaaaaatagttatacgatttgttaattttgttagcctaatttttcctaatctggttatgtcacggacgcaagttaaattcatctgcggtgtttttaggtgttataaagccatgtgaatgaagttaattttaaaaaaagcaatgtaaatagtcaaacatgccctttaagaaaaagagaaacacacgcttcacgtgagtcgcacgtgccaaacccacctttcatcttcttcttcttcttcttctatcttccgcatccttcggacaagagaaccaaaccagccaacaaaaaataatagtaatggagagtcgaattagaaagagagaagcacgccatacctgagagattcgtgcgtcgacgacgtgaaaatcattattatttactaataataattgttattgtcaatcgatgataattaaattaaaattagtttaaaagtggtggtggaggtgtttgatgggtgctagtcacagcaccaacgttaattataatcctcattctcggaatgc

SEQ ID NO: 65445 - DNA, 457 bp, Arabidopsis thaliana landsberg
  unsure (1)..(457): unsure at all n locations
tttttctagttagtcaagacagttgtgaacacgattgtattggatgttgtcttcttctgaatcaatagtgttgnttttctccaatatcaaaaatttgcgttgtccggagtccgggaattctttatttaaaaagacatttcactgcatattaccaatgtttagtgatctttttaaccaacactgaatatgatttcagagttttaagacaaacgataaaccgtaactttcaactttctaacgaatcaaatgttgttttttggtctaattataaataattgaaaggagaaaaaaacgaggggtttcttcatttgctttagcctttaagagttgtttctcaaataaacttctaagaagcattttctcatgttttctacattagcctctttgtataccaaagtataaatttcaattgtaaattccaaagattgtccatctactttttttttggtaaggaaag

SEQ ID NO: 65446 - DNA, 408 bp, Arabidopsis thaliana landsberg
  unsure (1)..(408): unsure at all n locations
acccccgcgacagcgccagcaggccacgnnnnnnnnnnnnnnnnnnnnnnnnnnnnnnnnnnnnnnnnnnnnnnnnnnnnnnnnnnnnnnnnnnnnnnnnnnnnnnnnnnnnnnnnnnnnnnnnnnnnnnnnnnnnnnnnnnnnnnnnnnnnnnnnnnnnnnnnnnnnnnnnnnnnnnnnnnnnnnnnnnnnnnnnnnnnnnnnnnnnnnnnnnnnnnnnnnnnnnnnnnnnnnnnnnnnnnnnnnnnnnnnnnnnnnnnnnnnnnnnnnnnnnnnnnnnnnnnnnnnnnnnnnnnnnnnnnnnnnnnnnnnnnnnnnnnggaagctcgccctagacgaaatgccccccccagagcaggaccgccaccaacggaagccgacataaagcgcactgggagcatataagcg

SEQ ID NO: 65447 - DNA, 423 bp, Arabidopsis thaliana landsberg
aaccgtatgtgaaagcggtattcctagaccaactttaggaaagatccaactatatggctgcgatcagtgtcgaaccttgcacctttgccctgtttggcgccctcggcgacctggcattgcgcaagctgtttcctgcgctctaccagctcgaccgggccaacctgttgcacccggaaacccgcctgctggcgctggcccgcgaggccggtagcgcgcagggccacctggacagcatcgaagcgcacctgcgccggcatgtgcccgaggccgatatcgagcccgccgcgctgggccgcttcctcgccaggctgagctaccagcacctggacttcctccagcccgagggctaccaggccctggccgagcagatgccgggcgagctgccgctgatcgcctacttcgccaccgctgcggcggtgtacg

SEQ ID NO: 65448 - DNA, 241 bp, Arabidopsis thaliana landsberg
ggcattttgctcaggacttacgacttagcatgtgtcaggcaagataagatcgtcgaaggcgaactataggtaaaaacgggctatcatctgctaattcctatatatatatataaataaaaaaaggtggatggtgtatgttggtttttttaggtggggaggatgaggaaaaaaaaaagagaaagggggggggatttaataaaaaaaaaaaaaaaaaagaacctccgaaaggtcaggggaattt

SEQ ID NO: 65449 - DNA, 413 bp, Arabidopsis thaliana landsberg
ccaaacgaccaccaacctattgggctgcgactaacaacaccatcagtaacaagggtattcctgtctcatttgaaaactcgcacccaaaggagcccgccttgcagtaaacttcacacgcggggggtcactataggtcactccattgagcctaccaccatcaaacccaacggtgccaccgacttgaacgcactcctattgagattctggcctacgcacccgcacgatagctgtaccaagttcatgaaccacacccagaactaccggtaaagaaacaagaacgcatggcatgcacactccaaaaaggcaacgccctggtatattgctaaagaccgggtggcccagccacacaacagataccccatgcccatggaccactgaacccgcccggaataaccgcactctagccggcatac

SEQ ID NO: 65450 - DNA, 722 bp, Arabidopsis thaliana landsberg
tacttctaatcagacccaatagtacttcaaatcaggatttactcgtttatttaatctacgaaatttattactgtatattatactgaaaaaaaagaagaggggaagagaaaaagacaaaagctgccaagaacaaaaataaaagtaaactgaaaaaaagatttgaaacgaaaattagaaaaaagcctctatgtgagctagttactcgagatttaagcatgagcatggttaatatggtaaagatagtgttggttgttgaaaacacaagtccaacaagtgctgtttacgtttccaaagcttggttcttttggcatcgtcaatggtctgctcgatctatacacccaaatatttatttcaacataaaataaattagttacataacaatatcatattatttcagaaagtttctattatacaatttgttaatatactatctaaatttatctctttgattatagaataaactatagatagtttgaaactagatttttgtaaactataaactgacctttgtgggagaaaaggtctgtcgaagaaaggcatcaattgagcttttggaaccatttccttcctcaacatacgaatctcttcctcttctatcatctgttacatatggttcgatttaataacgcggcttaacttcgagtattcttctcaaaccaagggataccaaattccaaaatttctcactgttttagttagaggtagttccgttctatatctac

SEQ ID NO: 65451 - DNA, 508 bp, Arabidopsis thaliana landsberg
cacagcgataggtgcccttgggggtgtgattgaggtatgcctcatgcagtccactgtggccgtcaagaacgccctgcaggagggccggccgcttcccaagcacccggcgctgtactacagaggcttgctggtgagcgcaacatacatgcgtcatacatcagccgcccgcgaagttgcacatagtgtagccgcaaacgcgcgacaacatagcatacgatgttgagcggtcggtctgtgctgctggctttcagtgccaccgctaggccctcgatctgcttcgtactgcggttgagttctatcgctgcggcctgcccgtctggatgatcatgctgctggcatgttaggacccctgatcgtgatactgctgatagagcggcgtcgctttccgccctatagcagcgtatcttgcacgacgattcattctagcccacctatcaacggaacacataactcctgctagcctcatgcaagattttgcttgggtcccttagcttccacacagtccatg

SEQ ID NO: 65452 - DNA, 1601 bp, Arabidopsis thaliana landsberg
  unsure (1)..(1601): unsure at all n locations
ttctaactatttgtttttgatggagaaagtagctagtggaaattttcaaacttagaaaccaaataattattcgatgctcgtatttctaaattcttattggttctctatgattgatactaacagagatgaatgttctcataacaagattacccaggttaaaagtttctacatgcataaatcacatgtgatgtctctccttcacttttgcttcttttgattctttttgttttctatatcaaatttaagtaagtatgataaagaaaaatccaattaagtttttaacatatacagtcaatctgataatttcatcatttttttcttttgcttacaaaaagttgtcaactatctataatgggacataatagaatcacgtttctatgtatagaaatagttaactacatgaaaatatgaattgatatgccataacgaacataaaattgtccaaaaaaaaatcatattagaatagttgttttgctttcgaatattgccgcgaatgtaatagaaaataacctttttaataataaggtgaaaaatagaatgattaattcattcaaaatttagatgtttatatctgggacaataaacaataatagttagaaaatagtttgttcaaagaagaagatgcaatgattattagcagtctctgttctaaaatgtctggtgtatccggcttcaatcgtacttgtaattaacgtcgagtttttgccgcctcatttgtatttctttcggacggatcagtataaaatgttgaatgaactaaattggggcttggcaaagtgatgccgcatgggggcaattggcgttacaaactttgtttatagacttgcttcctttgaaaatgtagatctgcgtcctttgtttttttcattttttactcaactttgtttatagatttgattcgtaccttgtttgtatcatgtactctttgtattcttgatttctagatagacgttaaaaagaaagttattcatgtttaaattgactccaatttatattcttttaacgaaaaaaatgtaacaacgatgagtatttgttaatatagttgtctatttggaaatataattgtacaataattattgttatatatatatatatattttttttttttcattctaaacttttaacttctaaacaacaagaattgtttttctaatataattgcctatatgattgtttctgatatagttaaatataattttcaaatgaccagttaaatatggtcagttactttacacataaagacatgattatgttatctttaaagattcacaacaatttgaagtcaagggaaaaaacaaaaattatttttgcttgccacaaaggacgattaaggctttttattttctttgccaaaataggggaaaaaatcattttcccacttctatactatcatctcatattggactctctttattttacttttagttgttgggctttgtctttcgtttgggttttcttcggtttcctgtgctctttgagttggaggnnnnnnnnnnnnnnnnnnnnnnnnnnnngaagattgtattccttgtttcagcatcattttgagaancgatagattatttacattgatccttgtttcagcctcattttgagatatc

SEQ ID NO: 65453 - DNA, 370 bp, Arabidopsis thaliana landsberg
  unsure (1)..(370): unsure at all n locations
gatatatatatatacatctataatttaatactttgtaattgctgtcaatttgttttttaataatattaaaataatcctaaaatagagnaaaacagaaaaaaaacagataagaaaatgaaacaaatgaattgtgttggatttgcatagtaacgagtaacgattgtgcaaggagccgttaattaacttggtaggggtatcgagagtaaaatcatatatttgacttaagagcaactccaaccataatacaccaaaacacaaaattttggtgtttcaatctttttatcatcttcaatcacaacaccaaatctttacactcaaaatattacttttaattattatctacttaaatttaaggattctttttcaattt

SEQ ID NO: 65454 - DNA, 1701 bp, Arabidopsis thaliana landsberg
tattcctcaggactgatgtattgtttaatgagatcaaaaatgtaaatttcatgaattttaaatactgtacagattatttgttaccgtaattgtgactatagagttactcgaatgtaatttacagttgtcgattttattaatttctttcataatggttactaaataatttaataactcgaattcaattacggtaacataaatattcgagaacttatccaagttaacaaattaaggaaagcaaagaaaattatgcaagtaagtgaccgacacgtggcctatgatcctagtgagattagccggtaatcttgtgaagtaaaattacacaaaaagagttaaaaaagaaaggaaacaaagggcatccacaagcccaagcactgaaaatatttggaaaagaccaaactcaaactcagttacatacatacaccacacagagtttataacgtaacagactgtgatcacaatccaacgccacagatctttccattaacagacacgtgtcgtaatcatagctcaagtttcgtaaatgacagaaaacattcggttagaaaacggtgatgaaactattgccgtcgaaacaagacagatgcaggtgtttgggagtctcaacaacgaatcctcaccgtctgtttattttctaaaggttaataacgtaaatttaaatatctaatcggacggttataaagcctcttactctttccttttatatatcgtcactatcacctcaaaatgccataagagaaagcaacttcttcttttctctctctaaatttctcagagtatctaatctctctctcttctctcgttccatattatcatgcgtttcataattcagtaaaatttttgaaatctgatctgttctttccgaagcttttgagagaataataaaaaatggaatctggtttctccggcggtggtggtgggtcggatttttacggcggtggtggtggtagatctatacctggaggtccaagaactgttatcaacgtcggtaacaataatcctcagacgacgtatagaaaccagattcctggaatcttctttgatcagatcggaaacagagtcgccggcggtaatggattctccgggaaaaggactttagcagattttcaagcggctcagcaacatcaacatcaacatcaacaacaacaacaacaacaacaacaaccgttttatagtcaagcagctctcaacgcttttctttcaaggtctgtgaagcctcgaaattatcagaattttcaatctccgtcgccgatgattgatctcacgtcggtgaatgatatgagtttgtttggtggttctggttcatctcagcgttacggtttaccggttcccaggtctcagacgcaacagcaacaatcggattacggtttatttggtgggatccgaatgggaatcgggtcgggtattaataattatccaacattaaccggcgttccgtgtattgaaccggttcaaaaccgggttcatgaatcggagaacatgttgaatagtttaagagagcttgagaaacagcttttagatgatgacgatgagagtggtggtgatgatgacgtgtcagttataacaaattcaaattccgattggattcaaaatctcgtgactccgaacccgaacccgaacccggttttgtctttttcaccgagctcttcttcttcgtcttcttcgccttctacagcttcgacgacgacatcggtatgttct

SEQ ID NO: 65455 - DNA, 504 bp, Arabidopsis thaliana landsberg
gaaaccccacgcacgatggaagcgaccacgacgcattgaacaaagaacaattcatgttagcacacaaaacacaaccaaaaagggaggaggagaaaggaacaaaacagcacccacagtgaccgcaaagaccacacaacatgagagaccaggatccgaagagcctgaaccgagcctacctgagatcacaacaccgaaaataaactataaagaggacatcaaagaagaccaacatctagaagacaagacagacgggtcaaactcaagagacgaacaacgagagcgaaggcggcagagagccgcgcacaggaacccaagagccgagactcaaatccatcagtaaggaacactctagctcacaagtgacaccccataatcaaggaaagagagggagaccgccaccgttgttgagaaataagaagcacagagaactacaggcgaagagtgcacttaaacgaggcaaggagaaccgcacacacttcttgggggatatgggggcaaccaaaa

SEQ ID NO: 65456 - DNA, 188 bp, Arabidopsis thaliana landsberg
atgttttggtgaaggacatttttgaagaaacaactaattgagtcttcatagataatacatgatccgagtttggatattggatgcacgagtttttgatgtagtcacctttgttatcactcattcttactcaagtactaggtaatttgtttttagtttttagtatttagttactagtttagaccgatttt

SEQ ID NO: 65457 - DNA, 195 bp, Arabidopsis thaliana landsberg
tgtttccagtccacaacacttaaaccccttttgatctacagagcaaccagtgtacaagcctgctggactcttgggtcgtaacacgggccttggacctcctgaatcaagaaccaaacatacacacccaagtactcgtaagctactgatccacaggaaaactttattctgcgccccgaagggtgaagagtctagcca

SEQ ID NO: 65458 - DNA, 109 bp, Arabidopsis thaliana landsberg
  unsure (1)..(109): unsure at all n locations
ttttggtcgatgcgccacactttctactagtgtcgaggcggaaacacacaaccnaaaccctacaccatataccctttactntaaaacctaaatcctacctagtatatct

SEQ ID NO: 65459 - DNA, 1083 bp, Arabidopsis thaliana landsberg
aagatggtcacttctcaccaggtcaatggttgcaattgaacggttttgcttcagagaatctgcaatcttttcagctccctgaaaccattgaaaatctttaagatagacaacagagcaaaaagagacaaggttttccgatattagagaagcgcagacacaatccagattaatgttataaattggatatatatgtacctcatcacctatatcattcatgtacaggttcagccaaaccaagctcttgcttctcttgatgtattcagctacatagaaggcaccctttgcggaaatggagttgttcccgagatctagcaaagccactttccctgcacacgaaaatgcatctcggtataactactgaattctacagtagaggtacggaagagttaatatagacgtatgacgagtgttctattggaaaacctttgtgggaagatagaccagccatcaaagcacgagtcccttcgtctccaatagagtttccatgcaaatgaagttcctgcaggtggaaaggccaagggaataaatcaactgttgatgacctttattcattggttgtctctgatgacatcagaaatcacctttaatgcatcatataagataacagatctaactatgaaatgtctcttttaatatagaaatggcacacgatatacatcgaaagagacatgaggaaagtttgtacccgtaaagacttgttaccctcaagccctttagctaaagcattggcacccaaagcaccaccgtaatttccactgaaacagattatccataaatcggtatgtcagggatatgaactatacagacaaaataaaaaaagcacgcccaaaagatatatccatctatagtcctaaactcacttgagatgtaaattgcgtattgtattattctcaagaagagctccagcaagacttgtgaatccctacctccatttcaaaacaagaagggaagaagacgcaacagatttaattcataaacttggtatgtcaatctgaaatataactgtacaacacatgaacagaaaaaacttacagaatagtcaatcatgttattattcagctcaataatcctcaaggtcgaatt

SEQ ID NO: 65460 - DNA, 1184 bp, Arabidopsis thaliana landsberg
caaaaccaaaaagaaaaatatcgttggtcattgttgttgttgctagcagctataaaacgtacgtgaccaatgatattttccgttgttttaccatcggatgagtcttcatagaggggtttgtgtgtgtggaacaattcaagccagggcaaaatcaatcttgggatcgtggcaaaagacaaagagataatggtgtctccatattttatctttttttgtctttaattcgttgagtgattatgacatctgcccacttttgttccatttccatcccaacttgtctgtgggcctttgtgcccacttcaattcattagctttcccaatcacatttcacaaatgattgttccatcgtttctatgttgctggttggtatttttaagattttgtaaaaacttttttccttgggtaacaagaagttgaacaatcaaataattttagtaaaaacattagtggacaaatgccactatgaaaatggagcttaaaattggttgtatccacaccataaagtagtagtgactagtgagtttcaactgagtcttatactgttgattcgtagttcaatgtggtcaattaattatttagagcagttttcggtagaattatgcaaaactcattactgaaatcagcatccaaataagctattttgaaatctcattacttaccaaaattcttttcatcaaattctcaccaaaatttgctagacattctaaaatgacttgatgcaatcatcaatgttttctatagtacaaactaagaagttgttgcgctacgaagtaaaagttaggttatatattttggttatagttcgcttataattttggacttagttttccgaatatatttatgtctttcgcgggcttagtttttgaaaaagtttcgactctattggtcttaattgagggataaaattctttcttgtacgattttaatttttggtcgaatatctcatatataccgtatgaggtcaaaaactcagccctcatgtgagcagctagctacgtgatcaaggagctgcgtaaaaaacacttccatgagttgcttttcttgatggaaacgatgcattcaagagatgatatggttgatattcaaagctgcctggaatatgaccaagtatatacagcagagccgcctggaaaatgtggagggttatctttgctatggaagagtagtgttcacgtggatctgaa

SEQ ID NO: 65461 - DNA, 1717 bp, Arabidopsis thaliana landsberg
acagaaactgagagagtcacatcaggcttataattcatctgttagctcatataccagttcctctggggcctcagatcaccagaaccatcttattgatttacccggttacgatccaaccagaattccatcctcagttttctctagtaaaccgggtaattcgacggaatggagtctagcttctaatgaatctttgtttagcatccacgatgggaattttagcatttcaacagcgttgagattggctgagataccgagatttgaagaaacggttcacgtgataaccgaaatcaactcggttcctcttccacctccggttaagaaaccaaatgaatatgagaaagagacgattgcagagaaggaaccataccaggtggagaactcaaactcagatattgaggataatgaagaagaagagaagatgagtgaagtcgagagcgacgacgaacatgaagaagaacaaacagatatgatcgaagcggaggctttagtagagaaagaagtaatagaaactgtgaaggagaataaacctgaagactcgaacagtatagtttcacattctccgtgcatttattgtcgttcggacactagcagtaacagcattggttctttcgcattcccactgtaagtcgttctcttcaaaatctcaatttatcgatccatttttgatgatttcttgagcaagaagaaactttaaaaccctaattttactttctttggaatttatgtaacagattgcaaaaagaagatgcagttaccaaaacgccgtctatgcaaatcaaaggaaacgtttcccacaagcgaagacccgagtatcagctgcctcaatcgcgaatgctacagccacaacaacaactacaaccttattcagaatctaatatgctaactgagtctcagccggaaccacaaccacaaaggaaggcatcaaaaaaattcgagtctcgaacgcaatcgctaaaagcttcaagaacctgctggttctcttgcttccattgtccttcaaaatgcggttcattcaagtagaggagacttttagcgtttgcgtttgaagcgattcctcttcttatgtgtaaattgtacggatgaaaatagttgtaaaccaagagtgatgatccaaaccgagttctggttttcaggattaacaccatattttggttcgattaatttcggttaccggatgttgtaaaccggttgatggatgatataactcttatgtcatggtgatgcatacatacaaggaccacatttcattattactttatttcaatacgtatcattattataagtagtagctaaaagacagatatatttcactaaaagaaaaacaaacctttttttcttctaattgaaaaggttataaactcagtctttttatccccataaatgtggctaatgtgttgtgtacatgacaaaattataaatttatatttaagaaaaaacattttaatttgctttatcttgaagcttcctttagttatatccttgaaaagaggcgattctgtccctttttcactttacaatttctcaatatttttgttataaagaaacacatctttgtcacatgcatttatgtatagtggcaggcgatttttcttttagcgtgagattatgaaattttcctaatataatgcatgtccatatacatatatctatctgtaataaatgttagcttcaagatcttagcataacattggtcgatgagagattgatacgtctagga

SEQ ID NO: 65462 - DNA, 1410 bp, Arabidopsis thaliana landsberg
catggtatccaaaaatccgtgcacacgtggacttatgtaagtacaggccaatatagcccaatagagcccgctttatttattttcccactctgaagcagattagaaagcggaaaaaacacaaaaggtcgtgaatgtctctgtccctttcttcctcagttctcacgcaagcttcaacgagaaaagatcggaatctcgccgtcggtaaagcgccgccgtaagtaaaagacggaaaaccagtagaaggaggagattgtatttatgtgtagcagcgtttagtgtgaggaaggaggagattttgtatatagttagaatttgcttcgaagacgatgtcgctgagaattaaattagtggtggataagtttgtggaggagcttaagcaagcacttgacgctgatatacaagatcggatcatgaaggagagagagatgcagagttatatagaagagcgtgagcgtgaagtcgctgagcgagaagctgcctggaaagctgagctctctcgccgtgaggttcgttttttttttcaaattttgatttttagggcttttggagaatccggagaaatctgtgtggggatactgattttgttctgattttgacagacggagatcgctagacaggaagcgaggttgaagatggagagagagaatctggagaaggagaagagtgttcttatggggactgcgtcgaatcaggataatcaagatggtgctctggaaattactgtgagtggtgagaaatatcggtgtcttagattctctaaggctaagaaatgaggttggaaattggaatctggattctaaatttagggcacaaaaggaaaagatttgttcttgcgtttatgatggatgcaatgggaattgttggaatgatgcttggtttgtgtaaattattaattcaatgaagaaagtattgtgttttctggaaagagagtttgtctgatcacttcaagcctcaaggtgctttcttgctctattcaaacttttgttgattgctgtgtgacatgttgaaattcaggtttttagatcacggtatgtgtgaatgatgggtttagtttgattagtatagatgtttgtaggaaatacaggggcaacaccggaacatatctttccgttttcttctgttcttaaggatttttcatgttgttttgcttgaatgtgtaaacatcttgtggcatgaagagaatgaaaggtggccagggtaaagatgctaggatgcatgagtgagtgattattggtgttagtatctatcatgatttatggtgattgatgagagacaataaacaaatgtttttgggtagggattagggagatactagcatttagaatttcttctcctgttataaatagcttggtcttttggcaaagcagcacccagtagcaaacctaaggggtttcacttttcagaacatag

SEQ ID NO: 65463 - DNA, 210 bp, Arabidopsis thaliana landsberg
  unsure (1)..(210): unsure at all n locations
gacccaagggaacacaaggacacacgagagagaagaggaccaggccaccacaccaaaaacaaaggccccacggaaacaacaggcccgacaacagacacggacaaacacgggaacgagggcccncgncaccgcaggaacaacaagggacacacaccgccgcggganggggaaccacngggcaaacacgcgcgaaaaggcccaacccaccac

SEQ ID NO: 65464 - DNA, 544 bp, Arabidopsis thaliana landsberg
  unsure (1)..(544): unsure at all n locations
cgcaataacctaaaagggtaacgagaaaaggtcgattttaacccgccaagaatctgtaactcgttctgaaactcggtctctgtttgtatagagaggttatcgagtctcttaaccgcgaaaagcttgccgtctcgtgtaatgcctcggaacacagtaccagagccacctttaccaatcacattggattcgtcgaagtcgtttgttgctagtttaagctctttgtaagtgaaaagctggagctttaatggcgatgcagcagcaacgtcgaaagggatggttctggaacggttcagaagagaaatccagaggtgatagatgaagtagagaattacgaagaagattacaagagaggatgaaattgtaagaatcaagaagagagtttttgttctgttatggaatagctttggtcgggttggatttggtcttggaggcatgtctctctgntacaaagatagaatcgtttctgaacattcggnatctctctctctctctggtatcaagtttaactctgaatctagctagctagtcgttgagaatgtctaga

SEQ ID NO: 65465 - DNA, 219 bp, Arabidopsis thaliana landsberg
ctttagatccttttctatctctaactctttagaatcaaaattaaaacactaatttattgctttgtcctcacaatcgtatgactatgaattgaagtgtcttggaacaagatttaattataattatttctctaaggtataagtttcttgaaccttattcgcttttataacttatgcccaagtatacatacccttttctaagttttatagaataagtagagg

SEQ ID NO: 65466 - DNA, 912 bp, Arabidopsis thaliana landsberg
tggcattttctataagaacagtgcagcataacctttctaaacttcgggtatggctttagattcatatcttagcaatgaaaatgtttttttcagacaaattcgttttagtttggcagtttgggtaggtgctaggtgcagctttataagagtgatgtcacgttaaaatcttagccagatatcaaaataacttttgtgacaaattctgtttcttgggctgttacaggatgtgtatctgcagactacttgccttgctacgttggctaacatggcacctcatgcccatcatttaagtgcatatgcctcacagaggcttgtcagccttttctacatgctttctcgaaagtatgcaattagttcctcgtctttttatgacttcataaatctgtttttgtacatattcctgtataacggatcatgaattgtttaacacaggtataacaagttatcggacttaacaggtgataagctccaaagtatcaaaataaacttgtccggagaggatgttggcgtttcagaagatctggtatggcatagttagttcaagcacaagaatatttcatgtgatcgttgctattccttgatttctggtacacttttttacatgtatcttggcaactgcaggcagcagagttgcagatctttactgatttcctgagacttgtcctagatatattaaatgcaattttgacgtacgcattgccgagaaatcctgaggtatcacttatttttctcagcagcatgaatcgcaaaaatcttttctagttttgcctgctctgattcttggtttctgcagattgtctatgcgattatgcaccgacaagaagtgttccaacctttcaagatcatccacggttccatgaactggtggaaaatatatatacagtatgctgcataggctttactcgtttgatc

SEQ ID NO: 65467 - DNA, 280 bp, Arabidopsis thaliana landsberg
cacaaccgacaacaccaccttgggggaaggggtgcctgtcacatccaatatccccaaccagatagctgccaaatactatcataatcaacacactctcaaatattacatccctcacactctgtctaacgtgtcctaatactaaattcatattcccaccttttaaaaaacatctgctctatattacagcatcattaacccgtggagcgccttatttacagacactttaaagctctgaggagaaccatacgacaagaaaatctccacgtgtgaaatacacttg

SEQ ID NO: 65468 - DNA, 442 bp, Arabidopsis thaliana landsberg
agtctcttctttacgttttctcattatacaatgtaattctgttttcattcttatagttttggttctagggttttgattcaatttctgctacatttcgtttaaccggagttcgatacagtactaccaaaatgatgaacaactgtttggtgttcaagttctatggaagagacatttggtcaccggtttactatttttttgttcaatattctcagtaacaacaacataactattgcacatacatcaacatagggattgtaattaaatagttagataaagaatcaaagtttagacattataacagctagcagaaaaaaacatagtgtagagtttggtggaatacatgtatttaaactcggctcgtgaaggccattatatgactcgctgtttgtggttatcgtcggcttataggcccattcagtgaacaaaactgcacaatatgtca

SEQ ID NO: 65469 - DNA, 525 bp, Arabidopsis thaliana landsberg
  unsure (1)..(525): unsure at all n locations
ttacttccataattaggcaaataactctcttcttttggcaacgcaactaatacaaaaatctcttttggggaaacgtacaagttacatcacaagcgtgtgacacctgtgaaagctgacctttatcttgaccnnnnnnnnnnnnnnnnnnnnnnnnnnnnnnnnnnnnnnnnnnnnnnnnngaaatcttacctaggcatattaccgcattaagtattcgtttttgcggaccggattggatgcgatacatatttggaatcttaggtccatgactgatgactacgactcgtttttattaagtacgcatcatcggaagagattcggatccaccgaatatcgatgtcgtcgaagatagacagatccttatttcagttactgtctctttgtatgggagggctcggattgnnnnnnnnnnnnnnnnnnnnnnnnnnnnnnnnnatgacccacgtaacgagattgacatttgttgcatcacagactgtatatatcattcgcacaatccgtgtttttgacgataatggcattatg

SEQ ID NO: 65470 - DNA, 650 bp, Arabidopsis thaliana landsberg
tcattcatctttacacacgcatttcacaacttttgttctatacattgtaaaattgtatatttcattgatttgaggaagatatgatttcttattcctcatattttatatttcaaaagtagaataattgttggtgaagcaaatgttgttttcgaattttcatatttcaagatgggaatcaactatgaacttcactttctatcagctttttgtggtggatcggtttcgttctcatttctaagatgtttttgaagtttttttcagtaatttgtattcttcttccaacaaaatatagtgattccgtcgtaaacaattttttatttttttggtctctttgacaataacaagaaagagattcaaatacttggaagctaaaccaaattcagcaatcgagctgtcaagcattttcttttgggttgaaacagattgttccattcaaattactagagaactcgtgaacaaatttcctttttccggttccaactaattttttcaattgtataaatattttgataaccggatttgaatccgagtatatgatctcttagtgttctcctacgtaaactgttttgttaagcgttcacaatcctgcatatataaccataaatctttatgttaaaatataaacttttgaagtgaatgcaataaattta

SEQ ID NO: 65471 - DNA, 556 bp, Arabidopsis thaliana landsberg
  unsure (1)..(556): unsure at all n locations
ggcgccatatgccttcgatgttacggaaaagaccttcagcgggctgaattttgccgagctcgttgcattgctgtatttgctgagcaggaggtgccgggccgactatgcgggccttgactgattgccctgccgagcggcttgtccgctcnnnnnnnnnnnnnnnnngccttaccatcgttgcagtttcaaaaaaatacaaacgatgaccttcgcattannnnnnnnnnnnnnnnnnnnnnnnnnnnngcacaagcacaatttttgtgccaggcactgacggacgctnnnnnnnnnnnnnnnnnnnnnnnnnnnnnnnnnnnnnnnnnnnnnnnnnnnnnnnnggatccgccgccagacctgcttgtgcttgactgggaaatgcccggcataaacggcctcgatgtcttgcactggctgcgctcaaacaaaggttttacgattcccgttgtgttcgtgaccaacagaaccctcgaagccgatatcgttgccgggctcgaagcgggggcggacgactacatgaccaagcccataagaagcgcggaactgctggctcgcg

SEQ ID NO: 65472 - DNA, 529 bp, Arabidopsis thaliana landsberg
gccaccaccaacaaatctatattctagcatgatgatgaagtagctacttgcttcttcttcttcttcttcttaaattttggggttttgactttttggtgaagacagccatgtttcaaagattattactcttccttctcattgctcttctgctccaatcttctttccttttagagatttcctctgctctcaaggtaaccaaatctcatcaaatcttacaacatttacatttgtgtctgtcctctgttccgaccaaaagacagaggatctttattagttttgcagaaacatacaattaatcatcgagtactatagaaattggtagtctaaaaatcttgttttaatcaagatcctctgtttcttgggaaatttaaaatatcctatctttccttattatttggttttggatcgtaggaaggaaaaacatgtataacaaacagcaactgtgacgctggattacactgcgaaacatgtatagccaacactgattttagacctagatgctccagaacccaacccatcaaccccatca

SEQ ID NO: 65473 - DNA, 564 bp, Arabidopsis thaliana landsberg
tgtaacgatgctttcccgatcaggcaaatatatttttttctaaaaacactcaaaagtattagaaattattcttttttttggggtcaaatgtaaaactttctaatattctgtaggaccaatagaaaaagtagaaaatagaatatatgacttttttttttttgagtctaaaatagaatataggactttgaaaatcccaatagccataaaacattataaaaaaaaaagactgttggaaatgatattttcttgtttaaaataaaatgatattcattggcataaaagctattttcaaagcaaagtggaacacttgcattttgcattgagcatcaaattcctccaccatctcctctcctacttctcatcttcatcaccaccgtctaaagattcaaccttttgtaactgcttccaatggcgttagctctctccgtcgcacctacatcttcttctttgtcttccctcctctgtcggacccctaacccttttcctaatttcagaacaactcatctgaatttcggttctcaaaggaggatttacacaatcaatcctctccttagatcgcttaat

SEQ ID NO: 65474 - DNA, 174 bp, Arabidopsis thaliana landsberg
ccgagcctatagcaaaaggaaccatacctgaacaaaaagtcgacccaaattttaggaaattgagctgctaataaatccagcgagacgccaaacaggaacgtaaaacttgactcaaatgacctaaaacaacaaactaacacacgccgaagagcgatgcaataagaaccagcaaga

SEQ ID NO: 65475 - DNA, 631 bp, Arabidopsis thaliana landsberg
acacaatcagggcggttggtggcacagacgagcttcaagtggctatagacaagttcgaaggccaaaaacatgtggacactttcaccaaggttccatctaaggtctaatcctcactggcttgatatgtccaaccaaacccgttatttatctttgctttccaagcttcttttgtcacgaaagtggctcgtttctgacatcgagtggcatctgtgtttgagtctcagtccaatctataatacattgattaaacaagagaatgtatgatcaggatatggttttgatgttcttgacattgccttaagttctcaactttatcatactctttgtacctaaacgtttggtctaagctaaggtgtggctatccataaatttctgttactacgccgtcaaaatcaatcaaaagaaacccaatttgtcagcccaaaaaacatgcatgagattggttattttgacaaaagaatattatcgggttcattccgccataaaatagggtcttaataatattctgcaataaaccaaattttaataccgacttgttaatttctgaatctttctttccttttttcggagcttttctctctggtttaggggtccggcattttggacacccctagcgtttgtgcctccttcc

SEQ ID NO: 65476 - DNA, 650 bp, Arabidopsis thaliana landsberg
cgcagcgggccgcaaagatcgaggccaagcagggtcgcacgctgtcgccggacgagttcgccgagctgctcttttcggtccagatcgcggtacaacgaacgtccgcaatgtcgacagcgcgcattggcgccgctggctcgagccgcggtttcgatgtgtggtcccctttacaagcttctcggaattcaacccgaatgctggcggcgacgtatggttcgcattcgacgccgaccggccgctggcgtttttcgccggcatctgggcaccacagtggacctcggtgcgcaaggtcagggagggcgtcgtgacgaccgatctctttgcgtttctcaccacgacgcccaacgccgaggtaggcgcggtccatccaaaggccatgccggtgatcctgcgcacggccgaggaggtcgagacttggttgaccgccccatgggaggaagcgcgcaagctgcaacggccgttgcccgacggcgcgctgcaggtggtggcgcgcggggtcaagcaggacgggccggccgtatagatcgacaccaatccgccgatcgcctgtcgcgactgacgcacacgaagaagcattccggcggttgatgacgctgaacggcgatcacaagtcccgccgcgcgcgataaaaaaataatcgcggccatatg

SEQ ID NO: 65477 - DNA, 444 bp, Arabidopsis thaliana landsberg
agaacgtctcatggattgtgggtttctgatgtttgtcgaaatggtgctttggtttgtttgtgacatttgcagtgattttgagattataaaattagacttggaattagttcttgaaccaagatccacccatttcttctctaaaatgttaccaaagcaattatatctattgcatagagactccactttttggttttccttttttttatagggttttacttttctttttttggagcaaaatgttacgttaaaaccaggatccggtgaggaagaagatggcggcgtaatcagcaggacacatatgaattcagcaaagcttctgaagaagacgaagttgacagtactgcgaacagagaatgtaaatctgaatccgtagaagtatacgaagagatgaatcaggccaagtgtgcaaagagataaaccatagaccactttttattagatgtt

SEQ ID NO: 65478 - DNA, 477 bp, Arabidopsis thaliana landsberg
gtgagaatctgcatctgcctgagtcagctgctaggtagagactcataggacatccatgttaggcacttgattgtaaatattatatagtatcattaataatatcaggaattggtgcttgcccacagaattgtcatttactggccattctcccagtctctgtttcatcccccatgccttcatttgggtcaaaagtttactgggtggatcggtgtccttatcactccatttgagatcatgcatggctactgtatcttcaaagctgtgagttacagataaatatactctcattgattgtagggtgcctcccttatcccaggactctgcctcattccaggtgatatcccatacctttttacctccatcagttgcagattctcatttattctcatggttatctggctatatctcctgtacctttcaacacctgatcctgaaccactacagctccatactcccacccatctacatttcctaccc

SEQ ID NO: 65479 - DNA, 433 bp, Arabidopsis thaliana landsberg
gtcttccttcagaaccttaagacaaaagctcgcttttcattatataatatcaattaggaaaaaattcagctaccaccaagcttatcttctgtctataaacagagacaaatcagactcacagatatatctaaatgaggaagaagattcattgaacaacatgtaaaggtgatgttaataataaaattgatcacaaaggtataaagaccaacctccaattatggctttaactgacgcaaacattgcttctatagtatcaggattacttgatttttcacttaagcccataaccattgataaagctcctagacgcctgtcttcatccgtatgccgagcctgtggtagtataactggtagcagttccagggcatacttacttagatcaatgtttacatttgctaatagaaatccaactgattgcaggacaatttctgga

SEQ ID NO: 65480 - DNA, 1371 bp, Arabidopsis thaliana landsberg
tgacagtttggaatttcctcatgtgacaagcgttgaagaaaaggtttgaaacaattactaagatttggtttctgcttttctctagaattcaggacatctttaacatagatatcaacaaatatggcctgcgaatgagaaacaaacagattgatgatttaaaaaaccaaaaattgagaggcaaacaaaacatttgcaaatctagtttgtttaagaagcagagcaaaataggaaaagtgaatttaattatacctttgactgttcaaatagagcaggagacgaacaagagaactcaagcagtagtcctaataactcagggctatccttgtacggaatccgtgaacctttaacttcatccatatataaactgtagatagcttgtgactacaaaaacaaaaaccgaattctttaatcaatacagttcatacattagattatttcatacaaatgtacagtgtcaagccagacctgagagaacaaatggaacataaatcttttacaagccctccgcatacggaaagagctctccataatgatacgaagtaatgaagcctgcgttgatgcaactctaacaaatgcattcttcgaaacagtagcgaattgacttttttccagaagaagacatgaccaaattagtagtctgtaacagactgtatcaaaacaaaatttcaactgcttttccataacttgaacaagcatggccgcaaaagttttcatgaaggtaacatttcccagtccctttacaatcaaatcatctacagctttccgtgaggcacggtcatcatatatagccaatgtttggaatatcatgtcaactataacaggcgcaatatcagacgtcatatctgcaaataaatcattcagagcaccagttcaatgtacaatctcatatctgcaaatacttctaaggacaaatccagttcaatgtgaatgatttgaacattaaacttcaaatgactatggtttaatacgagtttagtcttagagtataatcgcaacagtggaattattcgaatccataatgaatggttaccggaattctggagaatctcggggatatcatggcggaagatccggagtctgattaaagtggagcttgtagagacagagccagagatggagagaagagactccaacggagaagccatttctttccacggagattgaccggagccaggttggtaggtcaaaacggtgaagcttcttcttcttcttcgtctctgtggctactagggtttaagctaagccagtgggttagtttgcagaagatgaagagtgaaagacactgacaatgaatctgaaagtttgtttttgggcttcgatttaagtttgtttgttcattcgggcttttaaagtccatggataatggattca

SEQ ID NO: 65481 - DNA, 107 bp, Arabidopsis thaliana landsberg
aacctctgagctgaaacggccaaagaagaaaccattaccaacttggcacaaacaacggtagaacacgggggcctttagggggatagaacaaacagacacccacacaa

SEQ ID NO: 65482 - DNA, 509 bp, Arabidopsis thaliana landsberg
  unsure (1)..(509): unsure at all n locations
tcttaaacagccatattatgcgatttggtttttaaactaatttgttttttcattaaattannggggaatcattattataagtgttttttgccgtcgcatacatcgcaaactgtatagccaataccttcacagtacggacacttcgtatcttcaccaacccactccatgaactacaacattgaacaagagcttctctgctttaggctacttgataatacatacatacacataatcggagcggggttattttgattttactcacctgcggctcaatgtttggctcaccggttccatcgcactctacatcaagttttcattttaaaatcatcaaataatgtgctacaactcagtgcttgaagtgttactaaggttggtttctattagcagtctcaatttgctaagaaaaatcattcttaactttcaaagaacggatgattttcacttaaccagggagaagggatttacctaggcacatcaatcgaccctcccctcgacaggtgatgcacctc

SEQ ID NO: 65483 - DNA, 127 bp, Arabidopsis thaliana landsberg
gcgtaaaacgaagaatcaaaacgtacaaaatcatgcggaatctcatcctgaacgttttagggcttttttcatcttacggacagatagattatagaatcaggtcagaaaaaacggctgtagaaaaaca

SEQ ID NO: 65484 - DNA, 611 bp, Arabidopsis thaliana landsberg
tgtatattctctcttcccaaagttgctttgggtttttgtttcctattccttatctctaccatcctcttcttaaggctgcttgcaaattacttactcaccatggataagatttttgtaattctttaataatgtcaataatctgcagtgataacatctatagaaaatattataacttatgtatagccataatttaacctgtataatttttgaaatatttttatacaccaattttgatatcatgctcatttataatctgaacaaaatatgttttcgattaaactacaactccaattagtaatcatatattagcagaataaagtcttttaatgcgatttgtaaaaagtttaccaatcaagaaaatttgcataatcacgttaaaaagagaagtgatacctcatttcaataatgtttttttttataattttacctatacaaaatattagcaattagaaaaataagaaataattgtttccaatgaaacttacaccattttttgaatgatattaacaatttcacaacgtttgaaaatattgaatttatatatttttattatcaaatatcacttagaatttattaaaatattactttatttattaaataataatatattc

SEQ ID NO: 65485 - DNA, 498 bp, Arabidopsis thaliana landsberg
  unsure (1)..(498): unsure at all n locations
aatgccatcagatgcaggcagtgcgccttggaacttcgcaactatttgaaggcccctggtacaaaggctccttgccccgaaaagaagccctgtccgattatgcttgcaaatcccgactgcccacagcaggtcgcgtctccatttcgaatagctccgcaactttccggtctgcacaacagtgagcgcatccaggccgctctcgataaaattatccatcacaaggcgattcaagcactaagaaattgccagaagagtctggatcatgcggggcctcttaaacctataccgaacctagacttcgttgtcgccatgacactgcgtgactgtacgtgctttgcgctgattcctcccaacgacgatgaggaannnnnnnnnnnnnnnnnnnnntttgattggaaagaccccgaaaggaaatccagccattggcgtggaactgagaaggatcttatcgacggtggcttctatactgccgactgggttgtatgtggtgacacttac

SEQ ID NO: 65486 - DNA, 732 bp, Arabidopsis thaliana landsberg
aagaaacattcattcaaaatccaacacgtaccaaaattctttgtagtctcaattatttgatttcgccagttagtcaatattcgtttcatagactcgtagtacatcacttcactgaataaatatttcattttttatcattttattttaatgctaaatatgaagtttgatattgggactataaaaccatgggtggtaaggtaatgatgaaaggaaaaatagaaggaaataatgttttcattgctttggaaatcagcttttttatatcatcaacaaataaatattattgtaagaatcattaaagaaaatgttgtttataataatgataaggagatggaccacactagtccctatatatcttgtgattgggcattagggaatgatgaaatgtatttttttttctagtatatcagtcaaagtaggtcaacaaaataatttcaacaaccgagggccacgcttatttcaccttttccaatcaattattcttgtaatttcgaattctaattctaattatacttagaccgttatcgatctgtgacatgatgtgatttgtatgtacatataagacagattctacctctgagtgtggtttattaacttattctctctgcgacaaaataaaataaaattattctctctattgttttcatatatttaaatcattaatgtgtttttcctttttcgtcgaaataaacatattatagtgtgttcggtccgagtccaaaaacagtttcg

SEQ ID NO: 65487 - DNA, 423 bp, Arabidopsis thaliana landsberg
ctaaggaaggcggcgatggcgggcaagacgacatcggcctggtgcaatgcgcgggtgtcgccgatgcctaccgccgccatccccgcggcatggatgctggcgacgccggcggcggcgtcttccacgccgaggcaatcggccggggcgagtcccaggccggccgcggcggccaggaaaatttccggatcgggcttggcgtgccgaatattcccggcatcgaccacgtaatcgaacagctcggcgatgcccagtcgttccagcagcagcggcgcattgcggctggccgaggccagtgctgttttaaggccggcgcggcgtgtcgcggctaccgcttctcgggcaccgggcagaagattcttggggccgaagtgttcgatctgctggcggtagtaatcggtcttgcgcgtggccagcgcgtccttc

SEQ ID NO: 65488 - DNA, 694 bp, Arabidopsis thaliana landsberg
ggttcatgattctatagtccttttctcgagttttgtactttcttttttttccctgcacacgatattgaccactttttttttaactattttcactgacttttatggaccctattgcatttgttactgctaggtccccatcctataaatgttttccttttcaactttctttttttctgagtaacttcagagaatccttcaacaaaaaacgagaattactacatacatatcaaaattaggccgaaaccaaaacttacttgtggaaaaaatggcatatgattaggacattggacaagccgttgtaatgtcgtggtcaaagtccatactattgattacttcaaccaacagctcatcgtatccgttggtttgtatgactttatcaaccgaaataatactctgatcaaatcccaaatcggacgaccaaaaatcgaaacgtggagggagggatgaggacccacaaagaggagtcccacaacggaatttaaatcgttgggtcatttaaaacactaatcaacgtggtggtccttctttacgtgcaacccaacacggcttggtgaaaccaatcaatccgccaaattaaattcacaattctaaattgtaagtatgtaatttattactagtatacattttgttgtattattgtagaattaccctttgtaaatatatttaagtattcatattgggcttgacctgggtt

SEQ ID NO: 65489 - DNA, 720 bp, Arabidopsis thaliana landsberg
caagtggccagttgaaaattcttagtggtcgcatgactagttttagaagaggtcgagttgtgaagcttatatgaaggggcctcaaatatgactatcccttttacacaccaaaattcgacgccctcctgtggccaattgaacctttgtgtgatttatcccatatagatttttaagaattatgtgttaggtttagaaagaagaaaaaaacttattattatgctaatttgataacaaatctacagaatttattcgaaataaattattggaataactcatcttgcaaataaatcataatatctaccaacaatcacactacaattaattaaaaattgatttacttctaactgttttggaaatgcaaaaactaaaaattttattttatatatatgttcatacaacaactcaaaatcatgttattttgatgaatatctataaactattaaagctacatgattgagtaacttatctaggaaataaaaatcatcatacagtatatgcttcccaaattatcacaataaataattaaattaaaaatatatctagtacctcattagataatagtaaaccatatctatgagaatataattctattatggggaatattacctaaattttattctatatgtgacattttacctcaataattttttgtcaccttttatacaaactttcacacacatctttctttattaatacccataatcaaccaagcaatcaaca

SEQ ID NO: 65490 - DNA, 1751 bp, Arabidopsis thaliana landsberg
agaccttgttgtgttcatcactcagtcataacaaccataagagatggccatatataccaaactaaaccaaaatgattaaacaaaattaaacataatgtgtttataaatcatttaaattaaaataaactgaaaatcaaatgaaataatacaaaaactacattaaattataaatgtttttttccattaggttttcttatttatttatctcttttggttaaattggtttcattattatcaaatgactaaaaatgaaactgaagttataaataaacagaaattcattaaaaagttatattttttaattatatatgttaaaaagtacttgtatattaattaaagcactatttacatgaagttgttttccttattttaaaaatcaaactgactctaaagtctaaacagaaaatcaaatcaaataaaccaaaaattacattaaaccgaacaaattaactaaaactgtttttttttgtcgacacgaaaacttaaaaactaaactctaggtctctagccaccgaaaacagaataaagagagagagaggagaggtacctgaaaatagggccatattgcttagcaagaacggagaagacatcaggaccatacttagccatcaagggcaagtgaccaactagaggcatagcggttggaccgggaacattgcatacggaccaggagggtcggtacaagtaaatcacaattacaaccgctgcaaaagtcaagaatgcaataagagcttcgtgttgtgtcaagaatggatcaagaacttcccaccattgatgttgcgtcttcatctctctaacctctaaagttctctcttctttagtttaatgtgtgggtttgtttgttaggtggttcattaatttatatagtagttgatgtgcttttgaaaagtgggttctacactctttccactagcccacctttagaatagcgtgggactatttcgcaagaagacaacatgcgttgaaattattagtcaagtactcaagttctcatctctactagagagtaatattgctaagttattgtaacgcacggaatccgtattaatttttatgttttttttcttgtcaacatttaattatttagtgtttaattcgaaactatttaactatatttaatactcctctatgtttgcaaaatttacatattctaatatttttatattctgaatgttagttttttgtaaatatatgattataaataaacagaatactatcttttgagtatggggtccttttgatgtttgaccaatcttcacccatccttgtacttttgttacactactatcaagtgcctctacttgtcaaaggggtttaccgtcaattggagtaaaccacgcttctacttttggtctcctttctccacttttttttttctctcttttattttggatcacaaattgttcttcctttttcagttgaaaaaattattgatggttctttagttttgtattttaatgggttagggaaagaaatggctatatatggaggagattgtttcgactttcgagtttggacattggaatataaaccaataattgataaaggagaaatttgatcattgcatgaccatcatttatggagtttggtgttccttttctatcatgatattagatcattgtcttaatttttggtttagagttaataatttttgttcaacatttctatattgttatacaaattttgaagtcttttttttttgttttctttcattttagaaccgtatcttctctctcttcagatttttctgt

SEQ ID NO: 65491 - DNA, 1226 bp, Arabidopsis thaliana landsberg
  unsure (1)..(1226): unsure at all n locations
gaggctgctccatggtgttgcatatggtttatcatggtttgggaaatgggattattttttttgggatggaagctttggggtcaaaaaagatctgtattggcgagctattctcactcttagctcaatagaagttgacaagatattggaagaattatctggaacaagtaaagggagagtgatgaagaagatcatcgatttctacagaggatccactgaaagccctttggccactctctctgatttgcttcggttcatgcttggtttcatatcaaaagctcccattgagagaaagactgcaatggcactagtagcaatgtctttagatcatgtttcatatcctactcttagagctgatgagaacactgaggtctgcacatcccctgatcaggaatcagatgataatggatatgaatctggcagagacactgtccttgatgatcataatactacaacatcgggcataaaacctcctcagtattactcatttgatgatttgagcaggagagaacattctagatggcctggaaggaggttgaatgatgcagcccaagcggttctcaaagtgtttaaagagcgaaatagcaccattagtcgccaagaccttcgggaggctgttagaagtagcattggtgatacgggattgattgatttcttgctcaaacacattgacaaagttctaataggtgaccagatagtgcagaggtccacaaacccgaaaagcaggatgttacagttctccctccggacaatcaattcccgtgttcaagagcaaaaacggaaaaagaaaaggaaagtgaagccgcaggaaaccagtgaatgcacatctaccactcctggactgagtccgtacgatgatattctctatctatatcagaatctcttgttaacttatcctgattcagacttatacagtgaagcgtctcaggttatcttgaagtgcaagagctttgtaaaagaatggtcttaccaggaacaaaatcatttaacagttagctgccaggttcttcccaatcatgaagaactactcagagacttcactcggttattaccccctggtgacctcgtggctgttccggaaaacgcaaccatcagagaactgaaatctgcagcagagaaagttctgagggacacttactgcataacagagacattngaagtgttggagataagaaacaggtatctcgagaagctaagacgacacgtgagtctaaaatcacaagggaata

SEQ ID NO: 65492 - DNA, 803 bp, Arabidopsis thaliana landsberg
ggtgcaatttcttgaaagtaccaatagtactagctagaaatatcaaaaccttgtcactaaagaggttatcatgcacatccatgaaaatccactcataaatttgaggcttagggcaaacttttcttttttggaccttttgttatgatttttttttttgggcattctttgaagtaaattttgagtgttttaacatttttcaaaaatatgggctcttttgtatataaaagaaatcgtttagatataaaaatgagactttttaatatatcttataacaaaatttggaatttttatcaattatattggacaattatttttttccaagaataaggctttttcttatgtaaagtttttaagtagggataaaccttaagccgtcgcacctctgccccatcctagtgagccgggcctgataccagtgttcaacataaatctgcttgagagtttatagtgctgagattacatttattaccaccaacggaacatccaaaatacgctagattcgtcgattgagaaccctcttaaatatgaggattttcaatacgaaacaagatttttttaggacaaattttttttatataagagatttaataatacgtaaatctagttttaacttcttataatttttataataatagtaaattacaataatttataataaggttaattttggtattataaaaaaaaagtccaaaataattaatttgatcaataaagttttgaactctctcctcttttcttctcaaagagggcttgagttctaagcaacatgctcttgtcgtgatccattgatttacgagaagctc

SEQ ID NO: 65493 - DNA, 571 bp, Arabidopsis thaliana landsberg
tcagtccggtcgcctcgaccttcacccgcttattgctgtcgtaaaccaggcaacgtcggccttgaggtgcctaactcatctcacgaattaaattgctgctgataaggctatgccaccgagtcccgcccgacatcgcgaacatctctccatcgaaaaattcgcttttatatggggcggatcgctcaatccggaggtattcctcctcgctcaatttctccgctggtttagcagcgccatatagagactttaaccgacgtcgtccagccgctcaatatgagcatcacaccacgcttatttgccgccaggtccgtatcccttcgctggggttccgtccggattgatatgatcggttgcccagagcacgccgcgtgtgacaaggtcgagataccgtggatcactcaccgtctcgttgttatgaccgattgtggtgctgaacacgcgggtttttttcgggccgtataggttcgtccaaaccaccacagtctccgtcgatttctcactcccgtctttctgtttgaaagtctgtttgcctttcgcgagtgggtgggcggaatccaagatgtggatattg

SEQ ID NO: 65494 - DNA, 475 bp, Arabidopsis thaliana landsberg
attctctgttaaccttaacttgagaagcacattcattttttgttttgcgaacatctttggtttggttatacgggggtgctttgagctatgaagatgtgcgtatgtgcttctagtagagagctttagatatcacataaggcacatctttacttcgcaactcaaatgaaatgaatacgtaaacctgggcataatacccgaacccaaagaaccgaatcaaatccgacccataaatctcgatccgaatccgaactcgtaccgaggttcaaaatatccatgcagatcctaaacttcataacccaaaaacctgaacccaaacccgaaccaaacgcgaacaagtacccgaacatgcccgaaatataagtgtatagttaaacatattagtaatatttatatttgtaataacctaagtgtctaaaatatttgaatgtaaacgtctttcgaatattttaactacttttggctctataaagcactc

SEQ ID NO: 65495 - DNA, 444 bp, Arabidopsis thaliana landsberg
tggcgcaggctgttttcgtcgagcgcacgcaccacggcgccgtttgcattttcccgttcgtcggcttccacgaccgatgggtacagcatctcgggcagcgtcacgttgcggtcgaacaggcgcggccggttctggttggcaatgcgcatgccgtcgcggaaaccccgcgtggttaccagcaaggtgcgttcgcccttgcgctcgagcagggcgttggtggccacggtggtgcccatctttacgcactccacccgttcggccggcaccggatcgcccgcggtcaggcccagcagctggcggatgccggcgacggccgcatcgcggtactgctcggtgttttccgacagcagcttggcggtggccgtgctgccatcggggcggcgcgccacgatatcggtgaacgtgcccccacggtcaatccagaattgccacttcatagtgtcc

SEQ ID NO: 65496 - DNA, 124 bp, Arabidopsis thaliana landsberg
gttgtctcgaattcgattggtagagattttgaacaatgggatgccattgtaggaacttgaaacggttctcgttgttcttgttgaggaagattcatatcccattcttctgtgtgagctgttagaa

SEQ ID NO: 65497 - DNA, 141 bp, Arabidopsis thaliana landsberg
  unsure (1)..(141): unsure at all n locations
gacagagacaaagaggacaagggcgacggaaaancccgaccagcaccccgggaaagcagacggaacaaggatgcgacagaaagcgcagaancgcccaaagccacacacaagggggagagaaaaacacngagncgaacaccc

SEQ ID NO: 65498 - DNA, 399 bp, Arabidopsis thaliana landsberg
atattttctggatccttctctagagacatacacatttctctatttgttttgtttttttgtgtggaaaattgcaggcgatctcgaatctcggaacacagtgcatgcatgataatagacatatctatttacgattcaaatctcacgtcgtctctattggtagctccactggctatcaaaaaccatattttatacctgttacagtatttacaattttaataaaagagagatatttctattttctatattaaacaacattatctcgaagatgcatacatagttccatactttagtctttgtcgcctatataagctgtctcatcttgaacgcgcttcttctttgaagagacttttacacatggtcagtctctctcatctaattctttttaagaaatttaaattt

SEQ ID NO: 65499 - DNA, 125 bp, Arabidopsis thaliana landsberg
tctcttcctactctcaccgatgctccacgatccgccactccctacactcgatagatattatagttttatagagatagatcataaaccaaaacgtaactatatgatttggacacatatatataccc

SEQ ID NO: 65500 - DNA, 294 bp, Arabidopsis thaliana landsberg
  unsure (1)..(294): unsure at all n locations
gccgagttaccgccacgggctcgccctgcgcggcggcgaccagcgccaacacgactttanaaggttagttacacaancaccgacagcaccgagggcaggcgcgccgcgcccaacacaggcgcgaaagcgcggcgcgggacgaaagagaaggccagggggcggcccacggacgacggaacaccgccgccgaccacgaacagcaggcagccgacaggctgggccgcggcgaacacctgggcggccagcacgccgggcacgccgggctcggcgagcaccaccaccggcgccggcacg

SEQ ID NO: 65501 - DNA, 714 bp, Arabidopsis thaliana landsberg
gcatcgctccctagagtcgaacgcaccatgggtgcggtgctgtcccgacggatcgggttcgagctcgagctgctggcacccagcggctcgagccggcgaaccctcgccgacgagctcgcgaaccggtgtggcggatcggttcatccggtgtggcacgtcgacagcgagccggtgcccatccaggcactcggcggtcggttcatccacctgacccagggcttcgaggtgcgccgcgcgtccggtgggcaggtgtgcacgctggtcgacgacatcacgatcgcggcggacctcgacgcgacggcacccgctccgcccggctggcatcggctgctcaccgacgacctgcgcttcgcgtggctgctcgatcagcaatgtgacccggcggcgcccatcgacctggtgctggacccggtcgccacgctgtggggtgccgaggtcgagacggtgggaggggtcaggcgcctcgacacccgcggcgcaacggtcgcgcttgccgcgccgtccggcggcgaacgcgagcggccctgcgagatcgtcaccccaccgatcgcggaaggtcacgccgatgtgctcgaggagctgctcgagccggcacgggacctcggttttaccgtgccgcgcgaggccgccgtccatcttcatctcgacggcaagccgttccgggacgctgcgacactcgccaacgtcgtacgcctcttcgcgcattggcgggag

SEQ ID NO: 65502 - DNA, 1062 bp, Arabidopsis thaliana landsberg
tttctttttcatttggggttttgttttcactgtttacacgctggagatgagaaaatgggccaatgtggtaaattaggcttttaaaaagtttttgagagaagaagacgagactagtgtcagatctcgagatttgaatcggtgttgaagccgtcgccagaatcagttggataggaaaatggcggcgaagcaaatggaagagatacagaagaagctagggctgctaagttaccctagggcaaatgctccagctcagtctctcctcttcgccgggatggaacgttatgctcttctcgaatggctctttttcaagtaactctttcttcctctccttcttttatagcttattcgattctcttctaccagaaaaatgctgggaattctctgaattttgaatatcaatgtgaactctcaacattttgaatttctcgagctctgatcacaaaattcgatggggtttacttattgtttcttctctggctctgtctttgaaggttattaggtgataaatcacctttctcacagcaaaatctccaaggagatgctggagttcgtgatgaagaaactgttcgtattcaatgtaagtgtttctttgatcgtgttggcctttgaacattgcctagctattatcttagactatattagtttttgatgtgtaagtgacttctcggtttcagatttggcagagattgcaaagtttttggggattacaccaactgtagacattgaagccattcaagtaagtttgtttcaagtagccttactggatttatgcatttacctgtatttgctcaagttccataatttgtcaaagtgcaagcatgggttccacttttcaattttcttttgttttgcaaatctttcaaacttttagggacatggaacctatgaagatcggatggaaatgcttcgcaatattgttgatttagtggaggcgagcctcttctcagataatcaagaatggaggtagacatgtcacttgtatctgatatcttccaccagtttttatcattagtgtggcatttttgtagtctttcatcttccttattcccgtcgactttagta

SEQ ID NO: 65503 - DNA, 534 bp, Arabidopsis thaliana landsberg
aaatactcttctaatattaaagttttaaatcaatgccccgcccaactctaccttttccacgaaaacggaataaagtgtttccgggtgaaagaaaatacttttcaacgatagattgtgttgctatttttatagaatatgttaaatttaagtataatataagataggttcctataaaaaaattgcgtagaaaagtttagctttgatactccatatagcttatatattagtgcagcgaggtgatacgtttactagtctaacttaacaaaaaaaaaagagttaattagtttatatattgattctttcaacgtaatcaatctgctttagacaatccgtcccaactcccaattatatctgtcattcaagtatttgattacaagggcaattcatttcggactagttgattgtaaatttcgtgtctcgttatctatttgaaatagtaggtctatttagggggtatacatctggattgatagctgataaggactatatacatgtctttttgaatttttgatatataaactactattcaaaatt

SEQ ID NO: 65504 - DNA, 1500 bp, Arabidopsis thaliana landsberg
aatagtttatcaaagaaaacagtcgtcttacgtcacatgaattaagaacaatatgttatacgaattcattactatctattgaaagttacactcaattatagtagtagtctagtagcgaattcattacatgcatgcacacatttgctttttttttttttgggcaaaatcacacatttgcttacatttacaaaattgatagagaatgtaaatgagccacaattgggctttaaacctgtaatgggcctaaaccggcaagcaaattcgtgatagtttgagcagctatgaatgcgtctcttacccaaaacttactcaaaatagatggattttgtcagctagaaatgaaaacatgaacctatacttcaaaaaaattccacatttggaaacatattaagaaaactgttaaggacgtatgtactctctctcacatacaaaaacactaaatatgaagacaaaaaaaaaaaactaaagagagaggtttcagttatggcgtggaggccgagtggacggcttcggataatctgcaaataagagcggtggacgacgatggtggtgcttcaatggacccggcacaaaccgagaaactttaacgggttctttagatgtcgaactagagacaacattttgatcctaagccacagaaaaacaaaaagaagccttagttttgagaaggtgataaacagataccgcaaatacgaagaacatgaaagtaaatgaaaagttgatgaattgaaatgtggatcaagaaccttgacgagtgaaaaccgagacgctgtaatgtggacattgtcgaggtgacgagaatcagaatgatgcaagaagagaaacaagagaaggatcattgaagcaacatggattgagctcattggtcacaacagaagcagtcatacaaggctcatcgactaagaggattatgaaccgttaaaagacttaataggtagtaggagactatataataagagcaagttcacgcataagtatttgaatgtaagaattaaatcacagaataaacaagttttttatttaatcaatccagatgaatgtgctggaaaagctcatgggaaaagccaaacatgagtcaaaaagagagaaagaaacaacaaaaggaaaaggacatataaacctcggtgaaaaacgagtgatttactacttcttgtctcttacacatctcatttgagaccaatccccaaaacttaccgactaccacggtaaatattctattaagataatgcaagctagtttcggattgcattattatatgaaaaacttaaagcactttttgaaggcaattgttttaattaccttaatggttttgtctgcctcgaggatggtttggaggttgacgatgactgttaacactactttttgagctttgacacaatctccgagacatcttgtcttcaaaaagccctattgaattgctcaattcctgcgtgtttctaaaacaaataacacatgttagttcaaagtaaaagagcttcaagaaccaagaacccaacatct

SEQ ID NO: 65505 - DNA, 1022 bp, Arabidopsis thaliana landsberg
agagacttttaatttttgcaacctaaaataaattgttatctcacattcacatttaaagccaaaaaagtgatagactacaattttgtaaaatatagtaattgagagatggtgagagcataggtcggccatctttgaacactgatattagttggtatttctttttaatatatagttttttatttttgtcagccatatattgatatattaatggttttcgtaaacgtattaatcaaaaataagaatgatttgaaagaagtcacgtataaagaatatttgagccgaataggatactagtgctcttcgatcgcatgggaacatgttggcccgggtacatgtacacacacctacaggtggttgttgtatatgttgtgggtcaaattgtgtcatccatactctcaaacttttatagattaataagtaatgaataaacaatatgagtcatgaattagagcctaacattttatagattttctttaaaccattttttgaaataaaggtaaaaattgttgatcttgtcgttggttttacatcagttagagttttctaagtttttaactatataaaactcactaaactgatattgttcatggttgtttagctgttggtattatatataacttttgaatagaatataaaaagagcacaatgtttcacttcaaatagagagcctccgatagttttgcaccttatctgtcattccatgatgtcatatcatatatgacgttctaacccggactatgtatattgagtttggactgcctttattactatactttaagagatattcgtttatgcttcaacaacgtttttggttatatgtactgtctaactgtttatatacagggacaatccctagatttcttagaaggcggtcgtggattctagtttatggttgtttgattgaacaatcagcctctgagactgctatgatttagcttccacggaaccggacttaggtggtctttgctcaaagtatatgaggatcgtcggatctcgaaggaaaagagttagatttgagaggg

SEQ ID NO: 65506 - DNA, 321 bp, Arabidopsis thaliana landsberg
agtcatgactctctctctggtcggctttggcgtgccggcttatgcgtggtcacgtccatgacaggctgtctcggcctgggttttctaggttctaggatacaatagggtagcctacactcgtttattttttccctcccccgtccaaaatactcacttgcatgactgatgcccccttggcccgtttcgtgtcgtcgacgtagttcgggatttcgctgcattgcggcgtgctccgggaaggctgcccaacctggcagagccaaatcagggacgaagtgagaacagagcgtacaccaccagggccatgcaacctcattcagctgc

SEQ ID NO: 65507 - DNA, 376 bp, Arabidopsis thaliana landsberg
atgcccgttgctgcatccaccaccaatcctttcggcaggttgtccactgaataggagttaggcgtttctccggaggctaccactgtgaacaggaacgggttgccgggccttgccccgaacacttttggcgaattgatcctgggcagttccggtggtggcggtgtaagaatatatctatcatcatcattcgggatattcatcggaaggcttcccccggtcatgataaatttcgcatcggcccaatcggaataattcctggcagcgtctttgccattggtgaccagcaacccgaggcgttgaataccttccaggtttacacgcacctgttttggccggatttctgccccgatatcgccgctggcaaaatatatttttt

SEQ ID NO: 65508 - DNA, 406 bp, Arabidopsis thaliana landsberg
cgacactggagacaatggcagactttgacaccccaggagaggatagtgcttttccacagtaagggccacaacagtcatcgagtctttttagcatgcttgagcactctaaaagaatactaagataaatttaccacttcccacatgaaatgaagctgaaaagagaactaaatttttaccccatgtacatccctaacagagggaaacctcaaattacattatgaaagacaaacggtacatagaaacgaaactgagaatttcaacaatatccaaagtcaggcccggccattaacatgcacgggactggaatacagagccctcgagtgggggcagccacatcatactcaccaccattatgatcatgatcatcatcatcctcatactggattagctcaggagcactgatacc

SEQ ID NO: 65509 - DNA, 438 bp, Arabidopsis thaliana landsberg
ctcatgatcaatataaaagtaatgttaatcattttatttatatctcagatggtattcgatattataaaactgatgtcaaatactaatatttaagtagtatagcacaaaagattacaaaaaacatcattattcttgaataaaagggaaagggaaagtggtgataattatgcataatttattgattccataagtcatctcttctccttttcaaaatctttactttaaccactcaaaagcaaccaagtacatatacatgagcgattatatgaacattatgcactaacttcatgatgtgcatacgacaaagtagtgacatatacttatgtattatggggcacaataagaggcccctcgctcttaatgtcatccagatggaggataaagacaaactaattccatcattcaaaaccttcttaagcttttcaaattttattttta

SEQ ID NO: 65510 - DNA, 760 bp, Arabidopsis thaliana landsberg
tctaagcgcttttttggcggccttgccatctgcggcagttgccagcagcggcgcacatacgagcatcgtcagcgcgagcttctttaacatggttttccccattcatttacgcagttagcagcgagctgcccctcgctgcgcgtgccacagtctaggcacatgccagaggccgcacaagcatgccccgtatggcctttgattatgagcagacggtcactttttgcatgcttggactcaagccagttgtgggggctcaaggtccaacagtgaacgcagtgtgtgcagcctttcattgagtgtcgcgctgtcatacggctgcgccggatgcttgccccagaccggcgctggccaggcagggtcgctgctgaaacgcacgatgtgatggatgtgcagctgcggcaccatattgccgagtgcgccgatgttgagcttgtcaccagcaaatgctgtcatcagtgtgcgacccagcaaagcagattcacgccagaagcgttgctgatccgattcatgcaattcataaatctcgcgcagacccgcgcgacgtggcaccagaatggcccagggatactgttggtcattcatcaacagcagacgacaaagcggcagatcgccaaccagaacagtgtcggcggccagttgtgggtgcagttcaaaattcatggcgatctaagaataggttgggtcgcatggccgcatgatagcgcgtgcctctgccagactttgtacacttgggctcattagatcgttggggcgcaatatg

SEQ ID NO: 65511 - DNA, 1748 bp, Arabidopsis thaliana landsberg
tatccttagaatcatttggcgcgttcataagtggtttatccaatatatcatcaacaatttcttcaatcaattttgcttctttacccctaaaaaggaaaaaaaaatcacaaactcgaaacaacaataattcaagataaatatgtaacatattccgttttctctttcgtttttttttgtttttttggtatgtgttatccgtcgcgtgttttcatgtattcagtataactttcttgcttttagaactacccaagtgtgtttgtttttgtgttctccggagtttttttagctcgtcttttagtatgtttttataaaaactcattttcaggtcttacaaaaattggataaatcaaggagtaccatgtaggatcaataaatgatgcactaattggtagacaattagaaggtctgatcagaattattccctcttaaggtttgatcagaattatttcctcagtttcacaaagaatgtcattctatatttttctacacatattaaaaaaactattaaaaattctactataccttttattaatatgctaacaaaattatttctcttattaacacatagaaaagaaataggttaagaaaatggatttttattcaaaattttgcatggaaaatgcaaaacgactctctttgtgaaattaaacaaaataaaacctttaaacgacaatttttgtgaaatgaaaggagtataatattgatatattagactatgttatctataagtctctttatatattttcatcattcttatatttttaatctatatagtattatgagtcatttgatcaaacaaatttttttgttctctcgaacacacggtacaaggacattcgtcagcctcttgaaatacctacaaactatcttggtagactttaacctagggttcacgattaagtagccgccttaagtaaccgctagagacattgccaccaaatgatattatgtgcccttagaaatttgtcgttattagcggaactcttctgttatctaacacgttcttgaaatcaaaaaaactttctccatggcaccgctcaagcaataattagtgcattatcacctctattgactctacaaaactccaacacttttactttaaacattaattcccatattgcctttgaaaattttctccctcatgatatgaatgaatatcgtggcttatactggttgttcttggatcgattgtcatcttcacacaaaacattgtgattttccaaactgtagcacaacaatatcccgcccatctcccacaccgagttagaatcattgctagaataattttgtccattgaaacgagtgttttctaactcagcgtactctattgttacagcttcgttgcgaaaattgtgcgttggaatctccaagaaaatggtgacaaactgctcatgctctaacttatgtcgccaacaaacaaggggagctgttttcttgggacggtaaatcactatcacgttaagtctgcaagaccattatgaccaggacgtgttgtcgtggttaagcgagggcgtgaatgatttaggttgcagagtcccattggagttaggaagaccaaacagttgagttcagaaagtttattgctgatcgggcatttgactttgaacaaacaaaggagtataccatcgctacaaaaatcagtcgtcatacaaagtcctggttcacaatcatagagattgtcgatcacgctagcctatgacaagtggtattagagtgaagaacgttgttgataacattgtatttgtatt

SEQ ID NO: 65512 - DNA, 805 bp, Arabidopsis thaliana landsberg
aggaagaccctaatcattggcttcgaacttattctcacactttctttctttagcaatgaaatttcaaattttgaagatctgatttacaaaaaccgttgattaaaaatgaaaccttcacgccattgttcaatactatcaaagttcagtgctttctctataaccaacaatcgacattggaagaagaaaactctaatcttcgctagttgaagtctggtatgcttcttctcccttttcacgaactgggtttgcttaaaaatcgcttcttcttcttcttcctttagacatttagtttttagggtttcgtagttaacagttacagtgtaccagtcaaaccaaaactgggtcataatttaagagttacgtcttttgttttagaaaagaaactttctcaattcttagtgtatctttgatgaattccaatgtttttcctcagacaagaaacaattaaacccgttcttgtctttttgctttgcaagtgtatgttctctctgacttgttcacaccagaaaattcctctgccatacaataatacagtagatagataagttcgtttaggctccacttgtatctgaatcttttaactgttttgtgcagattggtaaaaaagaatcagaatccagtgaagggtctaaatatgagtttccacaccatatcatgtaagattcttacatctctttacaagaacctgttctcttttgttatctcttcttattcacacacttgtttcttagataaggctaaaaaggcaaacatgtgaaatctatggctgataaaaaagggttttgataagataatgaaaaggcca

SEQ ID NO: 65513 - DNA, 764 bp, Arabidopsis thaliana landsberg
  unsure (1)..(764): unsure at all n locations
ataacttacaggggggatcatgcggtttcagccaaatagacctgctacgaaagcacaagcagctgtagcattaacaagcggtaaaatggtgaaagctatcacagcagagctatcaaggttagaagcagnnnnnnnnnnnnnnnnnnnngagacagaagaaatcagatcggaattgctagaaaaaggcgagataaggcaattttgggatgagaagattcaggcagagagatcccgaggatttgagatggaagagctgtatctctctagagttaatgaagtagaagaagaaaaaaccactcaggagaagtggtctgcggagcgtttgaaagagaaagcagccatagactgtcagaaacagttgcttaatagcttgactgaggagattgatgagatgtctcagaggctaatatctgataaatctgtttatctgactgaacacagcaagttacaagagatgctaagtgacttacaatcaaaacttgaatcgcttatcgacaaaagatctatcctcgaagctgaagtcgaagctcttcggatactaaggtaaatggatatttattattgtagcaaagttttgatattttggaaaagttttaactaattatgagtgaatgaaagaaaatgcagatcttggatagaggatgaaggtaaggcaagccaagccagagctaaggttctcgaagaagcgggacgaagatggaaatggaacgataatgcttgaatctttcttcagattgtacaaaaatttgttgagtgatcattgt

SEQ ID NO: 65514 - DNA, 559 bp, Arabidopsis thaliana landsberg
ctgagggtagagccgcactcaacagaaacaaatcaatactataagcctgttgactaatataaagcaaatccggtgctctttgacacaggaaaatggacaagcatgatgctactggataactatcagagaggtattattggtaatatgcgataacaaagaagatgaaaaaggactagacaaaaggttatgtcctataatagccaacgttgagaggtatataaagaagaggaatgagagcaagtggtctcaagatgaaatgagacagataagataaagtctcgcttatatgaagcaaatatttccgacaagacatgcgtatgatgctccaacctagaacgaaagctcataattaactgcggttaaatcataacacgtactgtagtatatcaaacaggaattgacatggtgcttttacgaaggataactacaatcatgttcgcagcactaaaggatatagaaatgtctacagtggcttttttccgggtaagagaatcaaactggtttagactctgaaatgggtgaagcacaacaaaaaaccaaattgggggcttaatgggct

SEQ ID NO: 65515 - DNA, 529 bp, Arabidopsis thaliana landsberg
  unsure (1)..(529): unsure at all n locations
taggatacccctgaatttcagtaggagtcgagatcgattataagcttttcaaaacttttatccttattaactgtatgtgtagatattcctagaagtgaagagatattaacagcccgttcatttgcatcagtggaggagacacgaacatcttcaccttctattagcatctcacttgaacctatcttaattcccaacggttttcccccattattaactgatgttccattcaccacattaatgcctttggaatttaaaggactccgctcatattgagaagtttcagtctgcatatggtgtgataaccagtaaataataggcgccaccaaagatacattcaaacacagcatacattcaaacaaaacatttacgaagaaaagataaattaaaacaaaagccaccacactcaatattcaaccctcactgatctgcagtaagcgaatgggagtggtagataaagagaccacaagccttggatcacttacacccaatgacggagttattggaaggaattggctntatttatattttt

SEQ ID NO: 65516 - DNA, 664 bp, Arabidopsis thaliana landsberg
acaagtctagagaggccaaagtttttcttgatttggcatcttattttttaagccaatattggtgcaagtgtaaataaacgagaataagtagatgcctaatttttagtattgaataaccacaccgctggtagtaagacccttaataaattcattcgaattctagtatcataaattaaagacttcatcatttaattaaccactgttattataatacattgaacaagattacccattgaaatactcaaataccactacacaaacatcattaaatgtaactaccattgttattaaaatacaccgaacaagattgtccattgagatactcaaataccaatatacatacatcattaaatttaattactaccattgttattaacatacaacgttgaacaagatttctcactgaaacactcaaataccagtacataaacataattaagtacacttaccactatcattaaattgtttatagttcaaccaattatcaaagaaacgatagaatataaatgtaaactaaaaatatcatataaatgtataatatacgttaaaacttgaaaacattgtttaacatataataagaaaaaaatgtgctaaaacattttatatttggaaaaagaggaagtataaaacaagcttcaaaactaaaattcatgtttaaaaagaa

SEQ ID NO: 65517 - DNA, 649 bp, Arabidopsis thaliana landsberg
gtacaataaacactttcaaacaactctgttttttttttacttatcacccaaccaaatacgtacaatcacataaatacaaaaaaatgcagaatcatataaaaaattagacaagtagcagagaatctgcaaacatgacggtgaggttaaacagtaataggtacattgatattatcagagagactgaattagtaaattctctggtctccatcttctctcttatcgttcacacacacacatacactcatatataaacacatatgcacactgtcactaatgcttctctctctctctctttctcttttcctatatattgacaagcttgcgatctctgttcgctagatctgtctgaaacagtgaggggattcctaggtttcagagcaaagtaatgtctccactcaagtacttgtgttttagaaaggtactcttggtggtgctctattccaggctcttccttttctcttcttcttctttctttgcctcatcaagtgatgatcatgaactaccacgaatagatccttattttcgagtgagaagaatggtggtgaaagaactggattcaactggtgatgatgaatgaaaccaatctttcttcttcttctaagaaaaagaaggctcttaactgattctgggttaatattcatcatcatca

SEQ ID NO: 65518 - DNA, 551 bp, Arabidopsis thaliana landsberg
aatggcccattgtgttgcccctaaagtgtgttatacggtgtaacttatacccatcattttggttttcgattcatagaaaacaataagccaaaaatgagatgtagaactcttacttcatctagcaattgtgctgttacgctttcggaatctttatcgtatcgacttaagagggtacttgccatgttttccttccatggaacaatcagtttcttgatctgcaaacaagaatctatataaggcccaaaccataacacgtacataatctgctaaaactgaatttgattgatttcccttttatttatgaaaacataaagacaagatcgtatcacccacctgatccatgaatgatcaaagatagatagacagttcatgaggcccaatttcagtttctttcaaattcaacggattgaggacaaataaaggaaaccaacttgagtgagatcgaattccgagaaagaatgttaaagatacaacctgagttaaagaaaaccgtagagaaatttgactatgcgcgagtttctgagtcttactaattaacaccgatctgccac

SEQ ID NO: 65519 - DNA, 569 bp, Arabidopsis thaliana landsberg
  unsure (1)..(569): unsure at all n locations
acccctagagccgaaaggcaaccgaaaaatatacctaacaacacactcttatttgtctgttttaccaactaattcgtattacctagacctttgctagaaacaatatgatttaaacacgcattgtagtccaaggtggttgtagctgaaggttgttgatcaatatagtaattttctttctctcgtcaatctgtattgttgnnnnnnnnnnnnnnnnnnnnnnnnnnnnnnnnnnnnnnnnnnnnnnnnnnnnnnnnnnnnnnnnnnnngtaactttccttttcaaaagttctaattttttctctttcatatcattaagagataatcagaagagataaaatacaaaaattagaagagaatccttaaaaaactattttttttcaactttccttttcaaaaactctatatctttatatcattgagatatatctagaagagattaaattggaagaaaatcttcaaaaaataattcaattttttcaactttccttttcaaaatctctatatctctatatcattgagatatatctagaagagattaaattggaagaaaatcttcagaaaaataattt

SEQ ID NO: 65520 - DNA, 1634 bp, Arabidopsis thaliana landsberg
  unsure (1)..(1634): unsure at all n locations
gagttttatatggccgtgatttgtctatggggttttctttttctttctccggtcgacgccagaaccgttacgatcaggtaattaattattaaatttaatttttttgcgataaccgaagtttttgttaggagagaaaaaatcagcaccatttgtttgggtttattatggttaagaaaatttaagagttagcaataattttagtgtatgtgttattgataaatttatcaagtgatgttgatgttattgatttggatatttttggttcatatgtggacaaatagtgtgtagtattatcctcaaaaattctatttttattctttttatttttcgaatttctagatttactcggtagattcaagaacctttatggtgtcgacagaattgaccttatctttaacatggtccaataaattgacccatgtgtcgattattaggtgacaaattagcagtggaatagagaataatgaactcattgatcctatttgctacaatcatgggtcttcttataattgatttgggttttggtgattgttgtgattgtaggaagtggtggaagagaagagtgagtggaaagcaaaatggcaaactcagctctcagggttaaggagaagaagcaatcagaaagataataacacgatgtcttgggctgcaagaatgcgtcgtcaacaacaagaatcttcttaacatacgacatcgagtctttagccttgttatgtatagtcttttaattgtttgtgtgtaatatagaaagcatagcatcaataccccagcaactttgtatatatgtaatgtatatacaaagtttatgccaatcggcggaagccaatcggcggaagcacattactttagataaataccctgattactaaataagctttctttggttgtgcgttttatgttttgtgttttacgttttgagtggagaacaggattctaggtgtggcagcaacgtttgtaatggttattgagtgataattctgtttaaatacggcggttaaaaggtttttttaagtggctctggagaaagtggttaaaagcggcaggagatggcagtatagcggttcaaaattatatacgattggtaatatttgtaggcaatgtggtgactgatgataataggtatacagtaatgaatatgagcaaaaactattgaacaaaatgaaaatatgaatcaccttaaactagaggtaattgttgataaactttttaagggtttcaatggtgatcttattatattttaggaaatattttaaaatatatgaaaataacaaaaatctaatcatattaaaataaacggttgtaaatgctctatttttataaccgtcatgtttcttctattcaccaccacttattttatccgtccgttacaactaattatttcatccgtccatcagactcttaaccaacgaggtacccttaatttatgtaactaatcaacttttaaagatgattgcttccaacaaattgcttaaggatttgacttgtgaccttgtttaatcaataaagattttctagattntgtggataaaagtataagaataatgtgaaaattatggttaaaaagtgttacgattaaaatagtgttataaaccaaacattgagtataatattttaccataataaaattaatataa

SEQ ID NO: 65521 - DNA, 500 bp, Arabidopsis thaliana landsberg
atcagcataaatgatattagtcataaataaaataaattttacttatttctattattgcacaataattactgggaattgtgcaggagaaaaataatgttttatatgatcgcgttattaggcattttaggtttaattggtacagatttatttgtgccatcattaccagccatagcacagcatttccaacaaagccccaaccacacccaattgacgataagtttatttttggcaggatttgctttttcccaattattctatggccccatctcagacaaaacgggtcgcaaagcacctttattatttggtgttagcgtctttgagttcggctcattcatttgtaccagcgccgattcttttacctggctttgcataagcagaatgaatcaagggcttggggtaggcagaggcttatccttagcacgagtcattattcgcgactgctaccatggtacagaacttgctgtgaaaacttctcaactagctgtttttatttctatgac

SEQ ID NO: 65522 - DNA, 552 bp, Arabidopsis thaliana landsberg
acgacccaagtaccctgagcatggaagtgcgcggcaaataagggccatgtattggttggcactatcgtttgatcgatcctcgcgcgagcaatattcctgcttgtgttaaccacttgattatctagtacccgaaccgtattttcatctatgatacgcatatttcggataaggtcgaaaccatcttttgattcccattgatcggctgatcccagttcatagttaaagatttccctgctatttgtatagatgaataaccacgaagctccacgaaaaccctgaccgataagggagttttcatgcctgagactttcttccagttcattttgtttattcaggtcattgatatcttcctcaagaatttcctctgcctgttgtacaatatcaacactgcttttttggagcgcatcatgaacaatttcctgcactggtccgcccactttcgtaagtatctctgcgaatgcttttttctgctcttctgtattttttctgtccggcataaggattattttttttggtgtttctgtattgtttgctgcgcacggtctctaattt

SEQ ID NO: 65523 - DNA, 1879 bp, Arabidopsis thaliana landsberg
  unsure (1)..(1879): unsure at all n locations
ccaagcatgctcttacttttttcttcacacatctctagttattacttctgtttcactctgtatattcatacatatgtgtaaacatgcacgtagtaacaacttgttaataaaagaattcataaataaaagtgaaacttaattaggtgcaacaataagatatcatgaaaatatagtacaatactttaccgcatatttattctcgatggagaggagataacaatggttccacggtgaaggttgatagtttccggagcgtcgactgagttcaacaagagtagtatccggcgtcgttttggtcatggacttgcatacaaaacggtgaggacgtcgaagacgaaaatggtgggtgagggtattttggtaaataagagctgaacttatacgtaaagttgccattgatttagtagactattctcttattcgtggctgaatacatgcactagacaacacatatggttatatagacaaccggtagaagaaaatattttatataattaggagatcaaaagatctaagggtgtaaaatatttttcaattaatagctaaaaaagcttttataatatattgaccgcaaaaatgcttaatctatatatgttacaatattttcaacttttatacattataatcatttcaacttttaaattattaaataatggtacaaccgtacaactaatctaactagaaaaaaatatcacttaactcatcattttttttttttttttgatgatttaaaacatgaactctggatctgacaattgtacacatttgtataattgtcatttaaatcacacacttctttttctccaaatgctccttgtgtaattatacccgctaggccactataagtatgtaaatttgatatcatagcttatttgattagataatgtccaatcctaaatgatttgtgtacctcgtgattctcgtgttatatttgatgacgttattatgtacaaaaaaattatattaatggccccttcaggtagaacagccattcgcacaaaaagtgaagtcaaacaaaatgtatcttctccaaattctaaatgttatgtgtatctcgtgatcgtcgtgttatgttggcaaacaaacatggcccttttaggtagagttagtcgtatggaaataaattctccattcgaagcttggagaaagtataaaataaagtatataatgttcacttggcttaacaatcgccactcgttcactgcacattatcttaatttatatcaaattactattgaaagataatagaagaattttctaatgagctttattagatctaccttatgatcgacttttataagcagtattctatgacatcagttttaattcaaccccatcgatgttcctttgaaaagagaaggttttacaaagtgtaagaatatgaaacaaaatggttcgagacaaataacatgcaaaaatttatagtaaaaaatttatttgatactgcaagatgtttgcatgttattgttttcgaatcatctttattcattgattggtgcaaagatgagtgaagagtagtgttatatcgccatgtttctctgtttgaattccttaatataattttgtttttagggtttaaattgtagaaatagtatcaaactgtcgccatacatttgtgttttgttgaatcttttccgagtcactattgtaaggattgtgtgattatgttgaatcacattgaaaaaatctaaaagatatttggaataatgatagtaactagtaattgaaatgttatctgttctaaaaccctggccttttgtataatatattttttgtgttgagtgacaaaaattttgaatttttgatttccataagaccatctcaaactccactctatatgttttctgtnattctatttaaagcaaaataaatacaatta

SEQ ID NO: 65524 - DNA, 656 bp, Arabidopsis thaliana landsberg
atgtgggaattcctatggtttcatacttggtgaaagcaattgatttgagtttgttaaagagtatctctatggaattgcattaaaaacattattctattggaacatgctaatggtagctagtatggtaaactaatatgtatattaaaccaagttcaacttccgctgcacatatctttttagtttcaatgcggaattgacatattagtcgtagattccagagattaaaacgagtttaaatttatgattctctacttatcaaaaacagaaaacactagataatagatattattttttacgacagtggtctgtaatgagtgacataaaatgtgggaatagatacaaatcatgttgtgttgggtgtagacgatgctactcttatataacaaggaaattttaaattttagcatctatactaatttttggagtctagaagactgcacttgctatgtaaaataggcataacttgcaaaacggaggaagtcttggtgtacattggatctaaacccctataatttggatataactattccaagtttatgccctaaatatttcgtgtcgaatactggatgaattcatttatttggcagccttggaacaatttgttattttttaagtccaacctatttaaccccccgatttaaatttttttaattttt

SEQ ID NO: 65525 - DNA, 617 bp, Arabidopsis thaliana landsberg
tggaaaaaaaaataaactccaacttcaatataattttgggtcaaaaaattagcatccaccattaatacagctcaaacccaactttgtctccccttttttcttacaagtttgaatatcaaagtacgggctcttttttttctatataatagttatttaatcaaccatacacattcatcaaatccatatttcatgcagctgttacatttttattatatgtcctctccttccttttgagtgtgtatatgtgcctaattatattccctcatcacaacctcaatctcaatctcaatcatgtctccaaatctcaatcatgcttcttccactttgattcttatctatctggatcacaattctattcatatcctttaatcaaaatcatatcatagcttctttttttttatattactaatcttgatgaagatcaccaaaactcattttggtcttcttcatcatcgtcgttcttgattttctcttggcaatgggatctacaaagcttggtctcatcatcatcgtcttcgtcttctgcatcatctctaatctacaaacgatggttcattgcatcaacaacattttagatttggacgatctgatccgttcatacgcggctcgtgcgacta

SEQ ID NO: 65526 - DNA, 747 bp, Arabidopsis thaliana landsberg
  unsure (1)..(747): unsure at all n locations
aacaataaggctctactcaaaatactaagcaacatacccaactcagtaagcaacgaagtattttgcgattgttatcatgcgggtaaagaggagagacaaattggttctcagactgctggagtaagaaatcaagaaccatggaagtatgcgagagaagctattacagagcgaaaagcgaggttaagtaaaacgaggataaaaaaaaacacagacttcgagaaagaaaggggaaagagaaggaagaaacctcctgacgaagatcagagtgatgagaaaaatggcgagtatcagatatttcttcaggaagcacagtgagaagctcaagcaagacgacattaccatcatcatgagcctgaagattctggagtgcgaacattaacttatcaaagggctttgaataaggatccgagtgaagaagaagcgcagagagagctaaacatatctgcgtcaatagctgcaaaattccacaaacacacataaacacacaatcgtttcgttcataacaccggagaaacacaaaaagggtacaacaatacctgaggaacaccggagctatatctcttagcagcaagaagaagggcattgagaagagcatctttagctgtagattgaagattcgatgcttcgttctgaatctganaacacaacacagaanaagagggttaaaaaagggtttttgaggagtcgaaaatagagaatctgagatgatgaaagacgaaacctttcggcggagaatttgagcggcga

SEQ ID NO: 65527 - DNA, 607 bp, Arabidopsis thaliana landsberg
  unsure (1)..(607): unsure at all n locations
ggagagcatcttccttggcgttcgcctcaatggccacgtcggccgttttgccggtttgaacgccctggggccactggtccatctcgaggcgcacgatgaattgcgaatcgcggggatagatattcttcaccttgccttggaagcgctggccacggaggctctcgaaagaaaccatggccgccttgccgggagacacgcgcaagaccgattgctgctcgagattcacctcgaggtagaggcgatcgaggctcgtgagcgttagcacgggcgattggggaggaacgatttccccggccttgaaagccacctgggtgatggttccggagaagggcgcgcgcacggctgactcttcgaaacgggcaagcacttcgccctccttcacttggtcgccctctttcacgggaatctgttgcagctggaggctcacgcccgtcttggcggtatatactttnatcggcgtcaccgtgcccaagccgtagatcccctctaccactcgccccttttttgggctttgggtttcgggcccacgggcgcgagcgaaagccaccgcgccgatgagcaatagaactacgggtccagcaattttccaagtctgatttttagcatg

SEQ ID NO: 65528 - DNA, 1138 bp, Arabidopsis thaliana landsberg
accccgtaaaacacgagttagtgctcttcttctttcctcttttttaggcaaatgtcttaaattccttgcacttcaacacaatgctttttacttctgaacacatgaaaacgttatgaggcttcaaaactgaatctatgtataaataatacacacgcatatatttaactttgttttttcttttcttttccatataacaaaccaaacactactcttttctaaccaagagaaaggttttatatatgcagaatgaagtttgagagagcaaggccattcatagccattgttttcatacaatgtttgtacgctttgatgtctatagtagcaaaattagctttgaacaagggaatgagccctcacgtcttagttgcttaccgaatggcagttgcttccgctctcattacgcctttcgctctcatcctcgagaggtttcttttcttcttccggtccatgcaaggcctgtaacacaaaaacatacactttgaggttaaaataatggttccttttgctccaaatgcaggaacacaagaccaaagttgaccttcaagattttgttacaaatagccatccttagtttatttgagtaagagtttgtttaaatcatttctgatgcacaatgatagtctgttgtaacttgatttaaatgattaaacacaggcctgtggtcgaacaaaacctgtactactcagggatgaaacttaccactgccacattcacatcagctttgtgcaatgctcttcctgctatgacattcataatggcctgcgttttcaagtaactctctcactctctagaccgatattatttgctgatgcacacatcattgcagtactgaaacaatttgactcggtttctgtttcttgaaaggctcgagaaggtgacaatcgaaagacgccacagccaggcaaagctggtgggaaccatggtggctattgggggagcaatgctcatgacattcgtgaaagggaatgtcattgagctgccttggacaagcaactcaaggggtcttaatgggcacacacacgctatgaggattccaaagcaggcggatatagcaagaggatcaattatgcttgtagcaagctgcttcagttggtcatgttacatcattttacaggtatgatccattcccgcttccatg

SEQ ID NO: 65529 - DNA, 1826 bp, Arabidopsis thaliana landsberg
actttttcctttcccttgaggctccatcttcatgttcatgtccactgaactcaatctttttaaactatttgttggctttgtcgttgtttcttgttgttgctgtgtagttgatggtaagcttcttgcttcgtcactagacgctgtattcaccaaaacattacatgttcattaagtaacattgatccattatcaatattaaacgacctttcgggttgcgaaaaggcgaaaactttgcattaagctatctagcaaaagtaatctaaatgatatgttacatcaaattgcttttaactcaagtttcaacaaatttaaaagattcatgttaatgattgagcagattagagagactagtactatacctttagtttccaactcggagacgctcgaagaacttccggcggctcttcctccgcctagagattcaacggaaacttgtagtgaatcaagaccagcactgtgctgccgcaaaagcccgcttttgttagcagtcgctgaccaccgtggaagtcctgacgatggtctacctcgccgtctcgaagcggtggcagtagcagcttcttccggattattactgtttcctccgccgacgccagtacgaagcttctcgcttctccgtctcttcgccgccattcttctcaaggtctgcatctctttcctcttcctccactcttcctccgactctgccggcaacgacgtcgttctcatcaaacccgtaccccgagtcgctcccgccaccgtctccgtcgaaaccttagttgttatcatcgccgccgcttgatgatgatgatgatcttcccgaaacagaggcatcgttacaacaacggaagaagatctcacaagcttattactcttatcaacaccaaatcttccaccaagagataagccaagatttaactcgatctcatcatcatcttcttcttcatcatcatcttcaccttcaacagagttagagataaatctctgaagcagatctcttggaaacacacaactattacttctcgccatttctttacttctctcgtttgcttccgccattaacaaaaaagaatactggaagcttatgaaacagtaatcagatttttatgccacgatccataatccaatattttcacaagaactgaacaaaaaagtttctctttagtccattgacaaaaattgacgagacacgtttcgttactattgattacaaatgggggagacagaaaaaaaaaagttaaatggatgagacagagaaagagaactcaaatttgagcacaagtcggaatattcactaccatttacttgacaataccttatttagttcttcatcattaacatgtacaataaaaaacgaaatccctgtaattattattttctatttactcttaaaaatattcaccaaaagatggaattgtaatcaaattagattctttcctatatcaaaaaaataatataaaaaagtttatctattaattaattaattattatgttgttgaggaaaattaataaaataaagttgagtaagaataaaataaatgttgggttttgggcacgtagaagaaaagaaagcgacgagaatagccaatgtgtgaaaagtgccaagtggcaaccagatgatccctcgagtcgacacgttttttgtacggctttgtatttttttattttaatttctttgtccccttactttttgccactattattgcttctttctttgctcctacaactagtatttaaaaaacaaaattcattttattcttattatgaaataaattgttataatattcgctggcaagttacgtgttagcatcagcgttaaaaacggagaagatgacatgtgtcggaggaga

SEQ ID NO: 65530 - DNA, 559 bp, Arabidopsis thaliana landsberg
gcacggtgggatcgcgcccaaaaactcgagttgcttttggagttacttcttgaacaatgacaactgcgccattgtaatgatatagtatcattcgacccattgatagcggccgagtgctttacaagtacaatacaatgacacgctttaatgacattatcaacattctaaatgagcatgtgtactagctagtttgaccacagccacagtaacgggctcgatataatcatatgggaaagaacaacctgctatgattgaaattcacatgacttttctaaccgacttgagaggtgctacataacaaataagcttgtgggcgagtgatataccactacttgtaacgctatttacaatagctcaggacaaagtaagcaaaatatcagccgctgaaaaaggaacacttattagctttttaccctcaaacggtactgaggacattgattatatatgagtatgcatagatcatgaaatgtgttaatataggcatcatggatgccaatatggacatagctagaactgatatattgtgtggtacaccacgcatataataaaggagattacc

SEQ ID NO: 65531 - DNA, 328 bp, Arabidopsis thaliana landsberg
ctaatctgaaataaaattgaatgtttctaataccatttcaaatactaaaaacaatgaaatatcatatttagagatttatttctatataatatctattttggtcatattcttagttatgatatttgactactattcaaaaacctaaccccaatatagtcaaaactatataaaaatgcagtaagatattaaatgctgttgaacaaaattcaatatcttatggcttgaaagtaaactagtaagatagctacaaaatgcatggtcagaagttaggatatttatttcttccgtgactatttattaatatacaccgtaacgcctggcacatatt

SEQ ID NO: 65532 - DNA, 1829 bp, Arabidopsis thaliana landsberg
gctgtgcccggttctctgctttagcactatagaaatcaagcagtggtatgtcctcaacttgccatcttacgaactcttttttccaagtaggcagaataccttttgggagaacaaccaatggcttagcctgaggatactttgcaagaaagctctgcataaaactgatgatcatgaaggtttttccagagcctggagcatgagccatgatacagccaccaggatcgtcagccactaaattgctgcaaaggaactgaaatccctcaatttgatgaggcttcatttcggcagcatgcgttggatgagcagcaagtccacctatcatcaacccttcttcagaaaacttaagttcattatcagattcgccaaaccttttagttctagtttcagaggcatatgttcttgtgtttcgttttgcctacagtgaaagttacaagaaaaattagaagctccgccaaactctgacttgggaaacaatttcaagatcatatggatattacaggtttcataacaatttgataacaaaatttaaaaccctaggcataatggaggtaatgaaaatagaccacatgtatgaagaactcctaccctattgtattcagacaacaaaatttgtcgagtaagaaacatacttttccctgaaagcacaaattagcgtagtatcagaaaataggatacttactttagtgaattgcacatcaattatctctagtatacttttctcaataactccgcagacacggcaaacataacccatatcgtcctttagaataaatgagtgctcacaatcttccactacatctgccttttccttatgtgaagtctcccttgctacatcctgtacatttattggaatcagaaatgaataaagcaggaaaagaggcaaaaaataagatcaaatttaaggagctaagttcttaaatgagctttctactaaatatctcaaatgcaagaaatctaagaggtgcaacatcaagccctaggagcactatagtgacagaaaagagtacagaaccctcttcacgaaaatgataactcaatctgattaatgcatacgtagagtccataccaaccgatttgtcaaacagaaactctatcaaccaaaaagaaagggagaaaaacacaaataattaaacttgagtttcttcacaattgagtattacggcaagaggtaacataacacaagattgttttgttcatttcttgaacgactgaaatttcaattccatctgaagtaactgttcagacatatataccttggaacactctattgacaaggccatttcattccagatattaccaagatcttcatctgctgcttcagactcattatcactgtcatcctcctcaacgcccacgtagacacctttctcattaaccacaccattttctataggaaggactttgcctctacttgtttgtccctcctgacaaaattacaaataaacaaaaaaataaacctcttgtatggctagctagtttgtaaatacaggtgacattgatttgtaacctagcttgaaagaaaaacagaacttacaacaatggctttaatggcagaaggcatctccttgcccctccctaaatcgacctcctcgaaagagcattgcggtattaatggagtcacatccccttgattcttctgatgctgtacaagagtagactgaaactgatacataggcctctgcctctcattgtcttcatcatcagaatcaagaagcacaatctcagacgacgaaggaacaacacagagagctttcttctccacatcagtatcatcatcatcatcatcatccaaattaataacaccttccacaacctgttgattatccatc

SEQ ID NO: 65533 - DNA, 677 bp, Arabidopsis thaliana landsberg
gcaactaacaagttctactcagccctgacctatcgttgaccaccaaatcaagaaccgacgtagacctcataagccttgttttcgcaagtgggtcaacaccaaatcttccatttagagatagacctaagtctaactcaatctctacctctccatcttcttcagacaatctctgtttcttcgacatgagcctctgcaacataataacttcggtcggagaatattaattccggttaaattagagatctctctttttctcaacttagattttagattagaaattttaacagattcttgatgataaagagcaattcaaatcccaagaaaacagcaaaatatcaaattttggaagattccattttcttcgattaatgacgaccttccctttttataaattcaataaaaaaaagtttaataaagaaataaaaaaaaatcccacaaaatttcaacatttaccgaaaaaatctccgacaaatctcgaacgaacactcaaaaagaagttaagagcccaaagagaatttagatggaaaaagagaagagaaaaatcaatcaaacaaaaagctgttttgtctaatttgcggaagctaaaataccgaaagtacccgtgtttggtgcattaacgacacgtggaatcatggaagactctgacccaaggactttgagcacccacgtggtttttc

SEQ ID NO: 65534 - DNA, 1855 bp, Arabidopsis thaliana landsberg
acttgccggatatcatcctttgatgcttggagtggctgcttaatggtgacagggggattctttgaagcagaggtagggagtgggtgatcataacttgggtgcggaagataatctatccttggctgagtgattgttctaaaaaaaggcctaaccagagcatcttcttgactgatctcaacatgtctatgcaaggaaccatgaggatcaacttccctatactgttgtgacctgtattccataggcctgcgtagagcatcaggaaccgcctcagcatgcaaagacgccgtagaaatcggcggacaagcctgcaagcgactggatatggatactagtgccttcatcactgcagaaagtctatttccttcgatctgccacatttggtaggtccactcagcataagaaattataagattctaactttatccctagcataagtaccatgaatgattctacaagaacttgacccgaaaagaagtgctttgatcaacgactaatattttaccagaaaacaaaatcacgagttcgtaccttgagcactacgtcaccagggtttgtgcaaattgacaaatcatgtgaacgtagttgaacattacaaccagtttcttccaatatcctctgcatcaattcaccattcttacctatcacagtaaccacatggctcccttccatcaacagattacaggagacggtactactagtgcaatctccgaaatttagagcttcgaaaaccctaatcaacgcgtattgtgctctggagacttcaacttcttgttcttgctccttcttctccctgttgctaacgttattaacaataacacctaatttcaccctagacactgaacctacatgaccgaaaatcttgatgatacggtacgtagaatcatcaagaggagtcttctcgacccagatactggattctgttgatttatgaagcttcttaaccattcctccatgtttcccgatcacatgcccggcctgagacacgttgcagagaatgcgaaacgttacgtattctggcggcggtgctgatggcggctgtggcagtggcagtggcgcacgagcggtagactgcgctccaaacttctttccctccattctttctctctctatatctctctctctatctaacggcacttcttgaagaagaaagaatgaaaattaccaatggttttgcatacggtgtcgtataaaggatggggattattcactaaccgagtcggaccaatgaacggttcatatttctattgtccatattaaccgagatagaccgaatccgagcttagttgagttatttacacggctttcacctggagacgtaatcaaattcgaggaaccaagacggtttagaaggaaatcggttactggttcgctaagaacgagtaaggaaaaaccgaaaaaagtcatttattaaattatgatgatcaaaacatggtattgaaacttttaaattggcagaaacaatcagagacacgtgaaattatttgagtgaaacaaaatattgtatatgtaattacatttctcctatttgttccaatattgcaattgaagtatcaaactaatttttttgaaactttgggaatgttaaattgttaatcaaagaaaaaatgtaaataaacttagaaaggtaagtatttctcaaaaaaaaaaaaaaatacaaatgaaagcaaaatcaaccaatgttttaagtaagatgaacaaaaacgcaaacttgtgttactttgaactttatgtctttatccaatagaaaaataaacaatcacttgcaatttaaaaccactcagcggaaggaaaaacgcaagttatcaattctctgcagcagcacttgcagcactcaagtccacagacaaatcaagag

SEQ ID NO: 65535 - DNA, 550 bp, Arabidopsis thaliana landsberg
  unsure (1)..(550): unsure at all n locations
catcagcgtatacatcgttcacctcgagatctgaagaatccttgtcaacatttatggtgaaggtgtgaaccggaacctcgtctgacttgtcatcttcatcaacgaggatcgctgatgcgtctgggttgtctgagtttgacttgatcttcgcgccgtcatcagctccctcttcggtgatgctgaagtctacgtcagttccgatttcgaactcgctgtcttccgtagaagcaacgccgtctgcatcgaagtaacgaacctcggtaggggtaagggtccagtctgcgtcagttcccgcgccgtcaacagagcctgcaacagacactgcaacggtaacctcaacctcttcgtcctcgcggactacgatgccgagattggtgaaacggaaggtaccatcatcttcatcgaggtactcatnnnnnnnnnnnnnnnnnnnnnnnnnnnnnnnnnnnnnnnnnnnnnnnnnnnnnnnnnnnnnnnnnnnnnnnnnnnngttttcttcctcagcgcctgttccatcaagctggaatgaaaggcggtcaacctcgatgtc

SEQ ID NO: 65536 - DNA, 823 bp, Arabidopsis thaliana landsberg
agttatattaactttagtgaactcgttataaaacctcaattaagtctaatacatggaaccaatttatttggtaaccatttaatgacgctcttttcacttccataaactttgtctatatacgtcaactctgaaatttatagttatacttatcatgatggcatcactcattcgatacctgcaactgataacttatacttgtgagaggataaaaataactgaaccgactatgttgttgcatgttaagtcattgtagttgatatgaacttatttatagcttggtatacttggaaagcttgtctctgttcttattcttcttcaaatggttgtgaacatgttaagatgtcgacactgtggaacaagtgagaagtcaactccaatgatgcgacgtggacctgatgggccaagaacactttgtaatgcgtgtggactgatgtgggcaaacaaggtaagctaagagtttcttagttcacattgatcacctcgtctcgtatcacttttttgactcattgatcaggcctatatatccgagtatgaacctaacaataacattccctttgactttataatatcaggggactcttagagacctatccaaagtccctcctccgcaaacacctcagcatctatctgtgaataagaatgaggtgagccgtgagcgcagtatttcatagagctggagttttgatttgcttattaagagaacatacattcattttttttttctcaatcacttttgttgctggacgcacatcttgaggctgatcaaatgatggaagtaactggtgacattagcaacacacagtgagaactgagaaaccattgg

SEQ ID NO: 65537 - DNA, 1477 bp, Arabidopsis thaliana landsberg
gtgttcttggcccggcaggtccacgtcgcatcattggagttgacttctcgccaattccacagtgccgacatcttacaggtatcaagccattcagaggaagtaaaatcagatatgttcttaccaactaaagtaaggctatcaagaagaaaaactcaaatctacaaagacttaaacgacaattgtctattccaaagttattataaaaattctcagttccaggatacaatattagtcatcacaacctgtcttaaccaatcatctatcacagaagtcattttgcttcaggcatggaagagcttttatataatattttgtctgtattggtccttcaatgttaccaattcgtataggtccatgctcatgttaaatattacatatgcaatgtgtatgtcttgatattgaatcattgataggtttcagagttctagtacctctacaacgtttctgaaaccaaaaacaacatctaagatgcttaataaacctatcatctctacattaggatggttcagtttaataactaagtcagatgctacattaggttggaagcaaaaacaacttctaaagttgcttagcaaacccataataactacgttaagttggttcaagttaaaaagtatgtcaggaactcgcagtttactttcaaagcatttctaaacttacgagatctcttgatgctgagcctcactactttctatggcccaggtttgattcgacccccagctagatccagcagatgcagcttcatcattgtttgacttggcagatgtgaactgacctttattgcgttgcatcctgtataccagaaaacaaaaagtaatcaagatgcgaaccttaattttgggagagcaaccataaaagaagtataactagaccaagttgttgatttagacatcaatgtacctcaaagctacctccttgcggactgtataccgaatcttcttatcaaaattccttcctttccgtttctctcgaaatctgaccaaagaagctaatcgctgcggaatactaaacctttgaggagtaccaggtaaactctgtttcattgattagtcagtcagtcagtcaagcaatgtatcaaggaagggaacttatgtcccataaatgccatcatatattttattaccgatactctgttgttctgatgaggtgatcctaggccaggaggggctgcctgaggtaattcacgaccacccaataatagaagcacagcttgaacctgcaacaggcgtcgaatagcaagaggcactcacacattagaatcaatagatggaaaaaactcaaagctaactagatccttcaaccacttgctaaaatgtggcttggagtaagaatataaattctaatggaatgagacaatcaacgaaccaactcagtaacaacttaactcaccttctcaggcaagacactgtcaaaaacgtagacttggccctgaaaagacaatgttaactgatctccttgttcactaccacggtcgacc

SEQ ID NO: 65538 - DNA, 475 bp, Arabidopsis thaliana landsberg
cagatggctttttgtaactgaagaggatatcaagtttttaccttttttccaggtctgtctttcctatttggtatgttgaatcctatgaatttgatcaatcgattgtatgtatgtcgatcccaagactttcttgttcacttatatcttaactctctctttgctgtttctgcagaaccagactctgatagccgacaaagctcctcatggcacaactttggaagtgcctgatccagatgaagttagtctttttcagcgaccttggatgacatctgccattctttgttagattccaaaacgttattataatgtctcttctttacttgacaggcggctgatcacccacaaaggagatacaggatcattcttagaagtacaatgtgacctattgacgtatacctcgtcaggtatttatgcgttggcttcaaataatacaaacattgttattggcattttccgtgactccatatactctact

SEQ ID NO: 65539 - DNA, 261 bp, Arabidopsis thaliana landsberg
aaaacctattttacatgtaccttttttgttataaccatgatcatgtttcagtagattttggctcattctcagtcggatgtgacacagcttcatgatgtagtatctgctcctctatcggctgcatctcagctttcttcttcttctctttctggatcacttgccgtggcattacctctagtaaaaagctccctccgttccacacagccgcagaaatctttaggatctgaaagatcacatgaagtctataagataggaagatcg

SEQ ID NO: 65540 - DNA, 563 bp, Arabidopsis thaliana landsberg
ggccgtactgccgacagccgcgcaggacgcgggacaggttgccgccgtcgatgcccttggcggtggcgagcgaggtgtcggtctcgaggcccttcgagcggcggatcttgcggagctggtcgatgcggaggcccaggactgctctcatgcggcgttccctcccttctggggtgtcatggccgctgacctgctgtcttgcggcgatagatagaagtgtgcacacacatgtgtgtgaacgcaagacccaagttttcgggagggaggtggtctagtgcctggtcggcgggggtgtcctgacctgctgaaacacaccggttgtgattcgagaccagcgggtttgcgccgacgcaaggcagacttggggccatgaacaggccttccagccgatctacggttcgccggtgagttggcaggagtacgtcgagcagcacgtcggcggtctgacgcagaccgagatcgccgaccgggtcggcgtctcacagagcgcgatctccccgtgggcgcagggcacccagggagtcgatgccgagcgcgccatcccggtcgctcgagcagtaggggac

SEQ ID NO: 65541 - DNA, 642 bp, Arabidopsis thaliana landsberg
gcattgcgcatcatcatcccgccgctcggcaactccgtgaacgggctcctcaaaacgacatcggtgacgtcggtcatctcgatggaagaactcctgcgccgcacgcaggtactcattcaggagcgcttcatggtgctcgagctcttcgcagtcgcggccctctattatctggcgatgacgaccctctgggacctcgtccagcgccgcatagaacgacggttcggccgcgccgatgcccaccccggtggcgcgacagtcgatcgccgctgatttccttctcttcagatgtttgaaaggcgcggcgctcgggcgcggcgtgaatgagatgacacagacgtttcgtggaactttcaccgtcatgatcacgccgctcgatcaagcgggcgcagtcgatctcaaggcgctggccgcctttaccgactggcagattcgcgaggggatccatggccttatcccgctcggctcaactggcgagttcctgtcgctgtcgcaggacgaacgcgacgcggtagcagagacagtgatcaagacggcggccggccgcgtgcccgtgctgatcggcaccggcgcggaagatactcgcgaggcgctgcgtctcagccgcgaggcggaagccatgggagccgacggcgtgatgatcat

SEQ ID NO: 65542 - DNA, 567 bp, Arabidopsis thaliana landsberg
agctactcgaaaatgattgttatttatatcaaatcgtgcgtgtttcatctattgataaatattggaaatttaagtgaaggccgattgtcacgtaatgacttgaaagcatctccaatgtaattcagtatttatttcttttcacttgacgatagaagaatttgattagagatgagttacttattgagcgaattaatgtacgttattttctatgaccatatacattccaccgacatcggacattacactgctgtcggaacttaatgatttatttttctaaatacgaatacatttctccaatggaaaaaatctaagagttttaagatttttctataactgtaattgtcatttcaacgaagagtttaagaagaaaacagagagaaaagcgtgtaaatatctgtagttttaatcaaatgggtcatttctatttcagtctatatatttaatcaaaattgcaattcacaaattttaatgcttacgtattttaagtaacattaaatgaacatcttcgtcctaaaagttacttgatattaatagaaaggtgaagtaacagaacaaagcattaacgat

SEQ ID NO: 65543 - DNA, 629 bp, Arabidopsis thaliana landsberg
gccgccggtttgggaatattgagaggattggtccctagtaccagaggaccgggatgaacgtacctctgatggagctgttgtcgcgccagcggcagtgcagcatacctatgtacggacgggataaccgctgaaagcatctaagcgggaaacccacctcaaaacgagtattcccttgagaaccgaggaagacgaccacgttgataggccggatgtggaagcacagtaatgtgtgtagcttaccggtactaatcgttcgatcggcttgattgctctcattttcaatgtccatgcctttgcgcatgcgagtggaaaaccaaaacagcttgcttcgtatctttgtccttcgccggcctggtggatctagcgaggagcttgaacccgatcccatgccgaactcggccgctaaactcctcagcgccaatggtactatggcttaagccctgggagagtaggtcgctgccaggcctgccaaggacaaaggttcctattcgatgaatgatcaaacaaaacgccgcttacttcgggaggcggcgtctattgttgtctggaccggacgcgattatctcgacgcttcctgtcaggacgggtccttgcggattccgtcatcgtactgagatgatcccgccacg

SEQ ID NO: 65544 - DNA, 972 bp, Arabidopsis thaliana landsberg
gataaaagaaaaggaaattatatgattttttttttcaaccaaaaaagccctatatgattatttataaaatctatgtagatatcttgtttgggaattggaacaaggttttaacataaaaagttatcccgacacaaattcataacgtagaaaaacacacatgtagtaataattgagatatcttaaggtttataacgtgagtgttttttgggtccatgaaattgcagcgacctgactaaagtagtgaagaggggacagtgtgttggtctcacgaatacgaaagatgtatataatatgtgtagctcagaagctggagaatgtgatgttactgttttggatctttaagtatataagaagattaaatattaagattatcgttttcaaggaatgtaggcccaatcttatctaactaatccttgggaccattactgatttgtatctagtggcccaaacaaatattctatatttcactgatacgagtgttttgattccatccatgcaaaacatttaaaaaacttgatgtttatggtaacttaagattaagatttgaaagaaatctcaaatattttaaccagaatgaagacaaaagatgatgattatgcgttataaaacaaaatgaaatgggggcaaaatgtagtcaaatagaattaaacctgccaccttcagcatttaatgggggcacttcctaccattttgctactttaactatattgcgggggcaactgcccccacaagccataacataggtccacctctggtatccgtatgaaggttaccacttagtaccatcaatgtagatgatttcaacagtacattccaaataaaaatcaaatattaaaacacggatgatgctttatcaaagcaataatcaaacgaaaatcatccgtacctttcgttgaatatgatgagcacatgggtgcatggcttttggatggacccatctgcgattctgcgttatgaatgtatgtatgtatt

SEQ ID NO: 65545 - DNA, 188 bp, Arabidopsis thaliana landsberg
aaaaaatcatacccacttgctaaggggtaaaaagtatacattttgatctagctggaccattcacactcaatttcaagaggttaacctatgtcgggggccaaccgacctaacaaccgatacttacctccatcatttgtggatgcaatacagaagaataccaacattaccggtattaggttaatagtatg

SEQ ID NO: 65546 - DNA, 1858 bp, Arabidopsis thaliana landsberg
  unsure (1)..(1858): unsure at all n locations
ggacaaagatgcagtcaacgcaaataaaattatttccttacgctcttcaatggggagatgccaggcttattccaagaaaaagatgttgactcactgcgacattccacaatgaactccttgtgaggatcgctaagttcggctttaaacatccaagatcttataaactcacaatatggctcacatgttttgaggaacaaaaacttcagcatagcactgtgagtaggatcagcaacctacaacagaatatgtcgggaaaatagtcagaccaaatcaagtgtatattacttactttaagcataactcctggttcagaaaagtagcttaagcgagtgtgaatttcagactcgccaggttatgtatattacttacgttaagcataacttgcaactataatcaccatataaagtggtccacattagaaagtgcatagaacaatttaaatgccatgaccgatattctttcaaatctctataaaatatgtaaatccagcagttactgatatacagaattcagagagtagagagtacagagatgcaaaatttaatgaagtaaaaccgaagaatgggaaacaactaaaaccgaaggtgcctctaggctacattaaacgataactatgcgcctcatgaaagagaaaaaggacgaatactaaatgaggaacataacttaacctgacctgtagttgtgaatataagtaagtaagaaggtcacttcctctgtagaacccatgaaatcgcgtggttgcttcagtaatgagacattcccaaggagaggcacagtaagaaagggctatatcatacaaatcacatatgtttgccagagcttcaatctgtgttcttaactctctagtatgcagaaaaacttccaataatgttatctttggatgaacgacgtttgtaaggctgcctaaccgagaagaaccatggtcagacccatcaacaatgtttgatgaacgcctcagttctatcgatgcacataatgtatcaagcccagatatatagccttctaggaccctcctcacagcaatagcaaaagcctgattaacaagagtatagcagcttttgttattgacttcttcattttcaccaattttacagctcccctgtccctcaacagctgattccacatccaaattcaatcttgtgaaatggtcaacgaacttatggagaagaaataccaaagaaccgaagcagcctatatctctaagaatctgtcccaacgcatcagtgcttgacaaccgatgccacangctcggaattttgtggaaggtcctgtcagctggctcagaacaaaatgcagaagagagctgttctatactaattttagaagactcaactccttgcagagcattcagcgccaacctgaccaagctcgattcctatcacaaacaacaagatgtaagaaatgagaagtaggttcaattacaaaacatttttctctaaataacgcagaactagactatgaaaggactatctacatatctcatctaagcactaaagacagtacatcattctcaacaaaccctagattgagccctaatcaaactcaatcaataaaataactcactgcaattgaagtttcccaaatccccaattagggtatccgatctaagccacacagaaacagatacactcacacaaaagcaaaatgcaagttcgaaacttacagagacaaaggaagaagatgaagaagaagaagcagaagaacgagttggaggaagaaatcggccgctttgagacggtaaagattcccaatttcgcggaggaaggtatggctcctccactttaagcgaaacgagactcgtcgccagcaccggcattattactactgccttgactggaatggttttagcgggaaaggg

SEQ ID NO: 65547 - DNA, 296 bp, Arabidopsis thaliana landsberg
aatgatttttttctatataaaaatagatgttgagggaatgcaccaaacacttcccatgaagaaaaagttgttgccctatctattttttatttatgggagcgagctccataggtttcatcttaagtcatattctcacatcaaacttagacctacttcttctggttaaagaatagtttaattaatactggtttggtacctaattggtaaatataattatttttattcacctaaatcggaaatcgacctcacacatctattataaagaaaaggtataattggggtgcgttaggcatcat

SEQ ID NO: 65548 - DNA, 2130 bp, Arabidopsis thaliana landsberg
gatgcaatattacaaaaaccgttatggttcttagaaaactctgtttaattaatttcttgcgcaacaagaaacctaagcctaaacctttttgatgaaagccctgtttctatggctcttaggttggtgggggactaagagactcagaatcaccagatgatatctactgttggcaaaaaccagaagacatgtcctacgaccgtcccgtcctctcttccacttcggccgctgaccttggcgcagaagtttctgcagccttagctgctgcttcaatcgtattcactgacaaaccggactacgccaaaaagctcaaaaaaggcgcagaaactctatatcccttcttcagaagcaagtccagacgcaagcgctactcggacggacaaccaacggctcaagctttctacaattcaacaagtatgttcgacgagttcatgtgggctggtgcatggctttactacgccactggaaacaagacttacatacaattcgccaccacaccgagtgtacctcaaactgctaaagcttttgctaatcgacccgagttaatggtaccgagctggaataacaaattacctggagcaatgttgttgatgactcggtatagattgttcttgaaccctggtttcccttacgaaaacatgctcaataggtaccataacgctactggtatcaccatgtgtgcttatctcaagcagtacaatgtctttaaccgaacttcaggtgattaattactctgctttactctgtttttcgtttgtgtgtggtcttgaaaatgacttgaaccgttttgtggagaaaattttcaggagggcttatgcaactcaacttggggaaaccaagaccacttgaatatgtggctcatgcttccttcttagcttccttgttcgcggattatcttaattctactggagttcctggatggtactgtggacctacatttgtagagaaccatgttctcaaggattttgctcagtctcaggtaagaatggagcctttaaaaacaaattatgacttatttagaacatatcatgattatgttgtatgtttgatcagattgattacattcttggagacaaccccttaaaaatgagctatgtggttggattcggcaagaagtttccaagacgtgttcatcaccgaggcgccacgatcccaaacgacaagaagaggagaagctgtagagaaggattgaagtatagagacacaaagaatccaaatccaaacaacatcacaggagctatggttggtggaccaaacaaattcgatgagtttcatgacttgcgaaacaattataacgcaagtgagcctactctctctggtaacgcaggcctcgtggctgctctcatttccttaaccagcagtggtggccagcaaattgataagaatacgatgttcaatagtgttcctcctctctactctccgactccaccacctcctaaagcctggaagccttgaaaaatattgcatctacgtcactgagtttaaattatacttgttatattcaatcttttttttttattacttggttacataactatatcaattttatttttcctttatatataaacataataaaatcaatgcagtatttttcttgaagaaaatattattattctacatgacaatacaaaacaaaccttaaaaaatagatgaattttggatcactcagtcgttagtctttctcctagtaactattagtcgaacatgaatcagtcttagacgactatgatacgagcatgatttggtcattggtgacttcaataagcgaccagtgatatatttttattcattttgtagtcgctggccttgcattgattcttgtttgtttcatagtcgctaattttgtgacagttttggtcaactagctactaaaaaatgtcgatggctgaaattttagcgttgttgctggggtcaacaaaacaaacatgatttagtcactagcgagcgattggaaaacaaacatggccattctctttcttggtagtgatggttcactctctctcttttcatattttgtttctctttctcgtttagataccaaatattatgatttttgaatgtggtatgtgcaaactatgtattcttattcaagcctgaaattggtaaggccctttatccatgaatgttgcaaca

SEQ ID NO: 65549 - DNA, 1083 bp, Arabidopsis thaliana landsberg
aaactactctctctattatacaaaaaataacattaaccaacatcaaacttatacatggttttaataaatcactgctttttggggatatataaaataaaaatacacagcattgattgaaaggaacacatgaatgaatgaaataagattttggaaatgatcgatatgtacgaaggtaaaaaaaacagtatacatttgtcgagtctgtgaccgtacacaaaatgtcaggctccataaccttatgcccgatagaaatgtatcattacactctctgattcacatatctgtctccatctcgagattcgtgtttcagatctaatacattaatgtctacgtacttttgttcgtacgtacgaattcgatacgaaacttctttcatgattcgtatcccaattcccaaccttacttacttttctccaaattattagtcattaacaactaaatcaccttataatcaaaactcatatggaaacaatgatgtggacctaatttcggttggaagatattttgtttatctggcttagattttgtcctttgatttagggaatcaaaagaaagtcataaacattaattttgcttgtaaaatcacacatttcagatttgttctcgtatgacctacaaataaagtatatgattacacaatcaatctttagattcaagaactttgtccctacttcattatattcagctaacatttctttttaattctctgtcgtgcgaaaggttgttgacaatataaatgatatatgtacttgtacgcgtaatgctgctaatacattttaatttgggcttcttctgggccttaatatttgggctttaaataagttatctctcccacttacgcatgtaaacacagctctgataattacgctgaggtggcattttttaattggctaatgcattaagagatgcgtggcgagaaatttccccttctataaaaattgttgaagagtccggtcaactccgaaagtcttcaaatctctccgtcacgaatcgttctctcgtcgtcatcaaaatctggtagccgaatcaggtgagccctttgttatttttggtggttatgatctggatctcttgtgattgagg

SEQ ID NO: 65550 - DNA, 137 bp, Arabidopsis thaliana landsberg
ggtttgacactgagttggatatgggcttttcatttcaataaagtgactccgcgcgatgttttttcctctactatgaaatatgaattttattcatttcttcaccggctgggccatgctcccgacaactcagtcatatg

SEQ ID NO: 65551 - DNA, 597 bp, Arabidopsis thaliana landsberg
  unsure (1)..(597): unsure at all n locations
aatgacaatttccttggcagtcaaaattattttaatcttgacatagagttttctacttagtaaaaaattatcttaacatacaaattaatagtgggaagtgacatagaaactatcttaacatacaaaatcaacttatctttacatttttctaactagctaatcaacaatgtaacaaaaaaatatttgattattgattgatagtgttattatatattcatacaaatgagaaaagatttgaaatgataggcgaaatttttattgaaaagttctatcaatttttttaaaagtttaggacgaccctattcaggactatatatgatcatatggattacaatggtcactgaataaattattttgaattatatcattccctcttgatttgtcttaataattcctaaataaatgcctaggtcagcgaattcgttgttgcatcagtcacttaattattactcgatgattccttttattactaaaatttattgaaaatggtcccatttattggaagaataaagaagtagttacactaaaatttaattatagtatatggctaaatntgtaaacccgtctggccattttgatatatatatacatatatgg

SEQ ID NO: 65552 - DNA, 615 bp, Arabidopsis thaliana landsberg
gcgcttatggccgcaaaaagtaacctgctttaccaaagataacatcatgaagatgaccgacggttgttttcatcgtgtgtttgagcaggtgggcgaagaatatcctgacattgaaaaagaacactggatcgttgatatcggcgcagcgaaaatggccaacaagcctgaaaatttcgatgtgatcctgctgccgaatctttatggcgacatcctgagcgacgttgccgctgaaatcgccggttctgtcgggctggctggttcagcaaatatcggcgaaggctgtgcaatgtttgaagccatccacggcagcgccccgcgcagggctggccaaaatctggccaacccatccggtttgtttctgggcgcggttcagatgctggtgcacatcgggcagaccgacattgctgaaaaagcccacaacgcctggctgaaaacgctggaagacggtgtgcacacctatgatctctatgatgagacgatcagctcgaaaaaggtcggcaccaaagagttcgcggaagaagtgatcaagcgcctcggccagaagccagagaaactcaaggcggccagctataaaaccgctccaaagattccgacaattactgcagcgaaaaaaga

SEQ ID NO: 65553 - DNA, 1362 bp, Arabidopsis thaliana landsberg
ctgtataactcttgcagtcaatatttctacatctagaatatctacaaccaaaaccataattgttaccaattggtcccttaatataattttaatggattcagtttttttttatcaacaagaaattaaattcgaacctagattaaaaaacgtaaacaaactcaaatttcttttaaaaataaggatatatactaaaagttcaaattcagaaagaaaaaaaaatatactaagctatccattatatattagattttacagaggataaataaatatatattagattttactttttagtttgggtatcatttttggataaaactcgtgggatcataacctagtatataaaataatttaacgtttttttaatgacatactagataagctatatattcagaaaagaaagaaaatagaaatgcacaaatgaacatattacattggaaacaaacttaaataaagctgtaacttaatttcattctttatttttcaaagtctcgaaaatgtaaatgtcctgtaaattgttcataaatttaaaagataagaaatgaaattcttatataattaataactaaataaatcgcagaaatcttttattattatattaatatttatccatagcaccataacatttgcttttcaatatcttctaaatctgcaaaaccaaacacaaaagctttcagcaattcatacaagaaaaacaaaaaccttaagaccattacacaaaactcacaagataatagattgcgccgttttggagaggttgataagtaacaccaaattcatctgtaagaataggctggccaaacgagttgatcaaaacggcatcgtttccgaaagctgccttaacgttgaataatccagacactacttcgataggcatctcgttaataaacaccgtcattcttaccggataaacattatctccgacgtcttcaccaccggataatcctacatctcgtttttcttgtgatcaatagagcacattttggtaattaatgttagtcaaagtaattaaataatactaatttaccccaaaaaaatacacagtaaatggtcaaatctaaagaccaaaacgtctttttcccaaaacacgtatgcatgtgttactcgttccaaaatatgggataatttaataatttatttaccataatctatgacctatctaagtattataattcatatatatatgaccaagattccttttttttttttttatgaccaagatacatatacatatatatatatatacacactaatatatgaaatatgagaaatgagtgtacgtacatatctctgtatatgtgacattggataacaccagcatgaatatggtaagaactatatgatattagattcgatatgtatatg

SEQ ID NO: 65554 - DNA, 143 bp, Arabidopsis thaliana landsberg
  unsure (1)..(143): unsure at all n locations
aaatactagtccctgacgaagggcaggccatgtactagtatacaaatatatatagtgntcattctaaaaccggaccaaacccgaccaaagggagccatagaccctagactcaagcgaacagcaggacacagcacgcggcgcga

SEQ ID NO: 65555 - DNA, 554 bp, Arabidopsis thaliana landsberg
  unsure (1)..(554): unsure at all n locations
caaatcacctaaaatcgaaatattataaggttcagtattgttgatattattgatatgctcaatgatctttgctttggcttcatgtgtgccatgagaaaagttaagacgaaatacatttacgccagcttttaccagttccaataatttttcataagtatcgcaagccggaccaactgttgcaacaatttttgttttatgaaaagtatgttctattcctgcttgcctgtccatttctttatgcaaatatttttcaacgtttttcgacatatcgtaatctttaactcgctaatattttaactattctcaaccaatcttcgcttatcttttgtttttccctgatagcaatttcgagaggcgtataagccattacattattcaccacgccaaccattacattgtgccttccttccatcaggctttctatggcatggtagcccaattnnnnnnnnnnnnnnnnnnnnatacacgaaggtgaaccgcctctttgaatatgtcctaaaatagaaacacgtgtattcaaatgtggcanacgttcttttacactttagcgatct

SEQ ID NO: 65556 - DNA, 894 bp, Arabidopsis thaliana landsberg
ccgagacgaataaccgtaaccacgccgtgagatcttctggatctgctgctttgagttcgtcccttccgtcagtctctccgacgacgcgctccatcctaagctaagcgaccttgatcctgaaccggaatccgagcaagaggtgatctctagatcggtacctgaaatatcggtgccggttccggtaacggagtcgatgtttattattacgccgcttgggaattcgattgttacttctaggagctcttcgccggaggaggaggaggaggagggtgagggtgagtatgttgctggtaaggatggaaagctttgggtgaattctccggcggaagctaaatcggagccccaacgatcgttgtgagtcccgccggaaaatgacattgacattttgaatttgttgggaggagaggagagaagccaaggagggagaagactgaataaatacagtttttgaattttgtgtttattataaaatttgtcttttgtactaatcaaaggaacgaccagaggaaattaccaaagcagaacgaagatataaaaataagtttggtttctaaaaatacggttttaaattatactatatttacgagttacgacacaaaaaattatactatatttttgtgcatgttttaggtacactttaattatacttaactcgctgttgttgtgaaattatatattttaaaaaaaaaattaatttgtttagcatattaaaaatatatatgatttaatgttttgaatttttatatattaattaatgtataatcattatatttgatttttattctttaaaaatataggaacaataaaatacaattcatttggttaaaatctatatcacaactaaataatttgagattgaatagatttggtttgtttagtgtttaaaactagggg

SEQ ID NO: 65557 - DNA, 542 bp, Arabidopsis thaliana landsberg
gaagagattgcaatcggagagaataataaaggtgcagaggtttggttgggaagagatactagacctagtggtgaatcacttctcagagctggtgagatcggagttggttcaattttgggatctgttgcgattgacattgggattttgacaactccgcaattgcattggatggttagagctaagaataaaggtcttaaggcaactgagaatgattactttgagaatctatctacttcgtttaggtgtttgattgatttgattccaagcagtggaaatgataagttagagattagcaaattgcttgtagatggtgctaatggtgtaggtggacagaagattgaggagctaagagggtctttgagtaatttagatgttgagattcgtaacacagggagagatggtggtgtgcttaatgaaggtgtaggtgctgattttgtgcagaaagaaaaggttttgcctgtaggatttgggtttaaggatgttgggatgaggtgtgccagtctgcatggtgatgccgatcgattggttcacttttacattcc

SEQ ID NO: 65558 - DNA, 439 bp, Arabidopsis thaliana landsberg
aaaaagcccgggggagccaaaggcgttagagcccttatagaaagaggtttttgttgttttgaaaagtaataaaagaaataatttctttggcgaatgtgaatattcatctgccggaaaaaaatgaatttcaacctctcaagtctcaactgttcggttttatacctcaactaaattacattgtgtatatcaacatgagctaacattttattaatattgcccttcacaatatcattgactttttttttttttaaattatctggaattcaaatccaaaggttctacatctcccagatgcgagacacacactgcattaaattcattttatctggagaagagatcattttcaacatgacccgagaaatataccactgggccaagaacaccttggttatcattgtcttcttcaaagttcattaattcataaaattcacaaaaaaaa

SEQ ID NO: 65559 - DNA, 590 bp, Arabidopsis thaliana landsberg
  unsure (1)..(590): unsure at all n locations
tgtatatagtttataacatttcaacactacatacatgttattttttagatcgaatctacttgaattacgtaccagcctagtaaaacaattttaggtacgttaattttcggttgaaatttactaaatatatcctacagtaaagagatttattccatgtgacagaaatatctaacattccaaacgaatcaataaattgcaattttgattacgcttcagtttccatatgtcatgtcatgaataacaggtaaacaaaatactaattaagtgatcaagaaccaatattgctcataattaaccctttacgggtcacatactgtacgatgatacagaacgagacccatccttcaaaagtctagacaatgattttctatcgacatgacataataaaaaaatccaaagataagactcttatagtcacgaataaatactagatatataattagatataaaaaattgacaaccattttctcaggtgccaaccaaagtgacatatcttaccttactcagttcctgattctttgattatttcccgaaagtattctgacctttacagttggtataaagacatgcanatattgcatcagtgaagc

SEQ ID NO: 65560 - DNA, 2549 bp, Arabidopsis thaliana landsberg
cctccacttttccgaagcagatggtctccgttctggagataagctctacccagctcactaaagtcaaactgtggcccatctgaatcatcttcctccatagcatctgataagacaggaagggtaatatgttcgagctcacacttctcagttatttcctgtttctgtgagatcagctgctcaatttgtgtttcctgatagaatatggaagctttagtgtatctatactcaaacatatcagatctttaggaaagggttagatgaatcttcattgtaccttcgaatgtatttgacgattgagcttggttatgcttgttgtcgcttgagaagcctgctttttccaatccaggatttccttctcatactcctccgacttttgtttgcactctgcaagcaggagcattagatagtctctaagaaagaagataccagtgcagattcttgctaggcaaagaacattagacaggtaaggttataatcaaagtatatggttctgtaacttatgcttatacaagcaaaagcaatgaagagagtagcagcgctacagaattaatcatactgaattttcacatcaaccatctgtcagcctcaagcagtttatcatgatatgagtttctttctgaattagattcagacgtagcataaccatacatttacgcaagatgtcgagcagaccatgtacatctcaaaatttgttcaaagagcaatcaaccaaacatcaaggattatgtaatgcaaacagacaattggttgaaaacagcatgtagatatccatagatataaccgctaaaaagaattagaaaagtccatatttgaatatatcaattcagtaacagagctccaacatagatacagacaatgtacttttacaggttcatgataatgtctgctacgaatgaaatcctcaaattgacaactcaaaatggcactgagattaaaaaaaagtatagaactaaaaatgtcatcagatgtatgtaaagatagaatcaatataccttccatttccttcttccaattgttgatttccttagtaatttttaccgctgtctccttacgttcagacattgtcttctgtataccttccaaatcagtttccagagaactgatagaagactctagctttcgaatccgtgaccccacatcacggttttgctcatattccagcctgaaattcgaaaaaatgtttttcatgaaccaactaaattacttacttttactctgatcatacaactcaagctccattcaatagaaagcagtatgtcaactcagccaaccagttagcgtgtagtagaggtttgtaacacaggtttttacaggctacaggatactgaccctcacacacttggtaatacaagatagagtagaccatagctgcataataattacaaaattcacacagttccgtagtcccttctttttagtaggcacgtgaaagtcaaaatgtgacaacaatatgatgcacaagatagtgtttagttttacaaaaaacgaaaaatcaggaatggcatgttaacttcagaatcagagctatatgttagcacaaaaacgggcaaaagaaatcaaaagagagtaacatcgtaaatgtgtagttggtatgtaaccagaaaaacagagcagaagagacatactggtattttaacttagcaagctggttactcagttccagcctttcttcggcctccttttcagcagtcttgagctgagtttcttcatatacacgtatgtttggaaccccaacagactggctaaaatccttatagatacggtccacgatctcattcattcttttctccaacttattcatttctgtctttctcttatcgacctcagttcttgcctacattaaataccaatgacattcagtcatactattttcatcaggtattaactctaccaaatatcagaaaagatagacaattgccttagagagttcaggttttatgcgatcaatttcttcaatgatattccgctcctcttgctcaagctgtggaagtttgtctttgatacttttctgttaaacaaattccccaattagtatattctgaatagtgacagctcctcctagcagaaggaaagataaaatgggtgctactgtatggcattcttatcccaatcagggttctcttgacaacagtaagtaaaatatatgagaccactcatcttagaaaagataaattggttgttaccttctcaatttcagcatactgaatctttttttcaagtccacttattttacccgatatttcagactctttcatttgcatttctcgaatagatccaatattttctagttgttgttcaaaatcttctttatttttcttcaaacctgcacaaacaaatatctgttctaagaaaatacatcagaagtgaagaggctttaaaccagctggtgtcaaactaaccttcaattttcttatcatcccatttattagactttgcttccattccaccactggtaccaccagtcattgttccagcctttgtgagtaatataccatcaacagtcacaactaaaaaaaataaaaatcaagttatgtagaaagtaacgccaa

SEQ ID NO: 65561 - DNA, 436 bp, Arabidopsis thaliana landsberg
gagatgtttgactacttggtcagactcagattttctggtttagaagtgtagaacccattcgagtattttaatttttgaattcggattcgggattcagatctgtttcaggtcgggtgctcatgttcggatattatgcctatccctacgcgagaccatgtaattaattctgttttggagagcttattcctccaacgtagatcaaactcttgacttccaaaatccttacatttttggtaatccagtcttaagcactaggataactcgtcggcgataatttaactctaccatttttaactttgttcataattcttgattggctttaactaatatactatttaatgatctatttgcagaaattctatttaataagcgcactctacctccatgagattttatattgaaacagaaatggcttcactcaagatgaaccttggtt

SEQ ID NO: 65562 - DNA, 133 bp, Arabidopsis thaliana landsberg
tctagcgacacgaaggaccaaaacaggatcggtacgaccgaccacgagataggttgtgaaactttgaagacgacggcaagagaggggggagaacaggagcatttgctgcgacgctgcatgaattcaaggagag

SEQ ID NO: 65563 - DNA, 496 bp, Arabidopsis thaliana landsberg
catggcgagcgccggctaagcggggcggacgggaatggctggcgcggacatgatgggctgcttatatgccgactgtctgacccggaaagcttccttcgccctcccgcatcggtcgggttgccggtcgagcgttcctatagaccgctttgtcgtatcggaaaaacggattatactgatttaaccattcttaaaatcgatggaagacctgcgttccagatctggacgcagacgcctttccaacgcggaaagccggcgcccgtttttccgagaaatgcccgatggaggcccgtgatgaacggtcatttcgatctcgcggcgctcgggatgctggacgcggtaagcgaaaccgggggcttcaccgactgcagtgcccggatcggccgcacgcaataggagatctcggtgcggatccaggatcttgaaagccagctcgggcacaagctgctggagcgctctcggcgtggcgtgacaccgacggatgccggagagcgggtga

SEQ ID NO: 65564 - DNA, 370 bp, Arabidopsis thaliana landsberg
agctgaaaggggcggggaaagaggttacggaggttggcggggaggaagagaggaacggaggcatttacatgatagcaggtcacactaatatgccactgacaaatccttaacggttgcacgacacaagaacacatggtggcctgtttggacctataaaagccatggaagacggttctgatgctagggtataatattctatatttcattcgcttattcttttgtaaggagaggcataatctacatgacataagccttattggagaacttttcactggtgtttggactactaccaccgaaagacatcatcaagagtctatctgcagacgaccttcattgagtacagacgcagtttgcccatatatatagaggt

SEQ ID NO: 65565 - DNA, 512 bp, Arabidopsis thaliana landsberg
cgaagcgaaaagtgcgcatctacagaatttgaatcgaacattacttaatgtacatgatgaataacaaaggttaattttgaccatcatgaaggaaacataaacgaaagagtgaaggataagcaacatttagtcagtattataaaaatggtaaacggcgctgtcaacgtattaattttgcataatatataatgataagcttgggtttatacttatatttaaatagagaaagtgggagaaaagaagtctctatttcgccgtccaaaagatatgagaatccaccgactgataaaaaaaaaacaaaacaagttgggattaagaaagttgattaacacattaattaagcaaagaccaaaaccattaccactgatataatatgaaattgccgtggaatttttaaaatagaagaaataaatgttcaaaaagggaaggcgtaaaagtgattgacgaaaaggatgtgcttgtcctctatatcataattagcaagaggttaaatttattggtgattaccaact

SEQ ID NO: 65566 - DNA, 293 bp, Arabidopsis thaliana landsberg
  unsure (1)..(293): unsure at all n locations
gtttgtatgacactgatgaaacagtgatgcgatggtgtggatcttgttaaggggttatgcaactgttgttcacctaatgctgtcttgtaaggatggccgcagttgatgcatgaaacttactgtttctagagctcacatgtnnnnnnnnnnnnnnnnnnnnnnnnnnnnnnnnnnnnnnnnnnnnncgctattgataagagaaacattaggtgatgggggagtcttattacatacctatcaaccagatcttttacaatcgtacactatggtatccagtacatagggtgggcata

SEQ ID NO: 65567 - DNA, 362 bp, Arabidopsis thaliana landsberg
  unsure (1)..(362): unsure at all n locations
ttctccgacggaagtgcccccgtggctatccaaattggcgacctcaggatcgatcatgggctgtgttttgacctgctttcttgcggagattacacgcgattattcagacctccttctcactctctggtatgagnnnnnnnnnnnnnnnnnnnnnnnnnnnnnnnnnnnnnnnnnnnnnnnnnnnnnnnnnnnnnnnnnnnnnnnnnnnnnnnnnnnnnnnnnnnnnnnnnnnnnnnnnnnnnnnnnnnnnnnactacctgctgtgtgggatgcaatcgagtgccttggagacaaagtcaccgtacaagccaccatcttcctcacgcgcatggatacctgctcaacggttttagggtttaata

SEQ ID NO: 65568 - DNA, 120 bp, Arabidopsis thaliana landsberg
tggtaagagcttcttataatgccaaagcctagtcctctcgttgtagagctttgtgttctcgtaggcctcttgccttatttcgtcgaggtggttcaattggaccaaccgcctatccgaagc

SEQ ID NO: 65569 - DNA, 646 bp, Arabidopsis thaliana landsberg
acaagacaccgtgcgatataatacatgcgggctttttatgtttacttaacataaggtatgagcagaaaaaaggatgcgaagttatgatctaagagggcaaacatttatcgtactaaggagagaaccagatttatgttaataacgattcacagaaattaaatacgtctaggtactatccatccatttagatgtttagggctcatcaacacacaaatgtggtccattgatttttgttcatgtgggacaattctggtatatactatatagtctatagcaccttaacatacattctagtctgacgagtgtttgtctatgctaaaaaactgctaaccgaacaccctcatatatatatgctcgtagaattatatatactctttttgagattattttatataatatatttcttacacttcacttataagtggtacgctaccaggaatagcttactatagaaactttctaccttaaatcccgaagattcaacacaagcttcgaattaatatctattttgagttattaaagtatagtccaatcgcttataaaattctatttttttacatcatctgcatttggtgagcagactgtacatttctaggacatatatatcgtgtcagtctaaactaagccagttcagcctaatgaaaaa

SEQ ID NO: 65570 - DNA, 1813 bp, Arabidopsis thaliana landsberg
tagtgtacttttgcttatctttatcaggagctagcaaattgatcatatcctgaccaacagcagctctgcaagaaggatctggacatcgtaatgtaagacaccctggaccatcattaatcgctgtggtgatataacctaaagatgaggggaaaggtcagatagttaacccaacaataatgaaccatcattaattgtaatgcttatatgttgcaatacttgcaaatgaagactgaaatgaaacataaggtacaagttactgaaatcaagcaaaaaaaaaaaacagtacattgcaagttaaatctaaacatcacgtttggaaatgggtctcaatatataaaacaaaccttcccaacatgagtcgcagaatggatgaccacaagcagcagcatgcaatttgtcagaaaggaaagtctcaaaacaaattccacaatcaagctgccaaaatgacacagctgaattctattagatgaatttacaatgttaatcgaaatgaaaatataaacaatgggagacatacttctccatcagttgggaaatcaacaacaggtttctctaataaaccaacagcatctcgaaccttttcctcatcagcaaaccattcatcatgaactctgctcacacacctaaaaaaatttacacaaatgaaaagttcctctaagcacacacacacacacaatagctgtaatatctgaataacagaatctggaatcacaccaattgtagtgacgaagcaggatcgcagatgaattcctcgaaatggacaaaacagtagaaatccttgaaatatcatcttcttgaagcttacaaatatctgcttcgcttaacacactataattttgctacaaaccaaaaacaaattcttcattagccattgtgatctataaaattttctcaaatcatcattaacattacaaaaaggtcctgcgattaattcagaaaccaaaacttcaatctctgtattggaaacaacattaatttcaattttggttaagatgtagatccagaataatggagaagagaaacctggcggcgacggaagataaggtcatcggaatcatcagcagcgtcgtcaacgaactcgtactcgccgtcggcgtcatcttcgtcggagtcggcgtaatcggagtagttttcggtgccgctgtagaaatcgtcatcagcttccattgagattctcttcttctcgattcgatttcgatttcaaacacaaagcttaattttagatactttctctctctctcgtaagaagacgtttggaagggaaaacgttttaatcgaaaaaggaataatggcaaaatggtaaattaagcttagccactaaatccccttccaattttatcccaaggcacgattagaagaaatatttaaaacgtttgtttcaaattttttggtgatgaaggcaataatgttttatccaatgaatatttaggataaagttgtatatatggcaacaactaataaaatttgttttgctatctctcgacttcttctcttgaaaatgtttttttttttcgaaatgaattgtttagatcgataacggctaattgtaatttcatgttcacaaaaacaaaaaggatggaaaatcataagtaatccaaaatgaacatgccggtacagcaataagtaaatagttcattaatttacgagcttgattatgtaatttaggtgaaacagaagccaaacaaacaaaaagtattcaagataacgagattctaaaattttgtaagcatcgacttaaaaagactttcctggaacgttaagagtcgggacaagacattaaccggtactaataccgccagttaaggccaaaatg

SEQ ID NO: 65571 - DNA, 115 bp, Arabidopsis thaliana landsberg
tttacgtaggcatataacagtagctgcaggaagataacaaactccttcccttggttttagcatctagcgatgttgtgagggacgcagccttggccggcggcataggaggttgcat

SEQ ID NO: 65572 - DNA, 462 bp, Arabidopsis thaliana landsberg
  unsure (1)..(462): unsure at all n locations
gctgatcagcgacaatctcaagatcgacagcgattgggttgtcgcgacggccatcgtcctcgccggcgtaccgaacggcctgtatcgcggcgcgctgaagggccgcgtcaatnnnnnnnnnnnnnnnnnnnncggcatcgtcaatctcaccaccgatatcgaactggtgcccggcccccggggcggcttcggcctgtcggggcggttcggcgtccgcaccgccaggcttgaaaatgcctccgtccgcgattttctgggcggcaatgccatagtttcgggccgtatcggcatgacgccggagggcgacttcacgcttgcccagctcaaaggcggcgcgcccaatttcactttattgtcggggtcgggacgctacnnnnnnnnnnnnnnnnnnnnnnnnnnnnnnnnnnnnnnctcgcgccaatatggccctctatccctcagcgtgcgcgggaccatggatcg

SEQ ID NO: 65573 - DNA, 539 bp, Arabidopsis thaliana landsberg
agccagaggctgatcggattgccggtcctgcggtcgactacttattttatataactgttttccggctcgtaatagttttggtcgtttcccttgaagccgagattctcgaaaagatggtcgttcaggatggctacgatttgctcaggttcgtcctgcaaatggatatgctctcgcacatcatcggcaaaactatccagcaaggcggagtaagcattggcgttgatattggggtatcgcgtcctggccaaatgccaaatgccctgctcgacattgaactcctctccttgtttcaagcagaacgaaagaaaagcggtatccatctcctgccgcgcaaagaaatccacaatttcccgagaacggcggcgcaataatggatcatcgctcaaaaggtgtggtcgcaaccaatcaaccgcttgggaaccacacgaaacaagtttctcccggatagtttggtaaactgcgtcatcctcatcgccaagcaaactgatgagtgcggtgcgttgattttcgcttgagttcaggactagaacatttgagcg

SEQ ID NO: 65574 - DNA, 537 bp, Arabidopsis thaliana landsberg
tttgagttttgtttacgatccttaataccacatagtcagaaatattaaaagaagctaagagatcaacaacaatggctgttggttcgatgaatgtcgaagaaggcactaaagcttttcctgcgaagctgacaggtcaagtgtttctttgctgcgtcattgctgctgttggtggtctcatgtttggttacgacatcggactctcaggtttgttctcctattggtttttgtctgtcagggtttgacagtttttctagtgatatcaattaatggtgatcaaaatttgcaggaggtgtgacgagtatggacactctcttgttagattttttcccacacgtgttcgagaagaaacacagagtacacgataacaactactgctaattcgatgaccagctcttgcaggtggtcactttctcactctacttggctggaatcttcgctagctttatttcttactatgtgtctagggctcttggaagaaaacccacgatcatgctcgcctgcatcttcttccttgtgggtgctatgctcaacttatct

SEQ ID NO: 65575 - DNA, 672 bp, Arabidopsis thaliana landsberg
tttgaatgggaaatattcaaagtatgcaacttgtagatggagataaatgtagctgaccggtttatatttagttttgagcaacattttagctttcttagcatgcactctttattcaaaacaaattaaaacataacattctatagtcaaataaatcagtttctttgtaagataatgcatatgttaagaattgtttttgtctaacaaaatatttgttaggaattttaacaacagtctgaaccatttacattgtggctataaaattcttgattattttggttttaaaattcatttttcatattgtcaaacggaaaatcagaacaaaatctcgaaaattagtttgcgcaattataataatttgccatgattcaaaggtaagcccatataaaattttatattccacattgcatatgtatatagtataaagttcactttttcttttggttccccaatgtaatttctttaaaagtaattttttaccaactttgaaactaaaataaattccatataatgtatatattaaatcctcaatggaacgtgagatattatagagtggcaaatctattgtgatatatttcttttgaaacctttatcttttttaacaaattgaatattgcaaaaataatatacttcaactaaaaaacgactaaaaaaggagaaaagtgaaatgggaaa

SEQ ID NO: 65576 - DNA, 520 bp, Arabidopsis thaliana landsberg
  unsure (1)..(520): unsure at all n locations
tattatctgcggtactttaaagactaaagagttttgctttaaattcataatggcgattatatttattggttcacataaacggtcttactttcaacatagtgaaaaacaaatccatagtataatatttcttgactctaataagaaagaaaaacaatgtccacttgcactatactactagttgaagtacttctcgaacgcttcttctcccttgcagtgcatagagatgaatgcgtagatttccatcatcaaattcgggaaacgagcagtaaagaagatatccaatccttcaggaacctttcccaccatttgctgagacacatcaaaagttttaagataaccagtttataatatggtcatgggcatctttatataactttgttttacaaacctgaaatggttaactatatgtacataatttgtttataaagacaaaccttaattcttggatcatcaagtatctctctgtggtgactcangatgtttcttatcaatcttaataagtggcgaaggctccaatact

SEQ ID NO: 65577 - DNA, 1712 bp, Arabidopsis thaliana landsberg
gaaataacaaatgaccaaacatcaatactgcgttgaagtgagctataattctcatcagcccagctaaaaccttcatcagaaggaagaaccctaactccttcaaccggtggaggaaggtacgattctgttgttttctttggtgccttaaccaaagtagacgccgcaccattaatgtttctactactaaccaaactcgctccattaacacctttcccagccgatccattcacaccatctttcctcttcaccacctcactcgcaggaaccattttgactgaacgtccattgattccaaccttagagggcaattccgactgtctcatctcaatacgaaatctcttagacttgctgccataacactgagtggcttccccagtgaaatgattctccaaagagctactaaaaccaatagctttggtgactcttgcggtctcaccgccatagcagcagctctgagaagctaataaagccgccatttccacctaatttacaagaaaccaattgaatagacacaatcaaacaacaaaattcaataagctggattcataaaactggaatgcattggagaaaattatgcggcaagcatcatttgtataatctaaagttctaaactataaaagtatgaccaacacaaaatttctagtgatagaactccattaaatcatacttgagcctattcaaaaccatcgagttcaacgacacctctaaattattgatttgataagagaatcacaacgattctcagccatgaaaaagatataaataatcagcgaacattaacacgtactatagcaagaggaacccaattttactacaacccaaacctgttctgaacctgggatacccaaaagtaattaagaaaaacaaaacaaaaaacagagtagaaattaagaaaaatggaacctttatcaaagtcctgaattgggttgactggtgagacaaagatcaacccagacccagaaatttcgtagcaggaatctgtagaatcagctgtattaagtagaggaatttcttggaacagagtcgagagagagagaggtaagaggactaagatgcgtaatggtgtcgtccttatgacttatgagacgtgtgttgttccaccgaattttccacctttctaccaaaatcaatattgagactttgtgcgtaaataggaaaaaaattggatttgataggacagggaaaataatctttgtaacttttagtgccaaaattaagacaataagagttttggaagatgcgtgtccagcttctacatctcacgtttattgtgtggacagttcgaaagagagtgttgagcatcttttctaacaataaaattaaaaggatataattgctcgttagtaatccacttaaaggggtttaaccaatttaaacggtaaacttttttaagagcaagcaaaacaacaatggttcatttcaaaaaggaaaatgacaaaactacatattaacatatgaacaaaacttgtgacgcttcaccacatagtttggcttctacatgatcggatcataggcagctccaaaaccgaagttccacccacccagactactattggaagtcattactctatcacaaaaccattcgtctagtttcttcttcccaagtatgaaatgttgcatttgcgagttcggcagaaaacgaatatttcttgctcttcagtagcgcctcctgagcaagaaatgacttccattcaccgaacaactctttcctg

SEQ ID NO: 65578 - DNA, 558 bp, Arabidopsis thaliana landsberg
  unsure (1)..(558): unsure at all n locations
gcgaacacagaggcgcgggacgttgcggatcgcgcccctgttgtgcgctcctacgtttttgcgcccggggcctgcggcgccgcgcgcagcggggtcacccgggcgatgagctcctccggcgcgtaggggcgggcgttggcggcgccccagaccggccgcggccaggcgatgtcgtcgcggaagcgcgcaatcacgtgcacgtgcagctgcggcaccaggttgccgagcgccgccacgttgagcttgtcggggcggaacagcgccttcagcgcgcgcgcggcggcgtcgatctcgtcggtcagctggcgccgctgcgtggcgtccaggtcgatcagttccaccgcgccggccacccgcggcaccagcacnnnnnnnnnnnnnnnnnnnntcgtccatcagccgcacctcgcacagcgccagctcggccacggngttggtgtcctcggccagctgcgggtgcaacgcgtagcgggacggtgcggacggctgcacggcggcgctcagtagccgggtgcaggccgcgtgcaggagcccaggtgcggtcagcgcagcttcggc

SEQ ID NO: 65579 - DNA, 545 bp, Arabidopsis thaliana landsberg
ccaaaggttcatattgcttgtaacgtattttctcaaatgtgcttcttcttgtaggattatggtggtaacaagcgggtggagttatctggacaactaatatctcttctctttgaggtgtcgccggaacatatcaccaagcacagtactttttattccgttttttcaataagattttgtctagtccttacctattatttccctccctctcctgctacaggatttgttcaaaacgatgctcagtgaggccattaaaaatgtagatcatattcttaacaaaccaatccgggctagccgatttgatttttctcaggtaagtgcagaaatacatttccctgttggttcaggtcttgcaataattttgttaacacaaaacatttttctttagacaccttctaatatttgcatctgtaaatgaacttcagtcaaaataacatcaaagattgatattttaagatttattctgtgttcccttcatgtgtcttgaagtaatctatatatatatatatgtttgcaatgagatcattattaactaggtgttatcatgc

SEQ ID NO: 65580 - DNA, 630 bp, Arabidopsis thaliana landsberg
  unsure (1)..(630): unsure at all n locations
gttgttttttttaaattttccgatgtagacttgggttgatattccaaaaatggtgctctacaacctttagattatgtatatgtcaacattggtatataatgtcctccaagatattacaacatcacaaccaatttaggaagagctatacgatatgattcaaacatcatatttttaatttttcaatggatttccatctttaattaagaaaattttgtgcgaaattaacgcatcttattttagatggtgtataatgagaattttgaaatgcatataaaacttgcacatgtttcccctttttgatgtgcattcttcaatgactaacataatctcctaaatacaacaacatcatagcatttgagtctctgaaaaaatgaaaaattatagaaataattgaaacaattagtaattaatgccaaaacagtttcaaagtcagaaatcagaacaagaataattatacacgtcttagattggtatatataaaaataggaagctctttacgttgcatttgacttttgtttttaaggataatggaatcatactgtaatgttaacaactaaagcaaaatgtttaagaaaatggaaacaatatgtaatgtttagaagaaaacaaacacatgatacatngatatga

SEQ ID NO: 65581 - DNA, 1459 bp, Arabidopsis thaliana landsberg
  unsure (1)..(1459): unsure at all n locations
ataccactggtggtcaacatgtgagcactgttgtcatgcttggtgcagcgagcattcctctgtagatggatacaagtgcttattttatgaagaaggctttgagagacttgagctgcggcgaggtttccctcccattgtcttggtaaatcggtgggcgtggggctagtatttcatcaaaataggtgcatggaatgtaatgtaatgtaatgttgaattgcaggtaaaaaaagccaaagtatacttgcaccgggagatgaagaaggaagatccttttcataagaaatggcctggatgttaggtaatcctacaaatagagacaatgttttgggtcgatgtaatgtagcattcctcagagaggacatgatgtaatgtaacaacggagatgcttgttactgacttactgtaatggattcaacaaattcatccagaagcatcatcggcctttgggctttgagttacgcgtcacaattgaatcaattggtccttttaattagttttaccaatatacccctccgtcttttcccccttctcgtttaggaaaaaaaatcattagcttcgacttatccgaaacctaacgagtaacgacgagagatgcttcttcaggcggcggtgcagaaccgcaatgttccactggcttcttccgcctcctactctcgtctccttcgctgcagatctcctgtcgtctccgtagctgctctctcgaagaagacggcagcaatcgtgtgctccatctcccaggtttatggctacggcacggtggactacgagagaaggccgattgtccagtggaatgccatctacaagaagatttcgctgatggagaagccagagcttggcgctgcttccgtcttgaatcagtgggagaaagccggccgcaagcttaccaagtgggagctctgtcgggtcgtcaaggagcttcgcaagtacaagcgtgccaaccaagctctcgaggtccgtgtcctccttgtatttgccctcgctttattttgtatctttaacactacttacttgatcgcgtatcgttttcataggtgtacgactggatgaacaacagaggcgaaaggtttcggttgtctgcaagtgatgctgcaatccagctcgacttaatcggcaaagtgcgtggcattccagacgccgaagagttcttcctccagctccctgagaattttaaggaccggagagtttatggttccctcctcaatgcctatgtgagggccaagtcgagagaaaaggctgaagnnnnnnnnnnnnnnnnnnnnnncaaaggttacgccctgcacccgcnnnnnnnnnnnnnnnnnnnnnnnnnnnacatgaacctcagggagtatgacaaagtcgacgctatggtcttcgagatgaagcagaaagatatacgtctcgacatttactcctacaacatctggctctcctcttgcggctccttaggatcagttgagaaaatggaactagtgtatca

SEQ ID NO: 65582 - DNA, 336 bp, Arabidopsis thaliana landsberg
gaactctcctggatattggcaggaggaagattgattcagacgaggctgagtgacttgaggcttcaaaagtggttggaggatagtagtatatccaatctaataggagcaatggatagaagtatatccaaacgaaaatttgttttctaaatactaaattaagtatagaaaagtgtgtagattactattttagaatgcaaatatcatcaatgagattgaatgtgttgtattgaaatgtataatataatataatgcataatactgaaattttgtttaaaacaaaatataataaattaaatagaaaaacaacgagtagaatactattttattatccaaaaa

SEQ ID NO: 65583 - DNA, 274 bp, Arabidopsis thaliana landsberg
ctaaggctagtttgagcttgaattcggcaaaggaatctgcaagatcacggagataatcgacctgagcataaagcacatgttcatcgcgaaaaacggaacattctacaatctcaacggtaaaaactaccatggaaaagaggctttaaagagattccttaaacagaacgaatctgatcaagaagagctcatgaagaagctccaagacaagctcatcgccgatgaagctgcagataaggaaactgaatctgaatctgaggaagaagattccctgaga

SEQ ID NO: 65584 - DNA, 563 bp, Arabidopsis thaliana landsberg
  unsure (1)..(563): unsure at all n locations
ccacatgaccctggatcaggcttttaagctgtgtttgttccactggtgaagtttctctttggatcttcactatgtctttgttcatctgttgttcaatgcgattcatttcaatgtttcacaaacaataaagaaaatatcttcaagataatttgtgatgtttaaccttagggaggagagtgttgtcttcgtcaaggatatatgccaatccacctgtcatcccagcggctacatttctaccaactctgcaattttcagaaagaaactattaagatatttggcgtttaagacactcttaagttctaggttttggtttagggctagaggctgagaaaaagagttctacttacttcccaagtataacgacacaaccaccagtcatatattcacagcaatgatctccagtgccttcaacaacagcttgagctagaggagtttctaaccgcanatctctcccctgctttgcctctgacaaataataaaccaccagttgcaccatacgacaagtgtttcctacatagttgcgtcttcggacgaaaccagtcgattccacttgtatatcacaa

SEQ ID NO: 65585 - DNA, 1833 bp, Arabidopsis thaliana landsberg
cccatctttgccgcttggacaagatcggcgccacaatcgttatttgctttttgctgtatcagtgtctaagagtgagggttgggcggggctcttatttgttgagctacatgatggcaagtggctcctcattgattcagaagaggtaatataacaacctcagcaatttgttaaaagattctagcttaaggtttttgattgccttttggtttgctaatatccagcttagatagagatttaaccatgccttctgtgaaattgttctgtgtaggcttttgatattctggttgcatcattggatatgcgtgggatcagagagtctcatttacgcataatgctgcagaagatcgagggatcattcaaagataatgcttgtaaagatataaagctagctagaaaccctttcttgacggaaaagagtgttgtgaatcattctcctacagattctgtgagcccgtcgtccagtgctatatcagggtcaaactctgattcaatggaaacttcaacttcaattagagttgatttaggtagaaatgacaccgagaacaagaatttatcaaaacggttccatgatttccagagatggatgtggaccgagacgtacagttcactaccttcttgtgctagaaaatatgggaagaagagatctgaactgttagcaacatgtgacgcgtgtgttgcttcctatttgtctgagtataccttctgctcttcttgtcaccagagattggacgtggttgatagttcagagatattagattcaggtttggctgtgtctcctcttccttttggagtcaggttgctcaaaccactacttgtttttctcgaggtaaagcataaatgatttttgtcgacttaagcgccggttcttttggtaccaacacttgacaactccctttttattgacaggcatctgttccagatgaagctcttgaatcattttggacagaggaccaaagaaaaaaatgggggtttaggttgaatacttcatcatcacctggagaacttttgcaggttccatcatcttgtttttctttctctaaattaatgcaaattggaatgatgttttgttttaaacccgatgtcttcctttttttggttttgataggtgttgacttccttagagagtgcaatcaagaaagaatctttgtcatccaattttatgtcggcaaaggagcttttgggagctgctaacgctgaggctgatgatcagggatcagtggacgttcttccatggataccaaagacagtatcagcggttgctttgagactttcagaacttgatgcatccattatttatgtgaagccagagaaacctgaggtgatccctgaagatgagaacgagcagattgtaagttttctagaccaatattggttcgaaaattgtttctaagttaatactttggaagttatttttttttatggttatggaatcttatgttacccacgtattgcagagccttttccctagagattcacctttcaaaggcaaaggacccagagagcaagaagatcaagacgaggttgctccaaacccgggtaacagaaataagaaacgtgcacgagtaagcttgggatctggatcaaacagaaaggtgaagaggaagaaagcgcaaagcggtcttaacaaatttgtcgttggtaggagaaatgttgcagtcaatagtaacttaatggccgttgagttgaaccaccaagtccctggaaaaggaaagaggacggttagaaaaagaccagagaggatcgatgaggacaattcccacctagtcaatagaatggctaatatagttaggcataaaagcgaagaagttgaagaagatgaggaagaagaagagc

SEQ ID NO: 65586 - DNA, 1071 bp, Arabidopsis thaliana landsberg
atgttatagaatttgtagaaacaagaggctagttagggtttccgacaaaaagatacttctctttggtaattgcaaaggaggtttattaactaaagaagtattttattgagaaactaaaacatcatccatattccacataactgtttcgaaaaactggagacatttttcacgataggaaattgctttttcatttatttcgaatcaactcttgtttcatttgggaatgattatttgcagtcacacatattttcttgaaatatttccgagttgatatataaatttcaaagctatctttataatgaaaagcttgattagttgcttgattgaaaactaataacattggttgcttagggtttctaaataagtctgatcttttttgtttttgtattttacccaagaaagatcccttgaccatcgatttgctaaatgatatgctttgttggaccatttctaatgaaatatattgtaccttattattgtagtgacatcgaaattgatatattctttttgagacacgaggacgagttctccgattctggtccgttccttgaaaaccttcacaaatttaatacttttgttataaaaaataatcctactatgcatttaactaacgttttcaaatgatactctagctgttaatattcgtaggaagtacaaaatactaatcccaaatgatattaactaatgaaacatagatggatcatgaaaattcacctaaacccgaagattcagccctcaaataagggcccattacactagctacatccatccggttatcataaactataagccggtttagacacatctgaaaaaccatcattacataacagagtggtcacttttatatttcaatcagaattcagaagctatgagcaaaaccatcaatgactagtaaacatatttacgaaataaggaggtttagaggttggctttttcttaaagctgtctctatcaaaaagaagacgaattgagttagaaaataaaagaagcagtaaatgagaaaaagaaaaatacatatctttcagaacagtaacaggtttaccactacacttcatgagatcatttaccacg

SEQ ID NO: 65587 - DNA, 190 bp, Arabidopsis thaliana landsberg
tagttttgagtctctacttacatctggtacagttttgagcctttggatgtatttttaagcaaagcataactcttttattctttaatcagaggcatgattggagcttttggggtgtgcgtcgctgaacactcctatccccaagtaagaagagtccgaaggaaacgaaacacaaacccgcaaagaatttgtt

SEQ ID NO: 65588 - DNA, 467 bp, Arabidopsis thaliana landsberg
gcgtttagctagaccgcttttgcttgagataggtgccctgccccagcgtgccgggcgaggacgggccggcgacgatcgtcttgccgcgcaggagcaccctgaccggccagccgcggacatcgagaccatcatagggcgtatagtctgccccatggtgcaggatatcgttggttatcgtcacctgcttctgcggatcccatagcgcgatatcggcgtcggagccgatcgcgatcgtgcctttctgcggatagaggccatattgcttcgcgtggttcgtcgatgacagagcgacgaagcggttgatgtcgatgcggcccttgctgacgccttcggaaaacaggatggggagccgcgtttcgacgcctgggatgccgttcgggatccagcggaaatgccgtttgcctttctcgttcagcttgccgctgtcatcgtcgtagcggaaggggcaaatggtcgaggaaaagagc

SEQ ID NO: 65589 - DNA, 119 bp, Arabidopsis thaliana landsberg
ctatcgctaaacacaaaccaatccttttacacagtccattgaaaggaagaaaacatgttctgaaattcatgttcctattacacagaccttcaaaactcgaataggccaattccactttt

SEQ ID NO: 65590 - DNA, 621 bp, Arabidopsis thaliana landsberg
ggaccgacaaatcaataataaatctactcattgactttgacccataaaattaacgcttgttgtgagttgttactaacttagttattattccaacgaactcttcgattaaaattcaatgtcattacagttgatatgcttgccactaaagatggtccagactccagtatcgaaccgaatcaagttagagttcactctgtgcttgggtagttgggctaatttataatcaaatcagactgaacacaaaccgatcaaaccaaaattagtctcaatatatccggttttctgcggttatgacataggtcatgaataaaacaaattttgtcggcaaaaacttggagaatgtgacacgtcatgcggcatgactcgtggattaaagaggcatggccacaaaactcacatggcgcttacttaagttctttcaacatcgaacacagttcactctaatttgtcaactacacgtaaacgtcaccgtttgggtgccatccccgtctttgagtccgttaataatattatgacccttgtatttgcacttgccccatatgcacgatcttcttctttcatttactaggtttttttgctcttatcccaagtttgaacgcttattttttttgacaacttttc

SEQ ID NO: 65591 - DNA, 1148 bp, Arabidopsis thaliana landsberg
tttatgactgcctttttaaaatgcaagaaaattaattgatttctgggaagataattcatttgcgctgactgtaattttaaactaagaggacaacttcatacttaactaaaaatcgattaccatttttttttatgatggcaaggatctatattacatcagaatgacgagatcagaatgcaacaaaacaaaaaaaactatattacatatatagttgtggaaagatcagttttcaatataatgttcattctggatatagaggttaaacaagtcaggccataattagctaattattcaattttatcaaaactttacatgtctgtagcattcctctgctaaaaggcccgcatcatagagaaaaaaaagagacatgcacgttgtctttaatcaattaatctacatgttgtgtcctacaacattattaaatatactacagccaaaatgctatatgtttgtaagtcaatattaggatcgtttcgcatggagttacttagaatgcatgtatcattgtatcttgtcattaccttagcgattcactaaaattttccttctctattaaactctacacatacatgggtttgtgataaattttaattaaaacactattaaactatagactctacacatacatgggtttgtaataaatataaaacagaaatttatgtgatcgagtgtaattgtagaacctaattcgttaatgagtatagtctttagattgcttcctgtcatagcatttttgtttatatatatacaataactaatgatatttgttagttacatgttttgatacaagtttcagtgacatgtatacctataagccgtgcttatgatttatgatgaaagttataacgccaataattacttagaaagagaggatctcatttccggtatgtttttcttttgtcaaccctttccaatatgtttaatatataatataatagtgttttgaattctataattggattctcattctttcaaatcgtttacaaaatactataatctaatttagatttaattttaccaattcattagattacttagataacacgcgtagagactcttgaccatgaaacagtaaacaatataatgtttgtacttaaataaaacaaatagttgtaagaaagaccaatataggatgacttgtacgtttt

SEQ ID NO: 65592 - DNA, 607 bp, Arabidopsis thaliana landsberg
  unsure (1)..(607): unsure at all n locations
ctatcgctttgcggatgatggcatagtccgggtcttctcctttgttctttacgatcacttgagttaagactgtattgctgcggatccagctcaaaatcaaccacgagatccgttctgcccacctgtatttttttctcccgggactgatagccgatatactgacacaccagcgtatactcaccgggaccaagctgaagctggtattgtcctttaccattggcagacacgccctgcgtggtgcctttgacaagtatggatgaaaagggaagaacggtaccgtccttttgtgtaatggtgccgctgaccgtagcggcgtcagcatgtaaatgaaaaatcgcagtaagcagcaggagtagttgtttgcccatacgttcaggttaccgcgaatatagttgccaggcatccgaatcgggcaacagcaacacgcagtttaacgatttattaaagcttgccgcaaaaactatccccgatcatttcgtcaggctgaacctattaagataactntttgttcctgccgggacattccatatttgattttagtgattaactcaataccatgaatcgtactgtatacacatcanaacaacttagtttatgagagtcattt

SEQ ID NO: 65593 - DNA, 602 bp, Arabidopsis thaliana landsberg
taaaacgtctattgtttcaaatgcatataatcgtttatccgcatatccgtataattgaatttcgtttgcagaggggctaaaactttctttatccagacaaaataccctaacctttaaattagtgtctctggaatgaataacgtctttgcaagggttactcgggtctgtggctaataaatatacgttatgatccataaaatagcaacaatattttatggcgatagtttgcagtaattaattttaacttaggggtttgtacttgttaagcagggggattattggttaatattagctctaaggtttccagcgtaagggttaatccgtctgctataaaagttgcctggttataaaaactttcacgttcctgcagcttaccggcaataaaagttataagttcatcgccatgtttattatgcagcagcggacgttcatcctttcctgtttccagccggcttgccaaacctttgggcgataactttaaatataaagttttaccattagcatttattcattgcatatgatcaaaacaacaaggcaagccacctcctgttgaaattacccgttttaggatatggagtttgtttaatacatccgactccagt

SEQ ID NO: 65594 - DNA, 346 bp, Arabidopsis thaliana landsberg
ccgaacagaaatgaatcattgtataaatgttaactacttatttattaatacttaactactgtttatagtacttactgacaagtataaaaacaaacaattttttttctgtatttccttgacataatcaaggaaccaaagaaagtctaccctgaactcctcaaatgttactatccaccattataacttgaactaccatttcctgagtctttctttggcatttccaatggttaaatattgatttttatatgaagatctcaaagatataacactgtagtaaatcttgagtttttcaataaccactttctttcacaaattacatttttaacttcatctagcttcatatgtg

SEQ ID NO: 65595 - DNA, 334 bp, Arabidopsis thaliana landsberg
ttccttcaccagttcaacggctaactccagtggtcacacctccagcctccctgccgggtaaaaaccaccttcatttccaaccacaccggctccaccactactccactagttatgctaaaaggtaaacaaaaatatattatgttttgataggtctcaatcaaaagctatggattaagcaacatataatttctatttggtagttaaatctgactttattgatacatatatagacaaataccaacacctaaaaatttaaagaaaaatacagagaatatgaacatgaatttcaaaaccaaatcgtaaacattgattatattagaatgttccacatttt

SEQ ID NO: 65596 - DNA, 454 bp, Arabidopsis thaliana landsberg
  unsure (1)..(454): unsure at all n locations
cttatgctcagccatacgaccccgtggtttgnnnnnnnnnnnnnnnnnnnnagcgagatagaaaagcgcattcgggcccaacgggcgcatcagctgcgctaatgaccgcagctcaaacatatattccgaaaccgtggtgaaaggcaacaaaaggagcaaattattctgcttcgcgaagcgatacttgcgcagcacatcgcgcatctcatcctggtactcgctgcgcacgacgatacggccatggtcgggattctcagactcggaggtgggaggggcttcgtccataaaatccaagaaacaattcgtggagtggctgtaatgccgcgagtagggcaggagactgtactggcggtgcatgaagatgactgcatacccttgctcaaggaagtactctgcggatgtagcaccacgggtaccggcggagaaattgtcgatgaatcgacagctgtgtctc

SEQ ID NO: 65597 - DNA, 495 bp, Arabidopsis thaliana landsberg
gacccttccgcatctgccgaccgagaagccgcgctacctgatgggcgtcggcacgccggacgatattctcaaatccgtcgcccgcggcatcgacatgttcgactgcgtgatgccgacccgctccggccgccacggccttgccttcacgcggcgcggccgcatcaacctgcgcaacgcccgccatgccgaggacatgcgcccgctggacgaggaatcgaactgcccggccgcccgcgattattcgcgcgcctacctgcaccacctcatccgcgccaacgagtcgctcggcggcatgctactgacctggaacaaccttgcctactaccaggacctgatggccggcatccgcaaggcgatcgaggaggggcgcttcgccgatttcatggcggaaacgcaggaaaactgggcgaggggcgatctcgcccgtctctgaaaccaaaagtcagatctccggccccggcgcggcgcgcacgatgtgcacgccgttgatcttgt

SEQ ID NO: 65598 - DNA, 434 bp, Arabidopsis thaliana landsberg
gccatggtgggccttacctttggcgagcattgccgcccattcgcatgaaatgcaggatgcttatcgagtgataacgcatgagcctgtaggatgaactgaacataaagagtcctgagctaggacctatgcatcgcgcccataacctagtgaactttcgacacagacctgggagtgaataacatacaggggacggcatgaaaagaaggggggggaatcagtccgatcataatagaactcgaggaaccatggggcaaccttggcctggaactctagtagacagtacagatggacctatttttacttggttgactccacggctcgcatcaaagcataactttcgaggatgtgctgagcatcaagtatcatacactcaaccagaacggccggatcgagaacatgaactaactaccgagaggggataaatgcataacaga

SEQ ID NO: 65599 - DNA, 405 bp, Arabidopsis thaliana landsberg
cgccccccccctttaggtggccagtcttggtacggttgtttgggaactcctgcctgccggaggaaccactagacctagagcgggcgtcaccgtgctggagctccaattctccctctctcgtggcgctgtacaactaactgtccgaccctgtacaacattccgactggtgaaaccccgttgctacccccctaaatagccttgtagcacattcctctttctgcaggtggcttactaccgactaggcccccaccgatcggccttgccaacagatgcgcactcctggtggagcacgggacgcgccctgtcgcggaacattaagccctgggggtgtagtggataccctcagcgagaacgcttcactcgccagagacctagatcgcgcatctatcgctctgttccactact

SEQ ID NO: 65600 - DNA, 442 bp, Arabidopsis thaliana landsberg
ggtaagcccccgcgcccagtgtcatggcaactgattttaccgcagaaaagttgtaaacctttcgaaactggtcaatattgccggaaaattccatgctctttcaaattttgttgaagtgacagcaaaactgcgcgtcgtaaggacgttacagttcctatggtcccggtccggaatatgtgaaccggaacgagaccattttccactccctttcaaccacccctatgttgaattgacttgaagcaggcatcaatcggttgtattgcgtgatttctcaccgaataccctgtgtattggactctccaagtattatccgaaaggatgaacctttcatggttgctgttttccgcgtatttgttgttttctggggcttcaaacgacgacaccgaaacgaccttcgaccctgccgccagtgctaatgaagaaagctttcctacgagcccac

SEQ ID NO: 65601 - DNA, 115 bp, Arabidopsis thaliana landsberg
caatgattcaaaaaggcttgagaaagtgtgaggttgaaagtacctaggcgtgttcttcaataaagttagagagcgttttggcttgttcttcggtaaggtttgagagattggaggc

SEQ ID NO: 65602 - DNA, 1895 bp, Arabidopsis thaliana landsberg
atctcggcactggatactccttgtcatcacaaaatcactgcactgctgcttacgttcgggaatggcattcctatttgaaaccaacaaagacaatgtctcaaattgcaggaaagttatttcgtatcttcaatggagtgtaaaatcagaatagaagagccacccggacaagtggcataatctagacaagctttgacagtgaagagcttactactatatagagaaaagaaactcacttggagagtgacatagaacttcaggccctcattgatgttctccttgatctctcgatacttcattatagcagcttgaatctgcttgtagcacttctccttggatgctgaacaacagagaaacacagaaaacgaatgtctgagagcaaaagaaccgaaatacgggagcataagaaattccactacttcaaagccgaatgtgtcagttctatcatggattatacttcaaccatcgtatagaatgcaatacagaaagtactttgatccatcatgcaagacagaagctgcttgctcacctttataatcttcaagattgaaaatagttgaaaactcttcattttgagcctataatcaaggaaagaaaccaatgagatagtagttggtttctactaggagtgaaacacgatctccggtagaagctagcacactcaatttgcttgaatattgattgattacaatcaccatacgccaaaggataaaaaccatgataaaatatgaaaaccactacaaggatggcaaaaagaggtagacctgaatttgcatcaataattgttcttgaacttcaatgttttgggaaatatcttcacaaatgtggtcatactttgatatctctttcctgaacatatcttcataggagcctgttatggtcatcagctttggcagtatgtcatcctaataccaagtatcaagtaaaagcctaatgagttttgactccaattcatacaataatcaagaacgaaaatgatgactaatcaatagaaaaaattcacctttctcttcatctctttgagcatgtcttcaagacctgcccgctgagcaccaagattttccagttgcctctgtgcaaaaagggaagaaaaaaagtgagaataatggttcgtgaaagcactttccaaacacacactcgcagcttccaaaagtgatagagattaccagactctgcttcaaagttcccacaatagcatcctctgttgcgtccagagacattattggcctagcaagagttgggacagcagactctatctgatgaagaaaaaccgaaaaccacaacatctatgaatcagtatacagatttaggtttgctatagctgactcaagtgtgtgatttgaataacctgtacccaaagatttcaggtacaagaataaccaaaatgaagttaagagacaacttccgatagcagtttatgcccaagaggagaaatatactagcatacacaaaatataggaagtacttaccggccgtcgatcaagaatagacatgagggcggagttatctctcactgatcgctcaatcttaacatcactttcgccagcttgtttcaaattggctgcaaaccgatttagcctatcctgcaagttctttgtcagtgtgctagattgaggcctagtccaccgagtcccaaattgacttctgaactgagaatcttcagttgcttctttctgcaaaagctcttcagtgtgcaccaacagttcctgattaaccctcttcaaatctctaagttgctgcagttcagcttccaagccagctggaccaccactgatctgaacagcttctacatcttctttaagatcaacaggaagagctgaattaccatccacagcgagaatagaatctggaagatccatctctttgagcctaactcgagttagttcgctagcttgctg

SEQ ID NO: 65603 - DNA, 1602 bp, Arabidopsis thaliana landsberg
ttaattttcccattctctatccttgcacataatttctcagtcttcctacgtttccttgtcccgtcttgtaatttcaattcaagtgatgagagtaatagttgcgacctttctctgtataaatctcacagaaaatttccgggcaaggtaattctcaagaggcttttaaatccagaagtttatcaaaacaagaacggaaagagactgtaaatatagctaaaacgggggttaggagacgacgtgctcgccatatgcaggtaactgatgatctttctctttcttccctgatgtcttaaattcaccatagtgtctgaatttgtctgttctctttctggatgtcccatagacttgccaaaacccaataagacgcataacacagtacagcctgctggacaatatttgctggacaatatctgaagcagcttcagccgccactatttttactgacagcagcagtcgtgacatcagtgaaccccagccttctgttgtacaagatgggatagataaagggttagatccagtggcttctttttcaaattcaaccagagcacttaccgagaggtactgtttcgttcttcgtacatctcttttccttcattttttagattttacatggctactttagaagtaaattgttccagtgatagtctactactatctattgctgccattgttgcaatcctggaaatatctcactgtggtcaactatcttttttttcttcctgggcgctcttctgcagtgagaagacagaagtgatatttaaagacagcttccttacaattctatatccagctgatcggttctcggagatgggaccttcttcacggacttatttcagtgatagtggtttcacttgcctgcaaatcttagactatatctacagattttaccaggtataaccatcatattcgaatggccaatttctcgtttcagttccttttagttgctatgaaaaggagagtctttagaatcaatttcttcgtcttagttaggaacttatgagtgattagtatttatactatctctgttgactcactaggcccatgttaccgtttagttcacaataagaagatctcttgtgtctattgattctgcaggagaacttgccggatcatgaaatagaagttgcaattcacacagactcgaggcacgctgaccgtctcagaacagtgtattgcagcaaagagacatcagatgaaggatgcttggttttcccaagaatagagttattaggaagcaggaaaagtttcgaaatgcttaagcgagtgaatggagagaacaacagtaatgtttatgagcttatgattagagcttgatttctcttttacaatacataactggaaacaagctttttaaagtacaaaattttactttttgactcatgaatttgtaacttagtgatgcacattaaatctaagagaattacaaatataagcatttccagaagaaaggagtataacatatagagtaaaactgtaaaaaaaaaaaagcaccgagaatcaacaaaacatcgtatagatcccgacaaaaagatagagagaggtctgatcgatcctctgatgctacaaaaagtattaactgaacaaacctaaacattttatgca

SEQ ID NO: 65604 - DNA, 1560 bp, Arabidopsis thaliana landsberg
tggaacccgtcgcattatcacatttattatgcccttcctcctaatataataaacttttagtctttgtctttgatacatttgtaacttcgtgctttctctcccgttagaagaatggagcattcctcttttacatcaattggtgaattaatgagtatccaccacacatatgacatatacacatattcatacatgtaacatgtgtcatgtatgcatgtatgagtagtgtcatgtgtgtgcacgtacgaagccataccacatatacatgcagatataatgcatgcatgtgtaagagcagacaatatattaaaatatcgaatgttgacggtgagatggaaaaggaaggtatcgtatgtctaaggtttatggattccacgtccaaaagataaaaggtaaaagataaaagagccttcaccttcggtgtgaccaatcaataaatttctatataaaatatatgatatcatctttctttttttctgtttctgttaaacgatatctgatgataacattatatatcatgtactttaaagtaatatttggagcgttgaaaatgacaatattttctgcttagtaataattattattatattctatgcttctcgtaaaagtagtactatatggggtcttctttatatctagagtaatttctttagctttctgaaatatgattcatatgtagtacataatgtgaaatcaaacattttaaatgaaattatgcaatgaatgtggttactaaaatgcctcaaatgaaattgtatcctttggatttaaacaataaacacgatcgttcttatatgattcatgaatcattattgtatacgaatcattattgtataccttatcagttgataattaattttagtcactttttatttagacaacgaaagtaattaacacgttagtaagacaaatacaaataaagttctataatatgaatcgtcagttttttatacataggattcgctttgcagtactgcattcccttctcaatttttctgagtgtttttttccccttttaaagaatcatctgagacactttcgagaataatttaattcttctcgttgaaaaattggaccgcattagtggactctctatttacacttagaagctctctcaatttgtttttgcttctagtacgatcttctaattagcatgtgaatggccaacaaataaacgcatgtccaatacatcaaccgttgctttcccttctttaaagcctgtttaaattaaaatatcataataagcaataattaagaccgcaaatttttaattaactaatatgtatctaaaaatcagatggtgaggataatcataaatatcatgtactaatcatatcgctccaaaaaaatgtatactttatcgctattaatcaagaaatatgttaaaataaatatgtttggtaagaatatgttctagaaaagccgaacttttcaagtataaaacgtcacaattagaagaaagaaacgtcacaattctcttcttttttagacaacaggtcagaatttgttttaaaaatgtttctcaatcaaagcttttttcaagggatttaatgtgctatataa

SEQ ID NO: 65605 - DNA, 418 bp, Arabidopsis thaliana landsberg
gagtgaggggagaaacatagcagtgtctgagaaaagagacagacagcacgcacactcggcctacttattggagagaaaaaaatgggagacagatgttacaaaagagtgaagacagagaagagagctgacagcagaccacgaagagggaaagccacggtgactcatatgggcaaagaaccgagaagcaaagaatgagcatttggtcttaatttatgcctggtctattaagggtatgatttataaatattctaaagaagatttcggaatgtttttattgtttgacaactatatctgctacaccaattaattgataaataggagaccgcgtaatatagagagcatgagttgtgaaactcagcactctacaatgttgatacagagcgtaaaatctagagaaccgtaggacatgaacacacac

SEQ ID NO: 65606 - DNA, 1978 bp, Arabidopsis thaliana landsberg
agcgacacatgagagagtgagaagctgcgttgaatgtgtagaactgagatgagatatgaggatcggggctgatgaaaagcccatctcttcctgcactcgaaaccctagaatttgacgaatcagcaatttgggggtttccggtaagggaatcgtcttgctcgtctgaggagagaccgggagaatctccggaaggagaagagcggaagagtatgaattccgggagagaaaacgcgggatcgacttcggaattgtggtcgtggtggtggtggagaatggagggtggtgattgaacgagtatgtcagccgtcggatcaagatcatgatggtggaacagaccttcttcggttttgtgagtattcatcaggaagatgaagaagaagtagcagcgagacagagaggaggagacggagaagacgacggcgacgatgaagagagagagagagagagatttttcagaaatttttatgtgttttgttttaattaattttattttcaattattaagaagctcaggctttgctctgacaatactgataagtcccaggggtattattttatttgtctctctccacatattttagttttgttttaatttctctttccagaagaaattcagacaagcctttggttcgtcgtcctttatccacttccccaatcatcattaacaatttggtttgtacgattacaatagatgtggtgattactaatgattttacttacgttaaccaatatgaccattgtccatatgtatagactatagacgaccaaaaccaatgttaaatttatattagttttgtgatcgaactatagactatatactatgtccacttctgttttttacataatgttcgaaaggtttttaaaactttttacacaaaatttaagtttatttgaacgatgtatcatacttttatgattacagataacgcatgttttaactttaaaagcaatgtagttactgtaacattttgttgacgaaataaaagttctaaacaaaatattagagtctcattctatacttgcaaaaatagttattttgcgtttattctttacattctcttgtcatatgcatggatcagttcaaagtcaaagagtatatcaatgtcaaagtaatagagatgtcaatgcagtcattatccattttttttttttttttttcactatgaaaagattttgataatttatgtgctttttgaaaatatattttagttgtttaactggcctacatttttattttatttaagatatcattatggagccaattatatttcaaaaaaatccatttcgaaattcaaggctttattgcttactaaatctggtccgtgaaataaaaaggagaaaagcaaaaaacggaaagaggaatttaatacaacggctcagatgattccacgtcaaaataaatcgtgagcctcggatcgtaacggaccctccttccgctccttgttcaaatttcaatttcacatccgttatactcacaacacttataaaccctacttttgctctctctctctctttgatcaattcttcacaacatcttcttcttggcgctgatcctcaaaccaggtagtttctaatttctcgctcttttctcttgtagatgttaaaaatcttcttgaacttttcatgagtcatcgcgattttgtaatttaactctgcggagaaaacagagaaaattctgtatctgtttccgaataatttggtatttgtgtaatcgagaatcggagtcacgaaacaattcagctgtgatgttgataattgggaatttttgtctataggttttaatcaccatgatacggaattcaacagagcagttttcgagaatcgagacttcatgtggattgttacttcgccaattgcaggactttttttgaagaagagtcacatcctcgttttctttggttatgttcaaaatggggaaattacccaactttgatgatttcaggaaatatggaatgaattgggaaagactgatgatgaaa

SEQ ID NO: 65607 - DNA, 391 bp, Arabidopsis thaliana landsberg
gatgggaccgttgatgatgcatgcaaaaagggccaaacttactaggtccatcaaggcgccaagctccttttgtatgtccccaggaatattattggtaataagattcttgtcgtaaagagacgcctaattatatttctgatagaccagaatacgccaattggaaataactcaaactaggaaaaaaccctgattcaggcaacattcggcaggatgtgacagacaagacacatctttagcaatcagaaaataagacgaatcatacaaggaccgagactatggaacctacacaagctgtggtacccagtgcacagcaaatttaacacttcccatgacactgggctcgcacaaagagaattgacacatgtcaaatataacaccagcggccggaaac

SEQ ID NO: 65608 - DNA, 575 bp, Arabidopsis thaliana landsberg
cttggacctcgttgcagagcaccgcattctctagatcaaagatcttgcggcgattgccctggatgtttctcttgttctcttcaacagacatttttttcgagttttgtttttattctagcttgtttttgtgacgtttgttagttaacgatttctctttagcgcgaaagagcacacggtctcaacaatacaagattcgccgaatgttgcattgctctacttgttgcgaattcactttcacagttactggaaaaagattttttttcgaagcgaaagcgtgcgccagaaacttccctggctggaaaatgcaccaagtaaccgtaccggcaaaacgccgctctgcacaaaccaatttggatgtgaaataaaccattcatccatgatgaatagtgcactccgggcaaaaggttaggaagtaggagactatttgaagcatttttggcggttgggtgtgtgcaatgcaattagatttggtttaattgcacaaacaaggggggacgctgcagacatccctacacgcaaagttaacgcacataagtaaaccagcccgcgtactaagccaagtaggggagggaaga

SEQ ID NO: 65609 - DNA, 530 bp, Arabidopsis thaliana landsberg
gagggcacatcgccacacaatttgactgttcaagaaacctacaaattgatcaactttcaagtacatgatataggtgacaaatctcagcagtgaaattaccggttggtggttgttgtaatgtaatgattgtttgatatttgtctgaagcttaatgatcaaaggtgggaccaaatagagagattacacttaacctgcacttctctatgtacacaacactcttctcttttcttccattaacctcagtctccctcaccttggcaataaagttctccatgaaaattttgagataatttcaactcacaaagacaaaactactagggtctcttacctctgaaggtccaacaagccaagcgaaagatattgtcgtgaatagagcgaagagctccctcgagacttttgaaggtggaaatgccattttgatctgtaaattcagaaagaaatgttaaatatgtccatagtttgctgactacttgatctaaattaatccataagaacttaccaaggagcttattactgtcggtaatgctctg

SEQ ID NO: 65610 - DNA, 1767 bp, Arabidopsis thaliana landsberg
tgaaactccagggttactgtttacaagcataaggatgattctaagaagaggattcaggttgttgtaagtcctccaggcgcaagagttgagttcgtcggaactaattacacaggcgagcaagctgctatgcagacgaatacttatagagttggtgtttttaatagagaggctaaaactttgaggattcttcctgttgctcacaataaggtttaaattctgttaccttgttttgattttggtgattaattggtttgaattagttggaatgttttgagtgtatggttgtgaatagaaaagaaatgatttttgagagtttgagtttggttttgtgttacttgtagataatcagattggagcctagagttaaagctcaagaaacaaatgaggaagaagcttcaggaagtgctgtcgtcaaagaacttgaagaactaaaaacaggagaacgcgatcgttataatacaaaaaaagctgttactcgggtatgttactacagcatctgaaaacaccaattctactgtttcctacagtatctgtcttattggtatccagactagtagagaactgattgtcgtgagattcgttgggaggattatatgtctgagtgagaatgtgtgtctctatgcaggataagaagaagcgtgccttatatatgggagatgatgctgcgactcagaaggtccttgatgggaaactaagtgagttaggtgttaacacagctgctcttgaaggcaccagttctactgttgcacgcaacattcctccttacaataccgctgcaacgactgcaaatgaagcttatcccttagaaaagatcattgaaaagggggattggagttttcttgaagatatttactggcttctgcaacaggaaactgaagcagcaactgaggcttaccctgtatttgtccgcaacagattgtacagattgcgagatatcaaggtaaaattatgactattttcttggatgcaaaatattttatgttagcttgcaccactttcgcggtttgctctgattaaatggattctgaacttctcatggttttatctactgctcagaagattctttatgtatgtatgtcattttgttacatatgcaggacgatatgaaaaagcagacggtttgtggtgctgcaacgcttctcacccatctggttaagttcaaggacagaaactcaatgaatggttacgattccgctaaagaccacaagatgccagacatcttccgtcaaaaattcaacagcatgttcaaggattctgaatcagataggatacctgttgacaagatcaaccttctgataagctacgttcttgtgctatcccttcacgtggataatttcatgaccgatccagaagacatagcaaaagatctgaggataagcacagttgatctgaggaaacattttctacagcttggctgcaaattcctgaagcagaattctactacggttgctaccttaccgacccctctcaatttcccggaggttaaccggaggcgcagggcacgaaagtgatgacgatctaggagaagattttgctctatctttacatattttctgctattttaatgatatttctttgacggtctgttgagatattataaattgttttacttcctaagacatctgtgtcttgggtttaatgatatatgatggtttggcatttaagcaagccaactgctttaggtccctgatagggaactaagtgactttttattaaaagaaagagatatttattggagttgattaattaaattaagtaaatgggttt

SEQ ID NO: 65611 - DNA, 494 bp, Arabidopsis thaliana landsberg
gtgtctttgaactactagatattggaatattcaatcattcacgactgagatccacataattatgaggtttggtgaaatgaaagcatgttactcacaatgtgatgtagcaaaaaaattaggttttttttttatttaacacgaaaaaagcaaattgtagaaaatggtgattattgtctcttcacttcaaatctagtgtggggtctcagtcaaataatagcactttcgcaagatagaaatatcattatttttctattattacaacgataaataattatgtaatgttactatatatcaaattatgaaccttgcattggactgctggtagatgaccaataaaacagatttagttacataacaagtctttcgttaaattacccaaaacacaatttatctattagtatattgttaaaaattggcatcatctctgatatacaatatctatggaactatatatccaccgtgatcgaattacagaatgaaaaattaacagaaac

SEQ ID NO: 65612 - DNA, 484 bp, Arabidopsis thaliana landsberg
  unsure (1)..(484): unsure at all n locations
tatttcagacaattgacctgtggcaatcatcatgtatattatatttatggagggaaatatcaagtgaatcnccccccccccctaatcaaacaacgtgnaaagtatggccataaaccatggctttccatgacgttattggaaaatacttcgacaaatttttcgtcataaaaattattagcggtgaaaaaatcacacaccaattttttttttttgctaaagaaatcacacaccaactatacaaaatgaattcacgtagcttcgaacacttttattttattttcttaccacattaaaaaaagaaacactattatctatattatttgaaatgtagacaaataaaatcataaatatgtcatgactcatgaacaaaccagtgatacaagggcaacaatagtgaaatgaaccaagtttatgataaacagatttagtccctctccatgtggatcgtagcatttgcaatgaacatgagcatgagttgtattga

SEQ ID NO: 65613 - DNA, 460 bp, Arabidopsis thaliana landsberg
cacacacaaaccccaaaaagaaaatcccaggcggggtattcatcattttgtagacgaaagaaccgacgaacctgaccacaatgttataatttcatcagacaccacctgctatgcgctccccggaagaatcataagacacaaaaaagaattgacacaaaaggctcctggaccctcctgacaccaaatggcaacccgaactggataacctttgcgcttccagcaagaccaggaaaaatctgacacaaccaaatgaactcttcagcatacatacctctaataatacactgtaacgaacttcgtaaaccaacgtagatcactagctctgatccaacgcaaacagcaaacacagacagggcccactatgactgaaccaatgttgagactacagcagatcagagctgtttggaccaagaactcaaaaccaaccgaggctcatttgaacacactgacataaccccag

SEQ ID NO: 65614 - DNA, 459 bp, Arabidopsis thaliana landsberg
gggcccctcgccgatcacggtgacgtcggcattgcccagggcgcagttttgctgttccatcagcatcgccgcatgacgcaggaactggcggctgtcggcatcgcgccagcgcgcatcggaaggcgggaagtgctggccgatatcgcccagcgccagcgcgccgaagatcgcgtcgcacagggcgtggatcaccacgtcgccatcggaatgcgccactaccccacgctgatgcggcacgcgcacgccgcccagcgtgacgtggtcgccctcgccgaaggcgtgcacgtcgaaaccctggccaatgcgcatgttcatgtcgtcctcgccagcaggaactcggccagcgcgaaatccgccgccgtcgtcaccttgatgttggcctcggcgccttcgaccagcaggggagcgacaccggccagttccattgccatcgcctcgtcgctgacctgtatgccatgc

SEQ ID NO: 65615 - DNA, 477 bp, Arabidopsis thaliana landsberg
  unsure (1)..(477): unsure at all n locations
gatcaggnttcgaacatatncgctgacattctcgtaggcgccgtcctctccgacannnnnnnnnnnnnnnnnnnnnnnnnnnnnnnnnnnnnnnnnnnnnnnnnnnnnnnnnnnnnnnnnnnnnnnnnnnccttctgtcttcaagatacacaatcctgaagacagaaaccatgaaaatgaccgcagcgcgtcagaggatgaaccggctcagatcggcgttcttggcgaggtcgccgatgcgcgcttcgacataggcggcgtcgatcgtcaccgtctcgcccgagcggtccggggcggtgaaggagatctcgtcgaggatgcgctcgatcacggtctggagccggcgggcgccgatgttctctacggtggagttcacctcgaccgcgatacgggcgatggcgtcgatcgcgtcgggcctgaatttgacctgcacctcctcggtcgtcattagcgccaccgactgcttgatcaggctcg

SEQ ID NO: 65616 - DNA, 558 bp, Arabidopsis thaliana landsberg
ctggcgggcgagggcagcgctgctgccgaaggcaagcaggagattcagcaggaggcgggcgaggcgaggcatccgggcatgatcggagccgccctgcgggcggtcaatcgccacgcggaccttgacggtgccttcagcagcgggcattcagcctgacccgatgagcacgcccttcgacgttcccccggatctgcttgcctggcacggcgacgtggcccgcgcacgccagctgcagcaagagttggccgcccgcgtgcgattgcaggacgacgccccgccaccgcgcctggtggccggcgtcgacgtcggcttcgaggaggacggcgccatcacccgcgccgccgccgtgctgctcgatgccgccaccatgcagccgctggccgaggtggtgacgcgcctgcccacgcgcatgccgtacattcccgggctgctctcgttccgcgagctgccggccgtgctgcaagcgctggcgcagttgcccgaagtgccggagctgatccttgtcgacgggcatggcgtggcgcatccgcgggggctggcattgccgcgcacctgggt

SEQ ID NO: 65617 - DNA, 557 bp, Arabidopsis thaliana landsberg
  unsure (1)..(557): unsure at all n locations
ctatagttaacagaacaccttgatttctaactttttaagagacacgtttggaaatatttgaacattgaatttatttatagttatatgaaaggttttccttcttatattataactacatatatatttatttatgtttcagataacacaaccatatttgatcagggttaaagtatcagaaactgttttgtttttgtgctttaaggttactgttgtagcgtacctactacctacaatacttctcattttctgctaacctcgagcgtatgctgcacaagtttgttccttaaacatctgtttcatcatatgcattatagagtgagatcttacacagtttgctattgagttctaaaacattaactgaacacaatactcttacttccattatcgtagtttgtgaattgtgtggcataagaaacctcttaagtttcaggcagcacaaagatgtgtctttagttgcaatcatctaagcggcaggtctggaattactgtatcagtatgcaatgaaatggtcatttannnnnnnnnnnnnnnnnnnnngacactttgtgattactttt

SEQ ID NO: 65618 - DNA, 613 bp, Arabidopsis thaliana landsberg
aagatgaaaaatctagaacctgacagtattgtctctcttgaactccattgtttgtagcaataaaaactttaagctaaaacaagaatagattgttcttcttgtttaggcaatgagaaacgaatcagagcatgagaagatattattcatgttcagaaaatggcagagacagagagagagatgggtttgactttacgtgaaacaacaaaagatgaagagagagagagaataagtagaaacagctaatgtaatgcagctaagagagggtaaaaacgagtgaaagagtaatactaacaaaacttttgttgttgttgttgttgtttttattttaatgttctcttggaaattgtaaagaaagagagacagagaagagaacgtgggttccattaaagccaaatttgtatataaaatttttgttttgaaggagatgatgatgatgatgatgactctttctctctcgagtctcatactatctcccgtgtgttgcgtacaagattctgtattttacatttttatatatgacttgtggaagtatataatatgtctacatttaataccatcacaaacttacaaaaagaaaaactcttatactgtattctatatattgagtaaaaaa

SEQ ID NO: 65619 - DNA, 558 bp, Arabidopsis thaliana landsberg
  unsure (1)..(558): unsure at all n locations
ccaggacgacatggttgacgatgcatataaaaaagatgcattgatacttgatttgcgatacaataccggcggctatgtttacgatgctgtactcagattcttgtcacagcgcccctacctgcagtggcaatatcgcgatggcaagaaaagtccgcagccaaactttgcccctgccgcgaagccgattatactattggtaaacgaacaaacgttaagcgatggcgaaatgactgcacaaggctttaaagaattgaannnnnnnnnnnnnnnnnnnnnnnnnnnnnatcgctggataatatttaccagcggcaaaggattggtagacgggtcattttaccgtataccggcctggggatgctttacgctggacggaaaggatattgagaaaaatggtgtcagcccggatatctacgtaaaaaacacgttcacagacaggctggaaaataaagacccgcagctggacagggcgattgacgaaataatgaaagaattgaaataaattaaaaatttgcggggaacgggcgtggcaatctcctccttatgcagagtccgctatgc

SEQ ID NO: 65620 - DNA, 417 bp, Arabidopsis thaliana landsberg
  unsure (1)..(417): unsure at all n locations
gtaatggtgactcaaggattttgcggcccccgcagttgggcgctggggaccattcccgaagtattattttctgaggnnnnnnnnnnnnnnnnnnnnnnnnnnnnnnnnnnnnnnnnnnnnnacaatctcagaagcaggagggtcaggatgacgcggaccgggactttcttgaacttgattaatgatagaagagtgtccaagcgcgaaactgccaaatgatataccttatatacatgtcatatttataccaacctagagatggtctggcgcctaccctttcagggggtactgcnnnnnnnnnnnnnnnnnnnnnnnnnnnnnnnnnnnnnnnnnnnnnnnnnnnnnnnnnnnnnnnnnnnnnnnnnnnnnnnnnnnnnnnnnnnnnnnnnnnnnnnnnnnnnnnnnnnnnnnnnnnnc

SEQ ID NO: 65621 - DNA, 338 bp, Arabidopsis thaliana landsberg
gctccatattctttagtcaaaaaaaaatttcttatatttttcagtaaacaaattgactatgggcattggaaagtataaatagggcatgattggtgaacattttatgtattgaggcttcgaatggtgacatcggtttggacggtgcgggacaagtagttatggaagtgcagtgcggtttaacagtggtgtagttcaaaaaaacgcattatgcggaacaagtgcgggtactacataacaagcggtattgatcaatacatgaatgataaacaaatgcaacatgcggcgcggtgcaaattgtatgaatggcaaaaagtattatatgcggattgaagtatata

SEQ ID NO: 65622 - DNA, 539 bp, Arabidopsis thaliana landsberg
atggtttcattcatatattctaaaaatgttctaatggttaatatttaggatcctttactatgtgacattttaaaattaattactcataaatcataaaccaaaatagctttctgtttgaaactttctcaattcaaattacaatatttctatttttaatctcttattgacgtataaattcacttctctcataagtattaaaaaaaacaaaattaaattgtatgggataattgttgtttttggtgagtttggatcattgtattttagtaaaactaaatagcgaataaatatggttgatcatattaaatattgatacttcattaatcattatttaccaattcttatactgatatgaatttttattacatatgattgggtgggctgtcagaaatttttatagccactaagaaagttacaaccccaacattgatacaaacatgctttatcttttctattttctctcacagtgcaaatgctatatttataattattatgactgaaagtacatgtttttctaatgcacaattttatggtcttcacaa

SEQ ID NO: 65623 - DNA, 510 bp, Arabidopsis thaliana landsberg
aggacatgatcgagatcacctgcagctataccggcaccgacatcgtggtgttcggcgccatcgcgcggatctaccggtcgcagaaccgcaacatcgtggtggtggtgcgcgggcccgacacgccgatgacggtgcgccgccgcgaccgggtggcgggcgtgtgggtcaaccgcgacgcctgcaagttccagggcctgcccggctattactatctcgccagcaccgagccggtggagcgcatcgccccgcccggcgccctgacgcgctatggcgtgggcatccattacctgcagccgtgcgccatcggcagccatcacgatgcgcgcccgttccgcgaggcggcgctgcggtatctgcagcaggccgggctttacaccgaagcgcccggcaccatcgactttctcagcgagacactgtttcgcacccgcgtgccggtgcccgccggcgtggcgcgcggccagtacaatgtcgaggtctatctgttccgtgacggcgaggtggtgagcgccc

SEQ ID NO: 65624 - DNA, 677 bp, Arabidopsis thaliana landsberg
gcctaaagtatgactcattggtaagggcttggggaatatagaagtgtgtttgcgtttaagtatatctctctaaatatggagtttaaaatttcaggtggaggacatacttgggaaccgtgatacctctgttagcggcagtatttactattattctgagcgtggtgatcggctaattgatctatcttccttcagcaacaaactctggcaggtttgttcttgcaataatggacatcagatcttttctctaatgaacattaatgtttctcctgtaattaatatttatgctgattcttttgtttgttcagaaactacattctggatttcccctagtagatagttttccaaatgttgctgagctgagtgaagttagagagacaattcaacagctgttgaaatggggctggaagtataaccgaaaccttgaggagcaagctgcccaacttcatatgttagctggctggtctcagattgttgaggtttatatctttcttaaaaatcagctcacctttagtatcattagcgtgtggcactctcttaagatatcaagtatttatcttttgtgttgtgcttcatatgtttttgttttaggtgtctgcttgcagaagaatatcttctcttgataaccggtctgaaattttgtaccggtgagtaccttttgtatcagaggttagttgctt

SEQ ID NO: 65625 - DNA, 411 bp, Arabidopsis thaliana landsberg
caggacctcgtgagcgtgtcgatgcgcttcgtatgaagacatgaaagccgctcactaccagacaaccccttttgccatcgcaatggtgcgtgatggctttctttttgtggccgtcgtgaagatggcctggtggctggcgccggcgccggctttcccccaaatctgaatctcatgcaaaagatcaagtgcgccatcatcggccccggcaacatcggcaccgacctgctctacaagctgaagcgctcgaaggtgctggagccggtgtggatggtcggcgtcgatccgaccttcgagggcctggcgcgtgcgcgcgaacacggcctgaagacgacccgccagggcggtgacggtatgcttgacccaggtcaaggcctgtggcgtgccgatcgcgttcgacgcgaccagcgccta

SEQ ID NO: 65626 - DNA, 132 bp, Arabidopsis thaliana landsberg
ctattttgaagaatggatggacttggttaccgctcgctgtgggtacaccactatgcatctggatgatgattaggtctatcacctgatggtctgccatgggagtaattctgtctgttcgtacatatgacatac

SEQ ID NO: 65627 - DNA, 568 bp, Arabidopsis thaliana landsberg
acttatagactcgatcgtgactcggtctttggcaaagccgctacgtgatgatctccatttcatcttccaccacagtcgttcccgtgagcctatattcttcttcttgtatacttacaacactcacaaagaacactcagtagtcagtatcaaccacaaaacgcccaggcagttacgtacagtttcaagacatcaatggaactatctattacagagcaaactatagtagtgaatttatgcttgtgagcttcgacgttaggtctgaattatccatatatataaacatatactttcgaactcatgctttctaacaaaaatccatacgttctgcaaattacatcaacaaaaaaatgtagtcacgtacatatacatatcttaactacacagagataaagagtttaggtgataaaaacagagctttcttgcagaagaagatatagaatggagatgttctgacatgtttacacatagtttcggaaatttctacatagaatcgatttcttcgcttagcattatatcaacacaccgaaccttaagattttgcccaagcagagacttctttacccaacag

SEQ ID NO: 65628 - DNA, 646 bp, Arabidopsis thaliana landsberg
actaacttttgaggatccacttcttctccttcctcagaggaggctgccaaaatagtcgaatgccatgtttttcatcctctacatagttgattattcgacctgttggtgtatgtaaaataacagggtccttcttctggacaagttttgaaggatcatttggatcaggttcaggtttcttgctcagtaaaacatactccggtgtcacctccactgctcaagaaaaatataatatagaaaaaactcagtctaacatcaatgcattcaaccatgtaagactaacatcttgaagggtcattaccattttcccaccaatgttcgagctcagcaggcattggtaacctcaaaggagctttgtaaaaagagttcaaccacatttccctctcttgatccacctcgcctacgtaggttttccaatactcaggtacctaccaaaaagacagattgttttgccaactttgagatcagaaaactaactccaaaagcttgatatgaaaatgacccacttcataaattggttataaaaccaggcgccatcccacatcatcttcttcataaaataggatgttgggatcatatatgtccccttcttccctatactgctatgctgaacaacaaacaaaaccttgagttgactaactacacctac

SEQ ID NO: 65629 - DNA, 605 bp, Arabidopsis thaliana landsberg
  unsure (1)..(605): unsure at all n locations
atgaatagtggnttgcccttgcactttgggacatagatgttcagacttgagactttctcttggtggattttacctttgataagtataaaatgtccttcctcatctcgaatgataacttttggttgaaagtctattttattggatctttggatggcaagcaaagcttgtttcttggggaccatttgcttggaagatcttcttccatccttttactctgagatagtgtctgtctttgttattgaggtgtgtttcttgcatgcagcaaaatgctggatcttgtttgtatatccagtctgttagctcatgtctttttataggtgagttgagtccattaatattgaaagatattaaagagagatgactgttagttcctgatatgtttgtttttgtaggtggctttatgtgcttgtggttctctccttttggctttgttgttagatgcttaatatcttgtggtatagttacctttcttgagttggagtttttcttctagggccctctgtagggctggattagaagatagatacagtttgaatttgattggtttattctttcccccaagtgggacactaggacacttcagcttgtagagcttttagagtttt

SEQ ID NO: 65630 - DNA, 1209 bp, Arabidopsis thaliana landsberg
gattgaccgaacatctgattgttgtttgctttaaacctgactcctttgttcataactgacatcatgcaatttcagctttcatatcaaatcgtcgattcatggatctggcttggaataagagatatggtaaatgaccttaggaaaaagaaattgaaactacggcctgttacatatctaagtggaacacaaggatctggatctaatatcccacatggatatatgtggagtcctcaccttgtaccaaagccaaaaggtagtatgacgcattagcttactgatgtaataatgatgtttttatatttagatctttactcttctctctttttttttctcagactgggggcctcaaattgatgtagtgggattttgctatcttgatcttgcatccaactatgaacctcctgcagagcttgtggaatggctagaagctggtgacaagcccatatatatcggctttggtagtctcgtgagtcttttttcttacaaaattgtatttctactggattctctgagaaattgaaaacaatatttataactaagtaagtaattatgttatgagaaactgaaaataatacatctcccattctgtggtaaagcctgtgcaagaaccagagaaaatgacagaaatcattgtggaagcacttcaaagaactaaacagagaggaatcatcaacaaaggttggggtggccttggaaactgtaagttcttcaatccgtattacctttccatttttggatgttttcatgtttggtatatgttactataatattgatgtggttttcatatagtgaaagaaccgaaggactttgtttacttgttggataatgtcccacatgactggctattcccgagatgcaaagctgtggtatgtctaataatctggaaattctcacagtttagccttgattatcttgtttctttatttggttctggaaatttttagtcacacattttacttgtctggattagtagtttatgagtctcatctttaaacctgaaattgttggtcccctgcttttaggttcatcatggtggtgctggaacaacggctgcgggtcttaaagcctcggtaagtttaatatgtgtgaaagcgaaagtctgtttcttgatgtaggacttaagttggtaaaatatgaaagtgttttgctttttccttgaacacagtgcccaactacaatcgtgcctttctttggagaccaacctttggg

SEQ ID NO: 65631 - DNA, 456 bp, Arabidopsis thaliana landsberg
cctattttggtgtggatttggtattggattttcactttattttgtgaaataattatagtgggacctggtgatgttctgacagaaagttataatatatgtgtggtgaaattgttaaatggtacttaactatttattttgatccgaatcatctgtaatttacttcaacacaaatctcgcgtttattgattgctgaacaatcccactccgtttagctatagctaaattcttcagttctctcggagacatgatgttgacattgatcattgtggatcaatgacgtatttactactagagcacatttattttgtacttactaatcaatcgttttcatgccctgcatatctgttaacaacgaaaaatatgatgggtaaacacagagaatcatgctatgtttttatgatcagagaagagaagcattatatataaaacgtgaaaacatgtgattagatccaatta

SEQ ID NO: 65632 - DNA, 311 bp, Arabidopsis thaliana landsberg
tctttctgcagactgtaacatattctgtggttcatgtaccaccgtttatgaagaaaacttcgccaatttgtaccacccacaaataacagttctcaagtaggcatgggcataattatgcaatgccaaacaagctttcattatacaagattttcaggtcaccgtttttatctatatattaaccaaaatggtcagttatgttttttcaagattcttagccagaagcataaataagttgaaaatatacaggtagtgcaactctaatacaatccacaatcaacaataataaaaaaattgtttcaacgaaacaattt

SEQ ID NO: 65633 - DNA, 714 bp, Arabidopsis thaliana landsberg
gatggatattcgcttgttaaactagttctaaaaataccaagaaaaatattccaactttatatatttgtatgaacaaatgaaagagagagatagagcatttggtagagtgaggaaaagaaggaagctgcacaacactcaaagccaagactgttccactatctcttcatctacgtgactttctatgcacattcttcctaataagcatttcactaattaatctactactctcattgtctatattaattctcacaaccatgcttcctcttaaaactgtaaaaaagattttagggaaaacatacatacccaagaggctcggagatcgatattatatagaattctttcacattaccctaagttaaaaaaaatcacatttgcccctcaaagtcatactaaactccaaaccccaccccaaattgtttgtcaatcgcttgtatatcatttgctaatacacaatcatatttacttaaaaaaaaaaaaagggacataacctccttgaccctttatataagacccactcatcattcatacttttgcacattgcctactatatcaatcttcttcttcttcttcttctttaatttgctgcttttatataaccaagtctttgcttttagaggtcagctatggtgtctacagaagaagacgaagatcggagaaaaaggatggaagttgtttcatttattatgaaacaatgatgacagcattttgtggatg

SEQ ID NO: 65634 - DNA, 644 bp, Arabidopsis thaliana landsberg
gtttgactcctgccaaattagataaatctgaacaacaggatagcattcagtctaaatctgaggagcaggaaagaaaagagattattgattacactgacattgacatatctgatggtctggctatggaaatgtttggagcctccccatcaagtcatgaggtaagagacttcggtaatctcattgtttttacatattttctcgaagagtatttttaatttaattctatgcttacaagtccatatctgtttttctattcgatttgttgtcatagatgagcgtggttaagcttagggattctgcttttaaaatcaaacttttgtcaaaagaatatcaacatacttgcaaatctacggggttgatgctctgggagtctgctcggcttatggcttctgttcttgacaggaacccaaacattgtttctggaaaacgggtgttggaattgggttgtggctgcacaggaatttgctcgatggtagctgccagatcagctaaccttgtggtagcaaccgatgcagacacaaaggcacttacgctattgacagagaacatcacaatgaacctccaatcttctttacttggaaaactgaaaacaagcgtacttgaatggggaaacaaagagcatatagaaagcattaagcgtttgg

SEQ ID NO: 65635 - DNA, 634 bp, Arabidopsis thaliana landsberg
atgcaccaccagccgtctgcgctcagcttgtgctcgggctccgggcagctcgacgaagccgtccgcgccgtgtccggttcccgcaccgtcgcctacgccgaaagcgacccgctcgcctccatggtgatggcggcccgcttcccgggcgtgctgaacctgggaagcatcgacgccgtcgactggcggcaggccagggaccggcatgcgccgacggacctgatcgcaggctggccgtgccagggcatcagccacaacgggcaccgcctcggactggacgacccgcgttccgggctgtggcggaacgtcgcccacgccatctcggtgattcggcctgcacgggtgttcctggagaacgtggccgcgttgaagacccggggcctgcccacggtcgcggcgaacctgaacgaactgggctacgacctgttctggacgatcagcagggcgtccgatgtgggcgccccgcacacccggctgcggttcgtcggctacgccaggccgggcgccgggctgacggtggaggtgccagcgcctcccgcccagtacggggcgctgccgatgctgccgacttcgaagggttggacggcccaaacgggggcccgaaccagcgggacggcaagggcgggtactacctgcc

SEQ ID NO: 65636 - DNA, 631 bp, Arabidopsis thaliana landsberg
ggaatgctagttcctttcccacagagtgatcggaatactgcaaaaaagggggattatttttatgtggttgtttttctgagaaagaacaacaaataaaagctgaaatgtgtggcagggtaacattaatatatatatatatactatttaagggcgataaggcacgattcatctcgaatgcacctaattatcatcattacaatattagagcatttcctactcgaccaaaaaaaatgaaaaagatacttaaattcaaaacatacacagaggaatttacttgaactatataaccctcacaattatttagagcactttatgtctgaaaacataacaagtaatgttggtatcaatctgggtttttttgacaaagcctaaatcactacactatctaggaaaagagtgaaaacttcagtcctagggtttgagttataactggcaatgaaatagagaaaattgggtttattaaattaccagtgaccttattattcacacccctttatgatgagctctcatctgcataagaaaatccacctctaacaggtgtctccagatacatcatattagactttggacaatgcccaataaaaaaaacttccccatccattgtggtgttaaaaaaaagtgtcaaaatttc

SEQ ID NO: 65637 - DNA, 650 bp, Arabidopsis thaliana landsberg
taaatgacaactctagaatttttcaaaaaacgaacaaaacataattgtcatgttggttcgtgggcatgagcaaaaagaagggtgataacatagacagacaaattcggtggtactcacacaaaatacttgtatggacggacggactctaactctgcttcatagttgtcatgataacaatattggcatctatcttcttcctctttttcctttttgtttttaaacgtcacttcccccacatgtatgatgtaccctcaattttatttcattatcaatcttgcatcttcgaatcttttttaaaaaaaatcgagtttgcagaactaaatccataattatttctaatttcgattttttaatgtgaaatatttagtggtcaaatatgaatataagtactgtttatggacgaaccatgtgaacatatcatgttttcgatatacaaattatgatattgcattgtgcagtcacaatttggttcttttgagatgttatagttgaatactaccttaatccctagagatacatatctgctatttgaatggattaaagatttgctcttatatagatttaaggtaataattgaaatccttttgtcaaaagatatttggtgccagaattatattaatttcatgtaattgggaagaatacaaaagact

SEQ ID NO: 65638 - DNA, 514 bp, Arabidopsis thaliana landsberg
atctgtgtgaggagaacaaggaggaggcatctgctgaagaagttgtgttgcaggatctacaaagggctacagaaatggtgagtgtggtgatttgatctagcctatataatcttctttgagatttgatctgtcttgtaacagacttttacattcttcttcttatagttgactgatgatacccgcaagtgcttccgcgataccttttaccggcttgcaaagaactcacaacagaagtcagactccaactcggatgagttccttgaggatagaaccaggtaaagagagcttttttcattaatcatactttgcttaaaaatggactcatcaccttcaatagttctaatgactcatcaccatctatgacgtttttgtcagtagggaaactgaatctgaaaccaactcaatcgacagagccgtggccaatctcacattcaacaagatggaatcccacatgacaaatatgcctccaccgaatagactttcttttgttccaggataacatagttcaccatct

SEQ ID NO: 65639 - DNA, 1323 bp, Arabidopsis thaliana landsberg
ttttttctcaaggtataagcaaaagtgaaggactatgtacagagtgctctgtttccagaagcagggttggatgaaggagttgggcaagcaggaggagtcggaggacttgttgttgtcagagacctcgatcattactcttactgtgaatcttgcttgcttccttttcatgtcaagtgtcacataggttatgtcccatcgggccagagagtgttaggactgagcaagttctctagagtcactgatgttttcgccaagcggctccaagaccctcagcgtttggctgatgatatttgttcagctctccaacattgggtcaaaccagctggagtcgctgttgttcttgaatgctctcacattcacttccccagtttggacttggactctctgaacttgtctagccaccgtggatttgtgaagctactggtttcctcggggtcaggagttttcgaggatgaaagctcgaatctttggggtgaatttcagagtttcttgatgttcaaaggtgtaaaaacgcaagctttgtgcagaaatggcagctctgtgaaagagtggtgcccaagcgttaaaagctcgtctaaattatcacctgaagttgacccggaaatggtttctgctgttgtttccatcctgaaatcactgggagaagatccgttgaggaaagaactcattgctacaccaactcgattcctcaaatggatgttgaacttccaaagaaccaacctcgaaatgaagctaaacagctttaaccctgccaaagtcaatggcgaggtcaaagagaaaaggctgcactgtgagctgaacatgcccttctggtcaatgtgtgaacatcatttgcttcctttctatggagttgttcatattggctacttttgtgctgaaggatccaaccccaaccctgttggaagttcactcatgaaagcgattgtacacttttatgggttcaagcttcaagtgcaagagaggatgactcgacagatcgctgaaacgctatcgcctcttgttggcgggcatgtgattgatgtggcggaagctgggcatactcgtatgatctctagaggaattgagaagtttggaagcagcaccgcgacaatcgcagttttgggtcacgtttcgagtgacaattacgcaagagcgatgtttctagacaagatccatacaactaatgccttgaagacagagtcaagctctccattttgagatcggtacatgtctgcacgttgacttttttatatgcttcagcttgacttctcattttatgaatatgataaatactttagcagttgctaacttttgagcaaaccaaagataccttggtaagattct

SEQ ID NO: 65640 - DNA, 206 bp, Arabidopsis thaliana landsberg
attgcaataatgatctaaacctcgaccatcgaaacgccaagaaatacaaaatcaacatagttgatgatggcatgatctacatcgatgatgatccgaaaatttgcaataacaagcgtagtagtagtagtagcagtaacaaaggagtgagtaagtttttgatatgttaggttatttagtatttgagatatatataaaagaggaagatt

SEQ ID NO: 65641 - DNA, 1529 bp, Arabidopsis thaliana landsberg
tcgtttttgcctttcccattcttctaactaggctatgcatcctcaagtatttgtaagattgtttgcatatattttattatatcatccgcttgctagggttatatatacattatgcatattgtaacttttttcattaaactttatgtgccgaagttcaaactatataaaaacttcaattgctatatactagaagtggtggtcaaatatgttactagtagaattatttcatgacattgaccattatatgtatatttttaaaaatcctggaaaatcccacaattcaaaatggcttcatacttatgtcaggtcacggttcaaaatggtttcgtgttttcttatatatagataattgttgtttatagtctatattagacatatataattagtatatcaaccataccaagccttatgaaaattttatccatcagtaaaataaacaaatgagtatcagtcaaggcattgacttttcattacatttgcaattacatcagactagataagatgtaaattgataattattttaaaacaaaaacttaatacagtacgaccttacattacggtcttaacgggcctaattaaccatgcatgcaatgcatcactagacaccatattctttttatttcatacatacatacatagaaacacacaaaatcacatatttatatatggttggtttgtttaactatcatggaaaattccacaagtaatcttctcctccaggaaagccatcagcgtcgtaagcagcatcaaagacaggaggacgaggcgggctaagaagcattccttcagccatattcatgagcacattaggcatgtcgaataccaaatcctcgtccatgaatccattcatatttgtattatcataactactattcatgcaagccacaccacttgtttggctgttattatttgccataacaatcgcatccctagcagcaccaaaagcagcagcggccgaagcggctgctgcttggatgtctgctggagacatggaggttggggcaggcaaagaggaaactgagtttgggaagttgagctcagcttgactgcctttgagggctagagctgccacgtcataggctattgccgccatctcgggggtagagaatgttcctaaccagatacggttaggttttctcggctcacggatctcagaaacccatttgtttgagttctttcgctgccttactcccctgtacaaagggtggcggccgccattgtctttggaggttccttgcatattgataatgagtattagggttttgagtagagaagagtgatgagtttgaggaaggagaggaagagatcgaagccattttatggtgcagttaagttagttggagagtgaagtacgtagtgaagagtgaagagaagagagtgaagaaagtgcaaaccagttagaaaatggtttgggaggaattgatcacagcttagagatgatgaagctaaagctgtaaagacagctttttaattgctcctcttgttggatatcgcgtttttttgggtggtggccaattaagatgcaaata

SEQ ID NO: 65642 - DNA, 525 bp, Arabidopsis thaliana landsberg
aaaccaagtccgtgagatcaatacatcaaaaccctttttattttctagaggctccttgaattaccataggcccgtatcttctcgaatgttagttatgttgatgacgtggcgcaatttctatttatattaatttgttttttttttggaatttgagttttttctgtgttctctggattgggatcactggaagaagattatcaatggcgtctccatcatcgtcaccgacaacaagaatctggttccgtacagtgatcttaatcgctttaatggtggttctcttctacgttggccgtcctctctactggaagatctctgccacaatccacgatatccgccacaacaaacaatccgtcagagaaggtaaaacacacactctctatctctcgatggctttcttgaactttcccgatgagatcggtgttttttttggatataggtatatcgcagatcgtacacgaagcgcagagatcagtgggatggtatcacgacgaatcggattcagggtttcgagaaggtcacaacaag

SEQ ID NO: 65643 - DNA, 416 bp, Arabidopsis thaliana landsberg
gccgaacaggacaagccacagtggggcgttttaaaagcatgaagcgcattcctattccttcactgtgatttgatgaccgtacatgatatatacctagggactttaagtgaagagatttccactacatgacttaggaataggagtgatcattagctttcaattcaatgggaagcaggataaaatctaagcactagctcatagtgctgatattaatgggaagaagatatgatggttgtatggcaacccacaaaaaacacagttattgccagcgtgggaacggcagagtcgctagcgtaaaatagagagtcatgagatgagcttcgcctcatgcacctggtggggacaaaaatactaaaaaccgtgaccattatgacacatgacatcgactacgtacggagagatgatgttgtttatat

SEQ ID NO: 65644 - DNA, 713 bp, Arabidopsis thaliana landsberg
gtctttagcagaaaaatctctcgccttcagtgatcgtgaaggccggaggctataaagtgggcatcatcggcctcaccacacccaccactccggcaaaaacgctgccgatcaacgtggtgcccctcgaattccggaaattcctcgagcccaccctaagagaagcgaaagcgctccgggcccggggagccgagatcgtgctcatcaccacccacgaaggcagcgagggcggaaccgcgctccgcacgatgctcgaaaaaatcgccccgggcacgatcgatgccgtggtctccggccactctcaccaggaagtgcacgagttcgtgaacggcacgcccgtgattcagtcccgcacccgcggccttttcttcggccgcatcgatctctacgtgaacaaggccacccataaggtggaccgagccctctcgcatatcgcggggatgacgcccatttgcggcacctggtatcacggttcggaggactgcaatccccgcacgaaagagaaggatcttttcccgctccgccaccccacttacgaaggcgtggaagtgcagcccaatttgaaagtgcgcgccgttcttcggccttatttcgctcgcacggataaattaaaaaaagaagtgctcggccacgctaaaaagaatttcaattttatcccacgagggagagccaggtgggcttccttttattgcgggcctttctagaaaaaattccct

SEQ ID NO: 65645 - DNA, 494 bp, Arabidopsis thaliana landsberg
ctctggcatgctatgtagtgcccattgatgtcacctggccctgatagtggcaagatggcttctgctttcatgggaagacaaatatgtggaggagacatagacgtgctgtctttgtacatctgcataaggatctgccatctttttgacacgcccatattgggcacatattgatatagtggtgaataatttgcatcgcgattatgatttatccacccgacaactacatagctgtatacaaatggctcttggaggcacaccatcagattgagcgtgtggactggctggtgagacagggacatgcgccccctatgacacgacattggaaggtccgggctccaaaggacctgctaaagcctgaccgtcaccgactgctaaaacgactgagtgatgcatgtgaacactggcctggtttgaactgggtcaccatgccatagagcattgctgatgcggaaataatcagactgagagccgctgctattggaatggatctccac

SEQ ID NO: 65646 - DNA, 330 bp, Arabidopsis thaliana landsberg
  unsure (1)..(330): unsure at all n locations
gaagcgcaaaaacgagccaaacacgcggaaagaaacaccattatttacgaccaaggacaaccaaaaggggagggaaggaaagccacagaccgaaaccccaaaaggaacaaaaggaacacgcgcggccaaaangaccccaagcagccaggcaagaagccagacgccaacacgcccgacgaccgaagacacggagccaaaaaaaaaagaaccaaccaggacggggaaacaaacaaacaaacaaacaaaaaccaaagccagaggcacaccccaaaaaagaggaccgacacgccgcaagccgaacgggggggcaaaccaaaaaccagaaggaaa

SEQ ID NO: 65647 - DNA, 1315 bp, Arabidopsis thaliana landsberg
ttgggctacgtaaggcccgaatatagaaagctcaaaaatgtatttaagcccattagtcccgagactgaagagcagggtgaaatcatcaatggatggtgatatggggaaaaaaattgtaacgcgatcttttgtttgttgtcgacatgtcatcttttgatttcattttcccaccgattgactatagaatatgggaacaaatacatgatcgaaaccaatgctaatatacatgaaacaattaattttattttttttggtcactattaatttggtttctattacaacatatttacgaaattcatcgtactattaacacaaatgtgtctttctcaaaatataaactatttcgagatatcaaaacggtccaaacattcctatctatgacaattacttgatatattattctacatagtatattagattacgatgtacaggcttctttagttcctcttacacatgtacccatcaccgcaaactgagattacgccacgtgtaactcgctactcttgacgaggatctcccataaccgttggatctctgagaagacatcgtcggtgggaagctgaaacctgcagaacggacacgtgttcttcttgcttagccacggcaagatacacttccagtgaaagaaatgctgacatggcatttcacacacatctcttccttcgctcatctcttccttgcatatcacgcattctacttctccggcgtttgaagcggcgacgttgaaaacctcaaccgcccgtaacgccaccacagccgctctagcggctggaacttggtagccttctttttgatctcttcgacgaagatggttatagcctcccattatgtcaacaaatcttttgcatctaactagggtttctatgtacggcatcaagattccggcatcgcaagtccaaagaccggaattattacttaacatattattagagtacgtattaccgagaatttcccgccaattatcagcggaagcttctagaacatctggatgaagctggtgggtttcgcagagaaagaggaggaggaccaccgcgtctaggtcccggagcttcatggtgacggcgtaggaggagtggtgtttacggtggatgagaagaggatggaggagggagagaagatggttggcgatgaggtgagttttgtcaggaagagatagagagaggaggtggcggagagtgagggagaaaagggtcggagaggagaggactgcaccgaggcggcggcgatggtggtgggagatagagagaatggagtgagtcagattcgtgacgtgtgaaggagaagagcagagagtgcgctatgatgattgtcgtgt

SEQ ID NO: 65648 - DNA, 446 bp, Arabidopsis thaliana landsberg
tgaagaaaccactacacgcgattgtgcttcaccaattcaatttgtcatcgttacgcaacgcgctgtccggattcggttccactgaaaaacctttctccgaaacaaaagcactctccagcaaagtgatcgccagtccgccttcactgatatcatgcacgctgcagaccagtttttccctgatcagttccgttaccagtttctgaacagcaatttctttttccagctcaaaatgcggtgcgggagagtattccactttacacagcttatgcaggtattcggaagagcctatgcaattcttagtctcccctaccagcaggatcgcatcaccttctttcttgaagttgagtgtcatgcggccggaaaggtcttccacaatacctaccataccgatggtaggtgtgggatatacaggcccatcggggttctggttatagaaacttacgtta

SEQ ID NO: 65649 - DNA, 624 bp, Arabidopsis thaliana landsberg
tgcagcaacgtgccggagcaatgcgccgagccgcaacggcaggcccacagttttttcagccgcgccgtgtgcggcacttccagcacgatgccgtagttgtaggtcagctcctcacccggcgcgatgtcgcgcaaagcccggatcatcaccttgtcgtgccgcggatcgccgtctgcggcttcctcgacgtacgcctcgcagttgggttcgcaactgtgattgatccagcgtgccgaattgccaccgacgttggcgtcgacgatgtacttgtcgttcagcgtgaacaaaaacgtgtggccggtatcggcaccatcgccgtactcgcggtcggcctgcgcgtgcgtgatgagccgtcccttgtattgaatgacggtttcaccggcagccagcggcgccacggcgaacacgccgttgccgtggatgggggaacggtgggcaacgatacgacgcggcatgcaggtgatcctcgggaaagtcccatcatgcccgttccgacgcaggcagggaatcgtttggatgcaagacaacctcgcgccgcagcaagcttggtccgtaaaacaagccaaacccttgttctggacaaatacgggcaggatcaagcgccaatcaaacgggattcgcagc

SEQ ID NO: 65650 - DNA, 1558 bp, Arabidopsis thaliana landsberg
aaagtttcataacccatttgatgaaaaaacatatattaatctccatgatctactaaaggatataaccgccaaccatgaggaaggtcgttgacgatgttcaggttcctggtcatttgggcaccctgttgactctttcgagcaaataacgtgtctatcagtatcagttaaatattatagatgctactcaataatccaccggaacactagatgaaaatttacctgaaggagtttctccaggattactcagagaaacttcacatccattttcaacattctcagcctgagaaaatgcacattttctgcctaagtcatcttcagatggctcataggtgacaatatctccaggagggttcaccgaagactcgtcgtattccaagggaacatattcgccattttcatgcttgtagtaacgaccatccttgctacaataataccaaccagcatttgggtcatggtaaaacccactactgcaattcacaaatcgaaacaaaagttagcatgcaaaaatgaatagagtccttagttcaatggaattaagcatcaatctcaataaagtctctgcctttttcatcactctttatagttaaaaacgataaatagcagataaagcttttaacactaagacaatcaaacctaaacacaatggacaatttctgcttatattcaatcaaaactaaagcaaactaaggaaattaggctatagaatcgatagatttgggaagagacgtagcctgtgatggatatatagctgcgtatcgctgtcccaaacgtaggagtcttcttccttgggttcctgcaactctttatcgtcgtcgggcatgaggattgattgctggaatctcaacgaaacaaccaaagattgctgaaactaaatcctggacaatcaaattgagcaaaagatcattactttgacgatgatgattcaatcaataatcgcttttcaaattttggtttcaaaaactggaatctacagttctgttgaagagaaacgaggaggagggtaactcgggaaaccatctctcgtttccgaatccaatttacggtttactgttaaaaaaccggagtgttacggtttaggcccagtaaggtttaggcccatcaagtagaaacccaagtcaatgacagaagcttttattagtgaagtctttctaactgtattgttttctcattcaccatctcatgttatcgtcaaagggaatgtgattgcaagaagttattaccagaatcatacactgaatataagaatcaatgaacctaagtcctaattcctaacaaattattgttgttgcaagagaaaaaacaagagaagataactcaaagaagtatgttgagagaaagagtgagaaaagggaagaagaatgacgaatgcaatgacgtgagattcaactcctaccaaaattcctatcaactgtttttgttgtaattagacatgtcattgtcattgctgacaaaataaggaagacaaaacaaatccgacttggagataagcccgtttagatttattcaactcctatcataaggatatcaaatttttcccatatcatcaactttagaaagt

SEQ ID NO: 65651 - DNA, 596 bp, Arabidopsis thaliana landsberg
tagtcaccataataaatgataatctacaattctacatgcatcccatgtccgctcctattaattcaaatctattttcttcttgatttaattgtacttagaggttgcttactattgtaatatatatacctgaatttcactgtacacttctaaagtatatcttatatttacaacaagactgtattttgtatttaaagttgaaatttgtaggcgtgaatgtgtgatagttttggaggggtggtttggaaatatatcgagcgtttaaataaaataaaacaagaatatggtgcgagagaagggatcaatttgtttgaacttgaccgcaaaaatactttacgatgagatcaattttcactcgtcaatcatttggtgagaaaaggatgacaatttctaaacgaagtttattctaactctctaggagataatgcctcaaaggcttacaaattgcaataaaatataataataagaaatgtgattggaaatactaatttaaaataaaataaaacacaccaacgaaaggaagaagaagaagaagaagaagaaagagaggtggtttatgtttaatttgtaaagcggtaacatcctgtagcggcactgca

SEQ ID NO: 65652 - DNA, 2031 bp, Arabidopsis thaliana landsberg
atatcataatgggccaataaaaataggcctggatataaataactattaaggcccaatccaatccatagtttttacatgaagtctctggaacatgagagaagacccttaaaggcacaacaaacttatccaacgtgtagtaacataattagtacaagtcacagccaaaaaagctagaacaatctcaatatctctctctgcaaaactctaccaaaagaaagatatttcaagaaacttcttcattcttcatacaatgtgtattatatatacaccagagagttgagactaaccatcatagaaaacaaaataagaaagtgaagttaaaagcctaaaattttggtttcaaccttctacaataaatccaaatcactaaccatgatgaagcacttgctaagcatcttcttcataggagctttgttgcttggaaacatcaaaacaagtgaagggtctttgtcttctgcacttgaaactactccaggcagcttgctatccgatctctggctagaccggttccctgatccattcaagatcttggagagaatcccattaggactcgagagggacacaagcgtggctctgtctccagcaagagtagactggaaagaaacagcagaagggcatgagataatgctcgatgtccccggtttgaagaaggatgaagtaaagatagaagtggaggagaacggagttttacgagtcagtggagagaggaaaagagaagaagagaagaaaggagatcaatggcatagagtggagagatcatatggaaaattctggagacagttcaagctacctgataatgtagatatggaatcagtcaaggccaagcttgagaatggtgtgctcactattaacctcacgaaactatctcctgaaaaagttaagggtccaagagttgttaacattgcagctgaagaagaccaaactgcaaaaatcagctcttctgaatccaaagaactctgatattgaagaaactatatattactttctgagtctgaagagagttattataaatccaagagttttgagtttcatattgtgtaagctaaatggagtgtcatgttttgtaacctatctaccaaaatctctgtaaccttctctatatgcaataaaatgttcatttctttatattatagagcctcttgattatttgttatagaacattagtcatgtaattaaaaatcaaggtatatgaatttgtttggaatcaattttggcagaaacttgaaactagatttattcagataacagagaaaatactctgtgaaaaccaaggaaattgacaagagtgaagaaacagaaacagaacagaacaagattgaaactatttagacttagatttcatgagcttttgagcatcagctggagtgggaagtgcaggaatagctcctttctgagtagtacacactgctccacatgcatttgcaaaggcaagtgcttacttcagctttctttcatcctgttacattcacattactcaatcaccaaaactcaatttgctttatctatgaactgaaaatgtctttggttatacgtacatcgagtatggagccatcttttcccaatgagacaagaaatgcaccaacaaaagaatcaccagctccagttgtatcaactgttttcacagcgtatccaggcactctccctttgaatttctgcgcttttcgacagtcgaaaaactttgtttagataactccaaaacacacacaatcatgtcgaatttgatcccttacctttgtgtagtatctgcaacctttctctccatcagtaacaataagcagcttaagcttatcatgcataagagacaaaacaacatcatccttcttcgcatatccacgcgttagaaacgttacctcatcattggttaccttcacattacgaaactcgaacactaagatcatcgaaacacgagtccggttctacaacataaacaaacataccttgataatatcagcctcattccaaatacttttgatgccttctatagcagcttcagtagaaggccaaagaggcaaccgaacattcgggtcataa

SEQ ID NO: 65653 - DNA, 2870 bp, Arabidopsis thaliana landsberg
  unsure (1)..(2870): unsure at all n locations
tactttacaagctctctctagctagagtaacgtttctatctcaacttttctcaacgttgcttttactcgttgtcctccattcggcgataaccgccggagcaacactccggttcctcaactgtcatcagcatcatcatcatcatcatcatcatcataatgcagctaccggcaagaaaacccacccgccgggtcatagagtatatccggttccacctccaggtccatcaagaagacataacttgccaaggagagctcaattttcttatgaaaaagctcaacttccctatgaaaaaccgtccgggcctaatcgccgtcattgccgcgagaactaataccaaggtgaaacaaagctgcttaagaatattcatgtagtatcttctacncgaatatacatacatatatatgtgttcatagtaaaatgaaggaatgaacatagtgtgttttcgcacactgttcattcttcattttctccttttcacttcaagaccttgtaaaatatcaaaatcattatgtgaaaaaaaacatgtgatgggttgtggaccttgtggtagtatctataacaactatgttttgtaaataccaatcataatgtgaaaaaaaacatgtgatgggttgtggtagtatagtatctataaaacctatgtttgtctacttgtaataattggagttaaatgaacttatgtttccaagttgtaacaatatgagtgttttgtttttttacaaaacaacattatgtttctaatgatggtataataaccgataacaaaaaaaaaaactgttaatccatgtagctaaagtaaagatatgggaatttgagcagatggactagttgtaaccattattaagtgttgctactactgatataaacgatttttgtctagttgatggctaatacggttcccaaatcaaccatagtagttcaatattcagttattcactattcaggcatgtaacatgtatataaaagcaacaatcatattattataaatcttacaattttcattgcaaaaaacttttcagttttgaattgatacgtttccatgcatacatataatttttatgaccacaaatatattttaatctatttatcgactaaatttttttttttgaaatgataacattagctagtagagaataaagtttattttgaagataatccgccaccacaaacgctaattttgttcttattcatttagagcgattgaaaacgccaaacacgtgtaaccgcaaaccgcaaacgctccaacacataacatgtgttggcgggttgcaagagaaccaatcaaagtacttaaaaaataaccaaaagctgtatatcagttccttttgctttttctttttgataaaacaaacagcattgtcagctaatcaaataatataagatattgaagacttttagagttcggaaaatttaacgcttcaaacttcagagggagtctttgctgtcatttgatcaacggcatgaacaacgttctgaagctcttcccaaatggctttgtagaccatcctttgtctgttcactgcagattgtccctcaaaagccgatgataccacattgatgctacaaatattaagcaaaactggtattaagtaacagaaccatctaatatgacaagttaaagtaagaatctatgactggattccatcaagagcagaagaataagtactaacttatatcccaactttgatgattctactacttgttgaacctgaaacttttttgtgattaaaatgaaagaaaaggaatctcaaaatatgaatttatctatatatctaacaaacttcactaaacactatccataacagtgataacacacatctgcaacttcactcaagtgtaataaagaatcatcattggaagacaaaaatgagttaaatcagagtacttaccagacatgacgtccatctacagacatattcgttgcagggaccgactctgcattcaattgttctttgatctgcaaatgacgccacaacctcataagtggagagacatgtgttgataaatcgaaaaaaagaatcgtttgcttcaatcatataaggaagagacatgattgctcattaattatcttagcttagtgatcttgatcattttggagctactgagagcaatcgtgttgccaataccaagtttccatcaactaaatatgacacatgttgccaataccaagtatccaatcaatttcttcaaaaattcactaataatactataacctataaattgaattgacactgaaacatacacaatgaatcaatttcactgaaattagttaatgaggtataaaaatccaacctttagctccatggattgcataagggtttgatcaatagaaccagcatcattgatttgagaggatttagtactgaaattaaggctgcgaatgtccaaagcaccaaacccagaaaccctagaaactctattgccgtaaatcgacgacggcgcagtctctttacgagacaaaacggcgcttacacatctcgagttagtgaatctcacgagaggagctgagaatgaagcgaagggtctctttgaagattgaaaaaggcgataaagactcgctcttgtggaagagagaagaacgtacggacgagttgtcgccattaatgtctgcgccattgcttgagagacttgcgagtaaaaaaaaaaaatgttctgtggcaatgtcgttggttcttgaaaaaatgggcttacgacacaacacagttaaacttaatgggctttcgtggtttcaagtcattttaagattttaataatataatactttaatgcaaataatgtcagccgttggatcgaatcctgaaattgatcaattgaacaacaccgcctttggatatttgtttctctattctatacgatggttctcttttcc

SEQ ID NO: 65654 - DNA, 464 bp, Arabidopsis thaliana landsberg
cagacttgttctacacacaaacaatgtttcaaattttagtctgggagaagatatgttggaacctgagtcacctttttcccccgtttttggtattgtgagtaaaaatatattttgctaaaaaaatttagtcttatttcattattttgatgttaatcaaccttgttttttttttcccctatgacagataatccagaccttgtcacgccattgtgtaaatgtggaagccattgttgattgggaaaagcgtaggaaagcagcaagagaggaaggaactctgtctcaacaagagatgactcttctgtggaatatggaacatacccaaattggtcccaccggtggcatccttgaaggatatgagattggaaaaggaagccaggatgctcgagacatgggcctctaagtccattcacgttcatgactctctctccctatgatcacctatatatctatctattttaggtatc

SEQ ID NO: 65655 - DNA, 1199 bp, Arabidopsis thaliana landsberg
cctcagatagttcagctccgtggctcggtcaagcaacctatcttcagttgcaagtttagcagagacaggtgacatttgagttcttcatatatgcataaatctctctctctgtactgtttgtttagttactgatggtggtattgattcttcagggtgtcacaggtggatccgttgaatgggtactggtcaagttcaggcgatggaactgagcttgagagtgagagacgtgagagaaaaggctggaaggtgaagatacatgatctctctggctctgcagttgctgctgctttcataacaactccttttgtcccatccactggctgtgattgggttgcaaagtccaacccgggtgcttggcttgtggtccggcctgacccgtctagaccaaacagctggcagccttggggaaagctcgaagcttggcgggaacgcgggatcagagactccgtgtgttgcagattccatcttctatcaaacggtctagaagttggagatgttttaatgtctgaaatcctcatcagcgctgagaaaggtggggaatttttaatcgacacggataaacagatgctaacagttgcagctacaccaattccaagcccgcagagtagtggagacttctcagggttgggacagtgtgtctctggaggtgggtttgtaatgagctcgagagtgcaaggggaagggaaaagcagcaagcccgttgtacaattagctatgagacatgtaacttgtgtggaagatgcagccattttcatggcacttgctgcagctgttgatcttagcattcttgcttgtaaaccttttaggagaacgagtcggagaaggttccggcattactcctggtgaagaaaggaactctcttttgtgtgttttagtgtacagtttttgaattggactcaaagtctcattgtattaggaagaaactggcttaaggattaagaaatttcactcttctcagaatcagaccaactttatatcaatggaaaaacatcaagtagacgaggtcaagaactaagtagatcaaagtctttaaagcaactaaaccagtcaacagaaatgataattctagtctcataatgaaatcaaaaacagcaaaagaaaaaaaaaaacttggaaagaaagaaaaagctcaagtaaaccttggttttgcacttaaaacctttagttcttcttatcacctcccacttcaatcttcttct

SEQ ID NO: 65656 - DNA, 2291 bp, Arabidopsis thaliana landsberg
aagttcctccaagtgcaaaagtttacgagtacatattgttccgtggaactgatatcaaggtattcagcaggattatgctaatacttctatgtaagtagcctgccgattttgtactctgattgttcttgttgttggtaggatttgcaagtcaaagcttctccaccagttcagcctcctgcatctactataaataatgaccgtgcaataattcaggtgaatgttacaaaagttgtaagattacattgtctgggattttggagtcaattgatgtaaccccatcctccacttgtcttggttttgcagtctcactaccctagcccgatgccaacatctggtagcttgccttctactgcgagcgggtcactacctgacattagttctcataatggacaacctggacaacatggaatgggattccaaaacgcaatgcctttgtatcagcctggtggaaatcttggttcatggggagcgtcaccacaaccaccaatgtattggcaaggtttctacaccccacctcccaatggccttccccaattgcatcagcagtctctgattcgaccccctcatgggctgccaatgcccaactctcttcagcaacccctgcaatatcctaactttaatacccctcctccacctactgggtcatcatctttgcaggggtcaagcttgccagaagcaccctcttcattgtttccttttagtaccagttctcaaatgttagctcctagttcattgcctttccctggtctaccacctgtgacgctctcgtctagcctgcagtctacactgcaatcagcaccatctccttcactagcttcagagatggcacctccgttgctgtcaaacaaagctcctattactgctcctcctaccctacctcaggatactaatttgctttcgttttctctatctactacgagagccacagaagcaagtactggccttccactgtctaacaagcctagtgtagtaactggtccaatttctccgccgcagacaacaccattaacatctgctcctgttgcgggagtttctagttccattagccaagataagccaaaacctttgttggttactcctggtcaactgctgcagtctggatcttctgcagtctctttgtccccaccctcgacaaatgctgataaagatgttgaggtggttcaagtatcgtcatcagctgggttggaacaatctgttccagttacatccgaagcccaacctccaatactgccattgccttcctctgcaagaccaactcagaaggtttttaacttacataacatgccaaatccttcaatgtctcttataaatatcataaagaaccttgaatttgctggtgttttagttagctggaataaggtgtaactgttataactgcacctgtggtaattcccattttaatattccatgctgtgtctcttttgctttgttgaagatgcatgaaaatctctcagggttctttggtgtataagatggtttctttgcatgtctacttataagtcttcatggtgaaattatttaaactcaattgctgattttttttctcagccaaacgggcattctttcccaaatcataatggttacaggggacgtggaagaggacgaggaagaggagcaggggtactattcttctcactcatttgtagaatgtgacggcatttatttgtttttaccaaggaaaagatctaccagtttaaaatagctcatgatctttagccatgtatgctaataattcttcttgttggcagagatcacaccaagtaatgaaattcactgaagattttgatttcacagcaatgaacgaaaagttcaataaggatgaagtatggggtcatcttgggaagagtactaccttagatggtgatgaagatgatgattccccgattgtagatgaggctgagcttcctaagatcgaggccaaagtaagtgaagtagacttataatcaagtaaagccaccatattctccctctctggtctcatccacattgtttattgatgtagcctgtttacaacaaagatgactttttcgatagcctatcatcaaacaccattgaccgagagtcccaaaattcaaggcctaggttctcagagcaacggaaactagatactgaggtacaatctatatatttccacactctgaatagcaagcagactggacagagtttgtcccccctcgttgctggagatactcgaattcccagaatcgtaagagaatcccattgactaacagaacgtattgctatgatttcagacatttggtgaattctcgagattcagaggaggtctccag

SEQ ID NO: 65657 - DNA, 713 bp, Arabidopsis thaliana landsberg
tattgtcacttgcctgcgcaaattagggcttctccttcgcaagactctcttcgccagcttaaatcagtgtactctctctttctctgtctctatctcttgcaacttctctgtttctaatctcttcacgcatttgtgtatcaaggagtcattttttaacagaatatgaacatatttgaaaattcgaatcatgcgagttttattgaaagcttatgttcttgtgatgatttcaaacttttcgaaaacagcgactttcaaatttcttcagaaactatgaaaaccctatcttgtaattgccattatcggcatccaaaatgtgcttagctcggaaaattcgaattgaattagcttcgaaagctcctaattacattagaaaattcaatctttatacgaaatttttgaattctgaatctttctagcttcgtactcatgagtttaaaagcttgttacagattatgtagcacttcattggagattatctggttattgtagatagtaatgttacagagtctcataagtgctgttgttatgtgcttgtcaggcaaagtgctgaatataccttaggagctaaatgtcggatgatcctggacagatgttgctcatctatgatgatccttcagatcagcgatccttgtctttagatgatgctagtagtactgaggaatctccagacgataacaatctctctttagaagcagttcacaatgccattccct

SEQ ID NO: 65658 - DNA, 547 bp, Arabidopsis thaliana landsberg
cctttggtgatcatattgtagagtgtagagtaatccttagtttatatctttagtgattgttttatgatcattcatgatttagccatctataaacatcattataaagaacctgtctaaagtctttgtttggatacatacatgtcaacgaaatgtatctgtttcacagtttacatgaatagaaagctagttctaggattccatttgactttggtggtgtagtattcgattgaatatggacaacatttcgtttggttgaattatgcatagcttgcatctaggttgtgtggaaattaagtttgattggttagcactgaaaaccctttgttgatcatagtgtagagtaactcgttattgaactaaagttatatctttagtggtggttcttgtcgattaatgatttagtcatctgtgaacatccattaagaagaacaatgttgtctagttacatacttacatgtcaacattattttattgaatttggccatcctgaggatatctgaaggtctctctttcctttctatggtcatagttcatagcagcggcatca

SEQ ID NO: 65659 - DNA, 319 bp, Arabidopsis thaliana landsberg
  unsure (1)..(319): unsure at all n locations
acagagaaagaagcccaagcagaacaaaannacggaagcncgcaagtaaagcacaaaaacataaatacaagaaaacccaccaancaaaaacgaaaggttagagaaaangaacgaaggccaaacaaaaccgaagaccnaaggagacgagagagagaaaaaaacnaacgcaaaggagccagacgaacaaaaagcgaaaacgagagggcccanagccccaaaccgcaaaccacagacagaaancaaacccccggagagagccgacacgagaacccgggaaacggggagagagacagagagacgggaaaaaaaaaaaaaagac

SEQ ID NO: 65660 - DNA, 272 bp, Arabidopsis thaliana landsberg
  unsure (1)..(272): unsure at all n locations
accacccccaaagaaganaacnccggaagccaccaagngaggaactttagtaattggggaaccgcccagagccagaggggcactgcctaaccagcccccccctaccagccggacgcaacggnnggaacaaacacnacagcagaccaaaggacaaggcacaccncagccggacagacggaccacnggaaaccatccaacaccctaccgaaaaagnagcgagacggaaccgccaagggacggggaaccccaagacagancacaggncaaggcaa

SEQ ID NO: 65661 - DNA, 142 bp, Arabidopsis thaliana landsberg
atactgaacatgacttgtataccttattatgaccatccctcatggggtgtccacggattccattatcaagaagtgtatccacggcttcttgtaccaatttttcctgacacattactaattcccccggtgtagatctacttgt

SEQ ID NO: 65662 - DNA, 105 bp, Arabidopsis thaliana landsberg
  unsure (1)..(105): unsure at all n locations
atacaactagnagaatgaaagagtgacaagctttggtttgggatttttctaataaatcacatgcatttgtcagaattcgatcccaaaaaacaaaaacgcagacct

SEQ ID NO: 65663 - DNA, 218 bp, Arabidopsis thaliana landsberg
  unsure (1)..(218): unsure at all n locations
gacaacaaacancagggccggaactacagtagnggactcaacccccataacacagcgcnacaaacagannngccccnacncccgacagaagaacaacaaaggnggagaannccagggggaccanccaacaaaaaacggccganaaaagacccacaaaggcnggancccaagcagaccacnagcgggcgaccacccngggagactnncgcagcaaccaa

SEQ ID NO: 65664 - DNA, 1516 bp, Arabidopsis thaliana landsberg
tcttatcattcaacttttatgtaattagggatttgtttgggcaaataagctatgattaatcttttgctataatgcaggtgtttgcaaaatcttttttccatgtttgcttttgatttcaaattaacatgctatgtagaacatttgttttagtggatggtctatgtaatcatttctttattactcaatttggtgcattatatacgtaacaagaaattgtaaatcttatccatttgggacaaagatttgaagtgaggaaagactgtattccaactacatgaagcaatagaaactgagcatctgattagaaagcctagaagattgattatgtacacagcaaactggtcaagtcaaaagcaaaacagacagagattggaaacagcataaccaaaactaaccgatctactacccttcaaggaaatttattaaaatctagtatatctgataagatgcattccatggaagcaatctatcaaaaacttagctggaaacaagttcttatagtcaaaataggcttcctatagaagcaagggtcactgtaactccgagctctatgcttctttgcttgcttttttttcatctgggtgtgttcattggctggggcaccaccaacacataaacagaccaatgttagccatataaaactttcagatagaggtatttgaagctttgaattaaaactgaaacaaagatatgatcatatagacaatttcatgatatgcttcaacagacatatactatgatagaagagaagggtcagaagatacatgaaaactagttttaatacctgattagtgcatgaactctgagccaagcatcgaacaaattcttctttcttcttgccaaagttgaagacggcatgctcacggagcacttgctcccgcttaatgtcctccagcgttttctcctttttccatttcagctctttcattttcttctccgcctcactatagttgtccatcgtgcgagaagcagttggctttgcaaatctcacgttcacctcatcactgaaaatcatattgatttcagttcaggacagcggataagagcaagaaggaaatggaagaatccaaagagggaaataagttcagaggttataaaattgtgagaatcttaccggtttccaagattgaagatccccgttttcctgatgattcctccatccaaagataccgcaccatcacttatgcatgggagggcactaatcatatcggcccttgttttgtaaacttgaaggcgagagaatagattgtagaacaaggtctcacgaagaccatatccatatgatgtgacacagagcaagtaagctggatcgatctgtatcatattcactgcaaatccgagaaacccgggaggacactcaccattaggtaattttggtttcagaagatcaagccttctttgcagatcatcagctatgtgctgaccaacatacggcctaaaagtcatcaaatgaagcaattagaaaaggactgcagatgaagtgtacctaaccaaatttgtaatacatgtaaaagat

SEQ ID NO: 65665 - DNA, 1720 bp, Arabidopsis thaliana landsberg
  unsure (1)..(1720): unsure at all n locations
taaaaaccaatttaggcgatggcacaaaccccaccatttagattggtttccatatatatactcaatgttactatcttccaaaactcataccagatttgttttaaacacattaaacataggatcttctatgatgaaagtgttgtgttgagcccgtgtcacccgttctctcatgcatgcttattatagatttggccatttgggctctttcaaaggcccattggtgatattttgggctttccaaatgctggttttgtctatagagcccaacttgatcacctttagaatcctaactcatcaaaaaccaaagaccgaatccaacttagaacacgaatacaaatcatgaatgttagatctaaaggttcaggttccctcaaaagaacaaagaagacattttatacaaaaggaaatgaacaaaagcaatgtttatgagtaaacgccaagaggacaaaatgtagaacacattgaaatggtatcaaatactaaaacacactgttccatatgttaatgcgcaatatcactaagagttgccatttataccagtggaccttcacggaccatgtgactgcaccgcttcttgaaggctcttcacagcgctttcataagtcacaaaccccataaaccagaactcgtggttgtcgatggaaatcacttgtatgtatttatcagatgtgttcactctacttgttgatgggttcactgccttcagctgattcgccggaagtaccacctgatcatcacatcaaaatcatcagccacagactttacaaggaagaatgacagaaaatagactgcaagtgcaaggttctcaaggaacgaaaaaaggttctcaagaaccacccaaatcttaaaatcagttttccaaagatcatgttgtcaagaagctttctgcttggtttaataggatttcagctcatgttagatgtttacattagaaccagtccaaactctcaaactaacaattattcaatggctcccctagttttatcaagaatgctacaagatttagcttactctcttaggcaaaccactaaagtcctaattgtctacataggaactaacatgcaactactcaacaatatcgttagaatgattatgtagtttccatttactataagcgtacacacactatgttctatacgtcaataactagaaatgacaagaaaatttgttatagtctatgaatctatgtaaatagatgcattgaaaatgacttaactcacttaacgctttatcatgtcaccatcaaatattacattcgctgaatctttgttctcaaatagttttcttagatgtaaatagatataaaataaaagagttagaaagaaaaagtaaccataggatagagagcgagtataccttgtaatnnnnnnnnnnnnnnnnnnnaccctctttgtaagagagaggattgtcactagagaacgcaagcttgtgagtcgaaagatacataactcccaggacaggaccagcagatgtagacaagtagcaagcataggtcttgagaagtttttcatcaggaaggcaatcaaatgtttgcttgaagaccttttcgtatccaccctctgcaagtatttttgtcccctgagcaattcgtgaaacagcagcatcggctacacttgggcctgttttactgaaaaaaaaggatagatatcaaaacgtatactctcaagtctcaattcatataaaatatcatccctcctccaaccatatgtatataatctaa

SEQ ID NO: 65666 - DNA, 390 bp, Arabidopsis thaliana landsberg
tggatcgggatcttctaacatggaaagatactccaagtttatatttttggttgaggttatagccctatatgtcagggattcacctatcatttcgagatattagaggcccaaccgctcacacggacagagcttacttttgtgagtatattggctccttaacactaaggctaaaaccttcaacccttgacataaatcgtacaccctaaactaataatccaccaccctataacctatgcccaaatcccaacaccctacatcctgaactacgaaccctacaccgtttaacctcaacccatatccattgtgctcaaactatataagcaacatcctactttagctgctggaagcctggtgcggttctagctgttatgctcaagcatccacaaagca

SEQ ID NO: 65667 - DNA, 542 bp, Arabidopsis thaliana landsberg
  unsure (1)..(542): unsure at all n locations
aaaattgtgcgtatgggaacctaactcgctcaactttatgttgtgagtttcctgccccgatctttcggccagggtaaaaccacctcccatgtggataggcaccttgcccctcagatcgggcaatgcaaaatttacacggccatctccgccaaaggttgtccccaaaagcgaaaacaaagcctggttcgtgttaatggccaatagctgtccgttgctgagcgcaaagccatgtggtgcaaaattaaagctcaataaatatagttcagctaaaaaaggggtggacatactattttttttaacgtaaaagagatcatgttcgcggnnnnnnnnnnnnnnnnnnnnnnnnnnnnnnnnnnnnnnnnnnnnnnnnnnnnnnnnnnnnnnnnnnnnnnnnnnnnnnnnnnnnnnnnnnggctaaaggcaagctcacagggtgtgaggcaacgtcngttgcatatagtttcgttgtaatcgcatgaggtccggaacctgtagaatgacctgtaccgaggcttgcaaatgagctggccggtcccgtggct

SEQ ID NO: 65668 - DNA, 546 bp, Arabidopsis thaliana landsberg
accaacaatcacagcattgttgctcttgaccaggcgacgaatgattgctagaacaattgaaagttttgttggcaaagtttttaaaacatcgatatcttattttaacataggcacaaggaataaacgcgtaacatgtttgcagaaactggaaggaacgcaaaactagaatatctctaggcaggaaccttatatacctcaactcgacgaggtaacaaggctatcgcataacggatttgaatgacaatagacgttggggcctctgaccaacagattctctctgtttgaaggagcttcccattttgatcaacaaaaactccaatgttctcctacatgtacaagaagaaactaatgaagacgacatttcaaaaccgaacaaatacattgaatgggggaaaaaggaaaagcataactacctttcccaaaataagttcaccagaaggtagagatatcacgagaggaggagcaaccctaccagaaggaaacacctcagagagagtcccattagcagtgttaagtatcacatactctttcttaatgcctaaacag

SEQ ID NO: 65669 - DNA, 617 bp, Arabidopsis thaliana landsberg
gtctgattagtgtgtgcgtacgtgttcattttctttggtaccatttttgtggttttcaattttcgtatactactaatttcatcgacggatatacatgttacatcaacgcaataaccacgaaacatacggaattgcgaacatgagtagtgggtacagttgatacaaaaaaaaacgcaaatttttttttgtatttcatcatatattcgcaatgaattaaactcattctgcatatattttagttttagtttttttgaaaaagcatatattttagttttttttttttggtcaaagcatatattttagtttatttctgcaaattcagtacttattaatcaacatgtgaaaaaaatcagacttattactaatttttttgacatcaatcaatattaaagttcttgacctttgttatttaggagttcagcttttcctttggtgatagaatgaagagagcacgaaaagttggagaagacagagacaaacactgccttttgtacgaacgttagtccacttttcagactacaaacaaataaatgtaaggatatcactttttcatctgcagattcacttttaataggttgataccaacattggtgaacaaaggaattttcctattttac

SEQ ID NO: 65670 - DNA, 410 bp, Arabidopsis thaliana landsberg
cccttgttctaagcaatccgatgtttgggtcgtagtggctattagggatttcacattttttcagaggaatcttgactaaaaacagaaacataaccattttaggataacatgaaacgtttgcttagctatacaatcaactgcccaattgggacgatgactcttttctgtttattctagacataaattcatcccacatcagaatttattagtgaacgtgatcttttggttttgattataatcatgaaaccgcctacaaagatcttaatctcacctgcgagatttaagttaacaatccaatcctatatatacaaaaagagatagctagggggtgacaggtgaacaaacagaatcaatcggggtgaacaatgggaagaaaatgaaaatgagactgagaaaggaggtgcgaaaga

SEQ ID NO: 65671 - DNA, 507 bp, Arabidopsis thaliana landsberg
  unsure (1)..(507): unsure at all n locations
attcaacatatgtatatatgatactcaataaatcaacttatatattattacacagncacatcnctnactgggcatatgtatttagacaaacacatctctctctctctctctctctctcatctgtgttctagatctcaccaggtctttctctggttaatatatggcttccaagatctggtaatatgttataaatacgtcatacttaagcttttttcaaatcaaaaatagaaatttgtgggtttgtctcgttttactattttagcagtatatattaagaagttcagatgtcattcgatcatcagtttttgcttcccctctgccatctttatcttttagggtttcaattctttttcacttttttcttctggtttggagatgggtagggtccaactaagtatacgagattaaatttgacatcttagttacttcaaaattccttcaatcaaaacaagtcatctcgactattccggcatgtttggatatacatattcatatattatatatatg

SEQ ID NO: 65672 - DNA, 730 bp, Arabidopsis thaliana landsberg
agctggcctcgccattccatatgctgcatgagcgcgcgaatcacccgctccgatggcaacgagaaatccacctcgatgcccagcgcctcgcggttgaaatcatcaatcacgtttagcgtccggatactgcgcccgtcaaccaactggtcatgcatgaagtccatcgaccacacttcattgatggcctgcggcacggacagcggttgcggcgtctcccgcaccaggcgcttcctcggcttgatgcgcaggttcagttccagctcgcggtaaatccggtaaatgcgcttatgattccagccgaatcccttcacgttacgcaggtagaagtagcacagcagaaagccccagttgcgatggcagcccgtgatacgcagcagccagtcggcaatctcttcgttctccgtgttcaacttcgcctcgtaccggtagcacgactcgctgatgccgaacaccgcgcacgccacacgaatcgacacgcggcgctgttgcacaacctgctttgccatctcgcgccgacgagatggcttcagaactttttttgcagcgcctccgaggcaatcttagccttgagcttctgctcgatgtacatcttgcgaagccgggcattctccgcctcgagctcctttatgcgcgacatcatcgacgcgttcatgccggcgtacttcgagcgccatttataaaacgttgccgaactgatgcccagttcccggcatagctcgggtaccgtcag

SEQ ID NO: 65673 - DNA, 575 bp, Arabidopsis thaliana landsberg
gatctcatcgacccgctccagacccgcctccatatctccatggccttttagccgccaatcataatcctgatgtgggggattttatgacgggtgtgtttcaggtgtgaggggtgaatcgtgagttgtgagttagcgtgagttagcgtgagttagcgtgagttaacgtgagttagcgtgagttgaaagacaggtgatgttatataccggtaatcacaaaaagaaccggctgtttttttcgttgcgtatcttagctcccttgtttatagttcatagtccatagtccatagtccatagtccatggaccatggactatggaccaaaacccccaaactcctcccatgccccatcccatctacaccgttgacgcttttaccgatcatgtgtttggcggcaatcctgcggctgtttgtcccttgcaggaatggttgccggatgataccatgcagcggctggctaatgagaataacctgtcggaaaccgctttttttgtgcagcgggccgatggcagttatgatatccgctggtttacaccggagctggaaattgacctggcaaggcatcctacactggcaaca

SEQ ID NO: 65674 - DNA, 767 bp, Arabidopsis thaliana landsberg
cattcgacaaagggcctgatgctgggaaccgactgggctgtcagccctgattggcggctgggcattatcggcagcaagacccagacccggctggacagctatcaattcgacggagcgctcgacagttggctcgtcggcgcctacgccttgcgccaggacggaccgctggcgctgcgcctgggcgctgtttatggcaatcatgacggcagtaccaaacgccatgtcgtgttcaatggattcagggaccgcctcaagggtcgttacgacgccacgacgcaacaggtctttggacaggtcggctataacctggacgtcggacaattcgatatagagccctacgtccaagtgggctaccaacgctatcaacgcgacgcctactcggagaaaggtggcgacgccgcgttgcagtacaacggccaaacccaggaacactacaacagcgacctgggcctgcgcctagcccgtccttttgtgttcgaccaaggcatacggttgacgccgcgcctggatgttgcctggaaacacctgtacggcgatatcaggggcaactcccatcaacagctggctaacggcggcaacacctacatcatcaaaggcgtcgaactggaccgcgacagcctgttcttgcaagcgggattggacctggccatatcgccacgtcataccgtggggttgagttacagcgcagaaacgggccaggacaaccgcaacggtgcgctgatgggccagtggcgaatgatgttctgacagggcaaaaaaaggggagc

SEQ ID NO: 65675 - DNA, 1327 bp, Arabidopsis thaliana landsberg
ctcttgaattatcaatcactaattaattattctcgaatcaaaaacgttcaaactaacatattctttttagttttaatagtattgattagtattaatatgtacaaatttgtgaaacgtttttagtccatttgtgacgactgcggtattagcattccgattatatattttgggttaaagataaactttaacgatcatatgacaactagttaacaaaaaatgttgattttgtataagtgtaatcttggtagtaatatattaacacaaacgtgtcattttgtgtcgtgtaaaaggagaacaagtgagacaaatagaccaacagctttgaactaacacgtacgctgcacaatttagtagaaaacaagaagaagaaactcttttgagaaaacccaaaagtaaaaagacttgaccacaattggttgactccgcatttacacaattacacctcaacaccccgaaccggttttggtgctctttaatatgatgtcttcatcacatacatatatggttgctttctttgaccatcataaatcatgctagtaatatttatgtttttaattgaatttataaatatgtatggaccactgaatatcaatttaatcaaaccttttcagcttttcttaatcatattggctttgcactatcataatcgtgaggatattatttaaattttagtggcccgcactcaccaaactcgaatgttatatatctgatttgatgtgaaaccctctaaccaagccgagatttattttacaagtttttgtttactagtaacaatgttatatactttggacataaaatgatatatatatatatatatatatatatatatatatatactcattaacttattgtataggacatgaaatcaatatactttggtattaccgtcacatatttagctgtattcttaacatatgattgtgttgttcttgtacatttgataggtttcttgattcaataagaaaagcgcacaacccaagagaatttgattatactagtactcgttatcgaagatagatatagaatgaatccgttgaccgaataataaattcctaaataatcatcgggattaaaaatatgaaatgcatataagctagtaataaaaaacgacgacgtatgcaatgatgtccccacacgctccggacgtaacgccgtgcgtagatcaacaacacggtcacacacatatgtacagtgagattgtatatatgtgtatgcaactcctaatagtgttatcaaaacttaaataagtaatgagtaccgataatataattcctacgacgacgtattcaaagttgccccacacgctagtatgtattggaaaaattaa

SEQ ID NO: 65676 - DNA, 505 bp, Arabidopsis thaliana landsberg
gcccatctcagcgacctgccatccccggtcccgaacgttttggccttccattcgttcctccccggcacgtcgcacacggtggtgctgatcaacaccgacgacacggcgccagtaaccgtcgccgtgcgcggcctgcaagccgcaggcacgctcacgacccacagctacgggctggaacagccgtcagtggcggagggcacgatgccagcggcgcgggcggagagcggcgtacagctccggccggagtcgatgacggtgctggccggcaccgccggccgcgttcagccgcccgtcaccctgcgcgtctcctaacggattaacggacgggccggctgacggctactcggccgcgggagccgctgccgcctcggcgtcggagacggcgtcgccgttgatggagaagccgccgtcggcgaccagttccgcgccggtgacgaaggcggtctggtcggagacgaggtagccgacggcgtatgcgatgtccatcgggttgccgatccgggtc

SEQ ID NO: 65677 - DNA, 101 bp, Arabidopsis thaliana landsberg
  unsure (1)..(101): unsure at all n locations
acaccaanaccacacacanagagagcgaaaggccagacgccgagggaagcgcaccaaacggggcagngccccaaggaccagaacaggcggacgaaaaacag

SEQ ID NO: 65678 - DNA, 557 bp, Arabidopsis thaliana landsberg
  unsure (1)..(557): unsure at all n locations
caactttaccatattttcgactaaggtaacgcgaaagtccggcttgcgttactccaagaagaacatcgttcaccgtctaacaaaaatagattaaaagcaaaaaaaaatgtcagcgtgtatacatgatcaagagattcttaaaattaggaaataaaacaaatttaccattttcattgcgtttttcaccagcttaacatcgtcaaaactgataatccggtggacgaacctcttagggataagttcactaccgggtttggccaagagaggagtctccgtatccctcaagacaaatattgtaagagcaaacattaagatatcaacaaaagtgttgaatagcaatcttaggatgaaccagagccctacaaataaccaccaaatcttgtnnnnnnnnnnnnnnnnnnnnnnnnnnccaaagcgttttttatgaaccgcaacggtaggcaaagcctcggggtctgatgttntgcgggtacaagccagtaaaagagacatgagagacattccatcacccaaagaatgatggatcttgagaatagcataggattcagcgttcgatg

SEQ ID NO: 65679 - DNA, 512 bp, Arabidopsis thaliana landsberg
  unsure (1)..(512): unsure at all n locations
aatcctagctactatgctcagatacaactattgaaagtataattttcattatatcaaactcaaatgacgaacctgaagtggtgtgtcctgtcagaagaatacggtggttacttgaatactgtgtcaatgaagagaacagctttgaatccttatttttcagtcgatgacctttatcaacaatctgcccaaaacaattgttactaggcaacatgttagagagaaagagagacgactaagagaaagttaagtctcattagagaataagagttaccatgcactcccacttaattggttttagaactgctgaatctaggttgatcatctcatacgatgtgaggaggacatcaaacttgattcttttttgcttgctttcgctacttatntgtccagatttctttttcttgatctttttttgatctttcgataagtaaaacttatgttctctgataactgctcgagcttgcgcagtgccaaaatacataacctacccgtcaaatgaccacgaagaccat

SEQ ID NO: 65680 - DNA, 274 bp, Arabidopsis thaliana landsberg
gttgttgtcagaacgttccgcagcagtcatctacgcttaagtttattccttgaggctgtgataaggaaaacagagctccaccttcatgtgcttaccctgtaacaagagagagttgctatataaggtgtatgttaaatactataggctccatgtgatcagttaagtattattaatcagatagaacattattatgtccagttgctatgcaaataggttctggtatacttacattggaaactatagcagcttaacaattattgtgaattagggttgg

SEQ ID NO: 65681 - DNA, 2123 bp, Arabidopsis thaliana landsberg
aggcccaaaacagcttaataaatgtggcccaacacagcttaattgaaaactccatgtctcttgattctattaactgttcttaacatggacttcacgtagacgagaaagaagaaccttgaatccgacttttgtttcttcattttaaggtagggttaagtctattttcggttctgggttttcttctctttcaattctcaaacaataactcgcaattttattttcacggatcttttttatttcaaaatcgaattgaaaaaaatggttcttcacaatctagcatatatgaaatttgggaataaagttacgatttttatatataatatggttttaatttcgttgattctatgttttgctactatgattgttaaagtgtcactctcattttcaacttctcggtgattagtgtgtttgtgttcttcaaagattgtaaatttgaatagcttggttttgttttctctaatagactgagatatgttatgatgtgtagctaaacctcttcactggtgaaagcaatttgatgttatggttccaatggaaactcaagaagttacagattctttaccaaaagcgcagagtaaatcgggtagtactcaactagatgggcctggaatggtgtcttcagcaaatatacctgaggttttgactgaagatatggtttgtgacacagtgatgccaccggtttcagtttccggagctgcttccttagagttacctttgaatgtagaggaagcgccgttgattagagaagaaagtaatagaacaagtcatgatgctgatgccattttggttcaagagttttcgagtcgttttccagaccatgcctctatattagatattcaaggttctgctagatcagatcaggttacttgctgcttcttgaaaacgactgttactctttgttggtttcagatcgtttattgtgcttacgaattagatttttcgtctacagagagctcaaggtacgggttgtccaccatcttcgtcagttcccgtccaaaatatcacaacagcagcggagcattggacttctacatcgactcctttaggtcaggatctgcccattgatagtgatcgctatgctttaattatagttggtgtgctagaatgttaagatttttgtatgttgtgatcgttgtgtagttaaccattcagaggatgtcgttgaaggtggtgttcagcctcctaacgtcttacatagcagattaacagtcaatgcatcagcggttacgtctcttcccaacaatcatatgggacagagtcctcggttacatttatcttcgttcagtgacatatgtgaccacgagctggagaagctgagcagagaacaagggaccttactgaaaagctttgaagagacggttagtctttttctaattcttggttaatctatctttattcggtttcctgtcctctctgctcattgtctcgttgtttgtaagcagacattagagttgaaggctgaactcgagaggaagatggcggaagcacgcagtgagtatgataggaaatcccaagaggtagatgctgcgtataacgctcaagcgaagaagaatgaagcgttaaggagtttggttgttatgaacagtctcttggcgaatgcttacaagtctacttgtccagtgaagagtgcatccactgatactgctaccgttagaggtaaagttggagagtataattggataaagcagatgacctaaacagcgacactaattctattacctttttttagcacccaggaactctcaacattcaacgcagcagcagcaagcagtgcagactaacaggcatatgaattcaactgctcctactggaccctcagtcacagcaactgaacctatgaattacggtgctcctcctcgacccttagtcacagcagctgaacctatgaattcaactgctcctcctcgaccctcagtcacagcagcggaagctacaccttcaaatcttacagctcctctgccggactgcaacactcctcaaccaagttcaatatctcagcacgcagcagtataatcaaacacacagatgccatcaaccgcccttgctagaccctctgttacagcagacgctcgttctttacatcaaccacacagcaacacgtgtaatccaagaccaataccaca

SEQ ID NO: 65682 - DNA, 1482 bp, Arabidopsis thaliana landsberg
atgacttctacggactgagagataagatggatcgttcgttaagagacgtcggaactctgccagagctcggccggtatatggaactagccctgaaatgcgtagatgagacggcagatgagaggccaacgatgagtgaagtggccaaggagattgagattatcatccagaatagtggggcgagtagtagctcctctgcatctgcgtcgtcatccgctacagattttggtgagaagcttttgtacggaggtactttgaagaagaaagaagcaagagacggagatggaggcggagcgtttgattatagtggtggctactctgttccgaccaaaattgagcccaagtaaatatcaacatctcttgtgagattatttgtcgttactttttgtatgaatgaatggaaaagtcatattgatgaaaacttgtgcgagtattgttgacctgaaacactgtgaggctaggcccattagtaaatcgtgattactaaaagaaaatcttagtagttgggccaaataaattagaactgtaaactgtccatgtatagacgtcatttgccttttcagcccaaaaacggtagcgtattaacatgagccaccactgccactggacatatacacatttagcccatgtttttagtaatcgtgtttattagtaattgggctcaagtaaatcagagtagttgatattattaggcccataaaagcccaaaacggaaagccacctgagaagcagtggggacgcagattcctataaaaagcaaaatgcgtcctcggaaaggaagaagaagaagaagtctatctcacgagttcccgtttcgtgaatttctctctctctgtgtgaacaaagacgaagaagacgaagtaacactgatagaaaccctagttttttttttaaatccgtcgaggcgtaatgtcgtcggagctgcagatttcgccggcgattcacgacccgcaaggtcaagagaagcagcagcaagccgccggagtcgggattttgcttcagatcatgatgcttgtcctctcttttgtactcggtcatgtccttcgccgtcataagttctattatctacctgaagctagtgcttctcttctaattggtttgtcttcttcttactcctcctttgcattgcgatcgtccttttcgttttccatcgattgttttgtttgattccttgtgaaatttgtggaattgaacggctgatcgatggtggtttagcgaacatctagaacacggagactagcataaggttcgttgaactctttctcatcagttttttaagtattttctcaattatttattactatttttatgtcctttcctccattgacctgtaaactcacacgattgtaaattactcactgattacatacactaatacatgtttatatgtgtgtaagtgttcttcagcgctaatctattttgtcacttctgcaggacatggttcaatttccacgacgagttcctttttctgtttctgctgcctcc

SEQ ID NO: 65683 - DNA, 376 bp, Arabidopsis thaliana landsberg
  unsure (1)..(376): unsure at all n locations
gcccgcagcgacaccgacgtgcaaaacgaacgncagacattggttaaggggcgaaagaccaancgaaccagcgaggagcaggaacccaccgaagcaaccctcaagaaagcaggagcacggacgcgagacccaccgggaaaagccaaagaacagaggcacagggggcgcaacgcccccgacccaaacacaaacaagaaaaaggcaggacgngccggcnggctagacgagccgacacacggaaccgagagctccaagcgggccaaccaagggaagcagaacnggcgacgcgggaagaaccggaagccgggacacggagcccaacngcgcgcaaaccnagaacccacaaagggaggaggacgaacaagacagcaggacg

SEQ ID NO: 65684 - DNA, 324 bp, Arabidopsis thaliana landsberg
  unsure (1)..(324): unsure at all n locations
gcagaggacacccgggggggatgaaccggaaaancgagcaacccacgaacccgagagaccaccagaaggacacagacccgaggggccaacccgcaggaaccaacnaacccacaagccaagcgangaagcgaaagaggagaaaggggcacgcncggacatangcacanacaancaaccacacaganacgnnnacgnngngncacagancaacgnccaacaacnggagacaacgcggaggaaacgggggacacaggagccggcaccggagaccacgaacgccaaagagcnnaannngaggagagaaaanaacacaaacaaaaaaac

SEQ ID NO: 65685 - DNA, 702 bp, Arabidopsis thaliana landsberg
tatgtacgctcctctttgacctaagaatctgttgtacaagccaacaaacaataaaatccaaaaccatgtaatgtatgttagtactaattagtctacaagaaacaaaaccaagacgccctcgcaaccacaaaaacagaacatgtctactaagtaagacacacacgaacaaaacaagatagaagagcatatgttttaggactttgtctgtgaagcaactagcaaagcatcacataaactaaccaaatcttaaatcacaaaaaccaaagtttattatacaaatcttcaatcacaatactagagtcaaatcgtaaaattgaaatgaaaataaagcttagaaggaagaaaatcataatttaaagagttaaaacaacgaagatccatctaggcattttatcgaacaacttgaatgcaaaaataatctcctttacaaataactttaaatgcttcagtcataaatctatctatacataaatctagatccatctatgtcatcctaaatcttgtggtcctgagctaacaaaacaaaggtatagaaacaatagaattttgatttagcaaaactataagatgagacaattggaaagcctacttggtaatctctctgattgtaagtagaggtaagagacgagattgtacaaaattagaagatgagaaagttatgacggaggaggaagacgaagaagaaaacggagaatactgggg

SEQ ID NO: 65686 - DNA, 172 bp, Arabidopsis thaliana landsberg
gaggaagcggaccagaacacgacaaaccgcccgaccaagaggacgagcaggagcaacaggacaaaaagagaccacgcgaccacaaggacgagcagaggacaaaaccccaacacaaaaccacgggaccacgagggggggcgcccgaaacacaaccaccagacgaacaaaagac

SEQ ID NO: 65687 - DNA, 545 bp, Arabidopsis thaliana landsberg
tgaccgatatcgcaaggctgccttgttgatgagagttacattgaacacgatcttctgatggcatctcacatgaccggctcctgtaactttgaaaaagtttcgagcatgcatttaggtttctaattattattgaagctgtaatatagatgtcttataaaacaaaacaaaaaagaaaataactcacctgatcgaacaaatgatctctcaagaaccgtcccaagggtttatcaaaactaccatagtattttatccgaaagagatgagacctttcacacacagttcctttccacactgatcgggatgatagagaaaccaaaatgctctggtggtcagagggtgacggaggaaattcttctttttgggattgtgcttcctttggtttctcattgttttgttgttgggcgattggaagctctgaaccattgtcttggttttcgaccataatgctcgtaccaatttgagaactctttcgacaaagccttgccctgaaaatgtaaggaatagttcgttgtcctcatctgccacaacaattggattgcttttgt

SEQ ID NO: 65688 - DNA, 716 bp, Arabidopsis thaliana landsberg
ttctcgtccaagcatatcttatttttgaatccggattattgtagtatgtatggaccatagtgtcatataatagcataaaagattttctatatagaccattataaataaataaaaagttttagtttaccagcaatcaaggctccatgagttatttcactcacttttaaaaagatttatttttatatatttttgaatataaaattattgtcttctgttgtgattgggtattttctcatagaccaatgaaaaagaagtgtgatagacgcttaggggggcagcattcgattttcgattttattttagcgtttataatctgtttattctattatcactaatttggtaaaagacaacaagtgggacattcttgttgtctttgagaataaaaaagcaaatcaattcacaataatagagtggagtccaattgagtagctttctctttgatttgaccatacaaacaataaacatatatattggccccaaaacatcagaaaatatgtaaaaaaaaggtgtaaattggatatcgtaaaaataggatttagatttctgaatatgctgagtttctagtaaaactaaacgaatatagattatttttaaactatatatatttggtaatatttatatatatattgaaaagtagaaaaatgtaaactatactaaaaaatactaatatttatatttttcaatgacacaataaatactgtgaaaataaataaatt

SEQ ID NO: 65689 - DNA, 207 bp, Arabidopsis thaliana landsberg
  unsure (1)..(207): unsure at all n locations
acatgacatctactgatattgcactccgattttctaattcttaaccccagacccnaaaaccgaaaaccggaaaaccaaccacgaaaccctaacccccgaaccctaaaaccacaacccaggaccgagaacccgaaaccagaaacccgcaacccgaaacccacaaaccgagacccgaaaccaaagagcccaaaccggaaaaccaaaaac

SEQ ID NO: 65690 - DNA, 513 bp, Arabidopsis thaliana landsberg
ggtgaaagcttaagtgtcaactctggcgagcaatacaagtacacagggtcgctgaggagctagcaggcacacgccgcaccagtgttcgctgtccaccacggtggctggcgacatctggccgacgcaggcggtgctatggcaatgcaggtcgacacgcatgggcataccacaacggggtacactattgaatatacactcttccagtggcgattcacggcgtgcgagcgcaacggcacaagacgggtgactatttgagttcttccgcaagttggtattatgccgccacaactgggctctggctgccgtaatgaagcagttcatcgatttcatccccctcatcctgtttttcatcgtctacaagctggccccgcgcacggtcgaactagacggacactccttaagcctgtgcggaatatacagcgccaccgcggtgctgatcggcgcctaggtgctggtctacggcccgctgctaatcaagcaacgccggctggacaagggccagtggttgaccct

SEQ ID NO: 65691 - DNA, 624 bp, Arabidopsis thaliana landsberg
ggccctgtctatccacattttatacccatgaccaagccagttttttcttcaactgctgcaacctttgagctattggttggacttgttccatattctttatctttccacgcaactcactgatctccttttctattggtttaattgtgttctccaattcatcgactatagcagttgcttttgtcaagtgttcgtagatactttggagaagatcattgacttgctgaagaagggttgccttaaaaaagaactagatagcgaaaattttcagccataataacaacatggttgactttgatatatatatcagttcacgtgacataccttgaatttatctttgtcatttccagaatgtaagaactccctgcttttgtcttgactcattaccacacacggattttcaacatcaatctacacatgtaaaatataataagaatacagtactgagtatgccaagtatctgatatcacttaatactttctaaaattttgaatgaacggccaaaactcacattaaaatgttcaacaagttcccgtagctcgtcccttttgttacttacttttttttcctgcagaaaataagaaatcagaaaaacattctaaatcaatagttttatatatatgcaca

SEQ ID NO: 65692 - DNA, 581 bp, Arabidopsis thaliana landsberg
ccacaacttgattttttcttccaaaatttaagtagagataagatcatagtggtttcaaatttgtactattacgtaaacatttaaagtaacaatctctatgaatcatcagatgccttttaagcattggacagctataatttgatcccatactccgaccaacaaatttaaaaccattaaaggttttttttggtcttcattttacgaaaaaacaaaaagcttcacgccacgtttcgctataataacgaacctaaatactgacgtggatggttaaataggacacgtggttctgcacagatgggctttttaaattactaagaatcatgtgattgtccactataaaatgcagggcccataaccacatcacgtgaccttgtactctcgttgtctctcaacattcttctttcttctcttctttttttctttcttacaagaattaagaaaaaacttagtttaattaaatatctaaatttttacgtaaacattctaaataatttaaaattcgataataatgttagttcaaaggttaaagttttaattccaaattttaatttcaaactctaaaaattatctctataatgata

SEQ ID NO: 65693 - DNA, 597 bp, Arabidopsis thaliana landsberg
caccgaaaacaagtaatcgtttctccaccatggtggccgtatgaccacatctaggaggtggcaatgaccctgaaaccgatagctccagccattcaagggacactaatggataccaagagagtaagcattatcagcaaataaaaaccgtttattgcagaactaaaactagaatagagaaatgaagttttacttgtgtccataacataaacatctgacagccactttttaccgtcccagccgccacacctgccaacgatctaggtttagtaatgcaggcaggcaagcttaaacttaaacctaagaagatgattacgtctaaagtttgatacatacaacacaattttttggctcccaatagcagcagcggcacgaaaatcacgaggtgtaggtaagtcgccgaagctagtcaattcagaccactgccatatatctgcagcaaatgttagcatctgtcatgaatagagatatcatagaagtgccaaagcagagtattaataaatgaaggcaggtctacacgacattggtaaacttacatacgtacctgtatctagacccagaagtaccgaccctgaaatggtttatagaacaagctagtaa

SEQ ID NO: 65694 - DNA, 711 bp, Arabidopsis thaliana landsberg
aagtgcattgaatttatattaaatgtgtcttttaaatgtagagatatgtatatgtgcatcaagtaattactagagacaatgctttgcttcacctacctcttcttaatattttgctttctcactagagacatcaaattagaaactctttgttcattaattcaatggtcccatatgttacacctaatagtctacagtctagagtctatagactatagtgaagcatttcaagtttgtagtaaatgtttatggctaacgtagatattccggtaatgataatgaataaaatacttcaatatgcttatagaactcaatcaacaatgcaaaggagataaccctctaaaaacttcttttttaaaagagggaataatgaaaattatataggagctaagttgaaaaagatttgatcgataatttgattgcattgagcaagaacaatatctactagttcttattagcgcaagctatcactcagatttattatagcatgcgaaaaataaattaggtttacatttcaacccttaaatgcgaaacaagcatagggtgccacacttaggaatcaacaaactaaaacccaggtttgacataatccacataaaagtgtcattttacgccaatcattataggtttatagttcagaaaaaaaaaatttggattcaatattcatccaacggtaacaaaaaaatttgatataaatatatatagatgtttata

SEQ ID NO: 65695 - DNA, 709 bp, Arabidopsis thaliana landsberg
  unsure (1)..(709): unsure at all n locations
aaagcctgcactcctgtttcctggagctgattatagaattaacttgtgggttatagaggatgctgcaaaacacgaatggtccaagatgtcttatgatgtttcgtctacttcactaattcgcaatccttactttcatcattgtgtcttttgtactaatgatgcaggggagattgttttggcacccgactttgtgcgtacaaaaacatttgttgttctttattatcatccaaagaaaaatactatgagaagtgtcgtcatcaaaggaatcagagatcgaaagattccactttgggatgaggcttcataccataggataatctcggtcttctctggtcaggttgataatctcatgtttctctaagaaatgtttgttcttcatctttagatgtgtttcatcgtacttgcttgggaggttttttgactatcttttgtcctttggttggtgacagtttgtttatggacatagtctcggcatgtatttaatatgtagactttctgttttgaacttccttttatatatctaagtatctaacaaaaaaaatgatagaactagttntcttgaatgttgtgcttaatgctctcatggttagaatttataaaggatctataaaagctaaaaagtaaatcttcattcttttagatacctaaaatttaatttagcaaaaacttcttgattttggagtgagctaacaaagttacgaatttgtag

SEQ ID NO: 65696 - DNA, 995 bp, Arabidopsis thaliana landsberg
tgaagaggccagctccattaatgtagaacctccttttgtcaagtttgtaagataaaagaaggagagagagcaaaaataattagagctagtatgaagatattatttgttgtatgattcttcaggtacctctcggaaatcttacaaccaaatttgtaatggtttcaagtttgttttggccctactcatcacacatttccaaaaaccttagacgtaggacctcagattataccgtaagaataaggaacactaaaactatccaaatgcctactagatcttttacctaaacaaagatttgattaacactagcgaacaaatcttctgcaccaaatcaatttctgaaatcgagcttctcaggagcccgagaaccagattctttccaataaattcggaaatcttcaattacctccacgaaatgattccgtcaaaacaacgagcgatatccatttcatgtcgataaatccaccgaagaaaccaatcacagaatcacaaaaactggatcgaaacaacaataaacaaagttcggactaataacaacaacgccacagagaatcaatcaaaactagaaaacaagcggatcaatcgatggaaattgaggaggaaaatgaagaacgtacttgtcccagttaatctccgtctgaccaaaagatgcgatacgagaagtcggtggcgtgtccatgactctctcacggaagctgcgagacagagttcgagtcgaggcgaaaatgacctaatctccgtaagactcaggaagacatctggaattaatcagaatcagaagaagaagacgatcccggcgaaatgaaatttctaattgcagatttcttggaggcaaatttcaacaaacttttgggattcgtcgggagaagaaattaattttccacacatacacaaacacaggagaattttaaaacgcaaacgcgtttttaatcaaagtttcgcgtttggtcagcaacaaactttttgagtcctaaatttcagatctacacaatcaaagg

SEQ ID NO: 65697 - DNA, 567 bp, Arabidopsis thaliana landsberg
ccatgcgatgtggaattcggaccaaacggagagtgtcttatttcgtcctacatcaacaatcttcatcctggaagcgcaaaaatctttaccatataatcgagcagattatcacacgaaccattccgctttggaacgtctctctggccccgcggggggacctgccacgccgcatcccttaccgcagggtttcatacccatccgacgaagagcccgagcctgaatacgacagtagcgatgattttgacgagcgttacgaggaatggcgagataaccgtcgaccgaagcaaccggagccctgcccttttcaggccccccggtctaacatgcacaagcaagttgacctttgcgaacagtatcgtgacaaagggctgcaagtcattgtcaagctagcaaatattgagctcaccccagagaaacctgactacgagggtggagcgtggcatattgagggacagctggtggggcgatcctcgctacatcgatttaggcctacgctgaccataccctagaatgagacgatctgtgccactgccatttattattacgactctgaggacattactgaga

SEQ ID NO: 65698 - DNA, 592 bp, Arabidopsis thaliana landsberg
aataaaaaggatcaccaaactaaaaatttatcatcattgtaagctacagtttccctgtatttaaaatttagacgtgaagatataggcccgatgttttcagacgaaaaaataaagacaagataaaggcccaattaaaagcccaaaacgatgttctgcttatcattgcttagaaactaaaataaactgaatcctgatttgattaaagcagtcaaacaaactacatttaacagattacaagaactaaatatgtgcactgaatactgatgttagttgaaaatatattgaacattagttggagaactgttgtcgcttattgtgagactgattatctcatcaattccaggttagaactcatatctgtaacaatgtaatattaattctaacaatgtctacttctttatgcgaacaataagtttaagactgtactttcgttcagattattgccaacgaatcttaaaatcctttaaataaagtttgacgattaatgacaatactataaattaataacaacaattttcatgtgtttaattttctgacagtattgctccctatataaattgatatgaaagatgtcagcgagacttttaaaaaa

SEQ ID NO: 65699 - DNA, 483 bp, Arabidopsis thaliana landsberg
cccctacctccctctccaccttccccttcctctcccctcactccctccctccttctcccttcctcccttcctccttcgcccctccctccctccttctcccatccctccctccctcctgtctctctaagccttctcttccccttcggaagccccctgcctttcctctcatagctgtgtcacttataaacatctgcctttactaattggctttcacacgcctctgatcattttgaagagctataaaccatgatataagcattcccactgcctgtctgtctccaaccttcccgggtaccagaagggttagtaggctgcacagaaacactagagtctggtgtgcacctggatatgtaactgagatgcagttcgggttacaactgaaatccctaatagctttctttcccttctccctgttcatgtctacttcatgttacttggtcctcagagaaacagcagccaagagctgagtttcagcacccactc

SEQ ID NO: 65700 - DNA, 1354 bp, Arabidopsis thaliana landsberg
agagttttacgaattcaatttttgtcatttgaatccggggattgctttttttttgaacatattaagggttgctgtcattcccagagcataagtaatagcttttcttttgtaccgaacacatgattttttgtctttaaacaaattcttgaaacttcattatctcatgaaaataaagatttttgttaaacaacttatgctttaagatcgataacattgcagcatataatatagccaaaaaaatattcaaaaatccagaatttttactagtatatgatagaaaaagatttatgataatcatactcaatatcaatctcctaaatccacgaaacaaaatgtcatgaaaaaaaagtatcgagaaaataattttcatctaacacaatttaccaatttacaagaactataatatcccaactagatgaatatttagctcatcaaacgatcataaagcaacaaatgcctcaacgtcgttacttcgcctttctgatgatcctcgtcctctgtacacgtgtctctatctctttcgttcattccctcatcgccaaacgcgtacaccacatcccgcgattgcgtttgcgtttgctgctggatacacgtgttttgatctacgctgtccatcatcatcatatcgcgaacatcatcttccgtccatcctgcttccctcagcttccaaaacgcgtcgtccaaacacgccgttaacccctcaaaacctaacgcgctccaccaatcgcgcgtgtaatcacgcgccaccacaaatctccatccctccgccacatcgctccaaaactccactctccgtggtcgtctccttcgtcgtcgatcctccgtcggcgtttctgatcgaccgattcccttgagaaatccgactacgtcgcaactcaattccctaactccgtcgccgtcgatttggaaaactggatttcccgccaaatttggcgtcgtcgaagggacgtaaaaatcgccgtaaacagggacgagtaccggagcgatctcaatcaattttttcacgagtgacaaagcctccgcgtcatttccgggtcggatcccccaagaatcgacccagaatccatttctgacgacgtgttgagacagattaagaagagggagaagaagattattccggttcgacccggttcgccaattgggaaaattggtaccaaccggaagaccggtttggagaatcgaacggagatcaagagggaaagagaaaccatgagaggattcaacggctgagatctcttgattggtaagcccaggtgaaacgtggataccggtttgagatttgaaatggttaacaatggttttgtagtaaaccggagacgaagggttcacggaggaggaacgaattggatctgta

SEQ ID NO: 65701 - DNA, 584 bp, Arabidopsis thaliana landsberg
  unsure (1)..(584): unsure at all n locations
gatatttcccttgaaacaaagatatttgtaataagaacataagtactggacagacacacagagctgaactagacatgtaaattatttacaaatgttttaaataagtgaaaacgttgatttgaaaaatatattagaagattcatttaaacctacatctaggataagccttgagcaatatgtttcatatatatagtataaattgtcatactgatagaaaattgcatatgtgtgtgttaggctttgtaaattagtttcaagtatgaatcaatatctatgatgaagtaagcacattcgtacgaagacgtaaaatggatatatcacgttcgaaagcagcaaccaaagccaaaagtggtcacatggtttgttgttgtaaaatatatttttttggttataattattgtagaataattgagactagaacttaattagtattacgattccgctaattacgcagcccttatctttcgagactataactntaatattacgattcctctgatagtctaattatgcatgcatttttgtgtgtttgcgttttagtttatgttttatacgtaagggtaatatctattcaacttacaaat

SEQ ID NO: 65702 - DNA, 408 bp, Arabidopsis thaliana landsberg
cgacttctggagggaccattaacttggatctttttaattttcttctatcaggaggatacagatacggtcgcggagcccagctctaagtcgcgtgctgccccagtgaggatacacatcaaagcaaattttgccaatgccttcatcctggaatactcgagaaaacattttcaattgggatacgtaaactgtcgagtggctacgaaaggataccaggccagcaagagccatggcaaccattcgcaacatctaatctccgagtgtctctcgcattgatatcgctatccaggagctgcttgagcctgcggccagaggcgatgagaagatatatatgaatcccggaatgcggcctttatagcactttcttcgttctggcccggctgcaaaattggtgagcccgaacccaactta

SEQ ID NO: 65703 - DNA, 287 bp, Arabidopsis thaliana landsberg
  unsure (1)..(287): unsure at all n locations
aaggaaccacgagagaacagacggcccacccacggcaagccgaggagaaaaagcaggangagaagcgaaccccccgagcgaggagagcagaccaacaccaccacgccacggacggagagaagacaccacccaccccaccacagggacagcccgccgaccacaggagcacaacgaaggaggcacccgcaaagggcacccagaagccgcccgaccacagnacaaagaggacaccaacaaaaccaccgcgggncaacagaaaaccaaaaaaccgccccaaagggaaaaag

SEQ ID NO: 65704 - DNA, 772 bp, Arabidopsis thaliana landsberg
aaagtttattactttcctcaagggcacatcgagctcgtgagtctatatatatttcttctgttttgcttctcgatttggtttttgaaacattttgatggcacttttcagattgagaattctacaagagatgaattggatcatatcaggccaatttttgatcttccatctaagcttcgatgtcgtgttgtggctattgatcgtaaggtatgtctttaaatgttcaagagttaacacataagttacaatttattattttgcatgctttatttcactgtagaaagatctaattttgttgcttgctttatgtttattataggtagacaaaaatacagatgaagtctatgctcagatttcgttaatgcctgatacaacagtgagtgaccccaacaatgctaacttcaaaattaattctaatttttctcaattgtttcaaattttcttcaattttcacttaactaattttttaaaattgtaaatctttaggaagttatgacccataatactactatggatactcgaagaccaatagtttatttttttagtaaaattttaacggtgtctgacgtcagttttagtggtgaattaattattcccaaacaatatgccattgagtgttttcctccgctggtaattctgcttagtttatctattgaataaactcgaatttgagtttcagtattacattttctattcgatttgtttctctaagatatgtcccaaccaatatccacacaaaaatcttgttgcaaaggatcttcatggtcaaagaatg

SEQ ID NO: 65705 - DNA, 716 bp, Arabidopsis thaliana landsberg
  unsure (1)..(716): unsure at all n locations
gagctcatcggcgtcgggatcgtcctggcgctgctcgcggccggcggcggtgcgctctacctcaagggctangtttacggctctgcgagctcgacggcgcactggcaggccgtcatggcacagcaggcggccgccaaccaggccgcgctcgatgcggcgcagcggacgatcgtccagcaggcgcaggacctcgacaagacctcggccgagctcgatcgcgcgcttgccgacattgatgcgagctcgggcggtgccgacgcggccgaactcgggctcgacgccgcccggatgcaggcgctcggcaaggtcagataggagcacatgatgcgatttattctcgccgcggcggcgctgctcgcgctcaccggctgtgcgacgacgcagccgtcttcgaccgtgccgatcgacctgccggcgttgccgtccggaattgccgcgccctgcgccggacccgtgaccctgccgaccaccaataccggccgacaggatgtcgagcgctattgggcgaccgaccggaccaacctcgccaaatgcgacgccagccaccaggccgcggtggcgagctatgaggcggtgcgcaccgagctcgcgggggcggcgagcaagtgacccgcgcagaggccgatgcggctgtccttgagatgattcgacagctgcgggcggacatcgcccgtggcgaggccgcgcggcaggcccagagcgaagttccgcggcaa

SEQ ID NO: 65706 - DNA, 728 bp, Arabidopsis thaliana landsberg
cgatgccagcaccgcgcaatgcgcccaggcaatagtcgccccagctgtcggcgccgagccgaccgtggaatgccaccgggctgccaagtcgcgccagtcccatcgcgcaaatcatcgaggagctgcccggcgtcatcacgaaatcgtcggccagtacttcgcggccagcctcgggcaccgagcgacagcccttgaacaccagatcgacattgatctcgccagccacaagaacgcgcttcatggcagctccagccgtcatgcgtcgtcgccgtggatggtgaattcgcccaccacgcgggtgagcacgccttgcgacggcgcgtccggcgtaccgcccagatgcaggcagcggaagaacgccagccattgcccggccaccacctgcgccagcagcgcggggatctcgccatcaccggccaacggcaaatcaatggcaatgtcgttcggaccgatcaggtcgaggggaatgccctggcccaccagcaacgtggccatgcccaggcgcttgcgcgacagctcgcgcaacaagtcgtgctcatagccgcgcacggcgggatcattcgacaacagcgccactaccagagtggcttcgtgcacactggacatcggcccgtgtcgcagaccgaggaacgtctcggccatggtgacgaccttgccaccggtcatctccagcatcttcagcgcgccttcgtgggccgcaccaatggcgccaccgctgcccagataga

SEQ ID NO: 65707 - DNA, 498 bp, Arabidopsis thaliana landsberg
  unsure (1)..(498): unsure at all n locations
ggcggcctcaccgtcatctcaaacactgctcgggcttcataatatggttagataatgcacaaagcctcgaaagagggtatcttactaataatatcattgccctcaatcaaatgctttaaatattcgagagcgaaattctcatcttcgggaaagagcttggcaccccgctcgaatatcttggtggcagccggatccttgtagcagtggtattctataagagcgcttgcaatatagacatcgctagtcatgcggcccctcttgcgagcatctgcaaacacctgccgtgacccagggacctccccaggcttgcccttgcccnnnnnnnnnnnnnnnnnnnnnnnnnnnnnaatccacgcgaatgacactgtcttggataggataccaatctgtatagaatgtgcatgccgaaccgcttcaatctgggcgttcttaacagattcttttgctttcgtctcgctctgatcatcggtagcatcgccattcgccgctggctgagta

SEQ ID NO: 65708 - DNA, 522 bp, Arabidopsis thaliana landsberg
ccactgaattcatacctgcttctttaggtaacaagctagtttagcacaaaccgttgtctttccaactccttgtagcccagccaacaatattactgtaggacctgatttagcaaactgtaactcagatacttctccacccatcaatttcactagctcatcatgtacaatctgcaataaagccatgataagccacacttgagtactattgataccaaaatgatcatcatagagtgaatcaaatatcaaaaccattatgctaatgaaacaaaaacaagaaccggttttattgctaattaccttgaccaattgctgatctggtttgactccacgaatgacacccattccaacggcttggtcactaacagactgaacaaaccttctaacaactgggagactcacctgttaacaaaattacttttataccacattcttcacaagaacctaaatgaaacagaataaaacaccactcacatctgcttccaggagagctcttctgatatcccgcattggctcagcaatatt

SEQ ID NO: 65709 - DNA, 406 bp, Arabidopsis thaliana landsberg
gtagctccgggtttgtctataaagctgttttatctgatgggatacatgttgcggtcaaaagagctaatgctgcaacgatcattcactctaataaccgaggtttcgagtccgagctagagattctttgcaaaatcagacacaacaatattgtgaatttgttaggatactgctcagagatgggggaaaggcttttggtttatgagtacatgccgcacggtacgcttcatgatcatctccatggagatctttcacaactggactggagcatgagactgaagatcatgttgcaggctgcaagaggacttgattacttacacaacgaagtagatcctccgataattcacagagatgtgaaaacgtccaacatcttgtcgacggtgaaatgtgcgcatgaattgcggatttc

SEQ ID NO: 65710 - DNA, 405 bp, Arabidopsis thaliana landsberg
ctgtacatgcggcttgcaaccgcccatgccagtaaatcctgtgtgactcctacggcaccacaagcatgggattggagaatatgcagcctcctccctccttcgacgctcgttactcctcaggataccttatcgggcagactctggaccgctaatcaggggcgtcctaaaagaaggtaatgccgagcctcgtcctgcagagaaaactggtagagatgaagaacgtactaagtatatcaaacgtgatgaactcctttcaaagctgacgcctcttcgtaagatgatgtagacagaaacagagaagagcgggctcctcaaatgaatacccaagttgttggccaaacccacgtcaattccagattcttgatgcggccttgcagggatataattgtctgtggatgggatata

SEQ ID NO: 65711 - DNA, 555 bp, Arabidopsis thaliana landsberg
  unsure (1)..(555): unsure at all n locations
tccggcatataccgctggatcctgccaggaataagggccgccgctatatacccccgatggcttattatccggccaggaagctttccacccggcaggcaatttggcaaaacccgaagagctcggcgtaaaaggccgcgttccatccaacgcgatcacactgtcgcgcatggcatcatagaggtcttttcgggcatgcgcttcattgccgccggtccataacaacaaactcggatgattccggatacggtaaatggtgcttgtcatattgcgcacaaacaagttcgtgctcagcggccnnnnnnnnnnnnnnnnnnnnnnnnnnntcgtatcgccggtaatccagaaatcctgccataccagcataccatagcgatcggccagctcaaaaaaaacatccggcggcgccaccccaccgncnnnnnnnnnnnnnnnnnnnnnnnnnnnnttcctgcnaaggcggatctcgtaatcatagcgggtagaatcacggttcagcatcatatcgggtacccaggctccgccgtccaggtgaatgcggcggccgttgacataaaa

SEQ ID NO: 65712 - DNA, 1668 bp, Arabidopsis thaliana landsberg
ataacatttttgggtcatgagaaaaaggttcagcatagttctttctttctgacgatattactgttgcatcttgagacatatataaagctcccaagttttttccgccaccgttctcacgagcgaaaggtaaccaagaaggacaagccccagttgccaccaaagaatcccgctgacgactcttctgtttcagaaaactagcaccagagtagaaggcagcatcctgagcatttttattccggtcaagctcttggactcctctttgagtggataaaacagtattcctataactgaaatcattttggagagtcaaacttatgtttgtagcattagccacatctagataagcgtaagagtcacttgatgaacgccgatgaccacattttcgagcagggctttccggctgctcattgagaagatcatcaagccaaaagggaagctcttctaccaaatggctctcggaggaagttcgctggtgatgtgttttctcattactaagcttctgaccatgtcttgaaccaatcaaaccagtaggaatatactcggaatacgatgctgatacactaggaaacggtatttttggtgggagcaaagcatgctttcccgggtacatcaagtttctaacactctgtgatcccttggagctagccattgtcacccttgcctgacaaaacaacagtaaaagatagatctgactatttaaaccattgcatcaaaacccacaaaatcaaatctttttaagcttggcctaactcctaagaactcagtagcagatttagaacaaaacaagcaatccaaaacctaattaagctaataaagtaaggaaaaagttggtaacaaaacatcaaacacagatcaatgcaacaaatctatagagcctaaaatgttttataaagctgacactgaagcagaacactatagctgaccaattcagacaaccagaccagaacaggtcatccaaattcagttgctttcttattaatattaacataaacacataaaagcgattacaagaaataaccattttttcatttcagctaatcaaagtttttcttactcatccaagttaatcaataagcttttttcatcttcccacattttccagcaaccaaacagtgaacacatcaagtagtaaaattgtaatatcaagaatctataaaaggcaagtaaaatcagaaagtttccttttttagaaactatgagaatcagatagacagatacagattcgccttcctgattacaagttttgataattgattctactttccaacttaaagaagaagaacaaactaaccagttggagacagatccaaatcggagaaatttcagaaaacagaagctgaaaatgagaactccggcttgtttcttccaccggagatcttctctgtcttatcgttgaaggagaagaagaatctctattgactaagagaagggtgatagagagaaatttgggggaatttaagtccttaaaagtaaaataaaagccttctcttttgtcttaagaccttttgtttttcttacttttagtatttaaaaatagtctcaaatactttacaatattttataatttgaccccgatgtttaatttccgcggatttttgatacaaagttcaaatactactaatttgaattgggacaaagtagaaaagttctatttctttttcttttagt

SEQ ID NO: 65713 - DNA, 392 bp, Arabidopsis thaliana landsberg
catgcaagtgggtctcgcctccggcgaaatttggtctccaacgagacgcacaacgcgcctcggttgtgcgctctcaagggcggacagaaccccccccgcgtcgtcacgcgatttgatctggcgacttttccacaggatgaattctggggcggcgcaatccagtacccggcgtccgcgaacgaagcacagctggacgcgttctggaagttcaagaactcgacagtcgatccgtacgcggaagtcgagcagagctttttgtataacgcgtctgcgccgtctgccaatccggaagaaaagtattatagctcgaacaacctgttctatacccggcccgttgcgagtgtggaagatactgtcctgcgcgtgtttacattcagcaacatccatgagcc

SEQ ID NO: 65714 - DNA, 662 bp, Arabidopsis thaliana landsberg
gaatccgccccgggtcgatttcagcccctggttgaccagcggcgggttgtcccaggaggtttcctggtacaccttttccagcaacgtgcgcatgggcgaattctgcggatcgcccagcgtgttcatgtcggcgaccgcggccgggaagtcgccgaacgtggccacggaaacgccccgcaggaatttctgccactgtgcgatgtagtccttgtcgtacagtgattccagctgcttctggatctgttcggggctgcccgacagcgtgaggtcggtctgctgggtggtctgcagcacccagtcggtggcgttcaactggttgttggcggcgtcgcggatggcgcccttgacgtagccttcccaggcctcgcgggtgaagcttccggggatcgcgtagctacccagcaggagcttgtcgccctggtcgcccaggatcgaggcgacgctgagcgatggatagcgggtggcggcgcgggtcttgatctcgacgtacacgcggttgatggccggcatgccgcgcatgacatggcgcaacgcctggcgggtgtcgtcgaccagcgcaaccttgttatcgacggtgggccagcctggctggtcgtattgcgcgacgtagaagctcatcagccggtcggcgctgccgatcagctggtcgcgggtcagcatgc

SEQ ID NO: 65715 - DNA, 1357 bp, Arabidopsis thaliana landsberg
aggatatcatgaaacataagacaagcttacatgacattctggatccccatctacacaattcacgatgaaagagtaccggcagattaccaaacacagttttcccttaaatattagtaactgtgtgtgaggaccaaaacatatttttatacttgccccgttctaatcacaggaacctcgtccttactagattggatgctcttcagtcaaaagtcaaatctaagtatttcatctattttcagattataaagattttctagaccacatcgaaagtaatagaaaaaaaacatatagagctagatttttaggattcatagataatttgccggtattctttccaagctccaaagtccaaactgattgaacgataccaaattaaactacgcatatagatgcacttaaaaacaactcacctattgataagaacaataatcgtcgagctatttagagattttgctgcagggtgcctaagctgatcaagcagtaaacccaatttctggctggcctcaattgacaaatctccaattttcaaaacaggatgacccccacggagaatagatatattaaaatctgcttcaattccttcaggacaggtaactagattgtataagaaactagtatctaataagatactaataaaacaacaacttctagtttcacggaattgagcggatagatccataaagatttaccttcatgaggagtatacaagagaataagcgcttccacaaatttcatagcgcataattttacaccactatttccttgctaatatacaggtcacaagaaaaaatacaatcagataagaaagacgacccatggggggattagagaaagtattaattcccaccttgaaagccactgagcatatttcatccttgaacttaatcaaccatgtccacgaagattcaagaagatcattcaactcactagaatgcaaaccctggaagccaaatagcaataagcgcgtcaaataagaagggatttacatacgaaatgcaggaagaacaggtcacaaatacagaacctaaaaacaaaaacaagaaaacaacctgaactgccactctttcgagggtggaacggaataaatcagctccacaagcaatgacctgcctggccacagctggtgtctcatcttcaagagacttaattaaaaggggcactatttcaggtattaattccacatatttcaggccaatttcaccaagtatcctgcatttgaaatatcatcagaggttcagcgagttatgtagattccctagtcgcaaataattctttcagcagctgataagagtaagacagacactgaaccatcacttatgatcactgcctgaagtgagatgagatgttgtccatgatt

SEQ ID NO: 65716 - DNA, 1159 bp, Arabidopsis thaliana landsberg
gatctttccgcttttttggtacctgctattttaaattaaagttcacaaattttcaccatttatatgtccatcatcatcatcaccacaatcaaattgagctaaattggtttttgattgttgtttttctccagctccagattacaaaaagaaacagctcgtttttttcactttcaaaaaaatggaagctttgaggatttatctatggagtctctgtctctctctgtgtttgattatctatggagcaaactcagatccattagaagacaaacgcgcattgcttgagtttcttaccattatgcaaccaactcgttcactcaactggaacgagacttctcaagtctgcaacatctggaccggagttacttgtaatcaagacggatctcgaatcatagccgttagattaccaggcgttggactcaatggtcagattcctccaaacactataagcagactctcagctctcagagttcttagtctcagatccaatctaatctccggcgagtttcctaaggattttgttgagttgaaagatttggcctttctttatcttcaggataacaacttgtctggtcctttgccattggatttctctgtttggaagaatctcactagtgttaatctctcaaacaacgggttcaacgggacaatcccgagttcgttgtctcgtcttaagcggattcagtcgttaaatcttgctaacaatacgctttctggtgatattcctgatctgagtgtgctctctagtctgcagcacattgacttgtccaacaattatgatcttgctggaccgataccagattggcttcgaaggttcccgttctcgtcttatacaggcattgatattattcctcctggtggtaactacaccctcgttacgccgccaccacctagcgagcagactcatcagaaaccgtcgaaagctcgcttcttgggactatccgagacggtgttcttgttgattgttattgctgtttccattgtggtgattacggctttggcgtttgtgttgactgtttgttacgtaagaaggaagttaagacgcggtgatggggtcatttcggataataagttgcagaagaaaggtgggatgtctcctgagaaatttgtttctcgaaaaaaagatgtgtacaaccggttatcgttctctgaagaatgtaac

SEQ ID NO: 65717 - DNA, 479 bp, Arabidopsis thaliana landsberg
agacgccattatctttactgcatctactttgcttcctttagttgctacatccttaaggtaccgtgggggtttgccctgggattgcgattctatcttgaagttgatacgcctgggggtagaatagtggcacaaggacatcctgtcagaagcagagaacgagccccaattatccctgcatcgatagacgagcaagatctagtgtctcacgcgtcgttttattggtgtcactactcttccggggttgcgatatcgactacccaccggataggaacccgtgatttcgctcaaggtccgcaatattgcattatattatccccgactcatccaccaaagcagagtctgtactaccgaagcaatgtctttccctccgcgcgggaaaggtcgtggatctagaaatacgggtaccgaggaggaatacgtgctcttcctccagggggtgagttctctcacctcaatatcaccgcaaccatggctcactg

SEQ ID NO: 65718 - DNA, 506 bp, Arabidopsis thaliana landsberg
cggtccctcgacagtgtgatgcttcgccctttaaaataatatcgtcctctacgcagttagcgggaacgagcaatctccttcaaagatcaaagtgcctgatgaaagcaacatacatcccctatttcgctctggtagtcgctcccctcctccgacagccacgccaagtacaatggtagtcgccgcgccggatgcgggtcaaacgattaccgtgagcactctgcagagaatgaggtcgacacgctcatttgggacctactcttcgcgaaggaagtctttgttggaacaaacggattacctttttgaggatgtggagcacaaggcaaggtctatcttgggctattacccacagcaagcgcactcgatgcagtgacgccgccatgtatacacaatacatatgttggtagatattcttgttatttagcgaacaataccattacccatgatttattcaaaagatccaaaagcttgcatcaatcagggaagggtatatttgcgcgagcagttct

SEQ ID NO: 65719 - DNA, 321 bp, Arabidopsis thaliana landsberg
tagatgattgctatgccatactttttacatattggcttcaagctggttaggatggatggaatgttgttgcgctaaaccaccgatgacttggacggagagaaaaaacattgagagaaaagggttgatgtgaaagaaaaggtaagttactaaacaattatgcgggaagaagagagggatatgtgtcatgatgtatacagaccatcctattgataggcttaagtttgggaaaagatattctcatttactgaggttgtttctaagtgggacccatgtgtcatagtgcacatttataattgtttaattgaatgttttttaaaaata

SEQ ID NO: 65720 - DNA, 465 bp, Arabidopsis thaliana landsberg
ttcctataggctgcgttaccaaggagtccatttctttaccgcgcgcatccctctttgaagtggcagtgtccatggacgcccatggtgggatggcctgtctccgcagtggtgtcgtctaactagcgatcattaagcacatcgaggatcacagcgtttgccgagagacatattgatactgctcaattctaacccgagctctaaagctcttcttgctcaatggggcaattgtttaatatagccgcacacgcgatatggtaatacttgttgttgcttgcctaccagcctcaaagatcctacaatgagcggcaacaccagtttgatatagatttgctcactggttattagcaggcaataaatatgctatgcaaatatcgctaacagaaagcaatggactgcctgtatcagagtatcgcgcggtgcgtacgacagcgtcaatactatataccttacgaaaaggaaacgtac

SEQ ID NO: 65721 - DNA, 348 bp, Arabidopsis thaliana landsberg
catactcgctcgattattcttctcgaggaaccgagtcaggagctgctttttcagcctttacttcacgttttgagaatataactgagtttcttgatggtgattctaataactcggaggcgggtttcggatctacatttcaaaggagagcattagatgcaaagaaatcccatctcttggatgttcctcaaatggtatgtaatatatccattcactttttttgcataagtcaaaaaaacggatggatactatatagatgaaattgtatgaggggatataactcttcaggaggatgatcaaaactaacatcgcgtagatgatattcatacagttatataaccgttccatgct

SEQ ID NO: 65722 - DNA, 172 bp, Arabidopsis thaliana landsberg
aatattatttgctttaataacaatttttttattttcttatttcaaatatttgttttaaaaatatatgtgtttggaggggagttcgcgtcatcaagtttagaagggctgataaccaataccaaagaggcgtccgttgcgtaatcacattctatgccactcatgaatggtcgct

SEQ ID NO: 65723 - DNA, 466 bp, Arabidopsis thaliana landsberg
tgaggggcagttctgcgtgcaagatcgtgatgtgccatcggccacggccagccaccatgcggacatggcttcgcatggcggcagcgcgggtgccatcgacccgagcaccatcgacccatggcgcctggttcgcaccgatcacgacccggcccgcgccgcgcatcacgaaagcctgtttgccctggccaacggcacgctgggcgtgcgtggcggcctggaagaagtgcccagccccagccagggcagcttcctcaccggtgtgtgggaacgcacgccaatcgaatatcacgaacgctttcccggcttcgcccgccacaccgacacccgcttgccggtggtcgatggcacccgcatcggcctgcgcctgggcgaccagccggtcgatctggccgcggggaaatggcaggacttcaaacagtcgctggacctgcgcactggctgtctgcgccaccacctgcgctggcgc

SEQ ID NO: 65724 - DNA, 189 bp, Arabidopsis thaliana landsberg
  unsure (1)..(189): unsure at all n locations
ctantctgaacttctcgcgctcctaaccctagccttcccatttttctcatcttctagatccgcttttgtgatttggtaaatctcttctctccctcacttctaatttcgttacagggcaatgttttttacttttgatcagccaatttcaaaatcctcgtttgtttttcagaaatttctagggtttttttt

SEQ ID NO: 65725 - DNA, 337 bp, Arabidopsis thaliana landsberg
ggggggaaagaaaaaagggaactcggacgcatagatggataggtcatgataaaggtctgcccgaacgcaagcttttttatgaagaggaagcagataccgcctctgtaaaggcaatacctggtacatgcagaccaccagaagaaggagcacaaacaccaaaggagcaggcattacctacatggagtacctgccatagaattgggcatagaagaaatgctcgtgcaaatcaataataattaatataaaggcatcggggttgataaaagggtcagagcaacggaaatatgtatggaggagctcagctcgcttacatgcgcagggcgcctaccaaccacgt

SEQ ID NO: 65726 - DNA, 549 bp, Arabidopsis thaliana landsberg
ttgatacatgagacaaggaagatacgatttttccacaagtacttgttatggtgaaaacaatcagaataacaagaatgtgcctacgtttatgacaatcaatgtgaagatgcattcattcacataccaataactacatggttggaatttccatcaaaaattagtcaagaaatgaaaaaaaaaaacacagaaagaatagatcttgcgagttattacagtaatccaagaaccataaaaattacttcatcaaatgccaacccctacggattcatttgtcaactctctagtatttggcaatccaagcttaaagcctcaggttaggctatccccaaaaaccaaagtacggttccaaatgcttatttgactatttgagggaaagatactgtaacttaaactgttgtttccaaagagtaggcaatctaaattctataacaatccagcagtgtactaggctaccataacataagtaacactctaagctacaagcttcaccaacaaagaattatcatcacaaaactgccaaagcttttaacttcacgatagcttgaaaaa

SEQ ID NO: 65727 - DNA, 506 bp, Arabidopsis thaliana landsberg
atatataaggaaacaagcgtgcgctggtgtaatttatagcgcgcctcgccagattagcctgggggtgggtggtgtctcagtccaagcacctgcttcttttacaagtgataactaccttggtggcttagtttataaggggtgtattcgtaactactgccttcactgcagttagagcttttaatatcgagctattcgccatgcttgggtcgagctctctcggcgtacttgctgttcttcataatatatattcccacccactttgaacaatgaaaaagtgccaggctaaatacacctctctcacgttggtgagaggttattgaagacgactactgttcttataagctaggttactgcactaacggcgttcatcatgtatgccccgttaagctccacctctcttctcccctcatcgtgctatgccgactatctccgcttgcctcattgagaaatacgctcgtcccatcacctcttgtttaccatggcgtcattgaaacgtcaaatgtgat

SEQ ID NO: 65728 - DNA, 462 bp, Arabidopsis thaliana landsberg
  unsure (1)..(462): unsure at all n locations
tgccgactttgattggagtatagacgagaagctttcgtagtctcaagatcaacttgagaaccagagccgggaagcgcaagatcggggagcggcatccatgatgttctccggccaaagaattcagggttccgcggccgagtactaccaagcatgtgcgcatgaactgttcagtggaactccgtacttcgaatgcgttaaccacatctgttctatcacgccaaaggataaaataccggtggctgttgatggtactccgctgcacgatcaggatacacaaggagcaagaggtttgttgatagatgtggatgatatgcctcgctcgaaccacctcgagtctccgggatctggaatcacatctataaatccaagtccatcgnatggtgccggcacgttgtctgtgcagttgagaggttcactgaaaagctcaagagaacctgctggcgaacggacttctggactccg

SEQ ID NO: 65729 - DNA, 581 bp, Arabidopsis thaliana landsberg
  unsure (1)..(581): unsure at all n locations
gatactcagtccatggtaaaacaatagaagaagctattaaagacctgcagtttaaaatagcctcagttatggttaaaaaagacccaatacacccggacagcgagttcgatgtagcaaaataccgtatgctcactggtgccnnnnnnnnnnnnnnnnnnnnnnnnnnnnnnnnnnnnnnnnnnnnnnnnnntgaagaagcagaccaggtgatttatatcgatgcagctggtcaaccaggaacaatcaaagccaaagagctgctaccaatgctagagaaatcgaatgcatacgggtaccaaaaattcaaacaacttattacttggtaatcgaaaactaatttaaataaattaatttatgtccaaaataaagcttaataaaacagatgtatatggtatacttagaaaaaagtatcccgcttctgaatgtgtattattagannnnnnnnnnnnnnnnnnnnnnnnnnnaaatcgttccatggattatatgattataaatctgtggccatctcgtggtctttaataataggcatagaaaaaaatcatatagaggggattgcttaatgaattgaaaaacccaaaaag

SEQ ID NO: 65730 - DNA, 369 bp, Arabidopsis thaliana landsberg
taatgacccagtcttcaacacaccaagccatagcaagtgttgtatatcagctgtatatcatcaacattaaaaagagtgtattgggctcttgagtcacccccacatagcctaggcttgtcctgtgagtaggacatggtccaggcttcccaccctgttctgtactactacttccttggctttcccatcaagatgcctgaggaagtgcaccatggagaggaagaggtggagacctttgcctctcaggcagaaattgtccagctcatgtccctcatcatcaatactctctattcaaacaaggaattttccttcaggaattgatctctaatacttctgataccctggacaaaattcagtatgagagcctgacag

SEQ ID NO: 65731 - DNA, 464 bp, Arabidopsis thaliana landsberg
aatttaaatgtatttgtaaatgtatataacctaagatgggcagttactgtctccagtttatgttagggattattttatattctcacgtccaagtcttttaattagtaatcataattagaactactatctatctttacaacatcttaaagatcaaactttacactttttattgctaaagcgtataaagttgatgaataatcgtaaccttatataccaaaagttactaaaattaggcaatgttttacaaaaatatatccacagattttttgatagcagttgcatcaaatagtacataacgttgatcataaaaatgagtcaatagattctttaaatttatttgtaaatgcatatcacctaataggacagttactgtcccacgatatattctatataaacatgctatataactagctagagtaaaaaaaaaagtaactacagctgcctaacactctattaccaaaaac

SEQ ID NO: 65732 - DNA, 137 bp, Arabidopsis thaliana landsberg
tatcgacattccgtgtaggaggagtaggagccctttctaatgatctgcatttggggccagcgccggggccaccgcgaaaccaaggatctctgccccagccttggacgatacgaacgcatctgggacgagaggtgcac

SEQ ID NO: 65733 - DNA, 1626 bp, Arabidopsis thaliana landsberg
atggctcaataacaggaaacgctcatcagttaagatatcacaagtccccagaaagaataagaaaagaatgatgtctgtaacccctatatcgtgtttctaaactctcgtcattaaaaggtttctttccaaaattgattaggttaaaagtctttagtgcagtctttttgctaagtactggttaagtttagagagttccacaaagatctggtaaagcacagacaatatagatacatcttttcctagtaaaagaaattatagttttaacaataaaccttcctatggtcgtaaggaaatgaatctctagcatctcatagtatatttctctattatgcgtctttctagagataaggtaagtttttagtacacgaaagcgaaaacgtaccccatccaagcaacttttgctcgacctttttaagcttctttttcttcttgttgtcggtttgcttagttataaatctctcccctgagtaaaaaaaaagtaaagccaataaaaaccataagtaaaatattgccgaaactaaagccacagatgggatgttttacataaccgataagttgttatacaacaaatgtgcaatagtattaacctttctgctcgaacttagctcgagaaactgacatgaggagcttatcagcaggacgtagcggagccccgtctaagattttaattgctagatccactgagggctcctagtgaaaacaaaaacaaatacacatgaagatgaaaaatagacaaagtttaaaatcataaccttatgcatcccatgaggacagaacttcaaatatagccattaccttcatataggagataagagcatcgccttttaattttcctgtcgccttgtcactgtatagctttatgcgaggcttgccagtgtcatcctgaattgtttaccagatccacattgttaggggatacttacacaggattccaaaataaaacacaggaagaatcttcagatagtgagatttacctccttaattataccgcatttagaaaaaacttcagctacctgtaatgatatccctactatcagtccatttaaaagcttcagatattcataatggtagaagaagtatgaccacaacttacttcctcgatggtgacatcatcgggcaacccattaacataaatatgtgggtttacttttaactcaaaccacgaatctggaggcttgtttggttcctgaaaatgaatttgaaacttagaaacgtttgcagaaaatttcatgaggaattgcaactttagtttctttgattcatacaacacaaacaaccattactagttaatacaaaattaaagtaaaggtattctgctagtcccaatataagtatgatgtcttagaacaatttggtttttctttcccctttacgatgtgcacatcagtcaaaaaagtaatttacccactacaattcagcagctgaagaaaaatcaagactccacaatcaagaaatccagtacttacagctcgaggttgagctaagtgacaccaaacatgacgtaattaatttacgaaaccgaaaggaagacaaaagaagaagaaacaaaaaccttcttttcagtttctggctctggtagctttctcttgccgttactgtttatttcagcggtttcatcagagccat

SEQ ID NO: 65734 - DNA, 423 bp, Arabidopsis thaliana landsberg
cgaagatacgcttgcgaatgtgcctcgagatttcttccgcagccgtcttcgttattcgcatgggccggagcatgttgcaatgctgccttgccaatcaacttcgcctcgccgagttagtgtcaaaccagtggtaccaagcgcctcgcatcaacctatgcccattgcccaagtcgtgaatacgtccaaccactctgatcagcccagcaagacagatcagccaagccgtccatcgtctatagtcatggcgcggcggaagagcatgactgggctcactgccggtcctccaagcgcgcctcctccaaacattcccctaccgaaaattccttcggcattcgttgatcgctctccgcaagttgcgttgtcagaaaagtctccaccatcgtcacctgtgaaagacgttcaacaggcactgggcgacgtcgc

SEQ ID NO: 65735 - DNA, 1380 bp, Arabidopsis thaliana landsberg
cccaaataagtttcataccataccttatgtttggtttggctactaaacttagcctgcttcttccagtttccacagccctgtaaagtaatttgaggtccaattctacaacatacttgtacataagacattcaaagtctgcatcttgtaagaaagaaagacgtgtaaaatgcagattcttggccatgtataattcgtggttcgttttaaagcaaaagtcaaacattttgttgactattttaacttcttcgttacttgctaagttcagttatccatccactttattcttcttcttggaaatggctctcatgaaagtaatgacgattctggttctctttgtctcggtatcatcgaccttggcgcaatccaacaatggcggtcacatttcgataatcgtctcggaaacaggtcttgaatttgctaaagattacctcatcaagaaagtgatcactacgacgcttccacttcagctaccagacattgagaataaggttaagatccctctaatcgggaaagttcgaatgggtctatcgaatattcagattgatgcagttcatgtccagtcttcgaagatggagactcgaaaagatggaatcattttgagtgttttaggtgctacagcaaatttgagtatggactggtcttatacttacagagcttccttctttgagatttctgatcatggagatgcttctgttgaggtaaaactctgaaattatcgaaaaccaaattgggtctttttagttttgttgtttgtgttcagaacattgtttcatcatcagaagaaaaagcttaacaggtgaatgattatgacgatgaaggttaaaggaatgaatgtgagaatcactgccactttggttaatgataatggaagtctaaagattgcctcacgggaaaatgattgtacagtaaagaacattgatattcatatcaatggtggtgcttcttggctatatcaagggtattattaaatgttccataagttttcgtatctctaaaatctcttattccaagattataatatttgttttcctttttgcagggtggttgatgcatttcaaaaaatgattatatctactgttgaaaaaactgtctctactaaaattgtagaaaaaatgaagaagcttgattctttcttgcaatcacttccaaaacagagaaagattgatgactctgctgcagtgaatctcacttttacaggcaaccctgtcttagggaattcgtcggttgaagttgacatcaatggtttattcatgccaaagggtgatgatattaaagttgcagggtctcgttcttcttcctcctttggtggggttaataagagaatggtgacaatatcagaaaaagaaggagttttcaactctgcaacacttgtctacttca

SEQ ID NO: 65736 - DNA, 583 bp, Arabidopsis thaliana landsberg
ctaagcacatctgactggaaactcatccttccagagctgtacaaacattatccagataataaaatggtgcttaacatgtcagtaacatctcctcctgctgttaaaatcacagagaatggaattgatgcgacgattcagctagatatagcgttcgatgttcaagactctggagaaaatctatctgtagcacgcctatcaacagtaagactaatagtaatccaccaaacaatctaacttaagaagcatcttttgatcactaaagttagaatcttgttcttgtttgcagattctgagtgttgcgtgttctacagaaatcgtaaagaataatctaatcggtagcctcagattaaatgatttcaatgcaacaatgaagtggagtaaaattggagagtttcaaacaaactatgttcaggtaagtcaagttaattatcttgagtttaagatttatcttgattagcatcaaactggtggatatgtgttcttgttgttaggctgctacgtctaggattcttaaagccttgtttttgccgtacgtaaacacacgtctcaagagaggattccctttccgattccaagcgatttc

SEQ ID NO: 65737 - DNA, 657 bp, Arabidopsis thaliana landsberg
tatacgtctagtttctatttatgaaaaaaacatggattgagaaccgagtactatagcatatagtgcttgctacaagatcttcactatttaccgcttgtggaggtatagataaattctgattagcatgtttatgacgacgcttcaaagtctataaactgatgatgtaataaataataatatatggaaactttatgtcatttaaaaaaaaaacttgttcgaccaaaatcatataattgagaaagtgtcaacgaaatagttcaatgcatatttttatgttttcattaaatcaaagtgaaacatttttatctgtataaatttcagtatctcaatttttggaagatgtgtgtagttttctcctggtaaatctacatgattttggatatgatatgtctaaatcaatcgtaatttcgtaacttattgatcgatgaaaaagtagcatggtgaagttcataaagtggacatcataaaaaatttcgaaaccaagattctgggccttattgagcccagttggaggtgcccaatttttagtttccttgtacgtaagttttttgatggttgctatcagaattttagattcctcaaaataggaattagaacacgctttcagatttttactgaaaagggtgttaatttgggttctttattttttagaatact

SEQ ID NO: 65738 - DNA, 533 bp, Arabidopsis thaliana landsberg
cccctagcctccgaggtttcgatttcagcgtcttgttttgtttgtttagtgactgatctcgtacataggctgggcgggcaaatgtgtataggcttgccatattacggcgtttccccgtggccttttcaaatggcgttatccatcctaacatccttattagtgttcgattcaaaatatatgctgctgccttcatcgagactggccacatatcaagtggtaaccttgctttaatcatcatatgccgtgctcgagatgtcaaaacaccccctgagcgttctgcaaagccattctgctctggggtagcaaccacagagacctcatggataatgccttccagatcggtgaaggtacgaaatgctcctccaagtgtctgctcattatcggatttatagaacttcatttttgtcccaaattggcattcaatcatggcaactagatgtattggagcatctacacagccattcttcttgccatgcgtatacacaaaatgcatatgggtgaattcatcatagagatgcgtacaccaacgatct

SEQ ID NO: 65739 - DNA, 1514 bp, Arabidopsis thaliana landsberg
  unsure (1)..(1514): unsure at all n locations
ccgggatcatctagtatgttgacaaacttgtgttttctaatagcctgaagacattttgccataacagagtcagaaaatgattgtcacattaaacatgatcagaacatgttgagacaacaaacctgaagactgtctgaaatgattgcattcatcccgtaatcgattataagtgctccacctccatcagaacctattctcttggccatttcttgggtcaagtccattgattttgggctgatctcgacatgttccattttctccctttcctcaggtgtagcccatgtgcaacgtttcatgagatacaaggctgcaggtgtaggctgtggggatagaacaaagcggaacctaaaccaacaacacannnnnnnnnnnnnnnnnnnnnnnnnncaagactgatatatctcctttttctttgatttccctgatacttactttgaatcttctcctacatcaaccattttctcacaccagccacgagtagatttctgcagatattgagtctacataagacacacataaactaaaaggagaagaagactacattgcaagttggtttccacatataacgatgaactatgaaccataatctccaaactaacctgaaattgatgaactggaagagcatcataaaactcatgagcaatgattaatgttggtactgccacagaagcaaaagagacaccatgagaaaagatgaaaaacatcattgttttgaaagaccacaacctcattcataatcacaattcgtaagtcttaaattccaaagaaatttaacaaaagatgcatacctcctgatggtacctcttgaagagtagcatgccagtgcacaggtgttccagctagtgaacttacagctttcttctccgaactactctcatctgtacatttcagattctggtgctgaagcttctgcaatgcaggactacattccaccaaatgtatatgcaatgattccgtgaaattcttaaacttcgatgtaccctacaagtcaaaggttttagtattcagtaatgagatcatcgaggttatggaacggaactagaactgtcaaggatacaagagcataaatacatacacgaaggagatcggccatgagtgttccccgacctggacctagctcaacaagattaaccctctctggccttcccatttgctcccaaagacacacggtccaaacaccaatcatctaagatcacaacacaaagtaacaaaactttcaatctcaagctcaaacatagaaccaaaacacaaatgcataactctcaaatcaacaaacgccaagtaaatcacctcgccgaacatttggctaacttctggagaagtaatgaaatcaccttgagctccaaaaacatcacgattcatatagaatcctgctttaggattagtcaaaacctcctccatatactcagctactgagattggccaccccgaaactatgatacataaaccacgtcagattctttgaattgtcactaccatgaaagctaaaatgtatgaaaatcgaattctacctt

SEQ ID NO: 65740 - DNA, 1719 bp, Arabidopsis thaliana landsberg
  unsure (1)..(1719): unsure at all n locations
cttttcttaagttatgaaattactgcacatcacttgtttgttttaattttatggaaaggccaccacttatttgagtaggtgtgatgcaataactgtagtttgcttctggcgcttattgacagagggagagagagtattgcagtgcgcgcttatgtcaacaatcagcctcagaagaaggcagccgggagaaaaaagccccctattccaaaggtaggcttagttgcatctatcttgctctgtgacttatgtggttttgataccaagttctctgaacaaacaatgtcctgcctttgggttttcaatgtcccctagaagattgtcaacatatatgttcttctttcttgagactctaattttctcttgtgagatgatataaaagtagtatcttttcaaactctcagggaaaagttgttaaagctccagacttccagaaagagaaggagtactttcgtgatattgatgcttttgagcttctagaagagagtccttctcccaataaatctagtacatggaccatgggtgaacaagttgttcctgagatgccacatctgtccacaagattagaaaaatggctaatttcgaagaagttaaatcatacttgtggtccttcgagcacactctctaagatacttgaaaactcagccatacaccaggagtcaggatgtgataatgatgcctttgattcattgtctctaaaaaccccagacaagtcttctgctggcaacacttcagttttccggctcatcccgagctgcgatgagaacttggctgccgaagatgtgcctgttagaaaaatcaagatggaatcaatcgaccttgaagatgagctgaagcgactgtctttgacatctgatctaatccccactcatcaagattttgatcagccaattcttgatctattgtccgcctgtggacagatgcgaccatcaaacttcattgaagcattctctaaattctggtatggacttacagatgatcttttatgtcctagccttgggtgtttgtctagtgctttggatgttatcttaggaatgttgtgcattttgttgacacttgtaacgatgaaatgcgatgtagtgttcttatctcattaagtttaacttgatccaattgtaacgattactcaaatattgcagtgaacctgaaagcattgtcaagattggtgaaggtacatatggggaggcttttcgggctggttctagtgtctgtaaaatagttccaattgacggagacttcagggttaatggggaagtacagaaggtatatttttcttaactcacttctattgttctccatgatggtttgagactacaacttctagttggtgaaatgatcatgttagcatggaagcaaatattggagagagccagcaagctcaagttaggttaaattctaattagagaaaaacacagtgtttatagtttagataagcttatcatctctaaaaacttgcattgcttagggaaaggcatgcattttctcacaccagatgctatctgaatgaattatggtcaatgttatggaatacttacagcttatcaaagaaaatatgataaatgaccacttagtgtatgttcatttttgcagagagctgacgaactacttgaggaagtgatactctcatggactcttaatcaactaagagaatgtgagactacagctcagaatttgaacccgaaagtacataaaaactcaagagtacgtcttctcagganggag

SEQ ID NO: 65741 - DNA, 353 bp, Arabidopsis thaliana landsberg
  unsure (1)..(353): unsure at all n locations
tacggcaaaggacggcgcattgtanatgaatcactattaagactggacccatttctcaggaaattgtatttctcatttctcgatctttctttttttctcgagtttagactcatatttatgtacatgcaggtggagggaacgttccacgaaaaaatgaaacaaaccaaaacctaatatataccaagttgactttattagttttcttaactagacaataatactcactgatcattaccctttaacaagttgaccctcttgtcttataaaaacaaagaattacgtattcacatattaatgctattactttgtcgtttgattgaccatatattaataactaagtatggtgacataaa

SEQ ID NO: 65742 - DNA, 1359 bp, Arabidopsis thaliana landsberg
tgtgtttggatcttctaaatactttaaacatccaagcatctttttttaaacaacagaaacctgaaaatttctgcaccagacattctgccgggcagggggacatgttcaaacagtttgataacagtttgtcaataatagacaatgtaagatctctcttccctatttgcttcgacatgttttaggttgccaatagaaatcttgatggccaaatatgtttactttaaccataggtcgaggccgaaaaatcatcgcagcaaagaagatattcgtctcagtttgtcctaagaagagactacattggcggaactaaacaatttacgcgtacaccctcccaaaaatcagggtacaagactttgaggtcgatccaagaacatatccctcttgatacggtgaatgatcaatcttcacatagttcagaagaacatcctgagcaggtttcaccacgtcatattttgtatatatctactcacttatacattacacagcacagatttattatacagacacacttacatattactaggcttaaaatcactcatggatgcataaaatctccagaaatggtgctaagtgccaacattatgttcgtatatatgtaactaaataaacaggtttcatcattggttttgctatgtcacaggacaagacgtcttcagaagtattccacgatacacttgcagacgagtcacttcaagaaaggataacttcttgccgtcaagcgttacacggtttaaacactgctgctgcggttttcgtccagtcaatatcggaattatctacagcttctcctcgggatcaaatctcaggtgaacttagagctcagttgtttgatgaagcagctttaatgattccagatgtgtctcataaagttagcgaaattgttgccaagataatgcttgagcacaaaaatagaactagtgatagaatgttgtccaattagttcaagtagaaagattatacaaataaactctgtacagttatcagttacttcaccttacaaattcaataataatgaattgttttgttgctcttcctgatttgtcttacattgactggtttgtttatatttttattgcaccaaccatttttttctgataaagttacttatagggaactcttaaagtaatttctttatattattaaacttgtttgatcttgtaattttcaagatcgaatctgtcatctacaaaaaaaaaacggatccaccaaagtagtgttaaagatatgtccttagtgtttcaactatgccttttcgtatgtctcttcctttgagaactaactagtaaatacaactagctgctgattttcatggcaagaatagactttttttttgggttaggtaatagacttttttgtttt

SEQ ID NO: 65743 - DNA, 533 bp, Arabidopsis thaliana landsberg
  unsure (1)..(533): unsure at all n locations
gctcgagccaattgttctctaaagaataattaattgttattgttcattttagatgcaaaatacaaacatgatggtttctgacaaaaagaaaccaatggtaaaagtttaataatttgtactcttccttgtaaatgtaaatgtgtgaatagtagcaagatgcatgaaaaatgaggaacccaaagaattaaatgaaaaaattgttttgggaatttgaaatagagagaagagggagaaaacttaaaagagagaagacgtagccaaaggttaaaaaagtatctctctctctctctgcgcctccctttttgcttctctctctctcttcttcttcttccttgtgctctgctctctgtcaatctctctctgtctccttttttacttcgccattggagaaaagagaaatcactttcaacttctccttagattttccgcttatctaagacaacaacgaagttccgagtattcctcanaaaaattcctcctttatcatttcttcacttccccaaattttgtgtttttcgtggagcagagtgaga

SEQ ID NO: 65744 - DNA, 484 bp, Arabidopsis thaliana landsberg
  unsure (1)..(484): unsure at all n locations
agcctccactcactaagctggcccgactacagtctggtttcccgcgctaaatatttccgcgggtcggctggctgggcttcatcaaaacnnnnnnnnnnnnnnnnnagctcagaagcattctcacttgtatgtcacagcccctgttgagttgaggctctcaacaccttctggcttctcaaaccggccaagcaaggatctatctgcgctgatgccaatcaaggaatatactcttgagtactagcgctctctcctccggagaactctcttcaagctcaggtgcctgagctttactgagcttggtttgggttgtcaaaatatacgccatgcttcgaggtgcgtctaacacgtaccacagaaaacaatctgaaagtaagccatgatgggtcatgaacgcaactcatcagtcggcagtcgcagcactgggcactcttttagaggtacatctcctttcacgctcttaagtccatgttgaagctcgcatgct

SEQ ID NO: 65745 - DNA, 471 bp, Arabidopsis thaliana landsberg
  unsure (1)..(471): unsure at all n locations
ccccgccccggtcaactgatctagtcttgtctttgttatatgatgcctccttaagatggcttttatttggagcgggggcacttattttaaactgctgctcttaatacgcatcaccatcaactctccccttcatactcttaactccnnnnnnnnnnnnnnnnnnnnnnnnnnnngacaccgacgacttcgaaactcgaaccgtccgcttcacaaaatatcgctctcaacctttcagaccaagtatgccttttccaccgcgctttcgttctaattgtccatctcctccgccttcctttttccctcgcgatacaactatcatccgctactcccctcgtcattctgtctcctccgcacactgcagcagcctttcacattcaccgaggacgtcttacaccaccataacaagaaagcacgtccatactcgactggagacgatatatcccatctttacccgtcgcaggagctgggagc

SEQ ID NO: 65746 - DNA, 122 bp, Arabidopsis thaliana landsberg
cacacaagacgacaaggcaagaaaaaacacccccccaaaacacgcccggcacagcagaccaaaaggccaacaacacgagcaaagaacagaagccaacaacagaccgggcaaagccaccaaga

SEQ ID NO: 65747 - DNA, 509 bp, Arabidopsis thaliana landsberg
tctagctgatatatcaatatatacatatatcaacgaatacaaacttttcacgtatgtcatacattgtataattacggacaaagaaaacaagattagcgagttttattttcttatgaatcaaacctttatgagtaattagggtcaaagtgggtcaaaatctgaaaatgtggggtgaaaaaagggaaagaaaagggagaacgtggagacatctgaaggctaagctgtaagttcacgtgctatgttctttggcctggaccactacggtctcgttgctacatgattggctttgtttcctcttcttttctttttttatttttcttaacaatttgtaaataatgtttaatcaaatacaatttatcttttactttggtttcaaagttgaatgagacagtcaaagttaatatggaggatagagtaaagttacagaggaaagctacaaagtaggaagtttaaaattttgaagaggattataaaaagaaaatttgaagaggagaaagttttttaaagac

SEQ ID NO: 65748 - DNA, 262 bp, Arabidopsis thaliana landsberg
cctgggctaactatggtggttggtccaccaggtaccggaaagactgatacagcagtgcaaattttgaatgttctataccacaactgtccttctcagaggacattgataatcactcattcaaatcaggctttgaatgatctttttgagaagataatggaggtactattggcatcttcgttgcttttgttatttatatggagtcatatttaatgttttatgtttgacggagttctgagagacaaatgctacatggatctttttt

SEQ ID NO: 65749 - DNA, 288 bp, Arabidopsis thaliana landsberg
  unsure (1)..(288): unsure at all n locations
gcggccgcacaagaaccagaggaacccccgggcagcaggaaattaatcaagcccaacgacaccgacgacacggagggggggcccggaaccaccacccgcccccccaagagagggacaaaaacgagcgcggcggaaacacgggcacacgcagaaacccgcgagaaaaggacaaccgaccacaaacacacacaacaaacgagccggaagcacaaagagcaaagccaggggcgcccaacgagcgagccaacccacanaaacagcggagcgcccacagcccgcaaaccagac

SEQ ID NO: 65750 - DNA, 267 bp, Arabidopsis thaliana landsberg
  unsure (1)..(267): unsure at all n locations
gcatccattacaaantganatccaatgaaagcctaacgaaaccccctaaaaaccacgagaggcgactgggcgtattgtatgtgccaattgccatttagctaataagcccgtggatattgaggttccacaaacggttcttcctgatactgtatttgaagcaattctcttttttttttttccttttcttcttattttttctttccctttttttttataatttttttctttatgcattcttctttttttatgtcttttataattcttttt

SEQ ID NO: 65751 - DNA, 658 bp, Arabidopsis thaliana landsberg
  unsure (1)..(658): unsure at all n locations
taaacccaaaccaatcgtgttaatnctaggaccgattttaaccaactttatttttatctctatttcgtcaaccgggtccatttcgattttaatgaggaagagagtaggaactaggaatttaagacataaataggatctaacaaaatttaggaagaaattaatggttgactaataggagatcttggtttattattatggtagtcttcttcatcaccaaaatctgatgctgctgaagaaatcatgtgttgttgttgttggcaaagagcttgattctcccaactctttcccatcacaactaagtatagtccactcatgattagtattgcacctatcaatctgaccaaaacaaacataaaaaatgtgtaaaaaacttaactataagatatgaaaataaaacgcataatgagtcaaaacatatagataacataccctccaaggtaaaagtgttcaccaagagctataagagcttaaacagcagcaatcaaagtttgaagaggcaaatacgctgattcaaacagaggtccttctctttccactatcatatatttggattgcaaacaccattgctgaaccaactaaaccctgaaaattatttcaactcacaccaaaatcaattacaccattcaaaagagtcttaatttagaaaataaacaaacac

SEQ ID NO: 65752 - DNA, 577 bp, Arabidopsis thaliana landsberg
  unsure (1)..(577): unsure at all n locations
ggatgaacattcataaagtgccaataacatgtcaaacctcgccagctggaaggcgctggtcaagggaatggtctcatcaattaatttatcgtctttgatctggccggtcccgcaagctgagaggtacgcaagaaacggcggattcttgtggaggttcatcttgaggagactgcctactgtgannnnnnnnnnnnnnnnnnnccataagatcaatcgactttgagatggatcggtatgacttgtgtagccatggccagcaaagtggaagatctggcatactcgcatgtggcctataatatcatgttcgcgccgccttggttggattgtgtgaagagccattaatttgcacatatcacagagtatttgtacttcctcagcggcaaatggaaggtatccattccctggcgtatcctgcatggacaataaaagtgcaaatggtaaagactctgttgctaggcgttggcggccacgtatgatggctttaatagacgagctgtaagacgacatgacccgatcaagcacggttttggaattgccctngctgtgatatccagctgcatgcagaggaaatttggct

SEQ ID NO: 65753 - DNA, 583 bp, Arabidopsis thaliana landsberg
  unsure (1)..(583): unsure at all n locations
tgtcctggtggcgttttggacgtacgcctcgactttcttcccgtgcaccaatgagaaggtgaagcttccggggggttcggttgagcactacatcaccttcaagcgtgaagaggacaaggcgaaatggcatggcaagaacaagatccccatgcagacctttgcggaaatgtacctcgacggccttgtggatttcaatggcgacactctcgatgttatggagtaccgccacgattgggccaacttttcgtttacctgggacctgttcaagtttattgttggcactttctttgtcgacgttctcttccacaccaaggctcaagatgaggagcaggtgcgtcctaactatgacagtggtaatgatcactacgcttggttccttggaccccgtatgatctacacatccggcatcatctcggaccccgaaaaggaggagacgctggaggaaatgcaggacaacaagatggctattgtttgcgaaaagatcggtcttaaggaaggcgagaccatgctcgacatcggctgcggctggngcactctagctagattcgccagtctgaactatggcgcctaagtcactggactc

SEQ ID NO: 65754 - DNA, 2113 bp, Arabidopsis thaliana landsberg
atgtccttgacagagatggctctcatacaagatccgctgagaagaagcatcttctgaagttacagaagcactttttgaggagcttgatactccgaggtcttgaaatttactgatggctgaggagatttgatcattttctctgctttctggctcatgtaccactctgtaaaattgtttaggattggtaccgacatggaatgacccagaaatcagcttaggcactgggaccgaactagccaagttaaatgatttactcatggaatccatccatggcacagacaatgaacccattcccagagagttcatctgcaatgaagactcagaagccacaggaggatttgtagctgctcgtttgtccatgctaaacgaatagagaggtatgttctctggttcaataaagctattcgcaccagatacatatggtgccataaacccagagaactgtaacttctctggatacacgggatcacgtagctcaacagtgttagaagcattaggtcttgggtttctcgggattcttaatttagcatccttttctgcatactttccttgaacttctggttgctttgatgcactcttaatctgtttttttccttccacactttgcttctgttcggccctgcattctactgaattcaactccccagcatctttgtcaaacaaatcaacagattcccaatctttggactgaggtgaagaactataccacatctttcgctgtttcgccatgaattctgggttcctggttttttcaaagatacgataaactacctcccttgtgacagggggcttcaaacatgaaagtagaccttcctcagaagcaattgacgcaggcagtctactaagataagagcgtattactggggcaataaaagcataagagtcgactgcacctaagcattcactacttgcggcaatgaaagtgacaactgccctccttacccattgagatggatagcacaacaaaggataaacacactctatcatttggaggagagctctcttccgcaagaaactactcttgcataatgtggataagcactccaatgcattgacaatgacagcctccgtctgatcactcaaagcttgatcgatataaggcaatagatactcctccacacttctctggccaacaaaaaagcatacataaacaatcttctcaaagaatacagatcttagctgctcatctctgtcgtttagaaaggcagggaggatcggtagtagaaagtcattactctgcctctgaccaaagaaaaagcagagctcccctatgtcctgaaggagtgctcttctaacatttggagtttgttttggacccataacaagctcttgaacaacttcagctatagtttttctaagctgttgaagctgcgcattgccatttgccttttgcaaatgactaggggtctcactagcaggtgtagtggagatctgctgggaattcaattcattaagaacccctacatcgctcaactggaaagaatgtatcaagaatccataagcagtaagagcgagttttgcaatattgctggcatagcatatcctcacactctcttccgtatcttcaggaagcatggagagcatcggaaatatgtactctgggaaaatctttgcatcactaggaggaaaatctcggacaagcggcagaatgtcacacaaagtttccatggcagcgcaccgcacgattgctgttggatcagaaagcaaggcaacgacgtatggaagtacacgctgtaagcgatcatcatcatcaatatacaaagagcaagatctcaatagaagtatagcttccctcctcaaatgaggcaactcgatattgcggatacaagaacagagcatagatgcatcagaaccattccctcacatctcatgttaccctctaccggtagaaaaggcgtgccataagtatcagaacggctatcatagagagacatcagtgtacccaaatcgaacattgttatctttttcaagaaaggatggcgatttttcttgagtgcatcagaaatagagtaaaggatctcatccttagaggtcacagtattccttatcaaatccttagatgagttcaatttggggattgcaaaagtttcctggtctgtgcttgcgttcattg

SEQ ID NO: 65755 - DNA, 390 bp, Arabidopsis thaliana landsberg
gatcattggatcatgagcccaagaattacagccttaagatcatttaccacgtggaagatcaacgactttagtaagccaaagctttagactttagtgtcttcacaagccaaggctttagtaccttcacaagccaagtcaaaaagtcaactttctcttgacctacataacccgtaagtcgcgtcacatgggatcaattcaaaaacacacttcgctgttctttttctctccttttgaatcctaaagagatcttttttatttttactcatcctctctgtttccttcttaaattacttaattcattaacccgccaggcaaaagaaaaaaaaaaatctcagtcaagttcgtccgaaagttttcacgacgacggcttttagagattgattcgttcac

SEQ ID NO: 65756 - DNA, 179 bp, Arabidopsis thaliana landsberg
  unsure (1)..(179): unsure at all n locations
agccggaagcccgaagcaaaaaagacaacgacnaggacagaagggacaagggggggagccaaaccagcaacagaaggcaaggcngaaacaacagaaaaggggaagaagaagccgacaagagggaaagcaggccngcacaangagcagccancccaagccacgaaaaccaacgcaagaaa

SEQ ID NO: 65757 - DNA, 606 bp, Arabidopsis thaliana landsberg
ccgtaaccgttttttggtttatttgtaatttaacaagaattgatatttagttaatataatgtattgccttaaactctttattatataatataaataaatacagatataagatgtgtttgataataacttgttcttgcaagtgaaagatgatctttgcgtttggaaaagctgtatgcccgcatcgtcagagtgtttgggcgttctctcgggtgcggaagactcgcgtgcatttctgattgaattgggattcctcttactccaacttatgctacttcttttgttttactcttgttttgcagtgttcttttgttatgtcgtacgttcgtagattttggtcttctgtcttctttgcttaagcctctgtattctgtaaaaaactgaaaattagtatgaaatcttcacatgtttacccaaaaaaaaaatttgatgacaaaaacgtaaaaccgctaaactgtggaatccggaatgcttatccgtatggcgaccatgaagtaatgacctttagtgaccaaaattttgtattaaataaaagtcgttttgtttaatgaaattatgtgtataaccttcaattttttactatataaatgagtccggatataaaatgtg

SEQ ID NO: 65758 - DNA, 396 bp, Arabidopsis thaliana landsberg
ctgcgccgtctgtttctccattacgcatccagcttcaacagaatggcttaaagccacatccacctttgccttctgcaactactaacacaagaggttaaaaaccaaaaaaaggcttttctaagtgcttcttcatgtcaatctcctgcacttttctgaatttgtttttatcttggtttcttgtagctgagagacagtcatttgagtctcagcatcgcaggtcccttgacgatcagtcagattccttcaggtgcatatcactcttttttcttcatttgacacactcggagaatcatgaccatagactttagacgatgaaagttcttgattgaaacaggccaccctacaataaaagaggcttgactgggagatcatatggagaactatcaatcccggatt

SEQ ID NO: 65759 - DNA, 405 bp, Arabidopsis thaliana landsberg
  unsure (1)..(405): unsure at all n locations
gatttaattgattattggtaaatcagctcaagttaagagtcgtagtcttcttgttcagatgatcattagtttaatcaaatgtcttggcatttttcttctgtgatgtagcctaccgtagttgccactgggaaaaaaccaccacgggttggatatgttggacatatcacaagactgtggaataaacttgtccagttgagtgatagcaatgccnnnnnnnnnnnnnnnnnnnnnnnnnnnnnnnnnnnnnnnnnnnnnnnnnnnnnnnnnnnnnnnnnnacattagattcattaactgcacacataaaggcgctagcatcaagagtgctcttccttttacttttggtgtgctgctgacgagagattgctctcttaaatcattatgaaaacagtgaatggaacgagtgg

SEQ ID NO: 65760 - DNA, 348 bp, Arabidopsis thaliana landsberg
  unsure (1)..(348): unsure at all n locations
acacaataacaaaaccaataaaaaaatccacacaancttcacacttctaagcnacgcaanaaacaaccaccangataaaaggaaacaaaggagaaaacccccacgaccgcgaaaagaacaaccaccaaaaggggangacaactagcaaagcgaggaacacgacaaaacacaccaagagaagcgcccgaaagaccgatcgaaagcccccaaagagccgccacaagcgctaaaaaacggcgaaaccacaaaaacaataccagatggcaactctaaacccgcaaagagtagatagataaaccaaagatacaatccaaagaacccttgttaatcggaaaagagacggatcaa

SEQ ID NO: 65761 - DNA, 164 bp, Arabidopsis thaliana landsberg
ttctgaacatcgttacttgcgggtccaacggtaagcaaataccacgagtttatagttttatttcagttagtttgagtatatgtttgctcttgaagttctcattttcctggtaatttctttctaggctgtggttgccatgatatataaggctattggagcatctt

SEQ ID NO: 65762 - DNA, 407 bp, Arabidopsis thaliana landsberg
  unsure (1)..(407): unsure at all n locations
gatttcttgttatatccacccgccagaatgtctgaatccccctaccgtgggagcctgatctcatatttctttgaaaagnactnaaaataaacaggatggaaggagaaaatttcagtacgacaattttggtaggcgaatcaccgatggaggtgtttgacgcagtcaacaacgttcagggatggtggtcgaaagcggcgaaaggggnnnnnnnnnnnnnnnnnnnnnnatttatggttgatttcggcgggcattggtgggcgctcaggatcatcgaatcggctcccgctgaaaaagttgtatggcaggttaccggcagctatatgccctggaacggacataaacacgaatggacgggtacgacgcttggttttgaaatcttccgggatagtgggcagacccattacagt

SEQ ID NO: 65763 - DNA, 586 bp, Arabidopsis thaliana landsberg
cgcttcatcggggaccgcctgtgcgacccaggtggactatctcatttggacgatgccgaacaccactcggcatgcggcgatcatgatcaccgtgccccattgcgaaccgcccagcccgaccaggccgatgcccagtgcgctcatgatcaggggcatggcgacgagcgtgcgcgacaggccccaccggatgacccagcttcctattgcggaaccgaggaaattggcgatgccgaagaccaggaggatccccgaaacaccggcgatgcccacgccggtcacgtcctccaggaacgggcgcaggtaggtgaagaaggcgaaatgccccgcgaagaccaggccggcggccagcacgcccattccgatgcccgggcgccgcagcaccttcagcagtgtccccaggtgcgtcgcgctgcgaggcgccatgcgcggcagcgtcatggcttgcgtcgccagggccaccaaccccagcgctgcgccgaccacgaaaaccaggcgccagcctatgaccgcccgcagatagctgcccaccggggccgcgacgatggtggcggcccgcaccccgctgaacacgatggacagggcgcgc

SEQ ID NO: 65764 - DNA, 560 bp, Arabidopsis thaliana landsberg
cccattggctattcttgttggagtatttttttgttcattgtggaaactttacctgtccagaacgggttgtgtgtttagcatccaatggcccgccgcatatactacttatcacttgcaattacatagtaactcattctatctgctcaagtacattgtagacgtcaaatacgcagagaaccgtctcctatgcgacagtcgcttcctgcctaaagtcataagtcgcattcaaccgcattgcgagatgctccgccgccgagagcgttctccttccaggttcaagattcccagctgcccctccaaatcctactctttcctgagcgtacacaaccttctcctcacggtgagccttaaccacgtcactcggcacaggaaccagctccgtagaatcaaccggatggcaaaagaaaacaatgctataccgatcctgtgaactattccctgtccgctctgaagccggaaatacaactcggtgcacagtggacttgagcaacccgtctgtccaatagcttagcaggtcgccgatattaaccaagatgggcgggaaagcaaattcgttgtta

SEQ ID NO: 65765 - DNA, 1905 bp, Arabidopsis thaliana landsberg
tgcatatatacttacttactcatacactctaacaatatagaatctattattgtcatccatcttttctttcacttcacctaactcccagtaaattaattaataaaaaggcgaatcataacttgtttagatcctcttgcaaatgaaccacgaaagcagcatgaacacgaatatgaagaagaggacaaggaaggagaagaagagtacgtcgtcaatggtgttcttgtattcgatgattgtgaatatatgtggaggattgtttctaagttattggctttacaaataccatcccacaaattctaatctttggatggttcctgttggactcatcttcttcatcactcctgcgtttctttccctctccattttgatctccgatctctgcgacgacgatgatgatgtcaatctcgacctcaaccaaatcaagataattctataaaagttttgactacttcaagtgttgtcgtttatttggtattaattattattaacctccgtacaaatggaagacttgtggttttattgttaagtttgtagattttttcacctttgtttccgaaacatttggtacttgtgcgacaagttatctccccatagtcttaaaagattaacctatttttaagttcttcaaaattatatccataattcccatatgattctctttttctcaatcctctgttttgtttaaagaagggtacaaaacaaaagactaacagagtgggacggctactacaaaagacacgttatcttctcttaatatcaacataagggatacaaagcgaacatcatctataaggactactgttaccaaaagatctacacggaggaatccgaaactgcgattacaaggaaggactaacatcaaagtcgtcacactactatactgccaattcaaaaggtcactaggatttgtcttaatgtttttgatatcaaatgcgtcatttaatacttctaaggattttatggtgaaaggaatcacatacgcaccatatttctccatttgtccttaagatcggaggaattacgagttgtgtggaatataccttttcccatctccaaaatcttcttccaaggcatgtttttgttgattgtatcagaaaatttctccactccctcctatccaaaataaacatatactataagtttaagctaaaagtgtatttcaagagaaaagtgtggtggttttaccctcaacatcttctcttcgttgactgtccatagtaccctttttggctgatcattaacaacagcataagcttctccgcaagatttctccatatcaatgaattgatctgttgactcgtctaactgggaatttcgagccttaaggtgcttgaccagttcttgtaattgatgaaggttctcatgtagttgcattggtagtgaattatcagaaccattctctagttgactgttttctctcgtcatgactatatctccactcctcagctcactacatccatattgaacaagtgtcttcgcagctgcaacaccctttgttctcaaagccgtggatctagtagcttgctccttaaaccaacaatagggacagtaaaaggttgcaggatcttcacaatcaagctcaacacacttcctgtgaacagcgagagggcattcattcccagaacaaggtactacaccatcgtctgcaatatcgcatacaatacatgcgtgttcgttcaacggctcaaagcttctgaaagtgtcacttgtcccaaggtagtggcgcttcttaagaggcacattatcataagtgaaaatgtttggagcagagttgacgtcctcatcaccaccatcatcacactgaacaatacaatgagcattgcgcttttctctcacaaagcccatttcttcaacaatttcacctatctaagatagagaagaagataatcccaggtagagtgttta

SEQ ID NO: 65766 - DNA, 1361 bp, Arabidopsis thaliana landsberg
gaatcatcttgtgctaatatggtaaagattaggaagacgtttcattggtgttttgttggtcttaaatccctttcagcatatgatgtcaccatatggagcaccctatgctgctgtttatcctcatggaggaggagtttacgctcatcccggtattcccatggtatatagtaattctgttcctcaaacatctcgtagttgaatcctccgtgatcgtttatctgacttggctttgagtttctgtggacagggatcactgcctcaaggtcaaaaggatccacctttaacaactgtaagttgtatacctagtttgatacatcaaagattgagaaatggttttgttcgctgtttaatggatagttcttctttatcgcagccggggacgcttttgagcatcgacactcctactaaatctacagggaacacagacaatggattgatgaagaagctgaaagagtttgatgggcttgctatgtctctaggaaatgggaatcctgaaaatggtgcagatgaacataaacgatcacggaacagctcagaaactgatggttctactgatggaagtgatgggaatacaactggggtaatgtttctcttctcttactctcagctatctttagttttcatatgattgtctaaagtctagaacctcacttattgcatgtttccaggcagatgaaccgaaacttaaaagaagtcgagagggaactccaacaaaaggtatatagccttattcatgtcccaaagagttagaatcagtgtaaatattagataaaatgggagttttaattcggtttttttggcagatgggaaacaattggttcaatctagctcatttcattctgtttctccgtcaagtggtgataccggcgttaaactcattcaaggatctggagctatactctctcctggtgtaagtgcaaattccaaccccttcatgtcacaatctttagccatggttcctcctgaaacttggcttcaggtaccctgtgacttattctcaacttccacttgttggattttcgagctaatctgatccgtttccctgaccaagtattaaattttgtcttcagaacgagagagaactgaaacgggagcgaaggaaacagtctaatagagaatctgctagaaggtcaagattaaggaaacaggtttggttactgaaagaatacactgaagctctttagaaattctttctcttagtgtgtaactctcaccaaaacatttaataagctaacaaactgtctttccttgttttgaaggccgagacagaagaacttgctaggaaagtggaagccttgacagccgaaaacatggcattaagatctgaactaaaccaacttaatgagaaatctgataaacta

SEQ ID NO: 65767 - DNA, 1825 bp, Arabidopsis thaliana landsberg
  unsure (1)..(1825): unsure at all n locations
cagctcagatttgacgctatttttataatacagcacataattgaacattgtttttggaaaataaaaacaaatccctaattcaacgaatctacttctcttatccaacacgaaatcaagagttttgtaaatatgaaaaatctaaagaaattattcaggtttcaataatatctaaattagtgcctctaagtatatttttatataattaaaaaagcatattttgttttgggccgcatgaagtcaggcccaaatatttaaaggcttatttgattaatgatatttgaagacatgtccttgaatcggagttttcgaaaattttgaagggagcttttctgacagatggctagattctttcttctctgttgcctcttcgcggcggtgctgacgtcatcattgacggaggccggcgacaataatcaagtctactcgccttgttcagattctactgttgcgatcggcgatggattcactttcggcattgccttcgctgcgaaagattctttcttcagtacaaatcgatccaaatccgttcagtactctccctgcgatcatcgccatctctcgctcaacggaaactctgaggtcgccgtgttcagacctaaagtcgatgagatcacactccttaccatcaatacctctagttcctccagtttccgcccggttcgttctcatctctggtttatcttggtgaattagggtttcgattgcaggtttttgatcagattagaatggattaggtcactcttaaggaaatttagtatagatcggaatcatatgcccagattagttgacttgtctaaatcctggcttagaatgttagctctggaattctaagctaattgtcgagattacttggattggtagattcaattttcccgtaggtaacgaaggtttaggttttaagctctgttcttggacgatctggttcctttctgcatttgtttcagtgagatgaaaggttcaaaacagagacttgccatgttagattcctatagattaagagtttggtttctgacgaagtaggtggaaatcaggttaacttgtaatgtgtatatcattagactttcagtgtagatacctctggaaaaagtgattttagtagtagcttcgtcacagtttctcccgaacattactatacgatttttgtttatcctcggaagtagaggtcatgaatgtgttagcctatcaaattatttgtttgtctgatgatactttgtgattccaggatgcttccaagggatatatggtagcattcgctggtgcaaaatacgctgcaagatcactcccaattatggttgcagacagcaatcacatcgtgacaagcttcacccttgtaattggataagctcatatcaaccttcattttcatttttcttatagaaagtttccatctcttattagttatgtaatcgtcatatatcttgggtgaattctaggttcttgagttccagaaaggaaggcttgagaacatgttctggaagaaagacggatgctcgaagtgttctggagattcgaaattcgtgtgcctcaacaaagaagaatgtgcgatcaagccgcaaaactgcaagaaccaaggaggacaagtagattgtagcttggggatccaattggcgttttcgggcacggataagcactacaccgcgttgaattcgtggtatgaggttgcaaatctgaagcagtactcgctctatggcctctactccaatctaaaggactcactaaccaacccattcaagaacatcttctgatgactntctttctcctttgtgtgttgctactcttgtnnatttgattattntttcacctgctttctttggattatttcttc

SEQ ID NO: 65768 - DNA, 227 bp, Arabidopsis thaliana landsberg
gtctcttggttattgtaattgtggggtttggagttataaatttgtggaaaacagacagctattgtttgtgtaagcaattttatgggtagctctaaaatacggtgtttgcatcgtaatatatgtatgttcgaattgttttctatattattatttttttaaatcgttcctttcgggaaaaaagtgaaaaaaaaaatgctaaaccgtgataaagaatgggtcaaatttcc

SEQ ID NO: 65769 - DNA, 319 bp, Arabidopsis thaliana landsberg
  unsure (1)..(319): unsure at all n locations
tcgcgttagtgcacttgaaattaggacaacaaaaatgcatctagacaaactttttctgtatggaatatctaggacgnaaccttaccattttaatatgggnataaatcttggttttggtttggtttgttcacagttttaaactaaaaatataattataattttttctggatccatggtctaacaataaaattttaaaaaatgtgggataatgatgggtcttcacaaaatattttttctaaaataaaatactcctttcttttttttgggctaaaaagttgtcacatgccatagggaacggaaaaaggtgtgtttttacatt

SEQ ID NO: 65770 - DNA, 565 bp, Arabidopsis thaliana landsberg
  unsure (1)..(565): unsure at all n locations
gccgccgccgccccctctgggccgacgaaccgtgaactggccgctcagccgagggcaggtcgttcgtgccgacgtcggccttgccgagcccaaactgttcgtggtcgtgtctaataaccgcagaaatcgacagctgggggacgtactcgccgcgcgcctgaccaccagccccaaaccgcctctgccgagcatcgttgagctgaccgcagaaaccctcactgggcgggtcgtctgcgacgacatcgtggcgctctaccaggacgagatccgcggcgtcgtcaccgcgctcagcccgattacgatggccgccgtcaaccgcggtctggccgccgctctcgacctggaccgttaaatcccgcaaaccaggcgtcgagcccgcggtgccccgcctgtagcgcggaccctgaaaatgaagcaacccccgggggccgtagctctcaccgggggccagatcagttgtcaggaggagtcccgagggctgattccttgctcgtcgtcagcataacaccaaaccaccagcggnttcatcccgttgtggtggccgggtcgatgaaatgacagcgtc

SEQ ID NO: 65771 - DNA, 381 bp, Arabidopsis thaliana landsberg
ttcgtctctccatagagagagagagagagggagttaaaaaatgaagagaggtttttttcactgttttgaatttgcagagagagagagaagaagagtcaaaaggttaaagaagaatcgccgtttctcaggaacatccttcttaaatactattaactcatcactatttttggagatttttgtttagtaacgtgattttttctatgtaattaatttaattagattttaactgttacagagaaattgatgcgtgttcaacactattcatatgatatgagacactgacccaatcaaaactcattcaaccttataactaaacgtatcttaaaatatagttggtgaaatgacatacgtttatcaaagcttaacctattgaaatttaat

SEQ ID NO: 65772 - DNA, 301 bp, Arabidopsis thaliana landsberg
aactggaacaacaagatcctgctgtggtttttccattttctctggaagaagaaccagcggggctggggtcttttgaattaccaccatcctcttcacctacattatgatcagtctcttcataatctccatgtgcgctcaagagagcatcaaacttattcggaacatattgacaagaataaggatcgccttgctcatccctaccatgggtacgataaatctccccaacatgatcgttctggaacgaatactctaaatgactctacgaacgcgaatttatctgcaacacattacctctagaaag

SEQ ID NO: 65773 - DNA, 161 bp, Arabidopsis thaliana landsberg
  unsure (1)..(161): unsure at all n locations
cagaaccacaaaaacagaagaagggaagaagnaaagccgaaaaagaggaggagaaaacaacaaaaacaggaagagaagaggaaaaaagcagcggacaagaaaaagaggaagcaagaaacaaaaacagggggaagaaacaaaacaaaaaaaccggagaagag

SEQ ID NO: 65774 - DNA, 560 bp, Arabidopsis thaliana landsberg
tattcgattacatattatatcaactgattaatcttcgatttcttgagcttaaaaataaaataaaatattaaacgctggctagcaaattgttttgactgagatggtcctatagttttggacgcctagacggctataaactatcgagttttaaccttatacataattcatagttgttacgaattataattaggcaattacacatttgtattatattatacatctatgtcacctcgagaagattgaagcattttttttaacaatgacatttttattttttaagaaaattattttatcagaaacttaaaataacaatttgttttgtatcttcgcctggacgtcattaatgtttgtgtcgttcaataatgtttggtagttatatatagaaagagcaaatttatggttgattgatggtgcaaaaaaattcatttctctatattctagagaaataaaataaaagaataatggaatattaaatagagtctaaaacaatatacacaaggacagagcctttatatataaagacattgatctctttctgattttcacacacacacacacac

SEQ ID NO: 65775 - DNA, 648 bp, Arabidopsis thaliana landsberg
  unsure (1)..(648): unsure at all n locations
tgtaccgatatcaagaagcgaattgaatgatctgctaacgaaaccgtctttaaatggcattcctcttctgattcttggcaacaaaatcgataagtctgaagctctctctaagcaagctttggttgatcaactgtaagtttcttattcaaagtccatacaaaacaatctggattcgagtatatgactttggattgttttgatgcagagggcttgaatctgtaacagacagagaggtttgctgttacatgatctcgtgtaaggactcgataaannnnnnnnnnnnnnnnnattggctcattaagcactcgagaactgccacataaacagacacaacaagctcattggtctagaggaaaacaaagcttgtttttggtttcttgatgttgttttatttgttgagaatcaatcagatgtaaatcatcagcttttggtttcttcttggtttaaatcttgttttacaattcttcaatgttcaaatactttcggttcatgaagtatatcccgtccaatttattcggttcatgaaaatcaaaacccggtttaatccggttaaannnnnnnnnnnnnnnnnnntagtacatcttattggattctaaatattcatactggcatactgaattcattagattatgaatacaaagtcaattt

SEQ ID NO: 65776 - DNA, 377 bp, Arabidopsis thaliana landsberg
  unsure (1)..(377): unsure at all n locations
caggctaggtctatagcaacaagtattcctattttggtaggtggccacgtcatctccggtggagttattaaatcctgcgttcatgcccatataatgtccttatgataatgttttgatatatctgatcgattcaatatcttggatgccttttcccaagagggactatagaatcttattaccatgtccgtgacgcatatgcatttatagcgatgaggcattacacatttcacgactgtttcaaagatactagggcgggtgtataacatgcgcgtcccaacgcccccgaaagcagcatttaaggaaagaggagcctcatcttatatattataatagccagnggnnctaaatccctagcaacatatcatgataatggctta

SEQ ID NO: 65777 - DNA, 619 bp, Arabidopsis thaliana landsberg
acaaacaatgccgcccctagtacagctggattcagataacgagacaaggaaatcagaaaaattggaatcttcttatatgaggagaagattaagatattggcgcagcctccttgaacaaggtagcggttaccttggattttgaaaggtcccaggctcccagcatatcatttcatttgccatcagttgtatctgtctttgtgagtaaatttgttacagaattgtgcagatggtgagaaagatacaggtcaactggagagagaaaaggtagaaccaagagcacctcctcatttttcatcaggttcgagttcttcctttggagagccggttggtccagagccggttagcccagaattggttgactcagatacactaaatacctcaaatgttgaggtaggaggagtttgcttcatctttacttttctactgatgatgctgattatacagtaactattagacgcataagaacgtctgttgcctgaaaagactttactttagcaaataattacagttgatggtttgttttcaaggtctttgtatagagatttatagaacatgactttgtggaaacaaattatgatagtaattttggctgtgccatatattgaaagatctacttaaa

SEQ ID NO: 65778 - DNA, 549 bp, Arabidopsis thaliana landsberg
  unsure (1)..(549): unsure at all n locations
cgccttcatgaatgtgatacgatatgagcgaacttagtttccggtttaacagcagaatggcgggcgctggcacacgggcatactttgcctctgcatcctcgggcttgactgtcctttcatcgctcagggtcagaggtgtctgctgaagaatgacatcatcaacaaagtcaagaatcggactctgaaagaccttccagacggcgttcctcttctcatcagtggagaaaacgcgcgttatagactccacggcagtctggtgaactggtttatcattatcataaaccccagccagccacgccccaactactttgggcaaaaatcgggcaaaccgcttcccaacgaggctagcaatcaacccttgggccgagtgtgcggactgtctcactcggcgatacagatcaattgatgcccttgggtatattctgatctggccgatgttaggcttcgaagtagtgttttttatggaaataaactcacccaagcctctaagaacccatcatcaagtgtaccatcatttgcagctacactggaaacgaaagactntatatc

SEQ ID NO: 65779 - DNA, 381 bp, Arabidopsis thaliana landsberg
atgcacattgccttagtgtgaagccctccctcatgaagtcagttttgtaccggaaaacacccctactagtattctaagaactatttcaattctttttttttctttgtattcgaagaattgttctagttctcttttctattcggttttgtaataagcttaaacatctctaggttttatgtattcaattctgtacatttttttgaagtgatgcttgataacatgaagttcgtttttgtattggagaaaaaaaatctccaacttgtatgtcaagaactgtttttttctgtgtgcacttgtttccccatattttctgggacattaagcgttttgatgtctataactgactgaaacaccgagtttctgtttttcacaaaaatggct

SEQ ID NO: 65780 - DNA, 1592 bp, Arabidopsis thaliana landsberg
aaaaagtaaaaaaaataaatatgcaggaccgcgtgagattcatatgcaaaagaaccgtggtgagcactagatcgattgaaccaggacgattataccagttatcagtattggaccacgtcatggaaccaaaccacattcgtctagtctactattaccggtgttccaagactagagaaccgggagaaatcacaaaaaaattaagggagtcattagcatacacactcaattgttatccgattgtaaccgggagactggttaaagaagttgatggtatggaagagaataaggatttaagccaacgatggatggtaaagagcaacgacgccggcgtgaggatggtggaggcgagagcaaccggttcagttaaggaatggcttaggagtgtaaatagagaggaagaactcaagcttgttcattgggaagacatgtatcatcttcaatattattggtctaccttctgtgttcaggtatatataatccggtttattctggcttggtttagtacggtctggttttgtcttactttttcttgttttatttttaatctacaggtgactgagtttgaaagcggtggtttagctattggattaagttgtagccatctcttagccgatccagtttgtgcaatgatgtttattcgagcttgggcagatttaactttgtctcggtccatgatggctccaccactattccacccgttgccgcctcgccggttttccaaccaaagactaatctctaacaaccaactgcttagccattacatcaaatcttgctcttcaacggctccactttcaaacgtgaccgaggaccatatggccaccgttacttttctgtttccggatccgctggtcagagccggcgagaatgagccaaggatttcgacatttgagattttggctggactcttttgggtctgtgttagtcgagccaaaggaaaaagaaacgagctcatggacatgtccttgtgcttagacgttaggaaattattgcgtttagaccaaagttattttggtaattgcatggtttatcacaaggtaccttactccaaaccggttaaaaccaaagataaactcttattccacgctgttcaagagattgagaacataaccaagagactagactacgacacggtcatggacttgattgagtggttgagtagcaataacggtgcgatatcgaatggttcagatctcgtgtgtactaatttagagaacatgtctcattcacgtgcgatgatgttcgaggaggatttggctctgagccacgtatcttgctatgtagaagggcctgtagctggaggtggacaggtcatagtgcttccctcaccgcccggtaaggaaccaatgagccgagtggttatggccagtctttctcaaagagagatgggtaaagttattgcggatgagcttattcttagcttttctccggttgtgattattgaaaattcaaaacaattattattatactttatttgaaagtatttggtaatggttatactaaagatcaatgtaatttaggagcaaatattattttaatgtcttaaacacttaagttggtgttactcaattcatattttcgaaatgagtgatcaa

SEQ ID NO: 65781 - DNA, 518 bp, Arabidopsis thaliana landsberg
  unsure (1)..(518): unsure at all n locations
ttctggtaaacactcactcgggaaatgcatggtcttcgatttacgacaagctggtagtctttatattcccttactcatgacctcttctactccatgctgatctgactccacgattacattcgtttgtgttgaggtacgtttttcatctctttatttagtctttggcgagaacggaatagtaaacggaatggtgagtcacccacactagcctcaaagcttgcaaaacttatcgataagaattgtacgaaaccggctaagaactttggtaaatgactgggtcaactaaatacaaaggcaggctgccatatatattgatttcgaaacccataatcgctaatgatccttccaagttgttatactcttctataacttctttattttgcattcattgtaaaacccttttttgtgaataaaattttacatcaaaaaaaaagacaaaacanaatcaccacgaaacgattcaacattagataaaaccctaaaaacccagatttgaaccttcatccccaagcatcaaa

SEQ ID NO: 65782 - DNA, 1036 bp, Arabidopsis thaliana landsberg
aacgggctttagctgccctctttcctttgcaataatgggcttttatttttttttgtagtagtttttttttctatacgagtaagttgtagattatttcaagtaagagacataaacaaatacagtataaccacgtttgtaaattttggttaaattctgcttagcaaaatgccccccaaataaaattaaatactataaacaccaagtttacaagccaaaaccaactacactactacagtatttttaattttaaagaatccacaacatacaccattaatatcataatctcaaacccaactttaatgacttttgattgccacttaaaacatctctacaatacctcattttacatgctccaattccccattaccaactataatcttactccatctcttattcaccacttacatttttccaaatcacattctcaccaaaaaaaaactgatttcattataaaaactctcaacatttttttccaaatataatcaaaatagttttcaaaagtagtcttgactttcaacattactttttttttttttaacatcttcattttattgatattgtactttcaacattccttttcctccaaggctttcaaacaagataattttttttttaatttatttaaaatctttttttaatgatgtataattggagcctcctttaaattagggcccaaacggtggcttcttttagattataacccagggccggcgcaacccttcttcttaacaaaaaccttttgattccaattgttcttctctcttcttcttcttcttcttcttcttcttcgccgcttcttctctctcgaattcaccccatctcaagtaagcttctcctatttccttgttataccaaacaaacaccatcttcaagtcaattgattttgttaccctaattgatcccgtttctgtgttgtaatataatcgaaaaatcgaaactttctgttttagagacatggattttgtgaaccctaattgttaccgaatcgttgatatctgtgacgtatataaaccctaatttcgttttcatgtttctt

SEQ ID NO: 65783 - DNA, 1430 bp, Arabidopsis thaliana landsberg
tcggtttcatattttaactaaaaaagctcacatatgtttccagtaatatgtcaggttgaatattttaacaaatttttcggttcaagatcttacaaaacgaggaatttgaaaatctgataacacgtatagaagacatcttacaaaaagaaatatgagagacatatatctattatacgtgtacaaatcgtatgtaggtatatacgtgcacatatattacaaagacacaaatatgaactttaaaaacagctgttatacttggtcgtacattgttaatgtacaatatattgctttcccattagatgcattttgagatattaatgttttttgttaggtggatgttttcattttgatattttctgatgtcgatacacggtcatacacgatccttttgatagtttcttcagatttcttatcgatcatattcttttccgataaattgctgatgtgtttttttccttttctacttatacaaaatcacctagattatctaacacttatcttttaaacaatttcgacatcttaatattttgcaaatctaatttttcataagttggtcgtatgcgaatatgatatgcatatggtagacaaagcatatggttatatggtacgttgcgaaaatagctactgttttatggaatacttagttcaaaatatcagctacattttaacccaaaaaaagaaagaagcaaatgataatttggctgttttcggctatgcttttattttatcacatgcataattgagatcataatttatacgtacatactatatatacattgattgtgccatttctagtaataccaaatgtattttttgcccacaaatcaatcttaataatgggattggggcacacagaagaattcttttgttctttccatttcgataacgaccctagaggttttgatcaaaagaatattaggttatgttccccattttctttcccactttctcaaatttgctcttctgttggataatgaagggttttttgattaaattcacattccacactactactgctagtgttactattgccccaaatgaaatagattaatctactatctttttgtataaatatatttctatatgctgatatatatctttaaaacattgtaatggtttttcttcctccaaaacttgagagaaattacggccaagagtttcagaaaaagtttgggctcctttaatttggttcaaaggctgcacacctaagcttgctttcaacttatgggtcacaaatctggagaggctgccaacaaagtcccgtctagcttcttggggtcttgatgtctccactacctgcagtttgtgttccggatctttcgagaccagggatcatttgtttctccattgtgctttcactagcatcatttgggataaaatcatgattaggattgggcatcctgctcactcttttagcgactggaattcca

SEQ ID NO: 65784 - DNA, 1931 bp, Arabidopsis thaliana landsberg
atctaaatccgcgcagatggcactatcgaagcttaaagtcaggtggaggataataaacaaggtaatgtggatgcctgatagaaaccggttaccaaggataatctttgtctgttgcttgctgcacaacattattatcgatatggaggatcaaactttggatgaccaacctttgtctcagcaacatgacatgaactacagacaacgaagctgcaagcttgccgatgaggcttcatcggtcttgagagatgaactctctgaccaactgtgtggaaaaaattcatcagcttgattactctctcccggttcttgtggtctttctatgaaagcttcatttgcttctttttccttctggtaattttgtttagcataacattttatcgtttgatttgatctattgacatattcttttataggacaaacaaaaatgtgtatcttatgaatgttatttttaatttatacaacttgtatgtttcatcgacgtctaaactcattgcaattgtcattatagaatgccgcatagactgatttatgttactagtaatcatatttattattgactcatgtatgcgatacataaagaggaattggtttgcgtgagaaacaactaaacaagtacatttctaaatctctctaacttcaaaaatcaaaacatattgaaacaaaaggaataaacatgttataaccaatacatagaccgaacaaaaaaggaaacgatacagagaacccaaagaaagtctcattttcagctttattaagagcttttactgataagcaacaatggcttctaaaggaatggaggaagtatcacccatcttcttggatactttggctttccatcttttccatcaaatatctgcaataccaatatcaaacaatccacaataagaacattatttgagaattttcagttccgctaaaatcatatcttgagaccgctatgtttacctttctcagacggctgtgctttccaagagcccaattagtcatgattagagcagcaacagcgaggaaaacatatcctgcaatggtctgagtagcgatgttgaatcctagccattggtaaatctcggtagtgtaattggcacatgtaacaatgttgaagaggaaaccgcgtggaatctggtagcctccagccccactggggtccctcagattcttcagcaatatgtgacagtaaaagtttgcgacttggcaaaccaaaccaaacccgaaaccaatcttcatctgaaggtcactaactggagtgtacaagggatggttgacgtaataagcaatgtaagcaccaaagctccagtaataagcacagttcctgaacacattcccgattggggaggttgcgtggctgaaccgatgtacgaaaaacgtttctaagatccgtttgaagtagtgaaagcaccagtagtacatagcgtacgtctggaccggatggatcacacagtcctctccataaccaagaaacttgtaaacagggaagtagtaaaagacagggtagataaggagagggccaagatactcgaagaagaagagtgtgcggtaggaaacttgtgcccccaggtctttgaagactacagttaaggagttgttgtttccatcacagtactccttcagtgatttcttgctattgaggacaacaggtttgtccttcgatccaggagtcacgggaagagtcagtctttgcctcgacgggtaaaacttcttagctgttgaaacaacaaaacccaaatcaaacagtttaatacctactgagagaaaatcaaactaagatttgaatgaacgagataaatataatacatacagaatatacattgtactgtatagtaagatgatttcagataattgccattgatggacaatctaaagtgaacctttattaaagctaaaaagggactgatccataaatgacaaaaggttgtgatgattaattcaaatcc

SEQ ID NO: 65785 - DNA, 534 bp, Arabidopsis thaliana landsberg
tcgcactctgatacagactatgaaagcttagaagttgttatagaggccctccaaaccgacaaatccgcatgcgtgtcctccaaatctgcgtataccatctccctcttccgacaggtggtattatgtgctaaacgtcagatatggcagattagaggccacatgtcgcccttgtacatcaaacttatctcctcggtcatttacggactccttgtcgggtccatgttttatgaccaaccgcaaaccacggacgggatgtactcacgagggggcgtgattttttactcatctattcttctggcctggctccaaatgtctgaattagaagaagcaatgcagggacgtgacatcctcagtcgccagaagaaatttgcattcgtccggcccagtgctgtgtgcctggcccgagtcgtcgcagatatcttcattgcagctctccttactttcctctacctaggggttgtttattttctgtcagggttgaagtctgatgtgagtatctgccaagcgattgtgcacccagtcgctaactctatc

SEQ ID NO: 65786 - DNA, 745 bp, Arabidopsis thaliana landsberg
taaccatttccaattgagaggcccaagttaattggaacctaaggaaaattcctccattatattaatgagatcagatgaaagtccctatgactttgtgaagaggtgacgaaccgaagaagaagagaagaagacgacgagaacagaaaaacgaaagagcgatagcaattaatgcttctttgggtgtcttgtgaatatgaatgtgtgattatgtgaatgtgaatgtgagcttttttttttggaaggtcgaaaaaacaaatctctttcttccactggcccttttgcttctccatttatatttgtgtgtacattcacatgtaatattatcatatatgtgatatattttattcctattatattttatacattttctttgaatgtacacattcttgccacgtgttcttctcgtaaagatttgtttgtttatgttcttatattcgcaaatataaagtttttctcgacatcgaaatttactaaatctaacgaatcatcatagtctctcatgtagtcctaccgtttcatacaagataataattaatgttatggcctaattatttggctctgattgttttcggagggagacatgtattttttttaggcacaagacaaaatttaaaattattgaaaacgatatatgaaggaaatagttaggaatatcatcttccatatttgtattatttataacataaaagaagattatttttctttttctaagttagggtgattcttggtacaatttggacatgaa

SEQ ID NO: 65787 - DNA, 770 bp, Arabidopsis thaliana landsberg
aaacatgattattttgtttaagaagatgagaagtctcgaaggctaaagaagaggggcaaaaagaaccatgaagtaatttcttggtctcttcctttcttatgtccattttatgattttgatattttgctctgactgcctagctagctatgaaaactttaattagtcacgtctttgcatcagattttaatttgttatttggtatgaaattttatccccaaaagttgttcaatgacattcaaaattaccgtattcttgttggcatttcaaaatctacttttctttttcttgttgcaagctgtttgatcataattagatttcaaggtttgaataatggctcttgatgttttaaaataaagagacaaacaagaataacatgcacatttgggttctcaccaattccaacgattatgttgtctatagcagtcaatccagttagatccttgccaatcaattgtgccccaatgatatcgttaacatgtgtcttttagtattcagtccaacctaaatcacacaagcaagttacgatgatgcaaatgatcgttcatcacaaagccatactaggaaccaataaccattatcataaaatgaaagtcgtaatattatacaatatttttctataaattatattcgataacagatttatcattcatgtaggtcagctaaacctaatcgtttcgtagtaaggtttagaccaacatttattagtctggcatattataaatcccattttcgtctatctcaaacttctttataaaattcaaccatttgat

SEQ ID NO: 65788 - DNA, 488 bp, Arabidopsis thaliana landsberg
accccgcactacaggagcaataagcggatgctgccacttcgtttagccggtagagaagccgtcaaacgcgcagttgcgagcgatagatttcactctgggagtttgacaccaaaggtgccgagggcgatcacccggatgacaataaatctgatatttctctcaagaatatgctcaccagcttgatatcgatgaacgaacgatagcgataacttcttctgcctgttgtaccggagttatgcgagtatcgcaaccggtctcctagcggcttcggtgcgatctgcggaatggctgtggaattttgttcaacgagcgtggttttccatccgatagttttctttctagattttcgatccaaagcgaaagtatatatcccaggacatccctcgatagaatatctattcgaacgattgggtctcgagacagcgcttcctgttagaaggtggcgggtgttaacaggcgagggctcaaggcacagccttcaggggcat

SEQ ID NO: 65789 - DNA, 984 bp, Arabidopsis thaliana landsberg
  unsure (1)..(984): unsure at all n locations
taacgatgtgtacaatgtactgtatatatactctatcacattttatactatagagtaaaatatactcatgataatattatagttaatttagtatttagatcttgagaaatgaaatactatataaaaatataaaattcgagggatttagtattaaatttttatggagatttgcaaaacactgaatttggtttgcaggcgccaagatgcttctgtcatggggcgtagtaatggaggaaaagagggagagatctagttgtaagtgaactggcttttatttctattttagtacttagattataatatcccaagtatattttgtttacctagcttaccatttctatgaagttcaacaattccgacaaatacttgacttaaaatatcaactttacataaaagagtttcatgtttgattgattatttttacctaatcgattatatattaagagtagcacgtttgcacaagacacaagacacatgagttccaggaaagtaaaaattatcttagtgtcgatcacttgtagtataatgtttgaatattctgattgaataaaatataaacttttgtgattttgtttgttcataatcgaacgtctttgacagtcatggtgattcacacatttaatcaaactgtgtataaaagatgagagcttttagaagagaacgccaatggttaaattcaaatcatactttaatcttttttttattgttgaatttacaattttcttgaaaaaaagaaaattcgtggaaataattaatgtcgtaaccaataccatataatataccataaaatcgtagcgagatctttggttggtgtcacatttttagtttacaagagaaaagtataaaactaatgggaatatgtattagattatattcaattggacccacaatttgattatggaaagtttcctgtcatcttctgtctatttttgcttatcataagttcgcttatcataagaaaattatgaanactaatcatgaatg

SEQ ID NO: 65790 - DNA, 279 bp, Arabidopsis thaliana landsberg
agatagagtgagaatatggacaaaacgaagacccttttttttgaacacaacgtcctaatattgagagtccggtttcacaactaatcggcaatctctcaacccaatgcaacccaatgcaattcaattgaatccagtcaaaacctagctaggagggccaggcctgcctatgtcagggaagttacgtgactcatcatacatacataaagggtttctctgcaaccacccgactaacatagcacaacacatcaacaaacacacaaaaaaccccccacctccctt

SEQ ID NO: 65791 - DNA, 624 bp, Arabidopsis thaliana landsberg
aaatagaggtaaatcatagggataaacagtagtccatcagaaaaaattgcgacatccaatggagtttcgctttttcaatcgccttttactttgttgtagtaatttattgcatacaatttgtttttttttgaagtttaaaaacatgctaatagtcatgccgttataactttttttcaaaatgattgttcatacatctttgaaatttaaaacttttaaaaatgaaccttcttaaattttgattgaaaatcaatgtatttaattgttgtagtacacaattaattaattatgtagctaacttaaattattcaactatatcggtttagtttagttgaatatccaaatatatgcaccaataatagtgttcatacttcatatcatttataaacatagtcctctatgggcttctctacgctcacaagtcacaatatttggaagtctgtgggcttcaacaaccccacgttcttgcataaccttattttaccacgtattggttgaaaaaaaatgagagtttttatctacttcaaaagtgcatatgatacatcagtctagtaagaagataacatttaatttcatacttttcttaaaccggattttcattcatcagtattttgtttctttaacata

SEQ ID NO: 65792 - DNA, 712 bp, Arabidopsis thaliana landsberg
ctcggtggtcatcacgtccttcaccgccatgtgctccaggcggtccaccgagtattcgcggaagatgtcgaagccgcgccgggcgatcttctcggtgaggatggaacgcttcatcaggaacacgctgacgccgtaggcgacggtgcaggccaccagcagggcgggcagcgcgctggcgtcgtgggtgagttccagcgcgaacaggatcggcatgaacggcatgcgcatgacgccggccatcagcgcgctcatgccgagcaggggccacagcagcgggtcggtgccggggaagcacatcgcttccagcccgcccaggccggcacccagcgccagcaatggcgcgaggatgccgccggaggttcccgaggcgaggtagatgatccacatcagcgacttgacgatcatgaacaccacgatggccatgccgaccatcttgccggtcagcagttcgtcgatcacctcgtagccgacgcccagcgccttcggttccagcaagccgccaatgccgaccgccagcgcaccgatggccggccaccacatccagtggacgggcagcttgtggaacaggtcctcggccttgtagatcatcgccgacagcagggtggccagcagtccggccagaaagccgcagacgatggccatgccgagttcgccaagttgcggatggaactgcacggccagcgggaacaagggcccggggccgatcaggaac

SEQ ID NO: 65793 - DNA, 339 bp, Arabidopsis thaliana landsberg
ggcagggaaaagccgctccatgctcagaacaaaacttctttttcattggcgcagtgactcattgctgggcgtgtaaagccataaccggggatatcccaccacccaatgtcaatctatatatgacaaagtccaccattctatggcccgatctccggcattataggcgatgagcttaggtacttcaggcaggacgtctaggtattccttcgtatcaatccgacctattattccactgctacgaggctcctaactgaactgtaacctcacatcattgagcttgtgccacatctgccggagcgatgactatcccgagttacgagggctgaacacgaacataaa

SEQ ID NO: 65794 - DNA, 754 bp, Arabidopsis thaliana landsberg
atccaataaatcaacatcgccgtaatcttcaacaatctctttcacctttggctacacgaaaacgaatttagcaatctaatcgaaaattagacaaatttgaaaaacggaaaagagttctcgaaatctcgcaattacttcaaactgaagaacaaaatcttgaaccaccagagtctcgtaatcggaactacacgattctacaggctcttctctgcaattccggggaaagaaatcgagctctttcacgcgcctgagaaaaatgagaacaaatagatgaacaaagcagcacaaaaatcaatgaaagaaagagacgaaagagaagtagaaaacctgcgaatctcttggagatcgagagatccgtcgtgggtttcttcttccattgaagaaagctttagtcttggggattcattttggcgctactgttagagaactgaagagagtgtagttgtgaagttgaaagcagagaagacgatttcaattttcaaatgggaaaggtgaaagagaaacggaagcgaaacataactctccccgaggtttatacttttcttcaacattaacccctgaattctatttaaatcaatttgacccagagggttgaagttaattgcaattccggttcaatttattatgaccaatcgtaacgtattgaaccagaagactctttaattttaatctgtaacggttacttcccctttaaaaaaaaaaaagaaaaaaaaacttaattaaaatttaaatccaaaatccttatttttttttt

SEQ ID NO: 65795 - DNA, 454 bp, Arabidopsis thaliana landsberg
ggggaagcacaagaggtggacgagaatacacattcggtcaatgttaatgaagaatcaactgctgaagctgcgggatacacgaagccagaggccactccccaaactgacccggcagtcacaaagtcggagtcagagccagaaactgactcggatacgatttccgaatcaagacataaggaagaggagcctgcaccaaaagactgagtgctgacatgtggaaaccaaattatcctttaatgtgacgaacggctctcaaactacgattgcaacatgcgctattcattaggtggttgatgttgtgggtcgctccaggatttatattgatgaaatatactttactacagaatgaatgaagatacccatatctggtgtacaatacaccaacaagtggagggctggggatcttatggggtagatccttcgacttttacaccggtgttcggatgatctgctg

SEQ ID NO: 65796 - DNA, 837 bp, Arabidopsis thaliana landsberg
gttcttgtcttggctacaaacagacctggagatctcgatagtgcggttacagacaggattgatgaagtcattgagttcccacttccaggggaagaagaacgtttcaagcttctcaatctctatctcaacaaatatctaaagatgggtgataacaacgaagacacaaaaccgaaatggagtcatttgtttaagaagctgtcacagaagattaccgttgaagaagacttaactgataaagtgatttctgaggctgcaaagaagacagaaggattctctggccgtgagattgcaaagcttgtggctggagtacaagctggagtgtacggacgagcggattgtgttttggattcacagctttttaaagagattgttgaatataaggttgaagaacatcaccgaaggcatatgcttgcttctgaaggttttcagccattactcttctcttagtcatttggattttgattatacatgtcatttacttgatcagaaagaagaatctgattgttttaaaatgagtcctaaaattgaatttttagattaaacatgttaaagagttttacagaatcttgaagtcttacatatgaacacttctcgttgttaacattagattcatttctgtctgatgagggtttcttaaaaaattgttttgttcatttgtaaatctggtttgatttcagtatataacattaagcttaaatagcaaaataaaaataaaaatataagtaaaattaaaggataaataaatttattctggatacaaaaatatccaaaaacaaaggaaaacaaacgacgaataaaatgaaaaaccaaccaactagaacaaattaaaaaaaaaaa

SEQ ID NO: 65797 - DNA, 263 bp, Arabidopsis thaliana landsberg
attttccacagttgactacgtttgggcgccattggggaccgtatacaaaaggaatgccagtccttctgcccatacaccaactgggttgccataggggctcacaactaactggttaggaatgccttgcgtaaatatgatagacagtatgatggatttccttttagagttaactggtggatgaccgctggaacggagtccagaggcgtgccactgtaaggagagaccaaaaacatcacatgacagaatgatcctaatacgagcat

SEQ ID NO: 65798 - DNA, 1866 bp, Arabidopsis thaliana landsberg
cctatggctggctctctgacggtactttctcacatccttcaatcttgtaatgcttgaataatggcttaaatatgtactaaatattgagtggagatatgctttgtttgattgatgaaatgtgtttgagagctgtttctgtattggctttctagattgttgtattagacataggtagagaactagtttagatcttgccatttaagaagctttctcgatcagtgtagattctttttggttgttgctatggcgaaaaactggatcagttgttgttgtctttctgcttaacgttgtaaagagatagcggctcaattggtctagtttttcgatcttgtaggctgacacaagtgtagatgaagacaacgaagccaagatctgggtataaacgattagaacgggtttcaggcaataagataggctttagatacacatcaagcaatggttgatgctgcattgtgttctaaaaaaactggttcttacatatcttcttaaaaaaaatacatgtacccggaaaagtgccttcttttcttgttggttatagcatttgagttattactgattggtcttatactcccagcttgcaatgatgatgtgtgatgagttagccagaggaacaatgaagctacagtttatgtacaaaactctaccttttaaagcctttcttctttagaaaaacttaggaacgaaaaccctcttaattttgtttctgagtttcttggagagtttttgtttgttttcagcctattaagtaagacatgttgtattggttggacgagtaactgatgtttggtataatttatcagcttgcaaagaggacttttgatgatgtctacgcgtacccaatgcgagattgttgattgcgagagaaggtttaagagtatttaggcaaagaataattgttgtactgttcaaacacaaatcatctctttgtctttagttttcatatcaaagacaaatgtccaaaatcttttgaatcaaatctctatgatttctattacatcaacatacaaactcaacaaaattgcatcacttctactaatttaaaacttggaaacatccatgcgtttgaatactataaactataatcaagattctaccaaatatatatatatatatataatcaagaatctcatcaaaataagtagggaaaaagtagcagatttggctatcaaattggcacattaacttgtcgacccttaaacttgaaagaaggtttcaagtttcttcttctggtcccttggatcttatgaaacattgtattctctgccaaagattcacgacttgaatgggaagctttgttaaaggatctctttgtcattaatttttcatattaaaaaaacagatcctttcgagatatagaattacatctctttgaatgtggattgacacaaagtacaaacactacagtttctttgatccttaagtttctgcaaccaccaccactaaagctcgctcttctgatggctgtgtctgttcttcttcttgtggaactgtttcttcttcctgcgggagtgtttcttcttcttgctcattctcaacaggctcaacttcctcgggagttagctgtagattttgtctcctataccgaaatatcaccaggatgataaaaactgcagaacatgaaagacgtatatgttatattttgatacaaggcaaaccaaatactctgtcaaccattggttaggtaaattacctgcaaatattcgggttcttatgctcgtcaagttccaaaacgctgtcaccgcagagccagccaagatcttcttgtgtgagcagactccccatgcttcaccaattctagttttcactctttcaactgcacaaatgaaactcaaaccagttcaagaatttaaaccattgggccagttg

SEQ ID NO: 65799 - DNA, 363 bp, Arabidopsis thaliana landsberg
aacaactgaaacatgcattgtttcagacattcttcgctcgtaggacatgaattgtgaaggggctggacggaagggggatgattactcggatataggagagtgggggacgtcaataaaaaggagaaattatctttgggtgaagcacaacatggtaataatgttagcaaaggggaaatttgcttgaaaagaaaagcaaattgaccatgtagaatttagaaatatgacttatgtgggattggggaaacttgcagcgccagtgagcgtatgaaatagagcaaggaagtggccttatgacaatgtggatgcgtaagagtaggattaagaaaatagttgggcttgcactggtataggtacgatgtaacc

SEQ ID NO: 65800 - DNA, 535 bp, Arabidopsis thaliana landsberg
gttgccaagaataaaattttagactgcttttatatggcttttaatgttttatatattatcacaaagagagaaacattgtatggtataatggtaatgtgcaacattagaggaaactaaattgaccaacgacctgtaaggctgtaatctagtaagtaaattgagaatttgagatttgtaacaattttttgctaagttaaagtaaataactaataaggcatcttcggaattttggtttgaaggaagtgttatatattggcaatttggctgtatatatcggcaacatcgtatagtctcataatgacatcattctacaaaaatgaagggaattacgtctgtttttattaagtctaacatcaggttagaactggcttcaatataataacgttctttacttattattaaggtcacgttaagaattttttgcttcggttcctaaaccgatgttataatttgactgtatgtttaagtcactttcggaaaccgacgctaggtacaataattcatctttttactgccaaatggtaatactaaaatt

SEQ ID NO: 65801 - DNA, 573 bp, Arabidopsis thaliana landsberg
atgtttctctaaaagtaagtttttttcgtccgggatatattttcataattatagttttttttttgggataaaatgtaaatattattaccaaaaggaacaatttctttacaagagcttggcgtagctagtggttacaattagactaaaaaaaaaagtttaaaaagcctaattatgaaaagaagttgtgaaaaagcagagattactcatgcgcaaaccattgttgaagcagatttgcaaaagatggatgtttacgacgagctaaaattgtgtctctaatgtctatcgacgtctttgaaaaccttgaggatcgtggatgagacatagttgtgcaaacggttgttcctctccttccaagtcatgttgaggaaccgcctattttttattttattgaaacaacaagttaaaccgaactactatttattgttatttgttaatagagatgaaatttcaaatcacatttttttcttcttcttatttaactaacaagtaataaattagatttgtttataagaagcatcatgaatataaacgagagcaaaaagacgatgatcttcatatatacaatttcaatga

SEQ ID NO: 65802 - DNA, 1653 bp, Arabidopsis thaliana landsberg
aaccaaaaatgtcaccggccataaagcttgcccacgcaggagccgagtaagcagcagctaggagatggtaagactttaatatatccatcaggaacaagttcccatcccacaagcccaatcaaagaatcgaattcagctgcgaccagtgatgatgatgatgatgaattgatgatgattaaactggatccgccacacaaaaaccgattcgaagaatgatcggaggacctaatgacatgaagtttggtataaacaaagaaatggattggagaaaacgaagagaagccaaggaggatttgatcagacgagctcacgtctgcaatggacgacccatgagaggatgatgagaaaaaacaaacaagacaaaagagatgcctttttttttcatctaactttgatggtaaaagaaaacgtaaaaacggcatgcattgcaattgttagcatttaaaacggcaagcagatgttactggtactgactcatcatcaccgtacttctcttgcctcgtgtctcccgactctccttactttactctccaattcaattttagtcaacaatccaatctctctgcaactaactactacgccaagattaaataaaccccaactgcttgcttaattgctcttcagacaaaacatggcgattcctaccaagcttctcctcttacaggcaatcctcttcattttctgtcttgtcctagcgtttcttgccaaattttccttttaaaaaaaaaacttgttatgttttctttctggtttttttcgttatgcaaattgcatatactttgtgtgcttcttcttattaggcctttgcttttattgaacgatttccgcctctgacttctatcgatgctattatcgtataattgggaatgattgtcatgttgcagctctttacttcctcacttttactcaccgcaaacctgacccactcagaaccaaggtaatttgcattttagtgaccgagacatatggccttccttttttctcaatctcttattcatctctctttcggtaatctgtaatgctgctcagtaataatagacattcaaaagagtgttgcgctatgtatgacatttgcggacaccgcagcgatggaaaagtccttaactgtccttatgcctccccttccattcaggtagacaacttttcagatcatggagtaagaccattacttttccaattacttctgcatgtctgagtcaatctgacattcctttctgcagcctgatgaactgttttctgccaaaatccaaagcctttgcccaaccataagtggcaatgtctgttgtacagagactcagtttgacactttgaggtctcaagttcaacaggtatgacctttttcttattctcttgtttttgctattatcagagcaggccatttttactaattcgttgtcaatgcaatctcttttaggctgtcccttttcttgtgggttgtcctgcatgcttacggaacttcttaaatttgttctgcgagctctcctgttctccaaatcagtctcttttcatcaacgtcacttctgttgctgaggttagcttccatttttttcagcttttgttggttacttgacacccatttatatggttaacaacactagctagttgggatttattctaggtgagtggaaatatgacagtggatggtatagactt

SEQ ID NO: 65803 - DNA, 544 bp, Arabidopsis thaliana landsberg
aacaaattctggcgccttttgccttcctcgaacgattacttttaagtctgggtcatttcgggcgtcggctcgtttcccaggatcacttttccctgatgcacagcggcgatcgagaagtataccacgccaaacacgccaccaactacggcgtaagctattattcctcctgttgtgttatctgcgagcttcaggccagtaccgccgttgataattccaagcagaagaaatatccgcccgatccaaatatggacgtgtgtccatcttccggctttttgggctttcttatattgatgatggtgccaaaagccaatgaatggctggataaggagaaagacgacaatgacagttcctaatatcgtgtggctattgatatggagcttgaatgttattagcttaacgggaaggtacggcaatccagcagagggcataccctgtcaagaatctttccaacccgaattccagtggccaggccagcaatcatcatgacgtacgccaataactggcaggcaatatgtgcatacaccccgtactcaactggagcact

SEQ ID NO: 65804 - DNA, 403 bp, Arabidopsis thaliana landsberg
catgagcaggcccgtctcaatagagtactactatagtctatagtcaattttcgacaccggccttagatattgtttcgttgacttttgcagtttataactttacgtagcatgtaaattcaaagtaaattctatatgtttgaacataatgcggatataatacgcacctgtaataagaaaattggcgaggttcctctgggtggtctgtagtcaacacacttttttaatattatgctatataccggaaattatccaattaaaaattatccatatatttagttaaaatataaataaatgaaaaaaaagttagcaaaattgtgcctacatttttttataaatcaaatcgttaataacaaaggtgaatcgattggatatataaaccacactacgtaaacttggaattatt

SEQ ID NO: 65805 - DNA, 488 bp, Arabidopsis thaliana landsberg
tggctccggaatccacctcacagtccattgactatagtctcattttatacgtttgtatgtagagtaattaggtcggactccgattcgccgggctgtcaagtgcaccgagttgaagactgacatcgatccatcaacgtctccacctaaaagcttttgtggacgctgacgattcggcttgcgtggcgggccccagtggcagacaatacccgcggtatggttggtcagggccatggaagccggctctgacactgtcaacaggtggctggagcggattttatcgaagttatctcatgacttgaataatgtgctgtggaaggctagaggcgactacgtaactgactcgatgtctgcgcagccgcaataagtttccgcatcccgctcggaggctcgttccacgattctatagacaatggaaagcccaggcgaagccagtcgcactcgtcagtatctacaactaaattactcaccgtccacgcagtggcatgatg

SEQ ID NO: 65806 - DNA, 572 bp, Arabidopsis thaliana landsberg
cacagccccatgggcaaagaacaaactgtcgcacccttgttttgtgatagagcgaactgagcacggcgtgggggtgtatcccagcttgtagatttcctcagcgacaaggccagctatatttttgaaagcctattggtggtcagcgtacggttggaaccgatgcctgtacatgagagcatacctcttccccagactcggcaaagtatagtccgttttcatcccagaaatcatcatttccaccgttaacagccttctcaacaagttttacaaacagctgtgcaaggtccgcgatatggattgcgccccaccggctcagaccctggccaacataaacagcttgcttttcctgtagcgcgtttttagctattgaaggaacttgaatgctccgctggttcaccggtccactgccggtgccgaagataatcggcgggaatattattgccgttctgggaccgcttccggcaagaccaatgatgaagttgtcgacagcacggcggtccgggtatatgcgaatcaagtcgcggacggcttgcattccgtcgaggtcatcgtagactctgtctgatagctcg

SEQ ID NO: 65807 - DNA, 758 bp, Arabidopsis thaliana landsberg
caactccgattgaaacaaaacgaaattagagttttgacaaagatttatacatctttcagataagacgacaaaatagaataattcagagttaggagatttattaaattgtatagcctcacaaacttctaaaaacagatatgggaccaaacaaaagtaccgttttctgactgtgatataatctacgtattactacgtttaaattgtcgcaatgtttagaagagaaaatatttaccaataaagcttattttacaccaaattaaatagaagatatagtttcaatgtttcaaacctttatgttaagaaatcttacgttttgaacaacaaacaaaatcttacgttgaagatttagatccaacacacacaaaaaaatccggtttaaatctatcggtacactcaggatctaaaatttgtaaactaaaaaacaaaaacttttaagattcaactatctcttacgtaggaaaaaaagagaagagtcaatttaagtggtatatatcattttccataaaaagtgggaaatcacatgggttatatattttcaacgtaaggaagtgaaaggtcgaatccatcacatcttttttaatcataattgagaaagtaatcaaacttaattacgatcttcacgaaatggcaacgggtaggggatgcaccatgcacgtgaagttcacggggacaagacatttcttgcctgttggctgttgcactcattacaaccttttattttttttggcaaacactcaatacaaaccctttaaatttct

SEQ ID NO: 65808 - DNA, 2424 bp, Arabidopsis thaliana landsberg
gactgttagcttaatcgtggaatctgcaaatgttggatcttcgagctccatcacaattttacctctgtgattcttatttcttcctccggctttgctttcaccttcagattcacttaatttcagaaatacgtacgaagaaacagatgtcctcaagtcattaaggtttgttttgggctcacaatatttaatatataggcccatttaaaaacgtgggccgttggaacttcagcatatttgagacaaatattattgtttactacatacagatttatatacacaaaaatagaaacttccgatccctccatcttagacggtgtctttagacttgtttctcagctatttcatactctttcctctttttttatcacatcatcttcactatccacaacttatatttatctatgtacatatacacaagacaaggccctaccaaaccagcgtcaaagagcctcttgcacagactcatatatgcttcaacatctctcggccgttggatcttccttgtcattccttgcatcacagccactcgatcaatatactccggatgcaacccagagtcgatcatcgataccaatgtctctgcagcctcttcgaagtgccctcctttcacataccctctgagcaaccatgacagagtcttcttctttctctgagatcccatgaactcaactcgtgtcagtagccgagaaactgcattaacctctttctgtgaagcgcagatcgccataacaatgtcgtggaggtcagcttcaggttctctccctgcaagtttcatcttccagagctgtttctctgcttctggtccacgtcccgcacatatatacatagcgagtagcctctcatggaccaccccaataatggaatcattttcttggccttcctcaaccgcccaagttgctaactgcagtccacgagataatgtttctgattgatacttctcaatgagtaccctatcgtgatcatcaatctcagcaacaaaaccagcccgtgcaaagcgtttcaactcgcgtaatgtctttccaagactattcagctctttcactatagctgtcatcgcaataagatagctgtacgcttctggcttcagccctgaaagtcttaactccataaccatatcaactgccttcctataatctccatcaacctattagaagaaacaaaagacacatatccacatcaacaaagctagaccaagaaaccgataactaacaagaaggtataacaactatagtcatcttaaccacttcatatcacatctttctgatctcaaatccaccaaaattataaaaaaaaataaaaactatgaaaaaagttcaaaactttaccataaatttccaagcaagatacccaacaggtccaccttttctaccttcagaaccaccaccaccaacaacactataaccaaaaccatctctccttcttaaaacctccttgacaaacaaaaccgcactttctttcttccccatctcacaatacaaagcaataactttgtccatcatactaaaaccaggttttaaaccaacacaatccatctcaatcaataagtcgaacacttggtgtgcattacattcatcttcaatcaatttcttaacccaaccacacataatcgaaaccattaactccattatctcttcatcaactctattctcctttttcaaccattcaaacacttctaaagtacaccatgaatctctaccttcttgtgcgaagtaaacaagcatcaattgcaattctctagaagataatcgatgattcatctcttcgagtatatctgatggttctctagtcatcctctctagttcctcaatcgcttcgaaaaatccttctcctatctcctctgcttctccttcttcctcctcgcttgtgatgaattggtctagctccacggaacgtgatagtcccatctcgcgaaattttccagcagagtagtttagtttcagattgcatatgattcgggaattgggttttacgctgtggtttcgatgaagtcgggggaggaatcgtcggagagaaatcgtcgagatagtcaacgaagcgaaaacatgagcataagccataactaagttttctaattccagaagagaaaaaatcgaaaggaagagaaaaggtttaaaattgcttcgggaaagtttcaaattcgaaaaactttgaaactcagaacttcaaagattttggtgtgagtgatttctcgatagccaccatgagagtagaagctaagataatccatgaaattaaaagcctttaccaggaatgaagaagacaatgaaaggataacagaaccaaataatttattttattttttggtcgtaggattcattcaataaaatgaagggttaagattgagtgagctttcttaatccaacggtggatagtctttgaaatgaagaaagaggctactaagcggcttacgtgtcatggcgtcaa

SEQ ID NO: 65809 - DNA, 203 bp, Arabidopsis thaliana landsberg
  unsure (1)..(203): unsure at all n locations
accccgcaccngccaccacaaaagcacaaagagaagcgaccaccgcacgagcaagaggaaaagccgccaaaggcaacaagccagcgggagaaccgnnagaaacaacgncaaccaagcgacaaccacgaaacganggcgaggaacaacangaaacngcgcaacaaggaaaacaaanccaacaacgnnacaaggagcnccaggac

SEQ ID NO: 65810 - DNA, 545 bp, Arabidopsis thaliana landsberg
tgaggaagtctcaattatttaaaccaccggggtgatgaaataattatggacttttcatgaacgcgaaacttattaaaaatgatctataaaaaaatattgttggtggaggagaatcacaatatttttccgagagaaaatcacggaaaccgatgtagattctctatctccaggttggccactttctcattcatataaagaacaagacagatagagatagagcgatctaaagaaagctaaaaacatggagttttttttgaattttctttaaattcccacgacttttctcactacgcaagaagagcctatttcttctcagatcttacctttccttcaatctctcccatttgaatcatcattttgtttctcaaaaacaaaaaaacaaaaaaaatactttttctctgcacttgagaacaatgtgtagtaacaacaacacaagtagtggaagctatggagagttacagttacatgatgagtcctctggttcttgtcggaagaaacagaagaaagacaaagtacgacgaagaggaccttgtgttgctgaactc

SEQ ID NO: 65811 - DNA, 450 bp, Arabidopsis thaliana landsberg
atatatcgcccacagcataactcgccgagatgcgtccttcgacaatcaccactctattgctggccgagttattccgtgaccggactgcatccacatgctccagtgaatccagatgagtatttaccacccgatccaatccaggaatcttggggagaaacgggtcgctatattgtcccgtagcaactatcaccgcatcaaactccttctgccaccataaatcccttttacccccttccacggcttacgggcgcctgagcgtcaacctacatttaccagaccatgttttctccactgatacaaccgcggtctcaaacgagatagacccctgaagccactcaaccaattcaaggagatattgcgcaacagtataccacgggcttgttgcattcccgttcccatacctctccacggatataggggaattcttctctggaagtggagtgtgagtaa

SEQ ID NO: 65812 - DNA, 599 bp, Arabidopsis thaliana landsberg
cgttgccctgatgccgaataccattcccccggtgcactccaaagcagagatcgagtacctgatgaacctttcgaaacggagtttggtggatgtttatccgctgggcgccatatcgcataaacgggagggtaaagaccttgccgagatgtacgatatgtttttaagcggagcaaaggcctttacagatggcaaccgcccggtacaggatgcaggattgatggagcgtgccctgctgtacgcacagggctttgacgcactgattttatcttatccggaagatactgccatagcaggtaaagccaaggttaacgaaggcgagataagcacgatcctgggtatgaagggcataccaccgcttgccgaggagctgatgattgcccgcgacctttacctggcagaatacaccggttcacggatacattttactactatatcgaccacacgctctgttgaattgataagagaagccaaacgcaaagggatcgaggttacctgcgatgttgcggcccaccacctggtgcttacggatgaggcattactaggcttcgacagcctttataaggtgaagccgccattgcgcaccggggatgatgtgaatg

SEQ ID NO: 65813 - DNA, 138 bp, Arabidopsis thaliana landsberg
  unsure (1)..(138): unsure at all n locations
gcacaaaagcacaaaannaagagacaaacncaaaacagaacccaagagaagaaaaccacgcacgaaannaagaaacggaacggaacaacaaaaaagaccgcgggacaggcgaaaacncacaaaaacncacgaggaaaa

SEQ ID NO: 65814 - DNA, 558 bp, Arabidopsis thaliana landsberg
aacaataaatattaacatgtgacttggtctatctcgcacgcttgatagtgtatacgaatgataggttttatgaatttaagcccggaaaagagcgaacaaggtggtaaccagggggagcaagtataatcttaaaaaaatgaacgcatgctccactaatcgattaaattactcatctttactcggtgatcttatacatttatcatatcgtatgattatctctattaacctcattaataactaaaaaaggggccaccaaaagggttttagtatttaccctatgcttgaaaagatatgacagagtgacagttactcaaatgaaacatcagttaatgacaatagaatcagcaccatatgtaaactatcatttaaaagaaaaagactcgtataatgggatagctggatctactgtctaatactcgctaaccgaaactatgtacattatgacacatatggtgtatgaacattaaatgatatataatatataagccacgctgatcaagatgcgtgctcatatatatgatcacatatagctctgttaagtagactaacctgatacta

SEQ ID NO: 65815 - DNA, 241 bp, Arabidopsis thaliana landsberg
cgaaggaacacgggccagaaacaaggtatttccaattagccccccgggagcaaaaagaggccctgggcacccaagaggagagacaaagacgcaaacgacaggggcgagcaaggtacgaaacaccacaatgctttgcagcacgcgaaaacaattgacgggaagacgctgtgacccccccccatgccaagcggaaaaagcctcggcaatacgaccaaaccacaagaggctgcccacagaacaa

SEQ ID NO: 65816 - DNA, 2045 bp, Arabidopsis thaliana landsberg
  unsure (1)..(2045): unsure at all n locations
ttagtcgagctaaaggtttggcaatcataacggttgctaaggctggggctttacgtgtcatacaaactcgggactggtctggtaatatcttggagaccagacgggtcatggtctgctccatctgccatactatcagtaggtcttggatggggtgcacaggtaaacttcatcttttccattcaagacatgcatgttagagttaaagatgcgttttcaatagccacataagaagttttgtactctttttgtcagattggaggtgagttgatggacttcataatagtgcttcatgatgtgaaagccgtgaagacattctgcagcagaatgcacttctctctaggcgcgggatgcagtgcagcagcagggcctatcgggagagtgttggaggctgaccttcgagctggtgacaaaggctctggtgtctgctatacttacagccgcagcaaaggttttgcccatctcaacttcatgccttaaggtttctctttatctataatttggccagactcgtagctcaataatacagaggaagttgaaatgtaaatctataacctgagagaagttgttgtgttgtgtgaacaggggcatttgtgggagtatctctagaaggaaatctggtggcaacaagaagggacatgaatgtaaagttctatggtgatccatacctatccacatcggacattctacttgggatggtggatcaacccaaggcagctgaaccgttgtacaccgccctccgagagctctatgctcgtttgcgcccgtaatctccattcacattacaaactacgctttgtatatatacgcttctcaaattcgtttctattaaagtgtaaatgtacataaattgtttctctctagaaccaaacagttgcttccccaaactgtgtgaacgatttgggatttacttattttatcaaagcttgtttacctttttgaagcttgtttatcaaagcttggttctatttgcatgtctattcatttgttacagataaaatgatattggcaagtcccttaaatatgatgcaaaatctataacgttcactatttttacattctccgattcattataaagataatggaaagaaaaaaaaccttgcattgcaaaaaaactcgtgaaacattagaggaatcaatcaatcatttggttccaaggcaaaagtacaacaaaagaagaaacatgaacctaaggtacaaagctaaggtacaagcaagccaccgttggaggtcttctgagacttcttcctgtaatttgagacactacaatttgggcacacatattccaacccatctgtttttgcatagtcctgtatatatcatatgttgcatcagtacacatattattcattgatgcttattacgagtttacgatgtgttcgtttagttaccttgaaggcgccgaggccaggccttctgtcacatccgaaatgagcccactctccacatgatccacagttcacccagtcaccagctgtgctactgtttcaaccaaaccaaaccaaagcgcgttaacaaacaaggcgttattaaccgtgtacacaagagagagagagagggttcttaatgtacctgcgacatattaaacagcactctccatctacatcatcatgagcatactcatactccaatagatacgtctcatagtgtcttttcagggtattacccacaccctgccataataaccccagagctgatgatcagatatacattctctgatttttcaagaataaatcaagtggtgagacaagaaaacaaaatcatttacagtcattctgtttgtgagtgtgtggttgcgcnnnnnnnnnnnnnnnnnnnnnnnnnnnnnnnnnnnnttacctacatggaacccctccccgtgatacaacctgcaacaactctcattattagctcaccaaatgtaatgctggctgccttggttgaacaaaatcaaatcattgcttaactacctctctatacaagttgaagagatcaagccgttttgagttgagaacagcatctggaaactccgctagtccccctggaggaactagccgggtatgtcctcg

SEQ ID NO: 65817 - DNA, 2912 bp, Arabidopsis thaliana landsberg
atagctttcgagtcgcagttttaaaggctctctgtttaaagttcagaaaacaggtaaacttcatagacacgtcgctctctcgagtcccgtgtacaacagaaacgcgtcttcgttttgtctctataaccccatcaacggcgtcgagatgttcacgtcgatgccacgtgtcgaattctcaataaacatgtcagaacgaaaacaatcctccaccgtccaatctctgcttcacgtttttaacctcatacaatgatacaagtaaacaaaagtgtactagtgtagtgtgaaagtaccatacaactagagaaatctggtgagtgtattaatgttaaagaatgggccaggcctttggtactacaaaatacaggcatcggcccattacaagcccaaattatttaaaagggattattgaggattttggtgcctttgttgagcattctgcatcatgttattaggctgtagactctgctgattcgtctgcatatttccatagcctccttgttgttgctgctgctgctgctgctgctgttgcgattgctgaatttgtgtttgctgtgtttgcatcattccgctggtgttaaacactgtaaagataggacaaatgaaatagtcagggaatcgattttgatgtaagaaaacatgttttagaagagatttgtttacttactctggtcacccaacatttgagacgaatggcttctttggggattggtacccgaaactccaaattgctgacaacaataaaaatccaaagagatcatcagattaagacaatgttcatcgttcagatttgggaaacataatgagtagaggagtttttgagctaacctgcatcctaggaacaagtgtctgagattgcatagatgacatgtttggtatctagaattaaaagaaaaagtacgtagaaaatatgattagtaattgtttcgaatcatcaattcaagaggttaaatagaggtgactgaccatttggctacttggggagccttgtgcagaagtaaacaatgcactattggctccacctgaaaactggtttaagtgacggttcatcgctggattgagctgtccttgagacatgctatgctgaatatgtccacctgagagctgtctagcttggaattgttggtgcgcgcccattggctgggaatatggcatttgatgttgcccatgtgactgaaaaataagataaaactcacacttaaaagacaaaagcttgtttcataatttcatttgattctactgtttgaaactacgaactgtcacagttacttttatataaaagcttctgccaagtcccaagatctaggataacttttcaagagtatgaatcattcacttggtatatgtaaacttgtataaatacgtctagtcatcttcacttatggccataactactgcataatgatacaaataattgaccaaggtagtgtctgatccttttcacttcacacatctatcccctaactatgttgtagttctatttatcttaccgtctgaaacttttgctgagcttgcccatgcatatcatgaagtgctggtatctgactctacacaaagaattagcatgttgctcaataaagcagtatggtaggaaaaaacagtcaattgctacgtctgcaaaatgtcaaagcctacttgacccaatccctgcatagaagattgcctgagctgttgttgttgttgtgcaagtagttgctgctgctgatgttgaggcaactgcattaattttgacctttgctgctgctgttgaaactgttgttgctggatttgatgctgaggcgaagggacattaaccatacccgtagcgcgaggagaattggaatatggtaagggagatgttgtgttatcaaaattaggaccagatggagatgcagctgatcttcccacaaattgagtcccggaaacctaaaaacacacaaagacatgaacctcgaaagacaatgatactatcaaaagtaataatcatcacaactagagagaataaactagtttaacctgcatcattccttgattgttaatgttgtttgattgcccaggtaatgcaatcttacctaatgaaagagaatttttggagccattaacaacgtgagaataccattggtagtagtaacaaaataaagaagattcaagcattgggtttacttctaccagacagatcaatgaaatcgttacctgcatcattgataattagcacatctgccagatgtggtggaagtgcagtggttatctgtctctggtctggaggcagttgtgttcctagaaacaaccattgtaaaagaacatgagaaggaattcagcaaaacagaaaactgcagtttcgtacactatcaaatgactcaataaattctaagaccttcttacctttaccgtcatttacagcatatcgtagcattttctcatgatcctgaatctatgcagcttgacctttatccatagtaggaagcatagacgggccttgacgagtgccaaatccgtaagcataacgagtatcagctaatactctttatgcattttcacaagctgctgcaatcatatccatcctcgcctgtaaaaacagataccatttcaaaaaccagcaaacaaatcacaacaaaaatacattacacaactaaccttaagcctttcgatttgcattggtataggcaaactctgaacaccttgaagcaactgctctctcttggcattgtcatacagtttccatctccggtagtaatttcgaagacaacataaccggtaaaactgcagattcactgataaatgctaagctaaaccagttcatcacattcacaattcatttaactcatcaactaaaacaactaaaaaaagaccatacttgcagcgttcatagcattgacgttcttaggaagcacaacagacgcatttgaaactctctttacttcttccacaatgttaaa

SEQ ID NO: 65818 - DNA, 1782 bp, Arabidopsis thaliana landsberg
tttttcagtccctcagtctacctttatattgtttttttgggggtttctcgtttctttgaatttgtttttatgtttggagctttttatatttttaccttatgtggagatgtaagaaaaagaagtgatcatgtggttttgtgttgtttttttataactggaaaaccacatgagtttgtagaggtcacttattggatattttatgtcaaatgatgctcctttttacattttcctcatctcacaatgatttacatcttatacaatgtttgctaataagagacattacacttcactagtactcgaatgaattgtacatatactaaccacttccagtagtagaacaaaagaaacaatacagatatggcctgtggcgactttattgctatatatgatactaatatgtaccaacaagatttattctaagaatacaacagacttgcgttggaagaaaggcaaagagaagagacgatctatacaaagacgcttaagaaacttaattcaaagagcaataatcttctcgaaatctgattcatcttcaaaatcggatacatgatgagagtaagaccatgaaaacgacttactactccctctcctaatccttctctgtgaatcgttgccgctcctaaaccgctgccgaaacacgaaataacacatacttgccaatgtccctaccaagatcggtgcttcaagcaacgttatggtaatcgccatccacgagttcccctttccaacaaccgcaaatgcaatcgccaaaaatgctccgaatgtgcaagcacaagctgcccacattagcttattcactacagacacaactttcttctgcgcccgtgtgtcccacgccaccaaagttatttgaactaccacaaccgctaacgatataaacagagatgtcgcgtttaaaagacagaacacgcggaatccggttctccctgcaatattggcttgtcccacatgcgacccctccgtgaaatactgacccggcaagttgaatatggccaagaacgctatggaagcaaacagaaccgccactaccgttatggagttagtcgtgttctgaaccgcttctctgtggagtttcctcagctctttcgcgatcccagagacacgacggttggttttctcattctgcaaaagctgcgattgcacctcgtgtttgatatcactcactgctcgcttcaatgctctcgcctcatcttctcgaccaatgaacctcccatgcttagccccagcttctaccaaagcctcattgatctccaaagcagattcgctatattgcagcttatccgccaaatccatagcagtttctttctggttgttaatcgcattcacttcaatcgccgtaaaggtcagcaataagctcgttatctaataaacaaaacacaaaaggcatttatgtgtcaacccctgttcttgaaagctaactagcaatacaagaagctaagaaaggagtggagtaatacctgtggccgcgcctttcgagtagcaatatgcaaagcagtgttcccttttcgatctctctcattcaatattgtgtaatcagcctgcaaaatctcttcgactacttccaaacttcgtcctttaacagccatgtgaagagcagtctgacctttcttatctttaacaccaacaatcgctgcgtctttctctatgagagctttcactatccgaagaagcccgtaccttcccgcagtgtgcaaagatgttttcccgttctttctcacaatcattgcacagctaggatcaacatcaagcattgtatttactatgtctaagtgatcttgaact

SEQ ID NO: 65819 - DNA, 2184 bp, Arabidopsis thaliana landsberg
  unsure (1)..(2184): unsure at all n locations
agccattttaaatatgtttgtttaagcaatataagaactcaagtaatcaaatacattcttcaatttacggtcttagaacatgtccaacggtagtttttaaaaggctctaaagcctaaaacccttggaactaaagcctaaattttaaatcaatattgaataattttccaaggaatgttccttattttagagtttttgagctgctaagacgtcgtgacatgaaccttcttcttcttcaaccaattcaatatagtgtttgaggaccattttgtttgatcctatggcgtatattctgttctgttttgtttggttttacggttttttgtggtttttagctcatatgattttgttctaaactcttgaattctccaataatgaaagcgatttatgtagatatgagtgtgttctgtctaattatctgagtaatgatgttgtcttaaagagtttgtgtttgatgctttccttagttgtgtttggtttttgtaacaagtaatgaaatgagtttgtttttgatgcttttattagatgagtttggtctaattattttaatgcttttattagaatccaaaatatttataatttatcattttaaaaatatgatttatttttcttaaagaaatccatgcatgactctaccattaaataataaataatataagaattcaacacagactctaaactttgaattgttcaaatttataattaaagaaaaaaaatagagtcagtttatcattgaaaattgtcttaggggtataaattagtttaagcaactaaaccttgtagtttaattgttccaaaactataagctaactaattttgatatcaagtaaagaaattcccacttcatagcagaaattttcaagcattttacacatacttcgtaaccaccaatatcgtcaagacacgtgtacaacctgcgtagactttctccagcaacaatcgttgacttgtcttatctacgactacgactcaatcaaaaccttacacttcctcctccgtcactatcaatggcggatcatctcttactctctctttctcaatctctctctctcaatctcatactgatcccaaacactatccatggattaccaaatctcactaatcctagccaccagcataagctccatcttcctcttgcttatcgtcttcaccgtcgttatgatcgtatgtcgccgtcgtcctccaatccaaaaccatcctcgccggaatcgtaacttccccgaccccgatcccgatctaaacacggaaacagtaaccgaaagcttcgatccatcaatctgtgaaatatccatggcggaactcactatagcaactaaaaacttctcatcggatcttatcgtcggcgacggaagtttcggtctcgtttatcgagctcagctctcaaacggcgtcgtagtcgccgttaaaaagctcgatcacgacgctttacaaggattccgagaattcgcagccgaaatggacactctaggtcgtctcaatcacccaaacatagttaggatcctcggttattgcatctcgggatcagatcggattcttatctacgagttcttagagaaaagtagtcttgactattggttacacgagactgacgaagagaacagtccattgacttggtcaacgcgcgtgaatatcacgcgcgatgtggccaagggtttagcttatctgcatggactaccgaaaccgattatacatagagatatcaaatcgagtaatgtgctgttggattcggatttcgtggcgcatattgcggattttggattggcccgtaggatcgatgcgtcgaggtnnnnnnnnnnnnnnnnngtggcggggacgatggggtacatgccaccggagtattgggaagggaataccgcggcgacggttaaagctgatgtttatagttttggtgtattgatgttggaattggcgacgcggagacggccgaatttaacggttgttgtggatgagaaggaagttgggttggctcaatgggctgtgatcatggtggagcaaaatcggtgttatgaaatgttggattttggaggtgtttgtggtagtgagaagggagtggaagagtattttaggattgcttgtctttgtattaaagagtcgactagagaaaggcctactatggttcaagtggtggagttgttggaggagttatgtcgatttatgtagtcatattaatctaataggtaaatgta

SEQ ID NO: 65820 - DNA, 1140 bp, Arabidopsis thaliana landsberg
caggctctgccaccatcacagcagctgcacgagctaaagcagccaagttcctctctagactacgaacaccggcttcccttgtatacctctgaattatattctttaccatagcctatggcgagcatacgaagaaactgcataagtgcaccacacgagagacaattattggcattacatcaaaaatttcaaagataaaaacctacctctggaatcttgaggaactcggaactaagcccatgctgatctagaactcgaggaatcagatggcgcatagctatcttaagtttttcctcttgcgtataaccaggcaactcaattagctccatcctgtctagaagaggaggtggaataggttgaaccctattagcagtggcaacaaaaaccacctttgataagtcatatggaacattcagatagctatttttccgttaagggtaacagtcaatacagacaaaagagtgaccaactaaatcaagcatcactggacatctatgaacgaatatagttgttgcctaagagtaggtgaaaagcacaatttcaagatttaaaactcatgcaagaaactttcagcaagcctaacaatgtctggacgctgaatctaatatttatattgaataaggaaacatgataggatactgatcattaaaagatttgttctgctctggatccaaaacctcgagcagtgcagaagctggatcaccccgaacgtctgagcctgttttgtcaatctcatccaacagcataactggattgcaaacaccaaccctctaaaatccaaaacataagagtgaaacccagtgataaaatatatcatataacaaaccatccaacatgactgtaatcaaactggacaatcacatatcataagagcttctactaggcagttttgccaattcctgttcagaaaagctaagtagcaatcattttgatgatctataacactttctgtcacttatacttgtcaaggacagacagaaacttatctgctacaacttagttcctgttctaaaacaactccccaagttcctcatcagcataagctagttacgtattcttagaaaacaagactcacctttaggccatcaatgaggcgccctggcatgcttcctatataagttcttctgtgtcctactaatgtca

SEQ ID NO: 65821 - DNA, 358 bp, Arabidopsis thaliana landsberg
gacactcttgttatacttaactctggaactctaaccaagcttttttttgctttgcgaagaatcgatattggtgccgaagctcgtgtgactcataggctatgtctcttctaaaaaggagacactactcgagcttgcggatctgggtgcgaatctagatcttatgctgaatcactcacacgacctgaaggcattttagaatcaaatgcagtgaccaaaagtccagatggtcctcaatggtcagatggtggacccaacaaccgtaggactctgggacttcgtatctcctacaaggggaacactactacagctagtgcatctcgacgcagactctagttcgtagacgcaatcacacacatga

SEQ ID NO: 65822 - DNA, 152 bp, Arabidopsis thaliana landsberg
aaccagcgacaaccccagcccacaaagaaaaggagagcgaccggaaaggcataacccgacagaaagggaatcgcaccaaaaacacgcaaccagaggacccaaccagaaaacgaaccccacacgagcaccgaaccacaaaggaggacaaaacc

SEQ ID NO: 65823 - DNA, 494 bp, Arabidopsis thaliana landsberg
  unsure (1)..(494): unsure at all n locations
tgtgttgtcgcacttggacagggctgaatgagttggttatttcgcagctgcagccgggagggttcggcgggcgaaaacacatatcttgtttcccctcttttcttcgctttattttttctcttgcagggtttgggttggcttcagcgacgtcttcttctgctgtaccggtggaagatagtgagtgatagaggaaggttggtaggttttcgaggagagaatgtcgattattagacgtaattggaagggagcagatgtcattaatgataaaaaaaatgtgagagcaggctttctagaagagctgcacaatcaccaactgttgaatggaaacggcggccgtcttattctttgttggctggctaagacaagacactccgtctcgcacgccctcacccgtacatatcccacaatcccacaaggttcaaggcaaacagttctctttgtcgagctcactcacttncagcagcaagcctgccgtatgggactcggtcatgggt

SEQ ID NO: 65824 - DNA, 503 bp, Arabidopsis thaliana landsberg
  unsure (1)..(503): unsure at all n locations
ccgccatcgatgtccgctctttggagatggtcaagtggttttttctccaactaccactacgtcaagcctagtctggatgataaccagaccttcaagctcgctgccaaccccaagccggtcgttgagttcctcgaggccaagnnnnnnnnnnnnnnnnnnnnnnccgtcatcctgggtcctgtctccttcctgaccctcgccaaggctgaccgtgnnnnnnnnnnnnnnnnnnnnnnnnnnnnnnnnnnnnnnnnncctctttacgtcgagctcctcaccaagctcagggaggctggtgttgaggacgttcagatcgatgagcctgtcctcgtctttgaccttccccttaagtctaagaacgctttcaagcctgcctacgagaagcttggctcccttggtgcccaggctcctcgtctggtcctcgctacctacttcggtgacattgtccacaacatcgatgtcctccctgctcttcacaacatttacggtattcacattgatct

SEQ ID NO: 65825 - DNA, 394 bp, Arabidopsis thaliana landsberg
  unsure (1)..(394): unsure at all n locations
caaagnataggggaacacgcagcgcgacagcaaagacaacaaaagacgaggatccacggcggttgataaaaaaagcaacgcaggaggaaacaagggggggagaaaccaaaaggcgcgcccaacgccgcccacaggaagccaccaagagggccaaaaagacaaaagcaaaggaggaaagccaacggaaccgcagagccgggacgagccgagcaacccagacaaacaagaaacccagaagaaccgccgagagggaagcccgagacacgagcccaggagaagcagacgagacgcccacaagcggccaaaaggcgcagcagcacanaggcaagaaaagagccggaagcggggaaagacgcgacacccaaccaaacacgagacacgaaggcaaaagcga

SEQ ID NO: 65826 - DNA, 545 bp, Arabidopsis thaliana landsberg
tgatgacagcggctgcacccccacagccatccttactatagaacagccaaaccaacctcccacgcctggatcttgtgaaggccccctgaagccgcaaacctcgcagcctacaacctgcgcatccctgacagccccaagagctggtcaggggaactggcatactattgccccagaacactgtatgcaagccaagcaaccagcacaacaaaagctgaagtagccaaacaagactgaccaccacatcttcctctgcctcctggcctcctctagcctctgggctattggactacatggcatctgggttacccttgcagggaaagttctggacaggattgcacaggtacacgtgatattaataggatatgtaattactacaactaaacaaggcaaggtctttttactgtcagagaacgctgcaagcctagctggggatggatactttgaaatactagcagagtattaccaggttatcatgcgctgcatcccgaaacaactctggtccctggatagatagattgatactatcattacagatctcagcaatg

SEQ ID NO: 65827 - DNA, 1506 bp, Arabidopsis thaliana landsberg
ttctttttacaaaggcatgtagtaaatgatgctttggtttattacaaagaaactggtgacattgacgggactctaaggcaactaccgcgatacctcgttgctgaaagagccatagtaagttttaaactactcatgtattggtttctacaattgatgagtttccatgatgatcagttttaatcgggcgttttgaaacagctgcagtgtctgaagaaatgccctggtaactacctgcaggctcttaaaggcattcccagaactttgagaatgatgtaagcgctcgattctttaatatatctttagtaccttccggaacagtgttccttttgcgactggttatgacatgccaagccacagggcacaggcgcagatcaagttttttagcttactgtatatctgatccttatcatgcaggtatgtacatagttatcaaagctacttatggaacaatgcagcaagtctgcgcgtcaaaaattatggtacatcttggttgtttctttattaatcttgtgtcattctgtaatcttgtcgatggaggttttaactttcacccttttgttttgttgtctggcaggaaccagccaagttgtgttgggggacttggtaagtacaaaggtagatgctgcaaaaagaatggtcgacagtcttacctctgagcacaacgaaagcagcgaagaggcattggattgtgaccaggtagatgatactgctgttgtagatcttccagctgaaaggagtgaccttgttaaggttagtttttattgcgaacttcttctttttaggccgttcttagttgaaaacttttgctaccatcatctggtgtgaaattaccttcagattatgatgagctaatagaactttgggcttgaaattaatgatatttctttgttgtcttttttccgtattcgtatatgctttagcgcatttacattctcattgttatttgttaatactagcactattcatgtgtgatgttttcttttgtgttcttcaggttgtaagtatagaggatttggaagctggaacttactcgaccagtgacatcgtcctccctctacctgggtaagttgctggcagaattttccgacacaagtagatttcatattttacttcttgaaaccttaagacttttctttgtgcttcaacagttcaagagtcatctacccgtctaatgacattgcagaaatttatcatgatttggcaaagaaggtttgttaaagccaaattcaagtttgttctagacaaattaaactcccttattctcagtgtattctttctaaaatttacatctccgctgatgaatctttaaatttctgcttacattgttcaggacggtatcagcctaactgagagcattcacggtgtaaagtaaattccgataagcttttttcttgtagattcttatgcttgtatcactctgcatcaccagagcatctactttattctactaataacaagtattgtttcagggaattctcaataactagcatgactggtggttataga

SEQ ID NO: 65828 - DNA, 1856 bp, Arabidopsis thaliana landsberg
gagagaggaacccgataattcttcgccgctataacacttctgcagcttccaatttgtttgcaacacactgtttctgctattacatagaaaagataactcatcagtgactcaagacatgtgagttttcagacagcaatgcaggaggctattttactcgcagctaacttgacagtaccattgatgtttatagactcttgctacagaaataatgaaggaaatgcttccatgtatggttgctgtccatgaactaagaatcacatatagataatagactcatgaaacaaaaagagagattatgcattcgacgatgttttcacataaaacagagaagttacctgagtttatctactggatcctgtgaccacatcaaacaagccgcagcaactaaaccatgaggttcttttcgcaattccatgtgttggtatcaagatgggagcctgagagaaaactgatgttagtcttttaggtaacatgagcaacataaaagatgaaccaaataggtaaacaataaagacctcttcctcatgagaaatgacaacattagactctatgttgccttcaggaacaccgttggattctggaagaggcgaagtttttccctcattttctttcacatcagagtcagtagcacctgaagacgtctgcctaatctcatcaaatgcaagagcaacttcagcagcaatctcagttgctttaggcaaagaattatcatcagcctcgtttgagactattgtatcaacatgcgagatctcaaccagttctccagattcgggatcattcggcacagctgaatccatcaaaccagtattctctacaatcgcattagcagtaaatcccataaacggagcatctgcagcaataggcacaggttgaattggcacagaactcacagtaataacttcagaaacatcatcaccagtcttcttatcatcatctatcttcttgacttcccgtgactcatcatccgagctggagctgctgctgctgctgctactactactgctgctactagagctcttgtcatgatcatggcttgaatcagtgatctctatgcgttcattaacaccatcatcgctctccttgtcaccttggcttctcgaatctagcacatcagtttacaaatccaatcaatatcacaaacagagtgacttaacactgactattcaagtcaaatctaactattgtaccatccagagaatgaaacatatactagtaaacaaaataggcacagctactactaatgaaaccaaagcatcagagataaacaaaactcagcaaatgataaacaactttaatcataatcatgaatctgataaacaaaactaccctttagtccaaaacagaaaactagattcaacccatatggattacgaagcagaacatgctaaaattaaccgaaagatcaaatttttacagcttgagatcccaaaattgtgagcctaaaaccccaatcaaaacacaaagaagagtaaaaaggatacccatttgtttagatcaatgagcacaaaaccataaaaatcaaaacttgaagaaactatacagagaacaaagttaaaaaaaactcagatttaaagcgaagcaaatatataaacaaacaagaaaggtggcctaaacgtgtgtggtgtgagtgaataattgagagatacagagagacaacaacaacaagaaaaaggcaaaaagaagaaagtagtagtgagattatggggtgttaaaaaaattaaaaaccatggttgttggatttgagattgattagagtagaagatccttgttgttgttgttgttcttcctcttgctttttcttggcagctttccttttcttagcacctgaaggcatgatttaggctaggctcctttgg

SEQ ID NO: 65829 - DNA, 238 bp, Arabidopsis thaliana landsberg
actggacgagactcatagtctataactagtggtgtgggtcttgctatgaggcccctgcttagatcttattaggctggctattgggctattctttatttgtaaccattcaaaataaaacagaaatcattagctgtcctattgaaagtaaaatttgagtaatgcatgatctagtacacatctattccttttatactactttatttttgcgactaatctcttaggaagacggttaattact

SEQ ID NO: 65830 - DNA, 2585 bp, Arabidopsis thaliana landsberg
tatcaaaagatgatgtcttcgaagtctcatttttttgcttttttcttgatcatttttctcattgttaattgtcaatctactcgtaagtttttttttccttatcctaaaaattgcatattttccagtatatataggtatcatcagtgtttataatataatcacccaaaaagcataacaattatatgtaactaatatatttataatttgattgatttaacagggattatggatgattcaagcgattgtgtattcgaaggaccatgtcaaaggaggtcagattgttacgaaaggtgtggattgaaaccaccttctagagctgctttgtgtcaacctatgggactccaaggccgtgtatgttgttgtctctaaaaatctgcaactaaatatgattgacaatatgttcaaggtttgaaataaaatattatatcatctaaataatcacccaatgtattattattttcacatcacatgtctcagtatgtatgcaaatcgaatatgaattagacagaatataaaataaaactttgaatgactgtatgactattatataagaatgttttgatttgcttaaaatttaaattaaagaaacatgtttttattgatgtaaacagtctatcaaatagtatagataaaaactaaatattatggatttgcacaactgttgataggtaatttttatactttcttctacatgtacaagaatctatcatgtgaaacgtcccatgcacatactttggtcgttccacaaactgaatctgacatttgaatttgtgttttcctttgcacaaattaaatcaaccaccaaaaacactatttgtcatgtccttgtaactactacgatggttacgttggaccgtttcaaacattttatacattctaaaataaaaataaagtcttagatatgattctactttaagagtatattataatatactaagaaacatgctttccacagttcaatttttattttgaaccaaacttctcgacaatttttcttttcctactacaatttagtaattacaaaaatgaaactgatctccatttttttataccaaaatatatcattaaaacatagactctcttaaagtagaggcattgtggggctgctctacttgaaaatgtgtaaaatacaaacttggataatggagtattaagtgtgtaagaaacaaatgatctagaaaacatgtgactttgtgtaaaacgactataaaataaaaacaaaactttatatgcataaagaaaagttcaacttccaatcctaatagaaagtgtaagataagcttgaacaaattttagtaacataatgcgatttctttttgcgtggaaagagaattcaaactttacttaaaacttaaaagcgatatagacacaactttaattattgtcaacggtctcaaaactcgtcattaatacaatagaatagaattacatcataatgtcatgcaaaagataatgttcttttatccttttcaatacatacaaatatacaatatagtaaaaaaaagatacgtgtaaaaaaaattgtgccccaaagaaaacaaaaggaccagcccaaaaaacctcaaaagacataaatcctagaaaatacaaagacatcgaaggtctacacaatagttgaaaattgtggtgatgtattgtacattaacctaactaaccatctcggtaccatgaaacaaactgcttgcatatattgagaatattctgttacgtaagctaaacaaaatggttcacgagtttgaaaatccccaaaaaaagaaagaaaaaaacaagttttttaattttattttttaaacttgaacacacaaaattaagtagaaaaaggagagagagacatgaagtgtgaatggtcttgaaatgatattgtaaaaacactcaagctgtctacttcatagagagagatgtgtggccatcgttatctaataactcctacttactaactattttacagtttcataaaatttcgtaattattatcttcttctttgcaacacattttctgtcacattaaatattcttcaccatcctcatgttcgattcccaatgtaagagagagaagagagaattgcagagaagatagctgcttccaacatctcttgtctggtagtttaaaactcaagaaccaaaaacagacacaaaaagtaacccaagtttagattcaacttaaccacttgcttgggtttttgatccatccaccattcttcttacaattttttcctgtcagtcccatatttactgtacaacgtttaagcttaacaaaaaaagttgtaagactttttcttactcaaaatgggaagagactgcggcatgttcgatgacggccatggcagtgaaggtggtgaccacggtggagccttctcttcctcaaggtcaaagaaaacagcaaatggatgcatggctgctttttaccacttatttgattctcatcatcatctcaccattgattctccttcaaggtcaaaaggtatatactctttcttctcacaaagcttaagttgaatttcataagcaaatatttgtgttggtttttgagaaatacgtaagtgttgttgttcttgttgtcattgtgaaatttgcaggcttggagtt

SEQ ID NO: 65831 - DNA, 581 bp, Arabidopsis thaliana landsberg
gaacgaatggcttttaaaaccaattgcatgtccaatgtggttaataacccaagggtttttttattaatcctaaatttacatttcacagactgccaatagatcatgatataagctgcttcaaccaaatggatgtatacattacgtttatggatataatattagttcaagacaatttgatataagactactgacaaatttgtatgctgcactgaacaataattacattgttggatcgagatttatgatgcagtttgagggtaaggatttttctgaacaaaggtaagaacgttaatcaaaactatttttctctatttccaaaatttgttatctgcataacacattatgctttattgactgagatacgatgggacgattattggtgtaaatgacatgtctactcattggaaggatttagaatggcgaaacctaaaagttatataatcttcatactttcgtgacatcttacaacatacattgttgagtgtcataaataacatatgactaatcaactatgttcatgtaggtgcactgggacgagctttcaccattactaagacctactcaggtttcaccttgggaca

SEQ ID NO: 65832 - DNA, 497 bp, Arabidopsis thaliana landsberg
  unsure (1)..(497): unsure at all n locations
gggctggatcatgaagagtggcacatttagaccccncttgttttatctcgttccaaattggaagattggggggggctgccctgtataaacagatagtccacaatggaaacagaaggaaagtctgaacagaaattgcgagatcttctgcactgtgttcctgagcatacagctgcaccgtgtcgacgcccaccgcaatggatcttcatgcgtgctatcctaagagaaacaggaaaagaaagaaacacagtcacggctctagagcgaggcatgtgaatgagaaatcaaagagnnnnnnnnnnnnnnnnngagctcgtcttcatcgcctggttctattctgatgaggatctcttgaagaaacccttctagaaaggagtggatgccggcacccatgcccacggctgcgtcattgtcccagcgctcgatcctagtgaggatactgcccacatcgttggataatgattctatcatttctngagcgtgttcacgccgcgattgga

SEQ ID NO: 65833 - DNA, 1709 bp, Arabidopsis thaliana landsberg
attcccttactgcatctatcacgtcacctacctgtccaatcagtcctgtgtcgagcatccactcccaaggtatctgaaaatccttgtatcttttccctgtactgtctctcatcttctctgtgttgttaacactttcctctaacctgaaaatgtgaagatttaaggcgatttaattcttgtaattggttaagatcagggagttgctagtattatattctttagacatactcgcctgtcttgcaacgattgaatcctttgcaaggcctgcgtcagagaatcttttggattgtccttgaatgacaaaatctcatttccaaggttctttggccttttgtaattgcaagcagcctctcttagtgaatctactttgcgttctggccatttagggaaatgctttaggactgccctttcatctaccaaggaagatagttcttcgtctatccatttcacaaatgtctccacttctgatatgtctgtaaatgttgcagcttccactttactaatcaagatatggatatgatctctgtgtctgtcagtgtcagatttaatctgcaaatgtgcaaacaccgttaggagatctgttaatgttatgatggacatttaattccatacggttgttcatttagccacctcttctaagttatgatggacaaagtttatcctgtatagtacttacatctgaaagatatttggagcgattctcgatttcaccaatcatgtttctgttgaatgcaggcgacaaaactccattctgattgatcttgttccccatgtgagactctctcttcgtcagggcacgataaaactctacgacttctggagcacgccgcacagatctttttccaagtgttctctttgatggaagtggtggaggtggtggcggctttgttgctgtagactgaccttggatcgttggcttgggatttggatttctgacctcttgaccctttgtgttggatttgacactctctggcgctttcaggttagatccgtctgtgttgctgccatcatatgagctctgcaacttcttccatagcattgatttcctctcattttcatgtgatttaagattgcttacttgtgctcttagacgggcaacttcttgacgcagctcatgattttccttctccagcttatcgttcctcactagataggcttgaagctccttcaccagacgcaggagatctgaatcatcttctccattaggtaacatgtctgtatatccccccttgttctattagatgtgggattgagtttgtttttctttggggggcaatttttcacctttttaatcacatgcctttaaattacttcccaaagaagcatcatagactcacctaaacctttgatgttcacttttgcgtgtggttaattgcaaattacaagtgtagccacagaacaagactaccctcttcgtagttagactgaactagaattgaacctggaatactgcgagtttacggtctaagctcttttgcgcttgtcttatttttttttttatgtagattaagtttgaagatcctctgagtccgcaaataagtcacaggtaagcaaatacataacttagccttcctaatcacatgagaagcaaagatatataagctaatttattatgttgaagcttcagtagctttagtcctcaaggaaatgagccattaggtacgcgttggacttgtgtctcaagtaattttcatttgctcatgaggttt

SEQ ID NO: 65834 - DNA, 224 bp, Arabidopsis thaliana landsberg
aacacccccgatgatgtactccgtccgtatacgagttctggaatatgtatggcagatttatgatcttctttagtcattctgcatgattcgtggaagaatcacttgtgatcaatctagctctcggcgtaataactcgctgtaaaagactcagactgaggatcctcttaagttcgagtagctagaaattgaagcgctaacaacattaaaccatataacagaaaccc

SEQ ID NO: 65835 - DNA, 579 bp, Arabidopsis thaliana landsberg
cgctccgcgctgatttgaaaacgcccacttgcgtgtttccacgttgtgaatttttactgataaaaagttttcaaatcaatgtcttcatccggacggaattcaaatcatcatgcgcgcgacctcaagctgcattgctcttctgatcatcgcaacgacactgtcgtgcagtaatgcggaagctctgaaacgtagcgctgacgcgggtttcagcgattcttcatcgttgcgctacgagctcgttcgcacactgccgcatgcgcgcgatgcattcaccgaagggctcgaaatctgcgatggcgagatgctcgagagtgtcggcctctatggcgtttctgcgctaattcggaagcgaatcgacgacggcgaggtactgcagcggcacgatttgccggcaccggtgttcgcggaaggcaccacctgtttgaagggtctgatctatcagctgacgtatcgcgaacagatcgtcgtggtctacgacaacgcgcttgccgtgcagaaagtgatgcgttacgacggcgaaggctgtggcctgacgcatgacgatacgcagctgatcatgagcaatggcagcgcgacgct

SEQ ID NO: 65836 - DNA, 359 bp, Arabidopsis thaliana landsberg
gatgcattgttgataataatcatattttcagaattcccgacttttctctctgacccgataatcgaggacctttctcttgctcataaactctggcgtaggcgaagctcttgctggccggcatcgggacctctggttccttattttcatctactccctcaagatctcctttttactctgcttttggcgaatttctcaatcatgcttaacccccctcctttaacccttttaaccctttgtttgaggacgatttctttggggatagcgctgataggcggatctcgaatgttctcttacctaatcagtctctgtttacgattttcctgccgattatgcatcttgaagagccagtccttaccaat

SEQ ID NO: 65837 - DNA, 933 bp, Arabidopsis thaliana landsberg
tgaagcttttgttcttactttccttccttttttggcggtaaaatttgtatttgctgttgtaaatactacttattgactattatctatttatctttatgagtccaatactcgaaaatgtttatttatatttacaaaatgtacagaaatacttaaaagctattttcgttattttaatgagttagaagattgtcttttcccatggggaatcgacaagaaagtatatgtattctcataatgaatcgaacattagaatgtctctttctaacgaaccagtaaccacgactgagtaaagtagtatcattgtcgttttaaatagtcaaataatacgccctaaagtctaaaatttgtgatatgttattttttattgatcattttattatgatcaactagacaactaacgaatcatcagtttttagaaaaatgaaaagaatgccacgtctatcgtttgatatgattccgtgtcaaatgaacctgaacattgttttgaccggcgcagattcctcaccattgtttcgtagcacaccatttctcttttgccaattctcttttcccaactctaaattcccaggtttattacaatttctcgatcgctgattaatcttggtgaccacctgatcgaaactgaggatccttgggtttttcaatatcgtatcttgtttgcttgaaaccctaggcccctttctggttcggttaggctttggggtttatgatcatcgatgcttgcttggtaatataaagttttgaataatgagcgcggttagttttctttacagctcgaaaacccccacatttcgaggggttttcaatgggatttgtactctagttctgttttgcttcttctttgatcggagcgaattactcagaaaccctttgttaaggaacgcgtctttcgtcaatggtggtagtggctcaacctcccgaggtatcacccag

SEQ ID NO: 65838 - DNA, 304 bp, Arabidopsis thaliana landsberg
ttgtaatattattaagtacgtcactctggcttataagactcgaccgcgagtaagggcgaattttctattttaggagctaaacattacataacaagtggtgagaaaaaggactatgcaagagaccaacctacttagtgaatgagaagggctataaagctgatcgattattcgtttttaaagagatgcaattgacagagacaacaaaatggtaccagagcttgatactcacataagatagaagtgagtgagaaagacgcgctgatcccacctacgttggacagggactatgagcattggacaatgc

SEQ ID NO: 65839 - DNA, 332 bp, Arabidopsis thaliana landsberg
  unsure (1)..(332): unsure at all n locations
ggggggatagaaagcagaacaccgaccgcaaggacatgcttttttccaacggcgcaaacctcncgaaacgacttttttctggagagccagataaatcccccaaggcttatggaggttctgctccggatatggagagctctgcgcggactgttgttcttaaagaggggaaagaggataagacggaagaaccgaaggagggatctaacgaggagcacaaggaggagcacaagggggagcgaccacaccgactgtgtcgcgagtcagaaccgggtggggagctggcctgggtttgtgtatcttgctaccatgatacctaatagaattggaattac

SEQ ID NO: 65840 - DNA, 335 bp, Arabidopsis thaliana landsberg
  unsure (1)..(335): unsure at all n locations
gcagaggagacaaactacagagaaaccacaaaagcttccccgggttattaaaagagcaaacgaaaggggagccggagggngaagcgcgccaacccccaacaacaggagcagaggcagcaggnanggccccaancncagacgcaaagacaaaaccaaancagngcaagcaacaagccccaccggggaaaggccncnggccnaaaaacaacaacacacngaacaacacaagcaacaaaaccaaccccacaccaacacagaccaagacagaaaaanagggcaaggaacaaaaacnaagaaaaagaccccnncgagagaaagccaaggaagagnaggaa

SEQ ID NO: 65841 - DNA, 202 bp, Arabidopsis thaliana landsberg
  unsure (1)..(202): unsure at all n locations
agcgccgagagcgagagaaccaaggggcccgaggcagccaaagacgaacaccccaccacaagcccgggaaccagccacaaggacccccagagggcgcacaaacacccacaacacgaaaagacagaaaaaaaggggacccccacacgaccaaacagagagancaaccgagcaaagcaacacaaccacaaagaaaagcacagcg

SEQ ID NO: 65842 - DNA, 1585 bp, Arabidopsis thaliana landsberg
catactcataaccggaaaaaaaagaaagagaattgaagtatatattttctttgaagttagggagaacaaatcatctagctaccgcacaaatatgaagtacctgcatatcatgtaagtcaacacataaaaatatgaacagcaatatcttttagccgacaagaatcttacggaccaagtttttctcatggtccaacaattcaaagttccctttgtttttcatatcttgtttctttcatactgtttcatatatagttcatgacatctttttaataaagaagtttttgacatttttgtgacagaattgttatacgcaaattaaatttttacatataattttagacagaaagaaattgaaatatatagtttagacggatatttaaaacacccccaaaattatgaaggtaattaatttgatactcaaaagtgagataatttagttatacaagaaaaaaacgaggttggtcgacgtagccggacatgggacagaaagataagcctaagccaggagcggcaaaagcagccgtttccaccgtcatgcgctgctggatggtggcggctccggcttcctcgaactctttcactatagtacgataatacgctttgatcttcttcacgagcctcacgtagtacagtctcagccacttgagtctcatcctcgtcaccaccttcttgagcgagaaactaccacgtggcgtactgtttttcccgccgagacgcacaacttgtggtttacgacgacggagatagatctttcggcgactcgacggccaccggaatgcgctggaggcggcagtgatgactaaatggggatccatagaaatcccgcgagagaatttttttagaaggaagaaagtgaaagatggtttaaggagttagattgatgagaaacttgtatacttatataaagaggtagtaagagccatgaaatttgttatgtggtgactttatgactaaatatgacatattacgtaatttccgtgaagtgaataatgaagaaggccagtaagtagataagcttagacaaaagagtaagccattgtatgtcttgctgtagaagacgacacaaaattacgtagctcaagggacccattttgtctatatattacatagaaagtccactttagttcggtttttataagttgtagtgaaaaccattcacccgaaaatgatatgtttcttgacttctgaatagtctgtgtgtgcgttaattaatggtcggcttgtgtttatttcatttatttatttctgctttgatgttgactaatgctatagtacttttttgctcttatatacacaaattttctctcatcaaactttttgacattttaattgactgcataattcacctttttgctcttataaacacaaaacgtttatggtaaaaaacaaggtttttcgcatttgataaccatgacatcaacgtggcttcacagtccgcatttaacttatagtgatccaaatatagcatattgtcaaattgaaatcaaacaagaatctaaaagtttacaaatgccaattggattttctgctcattcacaccccatgcatagtggtctaacccaagagtgagggctcattaatagta

SEQ ID NO: 65843 - DNA, 171 bp, Arabidopsis thaliana landsberg
aactcagaagttacaaacgaaaaccacaatgttgaaactttcgtgacctttttatcggatactctccaagtatatcattatctatagaacgacggatcagtactggtggttgtggatataatctcaatgactgcacaacatcaaagtaaaaaggtaaatcaaataagcttt

SEQ ID NO: 65844 - DNA, 189 bp, Arabidopsis thaliana landsberg
gggctttgccatgatgtctagtgctagggactgtactcttaaactctttgcgaacttgcaagaaagtcgagcgtcgaccagggagtctctgcggccgaacatacgcgacccatgaaccttcacatcttgccgcgctccgtacgtccactctcgacccacacttggccctcgagaatcacttgaaccggg

SEQ ID NO: 65845 - DNA, 597 bp, Arabidopsis thaliana landsberg
ctaaagctcctctcctggccagcgttatacttggaaggtttctaggaaagctttggtttccctgtacaggcaccaccctcttcctgctcttcttgtttcctgtcatataaatgtgatgttggtagtggagcagccctcttgtaaccatgaagcaactatgagaatgaaagccacatggttaggagaatgcagcaagaagccagaagaaatctccatccctaatggctttgtgaatctattataccttctctccactatctacctctagagcagagctgatttgtatgtatattgtagcatgaatggtgtctcctggcattgtgagtgccaaactttgcctggggcaaagctggatgatgtctcgcctacaaagaacgaacttgtcagtttgattgttgatacttctcacttttgggaatgtgctcacatgctaagaactacagaaaattgtgttctgatggatggtagatgggagggtagggtgagagagagcatgagaaaataaataagcacttcactcgaagtgtcctgttttcacggcactgtgccatattttatttatttatttatttatttatctcccacccccgagatgga

SEQ ID NO: 65846 - DNA, 244 bp, Arabidopsis thaliana landsberg
  unsure (1)..(244): unsure at all n locations
gaaggtgctcgcagttattcttcccagtaactcagatggacaaaaactacagaacacacgttacacttgcatgacagaaaatctgaaataacactaaataatcaagcaatttacccaaataattctttgattccatttttgcatagaccaagtcaataagattgaattaaaatgaaaaagaagaaatgcaatttacctcttaaacttgctttctaaagattaagacgagaatngattgatcact

SEQ ID NO: 65847 - DNA, 567 bp, Arabidopsis thaliana landsberg
  unsure (1)..(567): unsure at all n locations
tagctctcactgtctnncttatccctagagaaggtcgttccctccacttagccaggnntttttttgggagaaacctccatctnntattctaggtgtgcgatggcacggccaggccctactatttcattggtgttcaagtgaggacctctcttaccgagccgtctctttctattctactcattagtctaagaaatacatcaacgttacttacatgacctggaccgaaacccannnnnnnnnnnnnnnnnnnnnnnnnnnnnnnnnnnnnnnnnnnnnnnnnnnnnnnnnnnnnnnnnnnnnnnnnnnnnnnnnnnnnnnnnnnnnnnnnnnnnnnnnnnnnnnnnnnnnnnnnnnnnnnnnnnnnnnnnnnnnnnnnnnnnnnnnnnnnnnnnnnnnnnnnnnnnnnnnnnnnnnnnnnnnnnnnnnnnnnnnnnnnnnnnnnnnnnnnnnnnnnnnnnnnnnnnnnnnnnnnnnnnnnnnnnnnnnnnnnnnnnnnnnnnnnnnnnnnnnnnnnnnnnnnnnnnnnnnnnnnnnnnnnnnnnnnnnnnnnnnnnnnnnnnnnnnnnn

SEQ ID NO: 65848 - DNA, 656 bp, Arabidopsis thaliana landsberg
agaactcgcacataagtaaatcggatgataaatcaaggtggttttgaggaggatttcagtaaagttcgagctcaacgatgaagtaaaaatgtcaaattgagattttctttatgttatagctgcaccttgagaaatgttgtctacatactcttgtaaagggatcaagccattaaattgatatattacataccctatcttttttctttttttttttggacaaaatattacataccctatctaaaagtacaaaaatagaactatacctctagggtataccccttggttaggtacatatataacattcaaaacatacttcggcaaggatacatcatacatatatactatgtaacattactattattagtttatttttaacgaacaaaagtgcagaaatggacgtaagctaaacagtcacaactgaaaaaataaatttaaaagggttttaaggaggatttaagttttaatttctaatgaaatagttgattttttcgttgccttactgcatcgtatgtggaaatatagacattcataataaatattttttgtccttttaattactaagaggttcgggatctaggtcttgttttctcggggttgggaaaacccataccattttaaatattaggttttcccccctttaaaattggtttaatttc

SEQ ID NO: 65849 - DNA, 614 bp, Arabidopsis thaliana landsberg
  unsure (1)..(614): unsure at all n locations
ttacgatcatatatattagtttttaaatattttaaatttatttttaaattcgtcaatgttttttttaatgtgattgttaataaacttttgaaaattttatggtgataacggcatgttattttgcgtaatatttttaacttaataatatttcttttgtatttttctgtttttttgagattcgttttgcaaattgatgaaaagttttccaaaactgaaaacagttccattaggtgaaattcgaataattttgtggggcagtaggaaaatattttatgacatctaactcagaaagataattgtatattttgttccactaaatgcaaagaatttatttagttcataatgaaatcgggtaatttattaattaggaacgaccatattgatataagatgtgcaactaaacattaaaaaagaccatataaaaagttgtttgttttgtttaaaaaatgacttgagctgtttgtcccattgtattagagaaatagacttaagaactagagatctggtcattttaaatcaataaggaaactccaacanactagttngtccatatatatacattttacagtattttttgtgtaatatatgaaatatgnattttaataaattaattc

SEQ ID NO: 65850 - DNA, 100 bp, Arabidopsis thaliana landsberg
tcattatgacacgtttttttttgcagctatcgctctgtggcggggatatttgaaacatgagcgtttgtccctagtgctaagacgcaaactatcaacgagg

SEQ ID NO: 65851 - DNA, 222 bp, Arabidopsis thaliana landsberg
agatgtcctttgtgaagttgtttcatgcattggaaccattcagccatccatatgtcaacatatgcttatttaagtttgaccggcatattcaggttttggttgaaacaattacccactcttttgcatacgtctcataacctatctagtagcttcttttgctaccatactatgtgacgtatgtgtttcccttgatgagtgagaacttctcctttgaggaacagg

SEQ ID NO: 65852 - DNA, 298 bp, Arabidopsis thaliana landsberg
gaaacctcgaacttcccttttgaacctagttgagtttgttgtttttaagtattcgtacattcatttgtccagaattttcttctgattccatcttgggaataatggggaaccattgaaccagctcctatcggtgcgttcttcataacccgcgattaaacgattctacaaggcgcaagaagaaacaccgaggctcagttaaagaaagttcagcaagactctaaataatttctcttcttattggaacacaaatcaatcatcatctttctctggtttggatgcaaattttgccttgattctt

SEQ ID NO: 65853 - DNA, 259 bp, Arabidopsis thaliana landsberg
tagagatgctcatttctacggtttcagatactaaatatctttcagttttagatgtttctttagtttaattttggatgatgttctcttgctctgggaatgattatgctttatatttggttgctcttttatgagctttatattaaaaagatctttaaccacccgataacattgaatcttatgtattttgctgctgttcttagatttcatatctgcaaactgattgtgagtgaagttatgttgcatatgggaaacgtttact

SEQ ID NO: 65854 - DNA, 131 bp, Arabidopsis thaliana landsberg
aagctagtctcctatggagaagagatttctaggagccacaatggcttggcctgtcccacatatagtgatcatgtaagaatacttgtatactataatggtagcatcggacatttgtcatagtgtcagatgga

SEQ ID NO: 65855 - DNA, 443 bp, Arabidopsis thaliana landsberg
  unsure (1)..(443): unsure at all n locations
ccatgacccaatgtaaaaatatttattcatacaaattttttttaacattcttataacacacaggcctgacgtgcgattgattttagctctagaccctattgatcaggagaagatgatgattctccataactttggcgactattttttcgtcgttttaaaactctaccctataacatgcaaccaactttttagtgcattttataaattaatattgatgattctaggtcttctattggcaggatgtacatcatggtctccacttctctaattgaaactcacttagaaagaatgttcaattattacagaagagctctcacgcaactttaatttaagaaaccaataactgtcatnnnnnnnnnnnnnnnnnnnnnnnnnnggaaatcgacacagtaataacgatactatacatcatatcatatcgtcgcatacacaagccctattac

SEQ ID NO: 65856 - DNA, 404 bp, Arabidopsis thaliana landsberg
gatcatggacttatctattaattagtatttttttattaataatatataagttataactcctttctctgttgccaatcaatgagctttaagcagagtttacagtttatggaatcaatagagctttccactggcgaaatctgatatcagcttcacaatgtgtttaggattcttcaacatgtggaagatgaccggaatctggtacttcccgcaaaaccgtatttgctagctcacacaacaatttctgcattttgatgatgacattaatacactttttagctagttttttcaatgctttaatcatgaggaaacttacaactgttagctggttgctaactatctgatcgttctcactgcataccacgagtcgtttttggtcaacctgcgcacatggtacattaaaaacg

SEQ ID NO: 65857 - DNA, 241 bp, Arabidopsis thaliana landsberg
agtctgtttagctgaagatgggcatgccgggtgggcacgaacttaatctaacaggatagtgtagcgccatacatacgagatcattctgacgtcggatgcatgcgaagggagccatggccatagctactaagttggccaaaactcaacaacaaacatctgccattcactgactacagaccaaacgctggcacaaaaactgccaggggacttgtgtcaacctatcctcattgatggcagccct

SEQ ID NO: 65858 - DNA, 690 bp, Arabidopsis thaliana landsberg
aatgggtttaaaaaatctcaaccaaaatttctacttaaaaatctttgagacatacagtctttctgattaatatatacatgaaggaatgatatttttttgagttttttattttatttttataggtaactaagcataaaacgaattagctgattagagaaaaggtaaaataaaaatagttaaaagacatgagcatacccaagagaagaagaatcacgaaagtggaaagcaaccgaaagctcgtgtcttgttgtttgcatgttgggtccttttgtctctctttttctctctctacggatgtgcaaaagattctcatatacgtagcgtcgttcatcagaatataaactattaacagtaatgtaacaaaaaggtctcgatgttgatcccttttctgagtatttataatattaacttgggaacaaaaaaaaagtaactatagaatttaatagtaatctacgtataaagttgcatgatcaagagagtttttagggcgtagagaaagagatagagagcgcatcgccccaaatgaagagatggaaaagcctaaaaacgagacatggatgcccttttggtctcttacctaaaaacccaaagcgaccaaccccccactcaattttcaaatttattttattttcattttcaaaaatgggtagaattaaaaattcccacgatggggttttatttaaaaatcat

SEQ ID NO: 65859 - DNA, 431 bp, Arabidopsis thaliana landsberg
  unsure (1)..(431): unsure at all n locations
gtacatccttgttcataaatgctttatttcatcgtttcaaatcaacctttctttcaagatatggtgtactcaagtattattatacatgttatctacatacatatcttcgtacgtgtctgagtgcacgtgcttccatacatcaaaaggggcaatcaaatcgtgagtgtgtgtactaagtttcataattttatgctattttcaattggggggaggaaaggaaatttanaaataaacataaacagctttttcatgcgtccgtacgtaaaatcccaaaaaaaaaccctaatttctcgagccagttcttagggaacaaacaaatctagagaagatatgaaagaccaagatacgagatttggatttatttccaaggctgacgacgatcgagatcgagaaagacgaataaaaaacaaaatctggttaaagatcaagaa

SEQ ID NO: 65860 - DNA, 458 bp, Arabidopsis thaliana landsberg
gattacatataggcgctggctacgctggcgtatttacttttttgggactcaatgccctctaagcgcgggccgggtgtaagaccgcgacgaatgctcagcttgttgccgaaaataggaagcttgcgcttatcctcctctggaaggctcttgtaccaacccaagaccttgaggcgccaattgcaccccgcagcagactcaccaagatggattgctccactgatgcacatatccaagatgattttctgttccgccaactcgaatacctcaagtgacgggttaagatctttgcttgcaatataagaagcacttagcgtgagcggagcatacattccgctatcattatcactaagttcgatctcggagtaaccgggcggatcctcttccagctcctttaaccagctgtatacccgcatgcctccgatggcgcgctcatgagtagtcattttttatctcccaaa

SEQ ID NO: 65861 - DNA, 591 bp, Arabidopsis thaliana landsberg
  unsure (1)..(591): unsure at all n locations
tcagcgtggtaaggcacaggcccgctgtaggactggaactgggttttgccgccctgtacaatatcagcaactggctgaaactcaaaaccggtgttcagctgaatgtgcgccagtattatatcgaaactttccagtcgcgcacgaatgacctcaccatggtttcactaatcaataaccgcggtgtggaaaccatcaatttctattctccctataacaacaatacaggatataaagccgcannnnnnnnnnnnnnnnnnnnnnnnnnnnnnnnnnncgtaggcatacagtgggatgtattcagcggtcgcaacctggnnnnnnnnnnnnnnnnnnnnnnnnaggctaccatgatgctgaacaataccagctatgtactgtctaccgactacaagcactataccaatggcggccagctcatgcgcaagtggaatatcaataccagcgtgggtattaacctcacttaccgcgccggcacttcttcctggcagatcggcccgcaggtacggtaccagcacctttctacctactccaatgcctatcccatcaaggaacacctggatgactatggtatccgcctcggctttaccaagc

SEQ ID NO: 65862 - DNA, 561 bp, Arabidopsis thaliana landsberg
ctgctgctgatctaaatatttgagctataacattaaatttttaagtttttatgattgtgatttgcttgacaatgaaagtgcacactaacatacaactaaaagcattagccataaatttcttttagttttagaagttagaagcatcatacatttttatcatgaacgtaaaccacacacaaactctactgattaaaccaaaattagacccgctaactattcgattctatcatcttttagttttgtgaattgtgatattatatagttcaactaggtcatatctcatcgatgaacataccccgaaacaccaccaatttcctctgttcgtaattaaatatcgaggaaaattcgattttatcatctaattcattcccacgggagtcactggcacaactaaatctatgaactaaattacttatagacgaaaattacaatgtacctggaagattgttttactttcttcagcttcttcattactctgtttcagacagagtcctctgttctctctgttttcacctggtaacttcataccaggcagtcttcttctgtctgttgagctacgag

SEQ ID NO: 65863 - DNA, 584 bp, Arabidopsis thaliana landsberg
ttaggaattgcttattaattttgccacgatgttgatccgtggtgcgattgccaggatgagccatacgtcaaaccaaacccgtgggacttagttgaagtaaaggttgtcagtttgaataaacaaaagggcgaatttttctggacgtggtgacaactgaaagctgatatgtcgcccgactggaaagagtttaattatagatttaaagttcaaaaagaacacggtaagtggaagatatcttatctggacggatttgattttaaacagggaacaacaacaatgtagcttaccccggggagttagtcaagcacagaaagtgccatctggataacgtcatcaaaaaccgccttgtcagttgttgattttgcggtaacgcgcagcccctttactgtgttaaagataaaccgggcaatagcacgggcatctttttcctcactgatctcgccgctatcctggccttttttaatggctttataaaaagcatcttcaacctgtcgatcattttggcagataatttggctgacttcctcgtcgagcggagctacttcaacctcggtatttaccataaagcagcctttatgctggct

SEQ ID NO: 65864 - DNA, 108 bp, Arabidopsis thaliana landsberg
tggggaaagttatttttggaggagtaaacaatgcgtttttggtatctgcgagcttgctggttagaacctttaaggggtgtaaggttggactgttggagaaaagaatct

SEQ ID NO: 65865 - DNA, 481 bp, Arabidopsis thaliana landsberg
  unsure (1)..(481): unsure at all n locations
cgcggcgacatactgggcggccttgaccttgcgctttagcttttacgcgtcgcggccgatgttgccggggtgcgcttcgactatctggatcttgccttccgggtcgatcacgaacgtgcnnnnnnnnnnnnnnnnnnnnnnnnnnnnnnnnnnnnnnnnnnnnnnnnnnnngacgtgggtcggatcgcccagcatggtgtagttgatcttgccgacggccgcggagctgtcgtgccaagccttgtgcgcgaaatgcgtatcggtggacacggagtagatctcgacgcccagcttctggaannnnnnnnnnnnnnnnnnnnnnnnnnccagctcggtcgggcacacgaacgtgaaatcggccggatagaagaacaccacggaccacttgcccttgaggtcggcatcgctcacgtcgatgaacttgccctgcttgaaagcctgcgccgcaaacggcttgatcttcgcgttgatgagggacatg

SEQ ID NO: 65866 - DNA, 2089 bp, Arabidopsis thaliana landsberg
gcaacataaccgtgttcttcgtccacagttttcgttttcgagtagatcgttagattcgatgtcggtgaatctgaaatcggagaaaccattattggagagaagcctctcccgtttctcgagtattccatgcctgaaggaaccttgcttcgccgccattactagacggattctcaaagagaattaagctttgtttgaaaaaagaatggtgaagatattttttatttgactgacgcgaaacgaaactgttatgaagtggtggtggaccttagttaggtgaataaagtggtctattatgaagcaaaatgacgacgttttaattccttttttattttatataatgacttgtgtggacaatattaagtagaattgaatgcttactttactttaattacgttacgtcacgttaataagcttcttgtctacataccatttgtcaatctaattaccataattagtatttttgtttctttaacccatagtttaataatatgcaagtaattaagactcttctttgacaattcattaaatacaatcaactttaaattaaaaaacggagatttcgtgattattcattccattccactttttctttttctttttcttcacagaaaaaaaaaaatttctttttgagattaggatttaaagtctatcatatgccattattggtaatgcaaaaagctaagcagaggaaacaattgtaatttcctttagtagaacaagtttcaattgacaaatacttaacaagtgctgaaaaagcctgcaatgatgtgatcaattaacaaggattattctagaaacagtgtggacaaaatacaagatgagatttgagtgttgtgtttgatgatatatgatcataaagtctaatccacaggaatttcaacgtccatctccggtctactactcccaaagatctgtgagattgaagaaacaagaaaggagatgcagtttcagattctaggaatgtgacaagttaaatactgcaatttggatgataacaattacaataagcacaaattgtacctttatgaaatcctccagagttaagaatgagtcactcgtgtagcccgattccttcaaaacctggcgcagtacttgctataccacaaaagtaaaacacaagacacatggtgaattcatttgtttaccgactttatacacttctcatgatcataaccatagaggttaaagcaaagatttcatccaatatgataagagtggagcacatgggaagaacaaaaggaaaaactctagcatttatctcaaagtttgaacaatgtgtcagatgagtaatggcacaccaaaacagttagatgatcgaatatcagaaacattttagttgaatagaattttcacacaacaatcattacacaccgatatgttggttttagtagtttaatgatgtttcattatttagttagttgttaacatgtccataatcacttttcaaaaacttaaaagtcaccaactttctataaatcatacctctctttgctcatcagacatgaatgatcccgataagtcacgcaacacttccatgatatctttaaaagagaccttcccgttgcagtccgaatcatagactttaaagatcactgagaaacaaagaagtctgatcatcattccatacaataaagtgaaagtgaacatttgccactaaaaaatcgatttaaaggaaactcatttacttacattgaactttctgtcttagactagccttggcactaaacgcagacaagaaagcaacaaaatccttaaagttcaaaccatcaaccatcttaagcagcctctgttatcaatatccagcaaacaatcaatacaaagctaattcaattcaacaagattgcatagatttaagattaaagaaattgtaaaaaacctgagagagtggattcatggcaaactcaggcacagagagaaactcatcagcagatataaatccttttgcgtttcgatctaactggcaaaaccgttgatacagagataaaatctgctgctgctcaactgaaacaaaacacacacaaaacaaaagcattaaaatttgaaacagatagaaaaaaagacagagacagttgtcggaaaatctcacata

SEQ ID NO: 65867 - DNA, 2890 bp, Arabidopsis thaliana landsberg
ttcgggtcgtttgaccttggctcaatccctagacatagaaacgaagattccgatcaaaccacacggcacaacaccattgcaactatttatatcctcttaagtacactctttggttgaatctgtaacggcttgatgaatatatgtttggacacaaaatagtgacttctcgtctagatgatgcattttcacaagcgtttctttgatattgtcacatctcgaatttttttaaatgcagtatctaatattggatttcgaaggcgatatcagatatagtctttgaaaattcgttgcatgcattacacaaatgtttagctaaatattgaaacgattgcatgtattggttttacatttgaaagttaattaacatcactagatattttgaaaatctttttccatcattaaaataagataagtttttacaaaacaacctcaatgtttttttatagaactgctgttattagtttttccttgcaatgtcccctctagatattcgattcctttttcggtcgggtccggaggattcatgtggtctaattagtaggagtattagttattaagaggaataattagctgacgctatatatatatgaattacaaataataaagtcatgttttagttaagaagtccatcttatcatcaaaagtaacatctttattattgagttatcatagctagtgaagacatataattattaactatcatgtgaagctttttcgaactagttatctaaatattcctcctggattatttggttatatcccaagatctttattcctttgttggtggatagaatgctaatttgggttggatttttggtgttgtccattattcatatatatgatccataatgtatcagtttcttggattaagaatttaagactactgagtaagttacgttagaaagatagtcaaaaccaatacacttattcatgtaaatttcttacaataatcattgagtttagatttttttctttcaaaactactcgcaggcattagttcataatttaagaggtttttcaactgtaagtctcaagtatgcaacaactcaactatgatttatccaaataaaaactagattgtgcacgttagctatatgacattgtcataaatattttacaaaagtataagaatacatccatgacggatgtattgtaccaaattcttcaaaattaggtacacaaaagtacataaatttgttactttcaattcttcccatcgataaagcctcccaatttctttctttccattttttctttttgccatacagatacagttttcttctaaataattttgtaattaattgtttcttctaaaaaaggtggtaaatatgtttatgactttctgttaaatttataaattataattaacaattttaaaacataattcctgaacaatattaaatcacttaaaaattctgtaactagtggaattccggccaaaaaaatctcagacacgtaataaaaatatgtcttattcatatgaatgaaataaatattataatatatgaagagaaaacaagaaaaggaaaaaagaaagaagaaggcactttctgtgaaccgaaacatgttacgcagatcgcaggcgccgtgccgactgccgaccaaatcctcactccatgtctctccaacacacatgcttggcttttgtcatcctcattatccgattatttttaaaaataaattctcataatattgtgaaaagttttcatttgatctccatatctaagctatatctttaaacatggccctttgtgttatcttttatcttctatatattatagatcgacatctcttatcaaaacacatatttttaaatttggactaagacttaattagtccatatacatagactgatagacacacccatatgtgcatgtacactaaacgacatattgcacataaaaatgatgaaatgagtatttgttaataacaatacacgacaatcggatcttttagatgcaactacaacaagaagcatatttttactcataacgatcagaaaagtttgagtgtagctactgtttttattttgtcatgttaaggaataatgaacacacatatatatgacatgtcaagtactttcgatcggaaaaccaaagagttttcgtcgacctatctcaagtttgcattttaaattacaacgaacttgtgacaaagaaaaagaaaagaaaatactacaacgaaacttgtaggtcaactcttaaattgcatattaccgtacgaatgtacatagttgagattgattttgttcaaacgttttgctcattaattgagtttgactattcaacaatgaaagaacccacacgaaaaggtccggtcactaaaaacttaaagttaatttattaagcttggttgagtactaaccagcaccggtctatagactctcgattcagaacatctcccttatgttttttcaacatcggaatgtcaaatttttgttctcaaactgtgataaaatcgggaataacatgttatatttgttttcaacgatttgacaaatattcttgaataaagagtttggtcttgacacaacgtagcctcgtggcataaaacatcaatcgaagaatcgaaacacaaatatctcgtgatcatacgaagaagtaaaaacgttttctttttttttaaaaggtaaaagcctaatgctggataatcaataaaatatttctaaaaacgaaaatgaacttagaagaaagagagagtaaaaaaacaaaaatatttttgtattagtgacatgttaaatttggagaactatacatcatgcacatgtatacacgcacgaacacacacattcaacggtcacacctcagaggctataaaaagaggttgctttgttctattctcagcatcaaattcaaatcagtactcttcttcttcatgcttgaactgtaac

SEQ ID NO: 65868 - DNA, 1964 bp, Arabidopsis thaliana landsberg
aaactctacattctactaagtgggagtccagaccgcaacaggccttctatactgatacctgttttacaatccaaatatctagccttagtttcttagatcatctgtactcgggttaaatttcatgcatagcctaggcattaggagcggcgggaattttaaacattggcatctcttttcccaattgcttgtttaggttatgttaatagcgaatttctgatagtactgggctttcttcccttttatataacttgacgttttttaatgaatgcttatcaagtatttactctctgttatttatgtgcaatacatgatactagccatcctctatctaaatgcaattgcaggcactccttgtttcaggtggcagtgatggcttacttgtactgtggagtgccgatcatggcgctgactcaagggaacttgtacccaagcttagcttaaaggtactcttttatgcctactctttcattcaaagttcaagagaggatattaccatgaccgttcaattcttaggcctggaaagatttgccagatttggttacagctgaggctaaggcaccattgttcttagttccagtgaaccttctgaattgatttctgtgtctgtttctgaatgttggatacttgcatttagatattctttcattctttttataaaaggctgagtaatgattaggggactatgacatgctcgtgcttttttttttttttttggtgtaatagacatggtcttgtttgcttaattgagtggataatttccacttctctgttatactttttttttttttttcctaatcccttcttggctccttctaatgtttttgttctgattgtattaggcacatgatggtggggtggtggctgttgagctgtcaagggtaagtgggagtgctccacaattgattacaattggggctgacaagacattggccatatgggatacaatgacatttaaggtaatggtgtatctcatgtatggatttttcatattttcccgatctcatttattaacatgcatatctactttttttctacaggagctacgtagaattaaacctgtcccgaaactagcttgccacagtgttgcatcttggtgtcaccctcgagcgccaaaccttgatattttgacttgcgttaaagattcacacatatggtatctttgtttaagatttggtattgtatatggtagaatatatttatgtatattagatgagtggtctaattgtttgaatttttgcaggtctattgagcatccaacttattcggccctgacaaggccgttatgtgaactttcttccttggttccgcctcaagtacttgcaacccacagaaaacttagggtaattagctcattgttgatgaaatcctcgaaatctaccacgtatcatatcatttctttctgcctgctagttgtatactatgtcaatagctcatgctcaagcctgagcatgagcattgctctctgaggctccattctatgtgtcccacaaaacattagtttctcttcttatctcgtaaaatgcatctattatggttcaaatgatgaagttgtgtagctgtataatattacacttggcaatgcaaaggtattctgactcaagtagactaggaataagaataagaatagaatacaactgtttgataatttattacttcttgcagaaaagttttgtatatagcagactttaaattgatagctgtttgaacactaaatttatctaaaagaaaattgcaatggagaagatacgtaatctttatgtcagatggtgatagggaaagcacatgctgcacccgaaagttgaaagttattcctttttcagaatttgcagataatattcggggttcattttctacttgaaaccgccagttgatgattttcaaagattgctagtttctttattgcataattataatagcattgcttctgtacttctttcgctttcatggcttccatacattggtag

SEQ ID NO: 65869 - DNA, 522 bp, Arabidopsis thaliana landsberg
cttgctgcgatgtttatttattttatttaaactataatcaaataaatatacataaaatatattaaaatgtaagatttacaaaagtgatagtgacaaatggctacgaagaaaacgacatcttcttgatgcgtttaaggtcccacgtcacatgggtatgtggaccccctatttttctcatttagttttcgtataaagaaagaagctacagtgtgggccctcattttggcaatttgtcagtatacaataaaaaggaaattttattttattttattttattattatattagaaacatatattatatcacaaaatttggaatcatatttttgtattttattttgaggtgtaacaatagagtagcagactagaaactataggatcaatccggttcaatatttttgggttgtgagactttcgatttactaattaaggttaaaacctaatgtagaattgatagtttggtgatgagagagcatcttcttaatcccgttttgctgtatttttggtttgaggttctcatattt

SEQ ID NO: 65870 - DNA, 2657 bp, Arabidopsis thaliana landsberg
aattacagatgtttgatgctaagaccaaatgaaattaaaaagggatttagggattttgtatctgtgagaggaacagtccattgaatcagtgagataggatactttaattatactgtcttcttctgctcagcatggttcgaatccccatatcaatcatccattgtctctttcacctttgttttcataaatggcaaaaactttggttgcaatttgcgacaaaggatgacgtattcggcgccatttaaagatggaattaataatttaaaagtaaaaactattactatatcatgtgaaaaaatataattagattgtgaagtataatttttagaattctgtcgtttacctcttagcattgttatttgattagactaagctaataattcaattaaataacaaatctaaatttttcatagtcgaatttcattagttaatcgtttagttgtttctctcgtggaacttcacatcatcacatgtgccaagaagttaatattaatatatagtcattttccgagaagagtctatttgggttgtttgagtaaagcgtggatatctttttccaaagaccttttgagaacttatcaaccacaatcccttatatatggttgaagctgtgatcacttgtattacaattatattaacaactcaatcggcattaacacaattgctttcgattggatctatcagaaatcggcattaacacaattacattatatatcacgctaggtctgatcagctccatgtcaatctcgttgtttgtgtgctctcggtttagttatgtgactaagaagatgaaccgacttggataattgattgcctggttgcaatattttcgaaagtgataggatatcaactgtttcttttcaatccataacttacatacttaatgatataaccacatatatatagaatcgtgtgactgtcccgaaacacgtgaccataccatatcgtattcgaatgcacctacttatcaactatttgaactgatgtggatttaagaattggtcatatattatcctccatgcttcatagggtaatatccagagcgatgttgcaacagatccttacttgatgcgtggccaattgatgttgcttgtgtgagttgccatagatcctaaagccaaggaatacattttggaatccatagaagacatgaacaacattaagcaaagccttctgtagatttttaattctttttcgttgttgaggatagtgatatgtacattaattaatttggttccgtataattttttaattaattagcgtaacactccacccgaaaaggtccaaaaccttaaacaacacacgaagctcgtagacaagctgaccaaaaccttattagttttgtttgcaaaccccaaaagaaaaaacatctttggtgtaacaaaaatggcttcgtcttttataagcactgatcgaatccataggctctcttgacaaagactcatacgtttctctcttatcaaaactcataggcgaatctaaattcgtccagaacaatccgccggagctcatccctcaagaggacctaatcgtcaaacacgtccttgactctctccgtccttacagcacagaaactggtggtggtcctctggtgatcaatcatgtcgcgtatcattcaggtagaggtaatctcatcgttgagtacccaggatctgttcccggaaagatcttgtctttcgtcggaatgcatatggacgtcgtcactgcgaatcctgatgattgggtaattctgattgattctaaatatgtgattttgatcggtgcccattagaattagcttaaaatctgatactgggttctgtttaatttccgatgaactgatctgaattgttccaaatttcaaagctttctctgttttgtgtactctagggtttaatcggttacattgaattttggattctctggttgacttcggtttttgttcataggaatttgatcctttctcgctaagcatagatggtgataagcttcgtggtcgtgggacaacagattgtcttggtcacgttgctcttgtcactgaactcatgaagaaactcgggcaagccaaaccggcgttgaaatcaacggtggtggcggttttcatcgctagcgaagagaactcttccattcctggtgttggtgtggacatgctggtgaaagacaaacttcttgataagctcaaatccggacccttgttagtttccatcctgttagaaatttcttggggagtttttagatgaaaattgaaggatgattgaagcttattgatgtgtattcttttgaaggtattggattgatacagcggataagcagccgtgtgttggaactgggggtatgataccatggaagcttcagtttactggaaagcttttccatagcggtttagctcacaaggtattttatatatgaatggattactctagatgaagttgcaaacttggcattgatcttttcttctgtttgtacgaaggcgattaacgcgatggagttagcaatggaagggcttaaggaaatccaagctcggttctacagagactttccgcctcacccacaagaggaagtttatggttttgcaacaccatccaccatgaagccaacacagtggtgttgtaagttttggaatctatagcatgttgtgtgcctaatgactttacatgttgtctacttacaataaattg

SEQ ID NO: 65871 - DNA, 158 bp, Arabidopsis thaliana landsberg
gtgatctcatgtataaacgtcaattgcttcaaatgcatataatcgtggatccgcatatccgaataatggaatttttttttcagaggggcccaaactttctttatacaaacaaattaccctaacctttaaacttaacgtctcatggaatgaagtaacgt

SEQ ID NO: 65872 - DNA, 209 bp, Arabidopsis thaliana landsberg
agggtataaaaaacaggcatctataggataggaaaaaagatgctagatgcgaaaaaatatgcactgaagaaaaggataacaaacaaaaatctaagaacagaacatgataataaacatgcgaaaacagtaaaaaaaaaaaaaaaagtgatacaaaaggatgcttacttaaagagcaaagagaaaaatataaagagatatttgatatacac

SEQ ID NO: 65873 - DNA, 616 bp, Arabidopsis thaliana landsberg
  unsure (1)..(616): unsure at all n locations
ccacaacactcggagataagctatacttagtcatgtgtcaaaccacataacatatagtttcaatcgcttccaattatctgtaactctagactctaagtgattatccctctctgattgcacacatctataaaagaccttagaatcatacatatccacataacttacataggagctacaatgcccaaaattttgagcacatcaactccaaacttttcgccattatcttattccatggattcaagtgcaatctgcataactttgactcatcttttgaagctaggagttggggccaattcatgtgtgctagagtctgcaaaataaaagagtttatttcaattacataatatataatttacttataatacaaacatcctattactaactagtctaaccacgatgggtcaacaaaatataacccaaatggagatagacaataaattcgatgagagatataacanatatcttattcataatagtctatgtgtacaccttcacatacatgtgtaaagatattataagacaaaatctaagattcatcactatgaatgtacaaagttntgaaactacataaactgaaattatataaatatatagatgcaacatatgtatgcataga

SEQ ID NO: 65874 - DNA, 2069 bp, Arabidopsis thaliana landsberg
gaactcctgagaaaacatcttctggttcttcctcttctgagagaactgcatcacacaggttttgtaatttatatacccaactgatctcaaactgtttttgctcaaaagacgtcacacttaccagtaatctcttcacccgcctgtgccccagcaataccaatgcaggagtacagagagtcctcgtccactcttaattgattataagctaggtatatgtcctcgatcgaagcagcttcatacaatgaaacaagttctttaatgcatgacagttcctaaaacaaccaaaaccaccccatcagaagaagtcaagtcagaaatgaaacatttaggaatacacaagtgagtattaccttcctcggaacagaggaggcctgcaagtgagctaatagattaagccaataggcattggacttgagttcagcttcatgtctcattagaagagttcgctttgcctgtcgattttacaaacaacactactttccattaacaaagagaacgagctaaaaagagctaagctgagaggcaaaagagacaactaaccctatccaactccctaggggcaatttggttgctatgcaaacctctaagaacactcttacaggcatcaaccgctttgtatacctggaaagagtattgagaaacttggtgaagaaaactgttaatgaaagagcagcacatttgctataagcaaaatacaaagactgcataccttgccgggagttgaagtcacagatatcacataccacccgagattcagcctatcaaataggtttagctcaaatgatacgtcatatgtcagtccaagagaatctcttactgtcgtgaaaagcctgcaatgacgcaaaaaaataaattcagccatgggtggcagaatatatatatatatacatgtaaaataataggtagatagcaagtagacaggctccggtctgaagcaaaaatacaatcagaggtctaaaaaggcattctcttaaaattcaaacgtttgttgacacacgatgacgttcattttctaagcagtgcttcattctggcagttagttcctcaacaaattctggacatgaaccaaaccagagagtactatagcagcagaaaaaagaactctgctttcgaataatatgacaccagtacacagtaagtgtaccttgagtttatgatttcggccagaagacccattgtaactccaaagaaaagagggtgggcacgaagcttcttttgcaactccctgtctcctccctctagcaattgttcctccgatttcaaaagtccatctgcaatttcagtgtgcatgcatgaaatgttataagctactttatgtcagagctaaccactaaacttcattactactactgaagataaatatctggtttatgagacaagctcagaaccagacctatacacagtttccacgaggttgaaaaccacgacatcatatgactcctaattttaagtccgttccgttaaggtgtaacttaccatgagcaacaggaagtttgctaacagactgaaaaaggtcatccccgtcaactgtaaagccccatcgatttggcgctggtcccgcaatgtatgcacatgctctctcatcagtatccttcaagaatacctatccagagataaagatgtcaatatatcctgcttgaatcacatatctaaggggatggggaaaccaaagagaggaacaagaaattccatgcatttactgctttgttccgaacctgttgaaattgcaagcctgctgtaggttggcgaaacacgataggctcagatcctggtggttttgcagaatcatggctagctttaactgtaccaaggtaatcaaggatgcaacgctcgatttcctcctctgaaaagtcccccacaatgcttacctgaaggaaaccagagaaacttttatgaaaatcaaataaaattaatataagtcaagcaaacatcagcttttaagttggagatctcacctccatattgtccccaacaaaatgactcatgaccgcatctttcacagattctagattcaagctctgtagtgacttaggtgtcggctcaacaaaacgctcatcaccgttcagcaa

SEQ ID NO: 65875 - DNA, 111 bp, Arabidopsis thaliana landsberg
taaaagataaacagtaaaccctaacagacataacataagaaacccaaaccaaaaagctttatgcataccgaaaaacaacaacacccccagggggacaaaatggaacccaaa

SEQ ID NO: 65876 - DNA, 258 bp, Arabidopsis thaliana landsberg
  unsure (1)..(258): unsure at all n locations
agcagaaacgaaaagagangncgccccacagagaacancagccaanncncgcgaccgaaaaggcgngacaagaagaaccgcaaaagcccaacacaacncccaaagcnnccaccaaacccncaaggcgnagaagcacacggacggagcccacagaaaagcanngcgcaaccacangcncaagnnnnggcgacagagaacaaacannccacaannannnncacgaacggcgacaaaacggaccaagcngcaaaggaggaa

SEQ ID NO: 65877 - DNA, 662 bp, Arabidopsis thaliana landsberg
  unsure (1)..(662): unsure at all n locations
ttttctgttctttttcttgtagcattgaaaatgaaagtgtaaattaatatttaagtaataaaacctataacaaaagttacgctttaggtaaaatcgatttagttctttaataacactcaacaacaagtcagcaacaaaccaaaaaaaataatacataaacctcacataaaagttttcatgcgcaaagtttagttacttttacccaaaaacaaattaaaaataaacttgagcggccgtgtgataaaacagaagggaaaatatgcagaataaatagcaatttacaattttaattaagtaggtagaaatttcgttaaattgctataagcaaataatagaaaaaagcttagataaactcattcttcacgtcgtacattttaaaagatgttcatttagtatcatagtaggtttatatactcaagttttatactagtgcatgttgccatctagtagaatttttcataactaaacaaatnagtgttcagaaaataggaagagagtagacttacaaggtcacgagaagaagccatggaagtagaatcttcttcatcttctctgtcttcttgngggcgttaacgatagtagatagaagaaagagttagtgtcggcagtggaatcgttgaaaaaagtctcgtgagttcgacggcggaaatgctccatgatct

SEQ ID NO: 65878 - DNA, 1123 bp, Arabidopsis thaliana landsberg
  unsure (1)..(1123): unsure at all n locations
cgttgttcctttccattcgtgaccttagaatcgcagctcctcgcaacgctaaaatctctcaacaaaacctcaaaatcacatatggggtatcatttgaaagcggtagactatgcgagaaaacaataaatgatacctgttgcagcacttgccgttaaaagccataatgtctccgttagtcctagcattggtcgcggagctaacagccgtggcaatctggttataacccgccccaatctctcccgctatctcgatgcaatgtgaagcgatgagagcagctgcagatgccactgcagctgcaacggttgttgattcaaccgcatcttctgcggccgcaatagcgttagatgctgcggttgcggcaacaactgcagctactcctgcgacagagaccgcggcgtgaatctcagcgttgcgagttctggtctcttgtttcttcttctccttctgatcctttaatcttcttcccattgttcttcctcttatcatgctcttgtacaaatgctgtatcattcacaacgattttattcatatttgctcatatgttttgattctcataatatatcatctagtaatagtcacttggcgaggagtagtctaattgactagtatatattattatattctccagacataacatattaatccgaatctaaaaatccaataaaactagaaccgaattcatgtaacgggtagatctagccaaattgatgtttgacattatatttgagttttctcaaatgaagtccttctttttgtcagcaattatttcgaacgtaaaaaaaagttaaccatagaatttccgctcattgcacattactcactgtgttaccctttttattatttcaaaaagaaaaggatatggattgaataaacaattgcatgatttcatcatgacaattataatgctttctcttttctctcggttaatttttataatcaacgaaaaagttccgaaaccaaccagctttttttcattctttacgtcgactccttttaataaagatatgatttgatttgagacaatgataaaccgganaacccccggtttaatagatcatatataccttcatttctctaaccggtcttggagttattggagggctggtcttatttcccacatgtg

SEQ ID NO: 65879 - DNA, 511 bp, Arabidopsis thaliana landsberg
  unsure (1)..(511): unsure at all n locations
accctatgtattcaggttattatacctttgaacattctacttatcctgagccccagccgaagctggagagcacggtcgcaggctgtaaaggtgggtttccccattcagaaatgtccggatcaaagggtgctcgcgcctccccggaccttatcgcagcgtgccacgtctttcatcgcctctcaatgccaaggcatccgtcagaagcccttatgcgcttgatcgttctcagcaaaactcatgcgtggggacggtttgtcgccgagctgtacgaagagcccgacaacgcccacacatgcgctttgtctttgatgttttctcaaggtccgtcctcaaagctccagggggagccggactgacccttcaattcacgatgtcattcatccaacctggccagagccaggtggaaacctgtattttccgcgatcgcttcgatgcagcttcctggtggagccagannnnnnnnnnnnnnnnnnnnnnnnnnnnnnnnnnnnnnnnnnnnnnnnnnnnnnnn

SEQ ID NO: 65880 - DNA, 113 bp, Arabidopsis thaliana landsberg
gggaaacaaccagaacaaaaaaaaagggatcgaagaaaaaaacaaacccgaacacttaggttttcgccagaagggccacacgaccagggaaccgtgactggggcagcgaccga

SEQ ID NO: 65881 - DNA, 485 bp, Arabidopsis thaliana landsberg
gccgtcttctcttaagaattgattacatgatttgtatgtgtttcccttttaaaaagggaaaacccttaagagtgccaagtatgcatcaaaagaacaaggactaaaaaacattccaagggacttagacccgattacttctttacaactccaaaactagaattgatggtgtagcctcattctttgtatataaattatataaataatgatgtagcctcagcttctatttgcagtatactcaatatttgactcattcactagaatttcaaacgatcgatatccatgtcaaggttactaagcgtgtataatgtatatttagttgtcatccttaaatcccgtataaaaattgtttttggttggatcatattcgatagaatcatatttttaaaatgcgaaacttgaaaagcacacataccattgactgaagtaaacccctttatttgccaaaaatgagtaaaaaccttattttaaacatttggactaaattt

SEQ ID NO: 65882 - DNA, 155 bp, Arabidopsis thaliana landsberg
gcagcatatatgcccaatgatactctctctaagcatctcttgcacggggatagtcttatctttctctcgttataagcgtgggttaaaggcttctttagatgatatactctcttctttctgaggggagggagcattgggggcaggggaaaagcaag

SEQ ID NO: 65883 - DNA, 451 bp, Arabidopsis thaliana landsberg
  unsure (1)..(451): unsure at all n locations
ctgttaatacctgctgtggtaagtgaaagtttgccatgcacggatccgaaccctttttaatgccagngcggatgaatcaatttgctgcatattgccatcaagcagttttaccaaaacctcctcttttgtaacgatagcagctttccgggtgtctttgttcttagtaatccctatgcctttgaaatataccatttgtccggggcggtatatgctcctgtctgtaaaaaaatacatcctgcggatgcgcttttcatagtccggctccggggggctgctataggcatcatagcgtgtataaagatactggtgatcatccgggaacagatggtctttttcccaactgatctcgagccgcagattgctgttttgcctgttgccggcgtttacggtaaaatatccattcttatctgctttaagcagcgctcctttttggagcttgttttttccggcg

SEQ ID NO: 65884 - DNA, 475 bp, Arabidopsis thaliana landsberg
gcttggtccaactgggtacgccattagcatcatatttttttttttaccctcaacggccagacctgtggggtgggggttcatagaactggacaatcctcgaacaaccctaggattcagacaagattccaaactctttctcgagagactcagcgtttgtatagtgggcacagtcttcaccggggcgtagagaggcgcgcgtggcttcgaatacttgaaaagactcaccgaaccgtatgaaccctgtccgagacactcgttgaatcctagctctggaggcaccattgcaatggaatatatggttgattctctgatatctttggctccaagatgacaaacaaaacctaggtgatgtacgagaaacctgagaactcggaatattggttgaagagagttatgatatatatagagaaacggttccttctttctgttagagatctgtaagctcattacgctactttttgcctgtaaaacataa

SEQ ID NO: 65885 - DNA, 513 bp, Arabidopsis thaliana landsberg
aatcaggttgcctgcgcatgcttgaatgtcgccatgtttccttttgtccttcaattactgacgtcatgggggagggacgactcctccgaaacggggctccagatttttgccactacagactcgggcacgcttggagggaccacaactgccgtggtgacgaccggcgttgccgtcttctccaatctcatgttcacggttgccccatcgggcacagccattctcaattttaccgcctcgactgtgggatcattgccggtggccgggaagtcgctgttttcaggtgctgttacggtcgcagcctcagttacccccaatagcaacatccgattccgccaaacgaattcctttttcacttttactggccaaggagccgatatgcaaaaggatgtggtcttttcaccagccatcgcgatcgaaatgctcaatagcgctggaaaccccgacacatcggataacgccgtcatcatcactgtgaccggcagcagcgacctgagcgggaccacggcgacgatg

SEQ ID NO: 65886 - DNA, 143 bp, Arabidopsis thaliana landsberg
cctaccggggacggcgaggagaacattgtcacctccgggatgttcgtccatgaaagtgctgatgtcatagacctgtggataaacatgtgtttagaaacaagtataaagctaaaaaaacagagcatttatattcaataaatttg

SEQ ID NO: 65887 - DNA, 577 bp, Arabidopsis thaliana landsberg
  unsure (1)..(577): unsure at all n locations
gtcgggcatgcggccgatgacgaggtcgaggtcccttatcctttgctgcgacatcagcacgtcgttcgggccgggacgacccgcggccgcatcgctccgtagcgctgcacgacctccgccagcgcccgcggcagcacatgggccgaaacggtcggcaaggccccgacggaaaaggcgatgtcggtattggcgccgtcatgcccgaccatgctgacgccctgcttcagcgccgtcacgctcgccccggcatagcggaagaacacctccccgggtccggtcagggccatcgggcggcgattcggctcgaacaacgccacgcccagcacgttctccagctcctggacggtcttggagacggcaggctggctcaagcctagcagcgccgccgccttcaccacgctcttcagccgcgccacctcgaggaaggcgaccagatggcgcagcttgattcgcccgttgagggaatggaggcgcggcacggtcacctttggaataaccccacagttaatcaaacgctcgaaaggcaacccagcatatccgcacgggcaagggaagcgggcanaggaagagagaaacg

SEQ ID NO: 65888 - DNA, 535 bp, Arabidopsis thaliana landsberg
ttataaagggtctctccgattctatacatgaaggaaaaaaaaattaaaagtctaatttgaaaaaaaaaaaaaaagacaaagaagactattataatctttctaatcaaaggtcatcattgatccccctttaatttttttctttcttctgttttacagctaaggttcaaagcaaatcacagtccttaagagcaacacattcaacacaagagcatatatatacatatcaaataacctcatgtaataatagagcaaagccaaagaaacaaaagcaaacatgtctacttctcatcatcatcatcaccctccttatctcatcaccacattattcttcttgtttcttaacttctcctgcctccatgcaaatgaactcgagcttctcttatcattcaaatcctcaattcaagaccctctaaaacacctctcctcttggtcttactcttcaaccaatgatgtgtgtctttggagtggcgtcgtttgcaacaacatctctcgggttgtctttctcgatctctcccgcaagaacatgtccggtcaa

SEQ ID NO: 65889 - DNA, 514 bp, Arabidopsis thaliana landsberg
aaacatattttacatatttgaacttaacaaggctctgtgattgcatatctttctttttttttcatcagtaaccatgatttattcgaggaaagaaatatttgtttgtatccatcaagaagaaaaagtgtcagatagtgaaccaaaagtgacacagttccataaataaatcaaagaaaaacaaagttagacaagcacacatggtaccatgcagaccatgcatatataatgtaaccaacctgatgagcccttcaatttatcttcatcagtttggccccaaaacatgtcctacttacacttgcctgaagacatgacttatatatataagttaagcctcaccaaatatgaaataggattttattattggttacatatatagagcaaagcgtctctaatcttgggccacaagccccatagctgaaaatgactaagccgaaaacgacattcttcgacagttttgaaggtccagtgaaggatggtccaatggattcttaaatactaaaattttaatttttcg

SEQ ID NO: 65890 - DNA, 413 bp, Arabidopsis thaliana landsberg
cggcatggacaaagatggaaaatgtctcgattgctgtcatgctcatggttatcccggtggttcttttttaggcttcttcgttcaaggttatatgtgtgcatgtaaaggaggataaatctgatgcaaatcgctactcacagtggaacatggttggatctctcttatgagagacatgtccttctcaagcacgtttcacataacttgaagaccttgtcgagggattcatgatcattggttgcagctgttgttgcccataaccgctacatatacccatcgttcggacaaccgatgaattgccattgttgtgcgctgtactcattgcattaaaccatgagttacaccgccgaatgtgatgccaatcggagcacatgtatatagcatgaatgtccgtaacacccccagcccccgacatt

SEQ ID NO: 65891 - DNA, 509 bp, Arabidopsis thaliana landsberg
catttttattagatctgcatctctccaaggggaataagacatttggtttctgttgatttcaccgtgttgagttggagaatgataagctagtctagtataaagaaggcaatacaggctgttaagtctaacagggacttgccggtgatttatgtttttcaactgaagacaaacatctagggacagctgaaacccttgttccactgaaactgtgtcaggaatacgtttgttactctctgaactaagaacaaatagcttgtgaccaacacaaggtcttatgttgaagaaatactttggaataccacaaggaatctgcatccatttcataattgcttgtgacaggagatgcccgcatcttttcataatcttagacataatctcctctttgagcaatgaccttgactgaatctgtgatccataagtgcatgaaagagcatctctgttaatagagagcaccatttctactttgacacacactcttaaaacctgattcctagattgcaagtggaaac

SEQ ID NO: 65892 - DNA, 457 bp, Arabidopsis thaliana landsberg
acgtggctgtcccccatcgcgccctcgatctcggcccgcggttcgagctccgccaccgagtcgatcacgatccgtcgatggccccgctccgcaccagtgtctccgcgatctccagtgcctgctcgcccgtatcgggctgcgacaccaggaggttgtccacgtccacgccgagcttgcgcgcgtagccgatgtccagcgcgtgctccgcgtcgatgaaggccgcgatcccgcccagcttctgcgcattcgcgatcacgtgcagacacaccgtcgtcttccccgacgactccggtccgtagatctccgtgatccgacccttcggcaccccaccaatcccgatcgcggcgtccaggttgatcgcccccgtcggaatcacctgcaccttcaccagcgggccgtccacccccatccgcatgatcgaacccttcccgtgcgccttctcgatctgcgagatcgc

SEQ ID NO: 65893 - DNA, 1801 bp, Arabidopsis thaliana landsberg
actctctatgatatatatgcatattgctatgtgtgcttgatgcaaaatacacaactagagttgattagggactcatatgaggagcaagagctagtacattatcaagtataaaatgctagtgcctttgcagatgaagcagtcaagagagtaaaggactatgctataatcatggacatgacatgctcaacgtgttattacctgctcaaggaaaacaatttttgtaagcatgtcaaggaaaatctgctacaatgggcaggcatcagctctacggtttcaacaggcaatgagcatgtacgtgatgcacatcgatctagagttgaaacaagacgctccaggacctgtttattcaagaaatcgacacatcatattaaaatctcagacattaggataacagcaaacatgttatacgaaatccaagctactcacttctcggggtgcatccacggtcgacttaagaataatatcaccaagaccgtttaataaggcaatctcaagggtctcattggccttaagtgttgcagcagggagagaatttgaagaaagtgcacgtccacaataaccaacaaggaatatatcgtaaacatctccaatttctttccaaatgcgtattcgagctgttttgctaattttcagttctgtttcaccacccacagaacataacttcacatcttcaacaagtaaacggttgaagccctcagctgctaccttccagagtgaaccatctggattgtctcgtcttgtcatcatgcacctgaaaaaaaaaaaatgatcctataagttttgtgtacacacttctcccagacacaacagaaggtaaatagacatggtaactcaaccactatacagaaaatcaagaacttttttctttctgcaattctaggcaaggacgtggaacttgagagagggaaagggggtttgggttaactagataaatcaaataacccatgattccctttctaaactcatgttgagaagagccaacacatctgcacaatgcgcctattggaatcgatgttcgacataatacgagagttgttttaccttctcaggttctggatgacttccggaaacaggatatacttttcaactgcaggagcctgaaggagaagctctatcaaggcagggatcagcttttctgcaaacatattagtcgtaattcttgtggttggaattgtttcagacgaagcatcagctttctgttccaatacttcactgcctggggtgataaaagaatattagattcagacttgttgagagtagattaacataaagtacttacttgcacagtgacctgtgttgttctgctgaatctcaccttcgtcatttggcagaacagaatcaacccgtggaagataatgcaagaactctctaagcaagattagccacattgacgaaaggtgttcaggaggccccaaagagggcaagatttccaaaacatgacgtagtacagggggtacatgtcccttgaaataataaatggaataagcataaaatgagtgcttgagagcaagaagaaagtaaatgattagagaacaaacttacatattcagtttcgaaattttcgctatttatgatggcctgttttatagccaaatcaacaattcccaacaaattgcatgtacattttatcatcaaacatcttcgatgattgcacatataattcacctgtaaaaacattaaacgagaaaaaaaaaggaaagagtaagaaccaaatgttgcaaaaattatgtcacgctaaagagaacactttttaaagccttttctattcactgaatttttttatctagtcagcaaaagagac

SEQ ID NO: 65894 - DNA, 217 bp, Arabidopsis thaliana landsberg
ggacaaccctgatgagagcggcgttttttgttttgagaattagagcccaaacaaaattttgattttgagattaaaattgtagtagaagtttaggaaatagtgtatacttactttttcatggcgaaaaaggtatgacaaaaaccataagaaccatcgtgccgtctttggcttgagatataacactacattgccgttttgagttcaaaaaaagcaatgt

SEQ ID NO: 65895 - DNA, 1776 bp, Arabidopsis thaliana landsberg
ctgaacgggtatatagatagagcgagagacatggagagcagcgaggaagacgacgagtacccatttatttttgcattactcctcactcaaagatcgattccgttcaccagtctctaaccgaaaaggcctctccttttcttttttatgagttgtttccttctctgaactgattcattgcactcggatatagtcaaacccaaatgggttctttcgaattaatctggattaagaatcagtagccctcgaattttacggcttggattgaaattgttgaacctacgattgttcatgattacttctcctgttggtccatgggtttatgctcgttgatctggtaatgttgaacaatgcaggggattagaaagctttgctgtgagcttatggatttaaaggatgctgtggaaaatatgtgcggtgatatgcgtaccaagtaccttgctttcttaaggtaatgtataaaagctactaacttctctttgttatttcatttgcgagttttgaatctgcaattccggattcaaaggttacgtcatgtttctttgtatccggtgtgctagtttctgagattcatttctttatgcttggtttgtgtagaatatctgaagaagcggtggagatggagcatgagttggttgagctacggaaacatatttcttctcaggggattcttgtgcaggatctgatggctggagtttgccgtgagatggatgattggaatcgattacctggtgatgtacatgacgctgaagtcgaagaggaccccttgcctaatgaagtaaccgatccaaagtctgagttcctggagaaaattgaccttcttttggctgaacataaagtggatgaagcactggaggcaatggatgctgaggaaagaagcagtccagatcttaaaggatcagtcgagatgtcttcttacaagtctgcctttatggaaagaaaggcggttcttgaggatcagctccttaggatcgctaaacaaccctcgatttgtgtagctgaattgaagcatgcattgattgggttaatcagacttggaaaaggaccttcagctcaccaattgcttctaaagttttacgccacaagcctccgcagaagaatcgaggcctttctcccttcatgtttgacttgcccaaacacgtttcctgctactctctctaagcttgttttctctaacatctcagtggctacaaaagaatccgcagccatgtttggtgacgatgataatcccgcatattccaacaaagttgttcaatgggcagagagggaagttgaatatttggtgcggttggttaaagaaaacgcttctccttccgaaacagcttctgcattgcgggcagccagtatatgtcttcaagattgtcttaactattgcaaagtgttggaaccacaaggcttatttctgtctaagctatttttggtgctgttccgaccttatgttgaagaagtgttggagttgaattttagacgggctcgaagggttatctttgacttgaatgaaactgatgagggcttggaatcaccctctgactttgtgacaatattatctgaattcgctatcgcttcagatactatgatgactgattgtagcattcgattcatgcaaattgtgcaagtaagttgattttgaacactgatcttactattttctttgattctgttggcataaatatatagaagctttatttgttctttcaggacatacttgagcagttaacacacctagttgtgttacactttggtgagagtgtactaacgaggatattgcaactatatgat

SEQ ID NO: 65896 - DNA, 1503 bp, Arabidopsis thaliana landsberg
aacagttatgtgattgttaatcaacaacgacaatagtgaatccatgttttgctatggtaatataatagaagcttacaggaaatcaataagatctgcaatctgggatgcttcaacaggggctgttgtctgtgcggtctttccgaaaacatcgaccagtgcgcttaagagaagcattagcgtctgttgagaaacaaaaaatgaacaccaaagtaaaactacaagaaaccattgaagatcatttcatttatgttgtttactcgagagactaggaattaacatgctagacgatggcaactacataatattcaaattctatccagcctttgatataacatttaacatgagcagaacgtcacacggtaactctcacaagcatatacttgaaaagactgaccacttcatatggatacaagccataagagtaccttgttaaagagagtatgtgtactggcaagcctcggaagcagtggccccatgatacggaatacaactctgagcattgccacagatgtcacaggccggaggttcgtgatgatagcattcgtgccatcaagccattcttgtgggagattgctgaagaaagcatgaagcaaggcgacaatatttcctggaagaagacacatgtaaaaacaaaatccaaacaaacatttcacttctagatccagaaactatagcatacctatggcggtcgaggtgttatcctgagcagcccatgtaggatccatcaaagcgtatccaacagctgagtctagttcaccttgtgatctcttcccgtccttaagccaccatgtttcccttgtcacacgtgctgcctccaagtaaagctgtacgtgaaaatctggagggagctgagccaacagaagtccacaagcttgaatcaacagacacgacagttgctgacatgtataaccgcttctagagacaaagctcgctgtgttgataccaggaatcagacaagtggaccggctagcgctcatggagtctgtgctccctccagagggagacgttggcagtaccgacccttgtcccaccccgttggcagcgccgtggaacccgtttccagattgaatcagagtcgattgtatgttgacaattatctggacaagcgaagagacaatctgagcagcagagacaggaagcgagaggatctcgatcacggctgtctcaagaaccagttgcgtgtaagttcctgggtcctggatctgatagaatgctttctggccctcagaggcgtttgctggtccaggctgagatgttcctggagtttttccatgaggaggtcttgctgagctgtttaagatgtctgccattgagccagacctcgagctgcagttgctgctgctgctaagtggaggtataacattgtttacgagattaagcagaagagaggcaaagtaatctagaggtgggcatacaggtgcaccggtagggctaatgtactgcgggaatgattcagagaatggaatctgcggaaatgtcaaaagatttgttacgttccatttt

SEQ ID NO: 65897 - DNA, 3104 bp, Arabidopsis thaliana landsberg
  unsure (1)..(3104): unsure at all n locations
cgatagaagcggaagaagggaagaacatgaacgttaagactttgacataaacttctnatttcttcataattcacttgtagaaactctacttccggattcttctctgcaattttacatatctgaaaatatatatatatctaagtcacatttacgataaaaatataaaatccaagatactgtacctaaagtaactcacaatgtcaacataacttgagttaattttgattaaatcctataaatagtttttgcttaatttggtaaatagttattcttaagatctttcgtgtaaaaagctgtccccggtttatttttttcagatgattaagaccggcttaccttgggatgaagagctatgcagccaccacaactaggcgagaagaaatcaacaacgacaagtttatctccagcgttacgtaaagagacgacaagatcttgcggtgatgtaacagacttcatgttcggtttcaattccttctcccaccatttttggttccttccgatcccaagacttgtctggattaaacaattcaagaaaattaactatgttcgataaaaaagattaaattttctaatgattttgaactaacctgacatcggacaaacgcggggatctttttcttggaaaacaatatgttaccattctcgccggatatcaatgttctcgggctgaaatggttgcaagatatcaatcttgggctaatgcaacacagagaagagatgcttttaggacttatgccagcaaaatctcggaggtcgaagcgggcacggttaaaggaaattggatttaacttgatgaacgaatccgtcgccatgaattttacttaaaaacagaactgccttgttccacaagaaacatgcacatccaaggaaaaaaacttgaacgaagagaggagaggcttttgaagggaaatttgatatttctcttctactctctccccaccctcgaaagcgagattttggagaaggacatacgcttacaaatcataatttttcccatagtatttatctatttttagcttgatatttctcttttgccttttgttagtaaacttaaggtttttctcttcctttttcttaggaaactcctgcgatcttaaagaaactattgctgcatgtgacatgtactctattatccatctggtttgatcaatttcggttcagtcactcggtataactattttattttgtaattccgtttggtttagatcagtttagcaaacacattgtattgtatgtctttctctgtttgcgagaatatcaatcaaccaaatatcaaccatcttcctctttctctctacaattcagacccgaaccaatccaatccggatatatattgagaggaagaaagcaattgctggtggtctccggatccaagaattgaaggaacgggtcaagaatatggagctaactttgttggacttcaaagttgaacggaataaggagaaggccaaatctgctgctgctgcttctaaagtcttgtcgtttaccgacattctttgatgtcgaaactaagttctagcaatctagcttatatatttggcatagaaagactactctatgtccatccttacattctctgttttgtgcaactcactattgatttggcataagacattttatttacatgaagattagttattagttgagttttaggctgtgtctagtgttagcggtaatcaatccaatgattagaccactccaatgaaaggcaaataatcaaagatagatattgtacctttaatttgtttctaaaccaatccaatccttttggttagaccaattcctcatgtctggtttattagacaaagccctaaaaagacactaaagagtaaataggtatcttcacaagacagccttaagattccaaaagttgataccaacaaaatcaaatcaggtccacttgacagagaatcttgcacatcgcatcaatggctcttccttttcgccaacattctctagctcccattgcagcaacgcccacattttcaaaattcaatctttttccccaaaatgtccttcgtacactctcttctcgcctgagttttcccaagtttcccgactgtcgtcattttcagagttcgcctccaacccaatttaccaaagattaccggaaacccatttcgcagaatggctctctctactcacctttagttgtcaaatgcagcgaccacgatgagcctcactcaactatcgtttcttctgagttcgtcaaagatgaaaagtcggagactttagaaaaaatggatgatttggagattacccacgaaacgaagaagggaaagagtttttgggctgccgttagtttgatcatcggaacagccgttggtccaggaatgctcggcctcccagctgcaactatcagatctggttctatcccatcgaccattgctttactttgttcttgggtttacgtcatttcctctattcttctcgtggctgagctcagctttgcagcaatggaagaagacaatgcagcagaggttagtttcacaggacttgcaactaaatcctttgggaacaaatttggagttttcgtggcttttgtgtatgcttcactaagtttctctttgatggttgcttgtgtctcgggtattggctccattgtgtctcaatggtttccttcaatgaatccatttttggccaatgctatattccctctagtttccggaatcttgatcgggtttttccctttcaatgccattgatttcaccaacaggggtctctgcttcctcatgctcttctctataacttcacttgtggccattggtttatctgtggctaggtccaatgtgttagcctcatttggtcaatcatgttggaaagtctccatggttttacccgcggttcctgttatggtactgacactagggtttcatgtgatcacgcctttcatatgcaatctcgctggggattcggtttcagatgctcggagagccattcttgtaggcggtgttgtgccattggctatggtgttgtcttggaatctaattgttttggggcttgcaagaatcactgtgcctgctgcaccctttttaaccattgacccaatctctcttcttctatctgggaattcttctgccttatctgctgttaaagctttgctt

SEQ ID NO: 65898 - DNA, 570 bp, Arabidopsis thaliana landsberg
  unsure (1)..(570): unsure at all n locations
gaccgctgggagccatgcggcccgaccttcgtgcaacccctaaatatggctcgcacaaaacgatgtgttctnnnnnnnnnnnnnnnnnnnnnnnnnnnnnnnnnnncgtanatcgaagatgtccccagcgcgctcgaagatcatgtagtcgtctgcttggagcacaaacgggcaggcatcacgcgacgccgtgttgagctcggagacgggcgtcggcgtcgtgaacgagccgttgggattgcgatgtgcgacgtagatgtcgcgcgatggcttcgcgtggaagtagatggtcgcggccccattcgtgatcgtgggcgatgcgatgtcgtcggtgatctcgagctcggggatgcgcgtgccggtgccccacggtgacaacgtcgtgttgcgcgtgtggagatagaacttgtgcgtcgccgactcgtcgagcacgacggcagtcagcccatcgggagagacggcgaggttgctgtcatcgtgcgtcgacagggaagggatgagcgccggtggtgaccagacgccgccggattcgatcgcgacgtagacgtcgtactggcccgcgcgattcga

SEQ ID NO: 65899 - DNA, 1924 bp, Arabidopsis thaliana landsberg
  unsure (1)..(1924): unsure at all n locations
gctaactgaagatactcatactcttttggaagagcaacgttgaattcagtatacttatttcaaaaattcagttttgattactagacttgcacccaatgagtccgtacactacaaaaggcaagagctattccgatacagaagatacgatgatagcatcatacgtagtaaacaaacagtttcaacgattccatccatagcttgatttgtttaatggagaataattgaaaagacaattagatcggactcctcttaaagcttgctcgaacttagagcatctccaattctccaaaacgagtatataatttaaaccattggagatgttcttattatctttcttttttttgtttcatagttattgttttgtttttaagttttaacttagttttaggcaagcgaaatttgttgactaaattaattttgcgtgcgagatcagtagtaaaaagcaaacaccaaagcttttttgtcaataaaatgatacaatcaaaacgaatttcaaatttgtttttgagaaaattacaaacgcagtagatagacttcacaaagggccaaagcaaccaaactctttgacgactggcaagttcaagtcttcggtcttcctacgacccgccatcgtgaagtagtagtctctctcttacttatgaataagggttttgtatatgggcttgggctttagtttgggcttttaaaagattaataaaatgagaagtatgataataaatccgattggttacgtttgtgtgacatgaaatgaaacggctaactttcgattccttatccacgaaatctagttaattatctatctccctccaccaatgatgacacacagttttatcaggtagacaaaatgatgcaacccaatgcaaaacttttgtccccatccgctaaatttctaccgtcacctatagagccaccgcaacacaaccgtagaaccaccgtaggagcacctccgtcattggaacgaaactgcaaattatcgcgacggaatcttagtaaatcctcgttgcttctactcctcaccactcaaacaactctgacgccattgctcgacttctctaaagctcaagcagatacaattgctaaccctaatctcacaaattgcgaaaacagagtaaggaaaatgtttataaactggatttcaatttcaatgtctccttattaattcgatttctgtttccaattttccccagattccgactaagaaagcgttcatcgacgtgtcaatcgacggcgaaccaatcgggaggatcataatcggattatacggagacgatgtaccggcgggaacagctagattcagtagcattgtaagcgggaaagctggaattacttaccggagaaaagattttgtgaagattatgccaggttatgtccaacacggcggaattagatcgtacggtgtcgatgccgagcgtgccaccgccgcggtggggagtctccaaaacctaattgaagagtgggagagagggaagagaggagagatatgtaatgtaaataaggcgggaagcgttggaatcgtggtgagagatccgtcgaaaccgccgccgaagacgaagcttgtggcaaggaatgggaagcttgtggtcgaagaagaggtaattgcggtggggccaaacggaacggagtttgttataacggcggttgnnnnnnnnnnnnnnnnnnnnnnnnnnnnnnnnnnnnnnnnnnnnntggaaggaatgggagttgttgagaagatgagagaagtgaagactgtgagggataacacttcatctccttatttcaggtaatatattactgaccgttggatttgacttgtgtttttgagatcaagggttgtgattgtggttctggtggtgtgaacagggtggctaaagtgatcggagataagagagctgtggtggcggagagagggtttaaccggccttattctaaggttgtagtcacc

SEQ ID NO: 65900 - DNA, 1989 bp, Arabidopsis thaliana landsberg
gaatcaaaagtgcaaaatggggtttggagcgaaaagaagagaaagacaggctgtgactcttcttacacaagtcatcgaggtgactatggtagaacttattcacaaagttggtatcaaagtcttcaagtacaacagctgaagtctgagggttctgcaacaatgaatatgatgttatacctttttcactctaggcaatctggttcagaatcacataatagtaagcaagtatacttctcctgtcatattcatgatcaactgaaggtgaagtatatgcaaagagtatagtgcgaatacacatttgaattgtcttcccatctatttacttggaatatatattgtacctttctcatgaaagccatcaaggaggatgggggtattccagggtttgcagtatctgctgaaagaattttgatgttttttgatgcaagtgaatcctgagctatctttaaagcatccagtgtcatgtttgtaactgaagaaacctaaagcagaacaccaaaagtggaggttaagtcgcctatgacagttttcacattatcgaacgaattcgaattatgcaagagtttcaggatatcaggaatttctcacccttgttttatgagcaaagaaggtgtttatccctccacttaaaccttttccaacagatcctatttcaagcacctgttagataatagaagaagcaatctgaattcgatctttagatttagaaaattgtgaacattcaatttcacaaggaacacttaaacttgctttctgcgctactaagaaacaaataagttgcagcaacgatgaaacacaggcaactttttccacagggatttcatgcataagactagctgtctctatcaactttgtcagaccaaaacaataatgattaccgtttcaatcgaagtattgctaaggcctgcgacagcatctgaatgcagatctaattcgtgtaagaacctcctgctgccaaggtaaccccatgtctctccggtcagaaccaaaaacacaagctgcattcatttacgatttacatgtattaaagcttgcaaacaacaaaaagcgtgaaataacactaaatcacatggtacactggcacctgttttttgagattactaataccatcaactcgagaaagagcatcaactgctcctagaagagctaccagaccctgaaagaaggagaacgtgttgagcaataaatcgggaaaagaaaaataagaatagtaaataaatgtattctagatcaacccaaaagcagaaaatagcaagttctcacagatattggtgaatctgcaccaaaacttttgtcacggaaaaatgatgcagtatccatggaggccacagtcagcacaactggtttgcgattgttggaagacgaaacactgattggtggaagcgaggaccaaacactgtccttcataacaaagttgttagaaaacgaaacgtatcctttaaaaggttttcatatgtcattagatcagacagtaataaagacctaaatctttacctatatccgcccaatgggaggcaagttccctcctgcaaacaagcctccgaattgtgtgttccagctttggtagtctaatacaaaaaatagagaattgggtgtcataatctaagtcaaagtgaagatccataaagctggttgacgttccagtgagcaagattgctaaagccatatacctccataaccatattgaattcagcaacatcactggtatatgttccatgcttcatctttttcttggaaaggatctgcgcaaatataataggatgtaaatatgtagtcgataacctgaaaaaagtgaagctatccacataaactatacactttagattgctaccaacacaacagaaacataaagctagcttcttgacagaacctcatctggtaaggacaccaacactcctatagaatgacatagttgaccagcagtttaaaggcaactaccacaagacaaatggaaaggctatggttgagtccaagtgcagactatgaaag

SEQ ID NO: 65901 - DNA, 2050 bp, Arabidopsis thaliana landsberg
ctcttccacacaacattttaaaattgcgaaagaaatcttttttgggttttcacatgcgatacgagtggcgtttgagtgatttttttttccaattaaaataacaaaaaggcatttaattagggaattgattgctacttgtgaattaatcacaagacataagtatccaaaaaagaagcaacgtgaatattatcccttgattcatgccttgtcaactcctctagaaggttttctcttgttagggaacactctctatctttttaaatggtccaaattagtcacctaactcaaccaattaaacgaatccacatgcaattcaaactatatatctatagtcacttcgtctaatacattctgatgttctatgaatatgagtaagacttaggtatgactagagtattatacatcgtctctatttgttctattgtttttttcatataaaaagtgttggttgatgggcttttataattcaaaattcgaagatttgacttactgtatatgatatgttattgtatatcccaatactctaaaatactgaaatgttttgagtaccgtcgcgggattacgtgatacagtggaagactggtgactcggaaccctgtgactcgtgaccggagtgaaattattattattctaaccattgattatcctgatttctcgcttttttaacaaataaaataattttgtttctcctttaaaaaaaaaatccactatgctattgagatcctagacgtatccaagaagcaaccctagggtagtcaaaaatttaatatatttttttctttttttttggtggaataatatattttttttctttatcgttcggtgatacgaatctaccttttctaacacctatttattttgttttgaatctagttttctttaagtaatgtaatttcacgactgaattgaaccatcaatctcaaaagacctctgattaattttcatccatctttagaaaaatagtgaagtttgtttgatgaattgggacaatttagttaatatattggtggtatacagaaaattattaattattaatttttatttatttattaattactaataacattgaaaaaggaaaaacaagcataatgtacttgcttcttccttgctcgcgcgatctaacggcagcaatggaaggagggagtaacgaaggatgaagcgtgggccattgaatttgagatagtgccacgtggacagtttagttaatgggacccataagccgacaaaaagaggacacgtgtagaatatatttgcacaaagacgtccgtagagagaaacatacgccaccattgatgtccgtccgcaaaccaacgccaacaccgagccgcgcgtcttttggccgacctttgattgagacgcttttctttattatccaattccaaaattaagaaataaactaggcgaaaaaaacaaccaaaatgttttgactaggactgatcctataatagtcaggtcgtagtaactagtaatatctgtaaacttgaaacattattatgaaatacggtcgaagaaaattaaattaaaataggttactaaaaaaaggggggaaacaaaatcatggaagcatgcaaaaggagagctaagtttgcaagcaaattatacgagagtgggtcaccactcactcttgtacaccacaggtgcatgcttcttctttccttaaattttgctcgcaaaatcaaaaacaaatttagttttcgcaaagccgaggtaatcaaattcaaaaaggataaagcaaattatatataggtaaatcggtaaataaagaacacaaagagaaattcaaatcttggctttgtttaaccttaagcttttcttctttagtcatcgggatccccgctgtttataaaaaagatccatgaggcatgcaggagttatactaatccgggcccttcactttgatcgtattccagattttctttgggtccgctagcctttaaacatatgccgtagtcctataatcttgtttatccacttatgatagaaaatccgcaaacatcgatgattggtgctgcgtatgtataagaaacactaatcttcgcgtagttaggaa

SEQ ID NO: 65902 - DNA, 582 bp, Arabidopsis thaliana landsberg
tttcctatgggttctaaatattcgggtggttttttcggtccgtttgatttgacaaatcaatatcaagaaaagttgtttaatagaacaaaacagattcggagcgcacagaacgaaaacatattacatgattcgtgaggaaataaaaacaaaaacaaggttgaacaaatatgagaacaagtcttccaggttagaacattcagcgaccttttatgaaatatataaactcccaaaaaggagaatcgataaatttaagaaggaaaatgaaatattttcgataaaaatcttaatcgatgtataaaaatataatttaaaatatgaacataaatttgataaatacttatatataatgcatcaagaaccgtccataaatatagtatatcttaaacacacgatgaatcatatacagaaaagatattcgaaagaggataaggccgaaatgacgatgtaaaataaatagaactactaataaaaagaagaaggatcggctgaaaagaagaagaatcggacttgtcttcgaagtcagtgtgtaccgacaaaaaataaaggagctctcaaagaaatgagcagcaaagtgggcgtaac

SEQ ID NO: 65903 - DNA, 1198 bp, Arabidopsis thaliana landsberg
tattcacctgcccgatgtttagcaaaagttaactaaagcataatataaagctaatcttttatcataatgtctgatcaaaagaatttaagaaaagaagagatgattcatttagttttgtcagctagctgcaatgggaggccttaaatcagtcaggtaacaggaagacttactcattggttgctttgctttgagctgccacagcctcttttagtttacaaggattgtgttgttgggtcccaacactagtgaaattgcctcctattttcccacagagagcacaaggattttttcccttgcacgttccaccattcttttactctcacggatgatacaggaaccaatcctttttgcgcttcatctgagtcaaaagcctgaaaaagaccacatataatacatctcagcctaaaaagcaaataccatacctacgactggaaacatatgggataagaggataaataaataaagggaatccttcaaatggtaagtttcaaagtaaaagtgttatggtatgatcttgtctgccttttctttgaaaaagccaagattgtgggtgtaactgttatcaaaagataaaaagattcgtgagatctttctttcttgtgactttttccttcaactaggctcctcctttatggcttctctccgccaacaaagaaagggagaggcctcaactataaagctatttataaccctttgttagacaatcagtccccattcggagattggttgcctcggccattcagaaatcacactacttttttatttatttatttataagatcaaaaacccttttccatcctggtttctatactcttgtctctcagaaatcaagaggccttatgagctatctacatgcaagcctcctcaggaaaagaaccatgcttatagtaagaagtttcaccatcttgcttctcagctgcatagcctttaagttggcttgctgcttctctagcagcatttcttctttgaaggcgcttcccctagtaggccatttggagtttgaacatgtccatcacgcctccaaagattttggaaatcgataccagttgatccctttggcggtcttacatcccaaatcggtaagcgacatcgcctcaacgatacgacacatctggatgatgggcactcattcacagcttacagtggcagcgagaggtcgtggacattcactccaaggccaagctcaaacaagacatgg

SEQ ID NO: 65904 - DNA, 176 bp, Arabidopsis thaliana landsberg
acgcaacacatccaaacaaaaatatacaacacacaattataattataaaaattaaaatataccaaatctatttaaaaaacaaaaaaactaattttaattagaaaaacaaacgaatctacatttaatataagctattagcaacatcaccttttacccaaccattataaaaaaaaaac

SEQ ID NO: 65905 - DNA, 768 bp, Arabidopsis thaliana landsberg
atgttttaatccaacattataaatgttgtgaaaattagcttaggatttggtcaggaatctccaataatcaaaaaataattgtataaatttgattggtaatatttcgtaattgcataatgactctatttgtataataaaattttgcagaatgaaaagttgtaaaataaaaatttgtgtcgattagatacatttgcaaaaatgcggaataagattttatatcataaacaagtatatatctacatatttgtataatgaattgttactagtgtttttaggtgaaaacacaaattttctattttgttaaatgttatgcaaatatttttgactgataatttttttgtataattacgttagaaaatgtcattccgctattattatgcatattaccaataaaatcaactgtgtaacaacagaatgaattttgtttatagagacaaaaaaaacatgaagtaatgaacattaaaaaaaaatcttagtaatataatgggttctctaatataatctaaccttcgagtgagaaaaaaatgaacataaaaaaaagaaacaagaacaataaaaagagtgggagacaagagggtgataaatggtatagctacgggacggtgacgtatgatgtgaaagaaaggaagagcgcgggtgatgatggaattaggtgacaggcatgtgacaacagtgaagctgcaaagcctggttggtgtgttcccttctcttaagcgtgcttcaacgtgtctctttgatcatgaccttcttcttcaaatatacaactct

SEQ ID NO: 65906 - DNA, 116 bp, Arabidopsis thaliana landsberg
  unsure (1)..(116): unsure at all n locations
aagagagagggagagacaccggagaaaccgggccaccggcacaaaaaaggaaacgcanccccagcgagggaacaggggccgaacaaagaaacggggacacaaaaaggggccagaca

SEQ ID NO: 65907 - DNA, 199 bp, Arabidopsis thaliana landsberg
aaaaagggacgcaaaagaacaagaaggcacagacaaaagaaacagagacaggaagaaaaaagacccaaaaaaaacacaaagccgaagagaaaaaaaggaaaaaagaccaaaaaaaaacaaagaaacgaagaaaaaaaaaaaaaaccagaaaaacgaaaaaaacagagagagagaaaaacaaaaaacaaaaaaaacaaaa

SEQ ID NO: 65908 - DNA, 1205 bp, Arabidopsis thaliana landsberg
ttaacttctttcctcccaattctcaagtttttcagtttattttgccactcttgctttttcctaatatgtgcagttctccacccctgagtcttcacttcattctcctcctgttcccagcattgccaattagcgtaaaccaaaaaaaacatccctatagtcaacactcacaacacacttcatcatgaaacttcaaaagctcaacgaaatgctgaatattgtccaacacctataacactgtacagctctttgacagtctctataatggatcaagtaaacttcttttttcttctcatcatccacaaaaacacatacatatgttctgcaattttggtgagcaagaaagtgactagcttactacttctcaataccaaaaggcaaatcctttaaattgtataatcttcacatcattgatattattctatttctattcattttccccagaatttttttctatcgaatctattgattccattgctcaagaatgattacacaattgtgttttctatgcaaagacgctacctgagagtcattcacattcctcgtcgattgcttctcctcctcttcaacaaaaaaaaaaaaaatcaataaaacatcaccaaatagatttgaattttgactccagaaacaaagagaaacaacagaaatagatttgaatttgacaagagagaagaacccaaatatagaattcgaattaatccacaacaagagataaaatcagaggtcgagcgataagcatctattcatcagtcaaattttagtaaatgataaaatttggaagaacaaaaaaaataaaaaataaagtcaatattgaaccggaagctacgggaatggagagataagaggaaatagaaaaaaacctcgatcagatttgagatcagtgaagacgcgctccgctttagccgcggcggaattgaaggcggttctagctttagagaccaaggacggcggcgccgtctccattatcgtgcgcacctgtacgttgcgcaagttaatcttttgtcaacgacacggcattgaaagcttgaggaaattgagaagacgaggaagaagaagaagaagaagaagagatcaagcagacgaatttacgaagacaattgtcaaattttaaattatttgtttcctagatttattagtactactaataaaaataagatagagtaatgtttttgcaatattcgatttatggtatggaatttaatatggag

SEQ ID NO: 65909 - DNA, 2421 bp, Arabidopsis thaliana landsberg
attcaggttgatataactttcttttttgaaaattttagattttatgtgttccttaatttgattgatatctcgttttaattatatttattcggaaactaaattaattgtcttcttttgtttttggtagatatggaagtaaaatttcaaatgcttctttgtggaactctagctctcaaggaacagaaaggagtttgatagaccaaattaggcccggtttaatccgcaacgcgtcggttagcaataacatccgtggtagtgattattggactaacaacaagtctttccaaaacatctactcttcttcaatttctaatcactttccgaaactacgacacgatcatcacgaacggaccaattcagtcacattcaacagcattcaaggacactcaagaacttttcaaaagttccataacggtgttgaggagaacactaatcattcttattgtagcaagacaaatggcaaaagagacgcaagtaggagcattgatcttgatctatctcttaagctaagacaaccggagaagacaattttggaagagacagaaacagcagcaacaacaacggatcaaacgttgtccttgtcgctatgtccagggtcgtcttcgtggaaaaagagccgactgatgaaagatgaagaggatcggacggttaagattggtcaggagagtactctggatctgactctatgaattatatttaagaatgagacaaattctaagtgagatcttgaggtacttaccgatatcttaatattcagtgtcgttgttgtttatcattaatcatgtattttctttattattagaaaggaaacaaaaatgtttgattatattaacggtcttgagtttgtttgataccgccaatttgtatcatcacatatataaacaaatattactagccacatcataatgattcgatcttttgtcttctcatagcaatatactatatgaaaattacatatacatataacaacaaatttacatcgattagagtatctctgctggtgagcttcattcatttgtagatgagacttttacgtaaatagtacaaaaattttggtttcgtatttatccgaacagtacatggacaattttgtagttccaaaacatgttatagttaatagtagtgttttcaataatttccaaaatctatcttcactcatttttcccttttcagagacatagtgaaacaattttacactatgcaaatccgaagccaattatttttgaggtttttactatatgtgaacaagattaatacttaaacaacaagacacacctcgttctttgtaaatattaaagaggttaaagatcataatacaaaaaaaaacatagaaaaagttcacaaatcatcaaatcttttgagttcattattctatataaaattttatctcgtgaaatgtttattgtataaggatgtgattagttgcaaaccaaaaattaatgtttaatagtatttgatagggaacttatttcaactgtgtaaaattttcccggtaaaattttcgttcaatcagtcgattctaagaacatgaatcttattgaatctctaataatttattgtataatatggtggcacctatacgtcaatacgataatgacgtcgttaatagtaacgttgagagttgagactgttgtataattttgattcgacgtgccaaatactacgttcgaccaagtatcaattttgattttccaaaaagaaaaaacaagaaacttaggatctccgttagtttgattggatacactgatactgtttcgatatttagacaaacaaatggaatctttgcttcttaaacattcgatgcgtgtgtgtacctggtcaacttcttcagacttcattatcaaacatggccgcacgatcagttttattttgctactggagaattatcttatccacctcagaatctaaactaatttctgaaactatataagtgttttttggggctaaaaataagatgcatgaagtgaaagtatcctagtggttaaaaaggggtgtaaacataacgtttaatgttgtatccctttatatgtacctctaatgtccctctttatttacttttaatgatttttaagactaaatatcttcagttgaagtaggtaatctttttgccaaattagtcttcgcaatacacggatcgatttccttataagatattaaatttaactcattcaaaaaatattaaatttgcaatgacttataagataaataaaaaccaaggtccatatcttatcccaatttgttttttttttgtataccaaatttgtctcctatattgtttttatatgtttatattctttctcctagtaatttacacaaagaatttaagaagcttcattgaaatatcaagactagaattgaagaatgagaaacatatctatcaaacctcgaagacttttctccatcaaaatgtgcaaacagaac

SEQ ID NO: 65910 - DNA, 1241 bp, Arabidopsis thaliana landsberg
tagaggcttacagacctatagagtgagaagcagctagaggcgagatccgttcattgctaccttgttggaagggacgctatagcctgaagaatcttcttccttggaccctgcattgcatcaatagagtgataccaacttcaagaaatctactaaaagaacagatcaatctcaattgttttcgatcgataagaaacaaaaggaaagtaccattggtatgatgagatcttttagatcactttctttcatctgctttattgtggtcatatccacctgttgtcatattagtcaagtttgttattgaagaacgatgacgaaacagagctcagacaagaaactaacatggaaaagcaataacgaacctctcaatagccaaaatcacaaagctctaagataagaaaataatggtacacttacttcctctctcttaaaggcaagggagtattttccaagtccaattgaatttagaaagccatcaactgatagaggctcgtccacctgttgttccaccaagtagatatacatgccatattataacatatgtataagaagaaggcataaagttttgactatctgatcacaaaggttttatgggtctaagaatgacacgaggtaaatatgaagtactcacccaatgtatagaaagagtaagaagagagaaaattcatccacaaattgagaagaagaataaagatcttacagagaagggactgttctgcataatacttccaagtggaggaagctggctcaatggaggcaatggatgtgggtttgggactggaggaggtaacattggcctggcgaaaggagcaccacttgatggcgcttgaccatttagtacacctctaacaggatatggcgatgctctcatattatcaagcatcctgcttcgtccatgaaaatcttcaatgttactacgtgggggagaacccctggaagaacccatgtagcttctaggattcctaggaggggaaaaaccctgagaagaactcatgtagcttcccatatttctagctggggacagagccctagaattactactgaagcttctggtgctccttggcggtgactgatcccttggagggcccattctccttccagcatttcttggaggtgatctatcccttggactgccagttacccttccagcatttcttggcggtgactgatcccttggagggccaaatctccttccagcatctcttggaggtgatatatcccttggactgccaattatccgtcca

SEQ ID NO: 65911 - DNA, 288 bp, Arabidopsis thaliana landsberg
  unsure (1)..(288): unsure at all n locations
aaaggacccacancggaanccnnagcaagaacaagagcggaancnnnncnggaaaaaaaaagcaaccaaacacaagaaacaaagaaaaaagnaaaggcgaacnaaaccccaaaccccgaaagnngacccgnnnancccacccccacgccggcacgaaagcaaaaaaaaaaaaaaagggnaggcagacagcgaacaaccgggccgagcgggacncgaaccagcgnagacaaaaggccaancgaaanacaggccggccccaanaaccgcncgggcaccgacccaggaaga

SEQ ID NO: 65912 - DNA, 305 bp, Arabidopsis thaliana landsberg
acacagtactagtatacggaattcttagtcccaagagttctggagaagcgggctaaaggcactagctccataggttggtgtaaccgctggatcaaggaccagtatatatctggctcaagggctcactttctgagcactgctgtatttttgtttgatctcccaataaacatctttctggaaaggaatactgaaagaaaaaactccaccttgttcctcttgaatatagaaacaagctaagtgggtctggctggcccaattaaaaaagcgcgatttctttctctataactaactaacagggcgcactc

SEQ ID NO: 65913 - DNA, 1286 bp, Arabidopsis thaliana landsberg
gttttccaaaaccatctaatgtttataaaatactaaattcaccaaaacctaaactaaaatttggagattagcttagctacttacgcatgcaaatagaaagtgtaataaatatgaatgcttacgctggcacggaggagggagacggagttggaacggtcatggcctttagctatatgggccatctctttcattggtccaccgttggataagatatcccattccgatctaagccgttcgtttccaaggaagtcaaacaaccgcctcggagataccggcatccaaactgacgtcgccgcatttagaattatcccaggcggctcgccaggattgtttacactcttcctagtcattatcctaacgtcttcgtcgacgttgccaacgttgagtttgctccatttctgtaacgacgaagcacaaacccctccacagaaattatcagtcatcctcttcgctagctttagcatgctttttctcccattgcagtttatagctgtgcccattaatataaccaaaaaaagattaattaaactatatagtttgataattacagaatcaacagctatcatctttttctttgtgactcagtcaacagttcatactatttattaaatcttatttattctggtaggataagatatgaatcacgtcaacaacaacaaacaaatatatatttctacaaaataaatcagaaacgcagcgtttgagggagcttacgggatggattagtggaagtggaaacagtggaggacatgagaatcgtgaggcattcgcattgacgttgtaatgcagccatccatcgatgcgcaccaaacgctagaccgcacctgagtaatgggcggtataaacggtggatgtggttttcgtcatactccgtgtgctcgatccatgttacctgcaaatttgcttaaatcattttgcgttagatttatcacaatcttttttttaggtctaatgtgagctttaacacataattaatgataatcaaagagaaaaacttctatgaacgtgtaatgataaaaattaatgcacgatccaagggcacagaactcggagatatttagatgcttctgatcaataaaataatcctactccaatgcataagttaatttaaagttataaacccaatgcataagaaacctttatcataatttctcggacaaaaacaaagagcttgcctgtggttcctagagaaatgtgaaccaaccaacactagggtaactcctaaaggtgaaaagttaaaactatacagtatactactatgcccaataatcatcacccagaaagaa

SEQ ID NO: 65914 - DNA, 149 bp, Arabidopsis thaliana landsberg
ggcagcaatgggcccgagtcatggtattgttgggaagaatatgaatgtttgacctataagtcattacagtatgaccaggtttcaactatactcattcctcagcaacaacaacatggagaggggcacacatacaccatgaacccactttc

SEQ ID NO: 65915 - DNA, 563 bp, Arabidopsis thaliana landsberg
caaatcgtttattctaccattgttggcgttaatttgtgttgtaaaacgaaactatacgtaaatgatcttatcaaaattacttatgtgataataacaacaaaattacttatgtaataaaaagaaaaaatacttatgttatgtaattcaataaaagtattgcggtatatcctcttttaattgtatcatctatatggagatgcatgttcaatttcttaatccaagaaaaaaattcacgttcaatattattaattcgttacactattcagaacccaatctaatcaatagttttgaggatacatgtctacgtagggacaaagaggaacaaagatgtatccacgtggcaagacaagtgcgaagatgagtcaagactcaaagagccctcttcgttccccacactgtctggtcggtagttgaaacgttagttgtcgacttggcgcgccacctcctctatttttcctaactgtctataataattaaaacacaacttacgacatagactttgttaaggtacatgtatcatataattaacttagaattcgaactttaaactatagtttgcaagc

SEQ ID NO: 65916 - DNA, 371 bp, Arabidopsis thaliana landsberg
tgacaattgctcaggagggctacagatggaagcaaagaacaagggatctaacactatgacgcggagggccacaaacgataggctttgagagccagaccgattgcacaaatttctgagaggggcccctgaccggactgagttcacatatatgttatggcacggattcttatattgggaccgccatacctggataatgaatttttatatataaacactggatgccccaagtagcgctcttaatcattgcatttgtatatgagttaacgcgactatgaacaactggttacggattgtatacaaccgcgctgttccacttaacataccggtggtacttcaagatcagctatagtggataaataatgacagcattt

SEQ ID NO: 65917 - DNA, 1869 bp, Arabidopsis thaliana landsberg
tacacaattgttgcagaaggtgcgctgacctttaaaatattgaatgttctatacaaaattaaagattgaagctgatatatatttatcacggtggcagatttgtagagtattaagggcttactacttgtcggccttggatcttgttcgcgatgggtcaaatcaagaaggtagtgcatatgaagtttctcgtgggcacctgaaagaagttaggttgagagtggaagaagctctaggaacatgtcttctgccatcgttacagttagtacctgcaaatccagcagttggtcatgagatttgggaagtgatgagtctccttccatatgaggttgacttgctactgtttatttgttccaaatatctttgtgtagaatgtgattttcaatattactgattaatttcgtatttaggctcgttatcgcttatatggtgagtgggaaaaggacgatgagcagaatcctttgttgttggcagcaaggcaagtggcaaaggtatagtagtatgactcctttgattctcatataatacaaatggaaagatacatcctccagatcctcatgagactactctcgtatgtcagttggatactagaagaattctgaaacggcttgcaaaagaaaatctgaagcagttaggaaggatggtggcaaaactagctcatgccaatcccatgacggtgcttcggacaattgtaaatcaggtgtcgatctactacaaactgttgcgttgcttctattttgtaattgaattgttctgacggggctaactgtcatgttcttgttacacagattgaagcatacagagatatgattgctcctgttgtggatgccttcaagtacttgacacaggtccgtgaccccttttcttttgtcttttttgtatgatatgctcatttcaccttatgcccttactctcccaggtttttgtccatttggtcgaaaaaatgcaattttgatgagatagatggatgggacttttgagtgattatgatttggctttgtaggttttctactgatacatgttacacattcagtctagcattcactctggggtaggtttaaatgtgggatatggagatttgttggtttggttgagcttaggcaataatgaagtaatagtcattaaaaattaggatgcaatcagattgatccgaatattctaagaggtttttcaataaatgtttatatttatcgttctagcaacaatcttttgtttgctaagttacctgaagtcagctttccttgtcaacttattgttgtttttgagatgtttctgcctctgttatgcacgctctgattctttctaaattattcctgatgcacagcttgagtatgatatcctggaatatgtagtgattgagagactggcacaaagcggacgagataaacttaaagacgacgggattaatttatcagactggcttcaatctttggcatccttttggggtcacctgtatgtgttcttctttggaaacattaatacatgctataaatagtttcagtacttatttagaaagattaattgcgtacagcaggcatatttctgttatgccgaggatagaaagaaaaatgcagtattgttttagtgtaaaactgtttaaagagtgaacttgtatttctgatgtttaaaaccattgtggttacttggtgaatttgttagtacccttccatcttctatgttgactttaagtgttcattctcttgaagacgtgttgttgtaagattttggttggtcaattttggattgcctttgtgttttgattttaccctgttaatcggttcgataatcagaagtttaccatagtccctaatttgttggaattttgagaagtatttaatttctgcagaagttgagcttttccatattgctccc

SEQ ID NO: 65918 - DNA, 248 bp, Arabidopsis thaliana landsberg
  unsure (1)..(248): unsure at all n locations
caaaaaaaccgcaacaccaaaaagnncncgcgcacaccccaccggagccacaaccacacccaacaaaccaaangagggcgacggcacaaccaacncaaaccccngnnaaccccacaagaaccccaggagagcgacacacacaaacnccagccccaccnngggcaaacacaagccgggnaaccngagccaccaacnnnccangnncaaccggggngaaaccanccgcaacaagcgnaggaacaaccgga

SEQ ID NO: 65919 - DNA, 626 bp, Arabidopsis thaliana landsberg
agaatagatgagtgcaaggatcgaattagaggagtgctgaaggggagattaccacccgagaaggatatgaagagggaaatagttcaagctttgaggtcgtgttttcacttaagttattatttttgatgattcggaatgaatcacttattaatataagatctcttgatcagcatctcaaaacaagagaatagcttgctacttggtgttcaaagttatcacatctcaaacatttctttgtatttgttttctctttggtttaggtcaattgaaagggaatatgatgacctcagtttgaaatcccgagaagcagaaaaggaggtcaacatgttgcagatgaagatacaagaagtaaacaatagcctattcaagcataacaaggatacagaatgtaagcactggtgtataatttaaagttagatatctattggtcagttctctgactagcgccttaagttgtgaataaactgctcttgacaattttttcagtgttaccaattattagaacatgttaatataatgtgtcatctgtcaccccttttatttgattatcgtttctacaatgtacctggattgacatttaaagacagataaggaatccattttcggtgtacagtggatgatttgaa

SEQ ID NO: 65920 - DNA, 120 bp, Arabidopsis thaliana landsberg
aaacaacagaagcatagtatttgcatcacacctcaaccatagtaacaacaagtcaaaacacatcctgaatttgcatttgtataagccagaaaaaagccacagtcttatattacacacaac

SEQ ID NO: 65921 - DNA, 553 bp, Arabidopsis thaliana landsberg
gtaattcatcacttcatatgttggaattgactcaaaccaaactatatcaaaccataattgtatgaaaccaaacaaaatatatgaaattgaaaggctcagaattgtttcagtttagtttttcttatttttcagagaactgttttttaaaaaaaattagggatttggcagtgagctgttgattggttgtaagaagttagagagagagattgagaaactctcacaccaaagtgggacttgtgttggagaacatgacaacccattcttcatctatctttgtcagatcttgtttggggacctctcaattttaatttgattatttatccttaactcttcctttttctttttttatttgcattattcattctttttataaatatgtatttcaaataatcgaaaatcattaaagatatctaactggtcgattatatgttccaatcaatcaatttttgtattattatggtatgaataatttcatatatttttcttgtttacttccttcctgattttattatatgcgaaagaacattctttttgtctgctgttataaagaaca

SEQ ID NO: 65922 - DNA, 2113 bp, Arabidopsis thaliana landsberg
tttgcagaaggaaaaaaagagttttaaggcttaagatgggtggagagcataaatcctaatattatctcatggtaaaagcatcaattttttcggcccaacagatcaaaaaccaatagcggaacgtaaaaaaactacagatgatttcaattgtgacatcttatatgtctgttgggtcaattcccatctttaacaaagaaagatactggttacttatgataagacatgttatgactcgtgagcaatatgaataaaaaagatgtaataaaatttacatactcgtccagaaactaaatgtaataacttattaaattctgatttagtaaaagaactagagttctgatatgtagaaagtttagctttggttaaaaatcgattgtcacttgtcttcatgtgtatatttctcttggtattttctcgtttttaggatccaagcatttgagaaaataacagaaaaataacataacaatgtaaattttacttttgtgaaaaaaattaactaaaatataaattataaaaaatcatatttcagagtaacaaatagttcaaaaaaagaaaaagaaatattattcgtggttaaaaacaaataacgtaaaaatattactattccacttttgctccaacgtctctcttgcttaatttatcttagaactctgtttgagcttaagacgaaattatcctcaccacctgcaaccgtagagtgaagtctcccggcagcccagccattgttcagcatccgtgctggatcaccagtcacacggctttcttcagtccgtgtttcaaactctggaagcccattagctttcctctctttccttctctttctctcttcatctctttctttcctcagccaactctcaactgttctcatcaatgacttcttgcttgtctccttcactttctccattggcaatgctaactgcaattttccgtttgctacatacacctaacaatggcagatgtgatgttattatgtgttgtttgtaggtagttttagtagaggagcaaaacagagaaatgagattgtgtggttatattacaatgtgtgttggccagtcctctaagccatcgaatatatgagtagcgtagattatggttgctcctcgttcttcacattcctttctcagaaacttcaaaaggtctgctctagcgagaacgtcaagatcaacagttatttcatccaaaaggagaacctatagaagattcaagaaagtaggattcagataaattgttgaagcaagtttcatgattagatactataatgatcttagtccattgttttaagcatcaaaccatttcatcttctgaagcatcaggtttggctaaaacctgtatacttttggttggagataagggtttaccttgaatggcttcaggagtcccatacagatctgtacacgtcttctttggccatcggataccttgtgcagtctccatgagatgtcgatatccaacacctgaaccaaacacaattagaacaaaacagtaaggtggagaatcacattgatttgatgtaaaaaaacagagtaataatactccagacaatgaagtgctcgtaagtttggtatgtgacaaagatcaaagatcagaccatgctctagctgattttttgttttaacattggaattcagaatgaacaaatgagttaagactatagcaaatacttaaaaagtaaatttgaatccttcccaaaacttcaaagaatctcatgtaaagatgcattaacagaacctaacccatcaaatcaaagtcagatttttgaattatctactcaccttgatcaactcatctcttctctgaggatcaataccagccactccaaatatcatcttctccgccaaaatgtccatttgtatcggaacttcaaatcctgcaaatgcaacatcacgcctccactggaaagaagaattgacaatcccaattactttcaattccaaatcaatactcagaattcacactaaatttgttatgcaatcacatgcacagaaacacaaagaattgaaaattcattacgaacctcgccaccgagataacagagatcaccagaagaggtcaatccagtatcatgaaacgcccagcgacccagaaccctaaccatatgcggctgcaccatgtg

SEQ ID NO: 65923 - DNA, 117 bp, Arabidopsis thaliana landsberg
tactagacatgaccacaaaacaactggggtcagggtagggcagagagacggggggggataagatataatcggaggagggaaacagtccggaaacaccagcaaaggccccgaaatgac

SEQ ID NO: 65924 - DNA, 172 bp, Arabidopsis thaliana landsberg
  unsure (1)..(172): unsure at all n locations
gaaaacccccctggnaaatgctttngcagntgttcgccccccacaaaaccaagaaccacaccccagactatgaaaaacgaaagcccccgacaggccctgacaatcataaccccgaccccgaaggccaacacaacaggaccgaaatcctatgaagaaaacccaagcccaaaga

SEQ ID NO: 65925 - DNA, 538 bp, Arabidopsis thaliana landsberg
  unsure (1)..(538): unsure at all n locations
ttcttcaccagttccagctgtttggcattgcttttttattagttcatcacattgttttgggggaaggaaaagaaaacaacattcttagaatcacaatacaaaaaaaaatgagcatctttactcttataatatgttggtaggtagccttgcgattttgagaaaggatacaagtgggattaagaatgtatatttgtagtggtgtatttttcaatcaagtaaatatagaatttttcaaaggtttttttttcatttttgacagaataggccaagaaaatctggcaaaagattaacaaaagatcgataaaattcttcatcttaaatccatggcaatatggcattagaaataaaaccctaaattgtttcactttcttgaatcaacaactttgtccctctctcctccggaccgagcagaagttgagctaggcttcatgcaaatctgcaagcacaaaacatagctatttcagtggcaaactttcttaatctcactatcttagatgctatccgntggtatgtatattctctaattctacttatctct

SEQ ID NO: 65926 - DNA, 568 bp, Arabidopsis thaliana landsberg
  unsure (1)..(568): unsure at all n locations
gccgtagagcccttggtaagtattccatccaattcgactcatcgttatacgcgaatttgacccctctgcgctcgagttgtcccattggacgtcggatcgactactccggctgttcgccgccgtgtctcacgggcgccccgcgcgctcgatagctggaggatggtggatgtgcagctgggattgaagatgtgtgggttgttgatcccagtcgttaatatttgatcggaggggtaacaatagatcgagctaaaataaaatcgggaccgtctatttgtgatcgcgcggtttgtatggcgtaccggttcgctttaaaagaaatctaatcctggcgctctgttgtggatcggacggccgagaatcgcccgtagcccttcgccgtggcaatctttgtaaagagcccctgtccttttctagaataaacccgccgtccgcgacactgtagtctggggtctaggaaatgttgtcccggggcccctgcactctctagaaaatgaggccagtccagtgatcatttaatttgaattaacganatagaaaatggatttttaatatganaataatactagac

SEQ ID NO: 65927 - DNA, 726 bp, Arabidopsis thaliana landsberg
  unsure (1)..(726): unsure at all n locations
cttcctgatattgcaaagcttgtgctgatgtcaagcctctgtttcataagtaaacctttctcttatttccgatttttagcattcactattgattctgtgaactttcctttgttttctataattttgtatttgtttctttttcccagttttgatgttcatcaccctcctgttcaagcttggaatttgccaatgtgttgtgaaaagtatctgcaaaatgtcatgtgccgcttgtgcagcgtactggttcgccattggagagatgattagttgcttgtgtcacagtttgactaacataaatcgggtcaaccgtcgcagaaaacgtctcgatgatatagaagctacgacctatgattatccgagtgatgatgaatcaagttcatcggacagtcccagtcgaatagataacattagaccaaagcagagaagaagaagactaggaagcaaacacagccaccaccatcatggcagcaatcgcaacaaccgccgtctcataagactaccgagtagacaattgtctgtacgagttggaggcaaatcaagaagagtaagaagaagtactagaaagattaaatcgaggaaaataaagactctcanagtcaaagatgtggttgattaaaatgtctctagaattccttagagagtgtctctaaactcaaaaacagaattatctcatttattcagatgaaatgaaacacaaaaaccattaatccatgtaaatcattttat

SEQ ID NO: 65928 - DNA, 168 bp, Arabidopsis thaliana landsberg
  unsure (1)..(168): unsure at all n locations
ccgaaaanncaccccgcaaaaagaaacacacacaccgcnacncanacacacaggncaagaaccaacaaggggagaccaaacaaacaaaaagccanaccggcacaagaagaccaaaacccncaaaacagncccgganggccnaaaccaacaaaacggaccgaccaaagc

SEQ ID NO: 65929 - DNA, 2430 bp, Arabidopsis thaliana landsberg
actgtgttgttgttggtcaaacacagactcgattcagtgagaaactcattttgcttaatctcaggtcttctttagggttaagaggaacagattggccaattaaaggtgacccttgtgttgattggagaggtatacaatgtgagaatggtagtatcattgggatcaatatctctgggtttaggagaacaagaattggtaagctaaacccacaattctctgttgatcctcttcgtaatctaactcgtttgtcgtattttaacgcgtccgggttagcgttaccggggactttacctgagtggtttggtgttagtttgttggcattggaagtattggatcttagttcttgttctgttaacggtgttgttccttttactcttggtaatctcactagtttaagaactttgaatctgtctcagaacagtcttactagtttagttcctagcagtttaggacagttgttgaatctatcagagcttgatctctctaggaactcattcactggtgttcttcctcaatcttttagctctttgaagaatctgttgactcttgatgtttcttccaattaccttactggacctatccctcctggtttaggaacgttatcaaagcttcttcatttgaatttttcaagcaatagtttctcatctccgattccttcagagcttggtgatcttgtcaatctggttgactttgatctcagcatcaattcattgtctggttcagttcctcaggagctgagaaagttaaggaagttgcagctaatggcgattggcgataaccttttgagtggaacgttaccagtagatttgtttagtactgagagccaactgcaaactttagttttgagggaaaatggtttctctggtagtctacctgatgtgtgctggtcgttgccgaaattgcggattcttgacatggttaagaacaacttcacaggactgctgccaaattctagttctgattcagaccagatagctgaaatggttgatatctcttcgaacacattctatggagagctcacaccgatacttagacggttcaggagaatggacctctctggtaattatttcgaaggtaagcttccggattatgtgaccggggaaaatgtgtctgttactagcaattgccttcaaaatgagaggagacagaagccgtcagcaatatgtgcagcattctataagtctagaggattagattttgatgattccggacgtccgaattctacacaaccgacatcgaaaaatgcttcttcagggataagccacagaacagttattatattggcagcagtgggtggtggagttgcttttattcttctttttattatcttgccacttattctggttctatgcatgcgccatagacgcagagcagcacatagaggaaataacgacaggcctaaacctgtcggtgaagcttcttcacaacaaccacctaaaggagcacaaacctttgatttgtcacgtcttggaaatgcattttcttatgagcagcttcttcaggcaacagaggaattcaatgatgcaaatctgataaaacgtggtcattcgggtaatctgtttcgtggtttcttggaaaatggtatacccgttgttataaaaaagatcgatgtgcgggaaagtaaaagtgaaggctatatatcagaacttgagttgtttagtaaggctggacaccagaggctggttccctttctgggacactgcttggagaatgagagccaaaagttcttggtatacaagtttatgagacacggtgatttggctagctctttgttcaggaaatccgaaaacgaaggtgatggattgaagtctttggattggataacaaggttgaaaattgctcttggtgctgctgagggactatcttatttgcatcacgagtgttcgccgcctctagttcataggtactactactctcctgctcagcttttcgttagaaaatcgtttaaagaattcacatctgctaagactttactaagttaccatcctccaaggatgtagttttgttgattctggttttaatatcataaaatatttcatgttcataagtagtaagatctactcatggattattagtgttgctctatgctttatttcctaataagaagaaaagcgagagaactcatgtgtgtgtgtttgtgttaatgttatatagggatgtacaagcaagtagcatacttcttgatgataaatttgaggtacgtcttggaagcctaagcgaggcatatgctcaaggtgatgcttatcaaagcagaatttctcgtttacttcgattaccgcagtaagtgcttattacattaacaaactctctggtccttttctgttttactttgattccctaacatgactctgtatgttgtcttggcacctactaatgcttctctgtctcttcatttcctattcttgcagatcgagtgaacctcttcttcag

SEQ ID NO: 65930 - DNA, 172 bp, Arabidopsis thaliana landsberg
aaccatctttagaagactctacacttggctttccattctcatgatcgcttgactcatttggctgagttagtttttgattcctctgaccaactatatcaggcacaagttcagctgtgatctgtaccactggtagatctccatctttaggtgattctttttcaacctgatgggt

SEQ ID NO: 65931 - DNA, 1785 bp, Arabidopsis thaliana landsberg
atcccctgagtgattcttatcattggaacaaaaactgctatcatggctacctgttgctgaccagaattttcggccaaatatacataggacttttgttgtattttcttccatatttaaactataataaacaatgaaccaattaaaaaattgtatatgccatccaaggatttatactgatgatgatgatggtggtggttacatgaccaatgtgatgatgatgacattaatgaaaaggaaacaaaaaatctagcggtggctttatatatatcacataattgaggagagtaaggcaatagctaaactaagcaaatctctaagacttgttctcattttgtttgttcaaaatcccattaaaaaaaaacacaatgcaaccttaaattatttccgtttagtctctctcttcacagtcctgacctctctcaactctcacaacattaccaaatacatcccataaaaaacaattctttaaaaaaaatatattttgatataaacagaaaaaacaattaatggaggctgcaaaagtttacacacaagatggcaccgtcgacctccaaggccgtcccgtcctcgcctccaagaccggtcgttggagagcttgctctttcctcctcggtatatgttttcgcaaacctcagataactattttcatctatagataacttgaaaaatataaaaacataaatctttatgtagtcttttgtgtctttatgtgtgtgtgtgtgtgtgtgcgagaagggtatgaagcgtttgagaggatggcgttttatggaatagcgtcgaacttagtgaattatttgactaaaagacttcacgaagatacgatctcttcggttagaaatgtgaataattggtccggtgcggtttggatcactcccatagccggagcttacatcgctgactcatacatcggtcgcttctggacttttactgcctcctctctcatctacgtcctggtattaattctacagtctcttttatttcttatggttaaaaatacgaattaaactcaactaaaccagacttttacaactttttgaagaaatcgaacttagaaatgaaccaaacaaaatatattaatttaaaaatagttcaaaaatctgaactggtgaaatataattatacgaaaatgatatcagtaattaataagagcagagtctacattatgtatgacctatttttttttcttaagcttattaaagttttaatggactcgtcaatttctacttttatcttctcttaaatattctatgtttcagatttttcatatcaatgaatatatatttactcaaaaaattttgggttggtcatgataaagaagtatagatgtgtgtgtttgtcgcgttttggacgtacgatcagatagggtccgtgagcatttatcccaagaagatccactgccacaaaaactatttgcatttttctccactggttataatacttgaggacaactgtgtggtttctgttaaagtggatttatattatagtatgagaatattatcttgaaggatcagaaatttccatatatgtaggggaaaaattggtatgaatgctaagcagactgtttttccttcttatatagcagaggattttttacatcaccttgacggctgtttgacagcactgatgtgacatctaagtagaaatatataggccttgtttagttgtttttataggccatgtttctataagtcagagtcattaattagcgctagtcaagtgatgttaggtggttcttacacaacttgggtacgtttctcttcatctggcactgataagtctgagatg

SEQ ID NO: 65932 - DNA, 456 bp, Arabidopsis thaliana landsberg
cgtctcagttatcagtattgccttatctttaaatgaccatctttaccgggcatattatgcgcaaacccgttcttacctgggtgttgtggctggccattgtatttgcgcatgcgcagaacaaatgcccggccaatatcgggtttgaagaaggcaattttaatggctgggtgtgcagcacgggaacgatcagcggcgcttcgggacagatatcgctgaccccctcatctccagagccttcacggacgaggttgatcagcagcacacccaatccaaacttttttgaccccctcggaggccttgaccccttcgggggatttccgatcagctgccccaacggaagtaatttttccgtaaaactgggcaacgagcaggtgggcgcacaggccgagcagttaagttacacattcaccattcctgcagaccaggataattacagcatagtataccattatgccg

SEQ ID NO: 65933 - DNA, 893 bp, Arabidopsis thaliana landsberg
tatatattctagtctcaatacgaagagtctagaatacgaagaatttctaatggactaagtgatggatatgtcaaaaagaaaaaaaattgatccttcatcatccgccaacctagttatgctgcctaatatatttggcgtttagtgaaaattttctattgggtaaaacttatgtgggtgattctgtttaaagcaaaaccatccatattgctcttttagtgtttctctttatgtgtcgggtttctttcccttaaattattccaaatcgatgtcacttagattcgattccatgttattacctttttcagttccaagtcgccatctttcaaactttctaatgattcttgatgtttcatccacgagtctttcattcccaccactttcttgcttttttaatttcgggtaaatattactccatatatcatttcgccaatcttcttatattcacatacacttattcatacattacgattatctcatggcattactccggcaatggactataccttatgttcaagttgttttttcttaaaaaaccttttttcataaatctatgttaatctataattcattttctacataaatctattagtatgtttattgtctttaaatccatatctggttaacaaactttcaataaacaccacatcaattatagattgagaacacattatgtatataaattacgcaagataaaaattatacgaaacgaagaacttttacattattcacatttccccaaatgaaatatattaaaatttatatcttttgtttttttctccaccaccttcttcttcttcatcatcatcatgggttgtttagtaagtagtcttgaacggcttgtaaaccttagggctaacattactccggcgatggagccaactccggggaccaac

SEQ ID NO: 65934 - DNA, 2436 bp, Arabidopsis thaliana landsberg
ctagttaatctgtgatcactgttcttcttaagttttgatcttgattgataaaattgtttttttttccaaaattcaaatactctaaaactcagcgggtcactatcaatcatatcatatttgaattcaaacataggcggtaaaaaaataagacaaaaagaaaattctcttaaaacataagttgtataatggttgaaggaaaaaacagaaaactttttaagaaatgaaagatatagaaccagaaggtattattatggtgaggaaaaaaaaagtacataccctagagactagtagtagtagtacacacagtttacaacgcccatgtaataagagagctagggggagggaagcatcacaagttacaaactaacaacaacaacaaaaagtacaatcccaaactagacagacgtactcttagtacaaacctcaacccaaaagagatcactgaaaaaccttcgaatccaacggaagaaccggaagtaaaaaaaaaacggaattgactcaggctcaaattcgtacacgcttgacatcagtttgtggaacactgatatcacctccattacctttgcttgaaccatccgttaggccctaacacacaaccaaattcaaaatcacacacatagatttcatccttgaaaacaatccacgatcttgacagagcaaggtataattgtgcagcaatgattaatcagtaaaatctggttctaagccgatataattgtgccatttgctttcattgtagtttacgtattggatataaagtttagtagaattaacaaaattaaggcttaccgtttcatcaggaacaactgcatatctctctgcaggcgacacccagcttttccctggtaacaaagcaatgcaaaagttgaatcatttaatcacttgttgagtcgtttacagaaatcgttttaactagtggtattgtttaaatacctgaagatggatcgatattagaagattctatatgttgtccacttgctccatcgacgctgagtgcctctataatcttgggaaagttcctataaacaccaaaccaaatatccatttcacattatcaagataggtagtgagtgggattgaaaagcaatgattttggtggaaacaacgatcttactggccaattttcatattctgttcgtaacaccaagatatgttaagtggaaaacattgattcatgagcgattagatgatcacacttttacctgtcaaccgactctccaatgccgagctgtccatttgtacctctaccccaagcaaacacgttatttctttcagtgacagccaaggtatgtctccatccacatgagacttgaactactttctgtgaaattccacaatatgtgtgcattggaaaagaaaacagcgaattgagacatgaacttattaatatgattatatagccggtaaaacattgggacgagctttctcgttaaacttttttagggataacatgcctgatcatcgggaaatcgcacttgcacaggagaacactgatctaaattattgccgactcctacttgtccaaactgcaggctaaaagagagacaattagaagtttgttttattcaagatgagttactaaagttacccaatatatgcattgttgttttcttaaaataacatctaagtgaatgcatatcactccttaacagcataaagcaactaaatgcaaatatcagtgaatgtgtagatgaaaataggtgttctatacatttctacgaaatataggccagaaaaaaaaaaaaaaaaagcaagacattctagaccttattccaaccccatccatatagttttccatctgaagtcaatgccattgtatgtctccaacctcccgaaatctggaaaagaaacgaacagtaagtccaaaagatgtcgaacagaagaagaaaaccaacagaagtatatacaatgaagccagtcttcttcagtaggtaatagttttcagaaagttttcgaaaaacatattattgctatcccatatgttggatatttcagatgtacaaatttgtatttcaagacagatttataaggcctaagtgaaacctgggagataaaactgttgctcagtgcttccagtttgtgaggaataaggtgatcctccaagtctccatgtcctagctgtccatatttgctccatccataagtatacaatgctccagagtaggaaactgatattgtgtgccgccatccacaagcaaccattgacattttctcaccctaaaattgtagttacaaccaggaaaacgagagtcaagtgagtcgaaatgaaaagagaattaaggaaaaaattgagggactaaaatgcagaaatagaagttggtaaaaaggtgaggttgcgtgatatcaatgttatatgaactaaatttcatttcatgaactgtgcagattcaggataccaaactttgatctttgtaaaagttttatgtacacttccct

SEQ ID NO: 65935 - DNA, 449 bp, Arabidopsis thaliana landsberg
gcctcttcagttttccatataaatccacggacaaaataagagggagtttttgataagacacatataccagcagtgtatgaaaaatgtgtaatggacaatttcagatctaaatattgataataaggatagacagtcaattcttgctagctaaatagtaattgaaagagagataaaattttgacatgaaaatacatagcatcatattgtaggacttttttcacaaaaaataaaaaatcatgttatagatgaaattacgacaaacgaaaaaaagaactatatatttgctaattattttgcggagacaatgtccattttgttttttaaaatgtccatttttaaaaatagggaaaaatatgagatcataatagtctgacaatggaaaacaatgaaacatatctgctcctctatttttagaagacataaatccagagacttatccgcattgagat

SEQ ID NO: 65936 - DNA, 889 bp, Arabidopsis thaliana landsberg
atatggtgtatggtgcggtccatgtcatttaattccctctcttgacgaaaatcattccttttgtttttcttcttttaatttgcattccaatatcgattctttctaaattaactaattttctaatccatggatatgagatgattatgacaaatataaaaagtacatctattgacaaacggttcttaaaactgattactaggaccgaaactaaatcttaccacttggttaattatcgaacattgtaatattatgagtcgctctttcacatgttgcactcaaatcttattaagaaaaaaaaacaacttcgaatattcatgttattctcttaattagtcaccgaatttggtctaacatcgacaaatattagactattcgataacacacaaccacttcatatatatcttttttgtttggtttaaaggatcgaatattttcagtggtctaagagaggctgctacattcttttcaaaaaaaaaaaaatcagagtcttaaattttttctttttgatgagggaaaataaaaacaagatattagttgaatatatataagcaaattatacctattttatttttggaaaaggttatatatgttcgttaagtttcttagaaactcttaaacaaaatataccaaaatgcacaaaagccatttaaacaaacattacttgaatgatgaatctgactggaaaacaaataaagaccattaatcaccgatttttttctaacaccgacaaacattaaagtattcgattacaatcacataaactctttgtataaccggaagtggctctcaagagcaatacacgtatgtgaagaaaaaaagaaaaaaaatcaatacacgtatactctaattctctttttttaaaagaaaaataaaattagaggcttgacat

SEQ ID NO: 65937 - DNA, 577 bp, Arabidopsis thaliana landsberg
acaaaaatgtctgtgtattacatataaagaaaaatctcttactgttatatatgcaagagggggaatatagcaaagttggttcaaatacattccttttgttactgaaaaattcgctttcaccgtatatatagttagttataacttaacatttataatttatatatgtacaaacgaaaaattgatattaaaaaatggaccgaaagaatgatggaatggagggaaattgttcaaaaatataatggagtatttattatcaaattataccaaattagaaaaaataaacgctaagtttgcaaaagaaagaaaaaaagtgattagttggataaaattagataaaggaaaagggaatggatttgatgtaatgataattaccacagcatgattctgtcaagtcctaccttaatgtctaaaaagaaaagtcattgagctggcggatggtactctttaatgatgtcaccagaaatatttctctatatgtagagaaatattaaaagctctacctaattataatttcaatttttaccttacttttttttcattgaacaatcggctacaattagtttcttatgtttacacg

SEQ ID NO: 65938 - DNA, 279 bp, Arabidopsis thaliana landsberg
  unsure (1)..(279): unsure at all n locations
ggcgaaagganccncccacgacgggccgacaggccgaaacgaaggncggaccgcgaaagcaaaaaacgccgagaaggggccagacgcacaagaccccancgcaacanngaaagcaaagcncagagagcaagggcccacaaaccgagaccnngaagccgcgagcagggcaagggaaaaacaaaaaccccgganngaaacaggaaagacaacccgcacgcaaccaaaaagcgaacaccaganaccggcaaaggggcgcaaaccaccggancgacggcaagc

SEQ ID NO: 65939 - DNA, 507 bp, Arabidopsis thaliana landsberg
cccccgactctcccccccccctcccccccccccccccccccccccccccccgcccccccccccctcaacccttcactgacacaaaacaaacaaaaaaacccgcatctttaatgacgtcatctgtatctctcaagactttggcgggtcccgtttctgcatttatatattcatggatttagacttcaaggtgtgggaagaattgataaatttaagtatttaatgaacaaaactcggagcaaacgtatttaagtttacatgcatttataaattctttatctttttttgcacccgccgattactctgtttgtaacgcattcgactacgggcgcaatccggtccctgcgcagtctgttttgacgtctgcgcgcagtgcggtcccgttccactactcccgacaatatctcgctatgtgtatatatcgatatctgtctatctctgtatctctcgagatctcgctcttgctcccgccatgttgcggctgggctttgggtgcggttttcgttctac

SEQ ID NO: 65940 - DNA, 542 bp, Arabidopsis thaliana landsberg
  unsure (1)..(542): unsure at all n locations
agccgatggtcagtgcaatagacaggccgatggcgctccagatagaatagcggccgcctacccagtgccagaacgcgaacatattggccttgtctatgccgaatgcggttactgctttttcattggtgctcagcgccacaaaatgtttggctacaaacgcttcattgcctgcggccttcaaaaaccagtcacgcgcagtatgtgcattcgtcatggtctcctgcgtggtaaaggttttggaagccacgaggaacagtgtttcttccggatccactttcttcagtgtttcggcaatatgcgttccgtctacattgctcacaaaaaaagcctctatcccttctttccagtaggggcgaagcgcctccgttaccatatacggacccaggtcgctgccgccgataccgatgtttacgatatagcggataggcttgccggtatatcccttccaggcgccgctatgcacctgctcgcagaaccggcgcatctgctcctgtaccttacggatacggggcatgatatcctntccttccaccagtatcact

SEQ ID NO: 65941 - DNA, 123 bp, Arabidopsis thaliana landsberg
tcttctttctttggagactcctctttaaacttcacggagcagcaggcgtaactttctcttctttggcatccgcggaccacggagctttctcttctttaccaaggaacaaaacccacagcctgg

SEQ ID NO: 65942 - DNA, 270 bp, Arabidopsis thaliana landsberg
atgggcgtttataaaatcagtagtatgcattgtttgatctcatcccagaaaattgaaaccattggactaatgaatgtgatcataatatatattggtttgcttctgaaaggtttggcttgaggtagatattaggattacttaataagtcttgactagtgggtgcttctaaaaatgtgtgttagatctttagttcccaaaatgcccatatgtttcgatatcgaatattgctgaatgccttctcaatataaactggtggactttccaaatttt

SEQ ID NO: 65943 - DNA, 235 bp, Arabidopsis thaliana landsberg
caagcttaaggaccacttctgattagcggctaaaaacaaccaatctctttatagtctttcgtcaataaatgatttaatgaagatgccatatcatcccaatgagagactgctaatggtgttttaaaccaatggtttgtgggaatatagttattgtgctaccactaccacccatgatcaaatccaccaaatacatattggtgaacagaatgggaacaaaaaactatacattaacata

SEQ ID NO: 65944 - DNA, 652 bp, Arabidopsis thaliana landsberg
ctggggccggagttgctgagacactagtgacaactgccgatcctggcgctacgcttgctacatctccggaggtcgggggagcagcagcgaccgccgccgcgataggcacaactaacgcgctgacttcatcccccgacgccggagtcgttgaggctaccggtagggccgaggatgcttcggtatcgctcggggtgaatgccggtacggctgctgcaacgggtgtcgctcttgatccaaccgtaaccgaggcgtcaacccctccggccggtgcggcatctgttgcggcaggcgccttcgctccaagtattgccgccacactgggcgctgatgtcggagtggcaagcgtcgccgccgatggccacggccccagcgctgatctggatctggcctctcccgcagacagcgcggaggccacggcggcggcttacgggccgaccgtaagtacggaagcgttcactgacgcatcagccggtagggccgaggtcgctgctgatgtcagcggcacttcgttcgcgtacgtagcgaccggatcggccgaattgacggcaacggtgttgagtccgaatgttggtctaacgatctctcctgcaaccgggtctgcggcggcgacgaccacgggcaatgtgccgactcttactgagagtccaacgct

SEQ ID NO: 65945 - DNA, 275 bp, Arabidopsis thaliana landsberg
caccaaaggatcctaactattgggactttgggacggactattgatcgttaaaaggcaaaagaatactacttgataagagggtcgcatgtgccatgctatctacacctcactatactaataaacctctcgttctttatggacatacacattctctgaatctaaggctacatacgctattatatgacaactggtcttctcattaaagagcgagagaaattgctaacggtcacgatcacattacgctgaagaaagctacgctatacaaaagaatatat

SEQ ID NO: 65946 - DNA, 1492 bp, Arabidopsis thaliana landsberg
agtatattacattcaaaccagaccttatcttctcagacttaaaacccgtctttgccggcgacacttctctactgaatatttcagtaaataatctcttcttagatctctccggcaatggcaattccgttgcctcttacctcttgctccccaatctcaacttcttcgtctatttcccgaacctccttcgtccctcttacacttcgcaatcgtactttcttctccaaccagaattacagtaggcgtgtacttatcagctgctcttcttctttgtcctcagacaatggttcatctccagactccatgaacggaaacgggaacgggaacgggaggtattattaatcttcaagttttaatctttacgcccaccagatgtttgtgaaaatttgtcaatgaagatacttctgggtttagggtttaagagtttattaaaatatattgcaaatctgattttattgttttggttgaagtaaaacttaacccatttataatgtttggaactttggctgattttgttaatactctgttgcgatcatctgtaattttcagtagcttaaacgggcaatcatctttcccacgactgccttcctttgatggaacatccaaaccaccgcttaaatggagaagggttttactcaaagtcagtggagaagctcttgctggagacgaggagcaaaatatcgacccaaaggtttattgtgataccaaaagaaccctccttgttttgctttctttgttctctgtttccttacttcagaagtctcatccagtttcccgttaattaggttactatggcgattgcaagggaagttgcagcagtgactcgacttggcattgaggttattctctaaacgcttcattcaaacattcttgttctagttgtcattgtgataattggattcaaaattttttagtggatatgtattcagctttgagttcttcctatacataagtataatacccgaagtatttgataattgcctgtgtagatgtaaccaaatatgctggaaatcaattagctcaaacttacaagaaacgggagcttaagttaaggggtggagatatatggcattacacaacttaaagttagaaatttgttatgatttaaacatactatacggcaacagatcatgtgtctgggtcattaagaatcattgcaatgttgtgtgtgctctgtctgatcttcttacgcctttacaataggttgctatagttgttggaggaggaaatatctttcgtggatctacctgggctgggtgcagtggccttgatcgctcctctgctgattatatcgggtaatcatacgcctttgtgtcaaaggatcttcttcttcttactcggagaagatccagaattttcctctattggaggtttttggtctcattggtttatctgaaattggataggatgctggcaactgtgatgaatgcaatatttcttcaagcgacaatggagagtattggcatcccaacccgtgttcaaactgcctttcgca

SEQ ID NO: 65947 - DNA, 554 bp, Arabidopsis thaliana landsberg
  unsure (1)..(554): unsure at all n locations
ggccattcttttctttgaatcagagaatccacatagagtttttatatttaagtttcagtgatgatcgaaacaaagataatgggctttgccgtaacccacaaggaactgagaattgcaaaaggtcaacttttggtcattcgaacaagacagaggcatggggagaggctttaggaaaagccaagattcttgctttctcttcttctgtgattggattgggcgaggaaaggatgactgatccaagaatctcagcattgtctaacacgtacctcaacactgatatctgtagcctgtttggcttaaagttcctgatctgcaggactttgagcattgttgtaacgcaatccggagattctactgaacgtagttccttcaaggactttgcagtaggtgttgaacgaggagatgtcaggtcctggttgtttcaccggaaaagggcaagatcagccaaagagaaaagatattggtactgtcacaacattcgatatagttaagacttacgcggatgctgagcatctcgagtattggtgcggatntagggactgcataatctaaat

SEQ ID NO: 65948 - DNA, 865 bp, Arabidopsis thaliana landsberg
ctaatatatatcttctgggtcttcattacttcactaaattcaactgccattcaattgctacagcatgttttcataatagtgtaatggtagtgaattttctgtttggtaattttctgctacctaattttaacttatattttcagttagattatattcttatgtgtaaattccctgttatcttttagttgattatctaaggaatttataaaatccttaaacatattggtagatcaactcaacttttttttgttgtctaaaaatggcaattaaaagagttaacagattaagcttcaaagcatatgtgttggttacaataatgtttcaacagaaccagagtaatgcaaatgaactattttgtaaaaatactaatacataatcaaatatttttcaacatgtaaacttattaattggtaaccgattttccgagtacgtgacgaatgggcacccctaatgaatattagattaattttcttcaagacgtcatccataacattaaattttcattaaattacattaatttacagatcccaaagccgtatttatcgctctagttgtcggcccaaaaatgtcagagatcaacatgaatttccgatcaactttgtttgattacaatattactttaattaattagcttgcaatataagcaacaatctattttctattcagtttttataatagtattaatttaaatagttggatcaaggcatcattatctttctcgtgccttcttacacaagcacacgtaagtcacgcaactatttacatatctcatcaaccaaatggtccaaatcacatcaacacctaaaccatccgttaattatcattcttttgaactttattactttgctgtaacctgactaactac

SEQ ID NO: 65949 - DNA, 523 bp, Arabidopsis thaliana landsberg
  unsure (1)..(523): unsure at all n locations
nnnnnnnnnnnnnnnnnnnnnnnnnnnnnnnnntttgacaaatcgggtagaaaatttccttccttcggattgagtgcataaaattatgttttacctaagcaatctccataatattatcagaaaatttggtatcaacacttattcgcaagtaatgatatttatatatttgatttgatttatacttatctgcaacaacaattagaaaaaatactaagagatccaatgtaaacataactttatattatctatatttattaattgaaagatgtctaagttttattggttaagtaataatggacagcaaaaaaaaagataacttctatgcataaaattagacaagagatatagcaatatggttaagaacttgagattcttaagaacctcacgtgtgatgcaaacaatgacacgcaataacgcgttttaactgacaactttctttctttatttttggctcttaaatttcttttcctttaagtggttacagatttctactttcgattctcgtcgactctaataatctcac

SEQ ID NO: 65950 - DNA, 1433 bp, Arabidopsis thaliana landsberg
tactttatttaaatgattgttttgttccttatcacatttgctaattaatactatatagactcaatgcttaaagctttcaatctagtaaatacagtttaatgttattatagtcacactgatcatatcaattagttctactgtactagagatcacaagtgaaattatcaccgcttcacattgataaaagactaatctggatttcagtctaaaaatatcatctaagagaaccatatagaattaaataaaatattgaaaaagtcatacttattttttaatcatgcatgcaattgggaatattatatggtctccgttagcttccttgtaagaaagagtctcacagagagaatatgaatagagatgcaagaaaaggaaaaatcaaggaaactacatctcatctcaagtaaaccaaaatgtaatttttatgacaatataataatagataagttaacgtcaactccagcatctcaactctcaagctgagtccgtgtaaaattgaaccgatcgtccactatgactcacggaatctacaactagagatcattaaaacaaatgggtaaaacacattagattatcggactcgtctcaccatgttgattcttcgaaataacaacacaagtactccattctttcacataaacataataatgttagtatttagttagttgtatactgtgttgtgtctttatgaattgttttatctttgtttggtgtatcaaaagtgacgtgtgtaagtaaacctttaaggggctaaatgaagaaaaaaaagcctaaagcgttagatcatgtggatcctaccagtgcgatctccgtgatggctcgcgcctcccagcctcacaccacgtacgagtgcaaattgtgcaaaatcaattatacgctttttataagaaaacataaaaggggtctctttttgttaattaataattatatatggtgacttgtaaactgaataatggtgatactactagtaagcaccgataagaaatacgaacatctttaataatgtggtcatttccaaataaaatgattcgaatatgccacccttgcatttgttgatctcatcatcactattgattttctgatcttctcgatctacgttgattttgtacatatgaataataccatgaatgaatacctaaaagttgattatgtgtctgatttcaagcatacgaaatattagtgttgttagtttatccagaataaataaataaatatatatgccttgcatggcaatctttggtaaaaaacccaacatatataacaaagaaaataagcaatattattcttctaagaacatttcatttataaatatgcatggaaaagggaaataatgtataaaaatgtggtcatatgtatttccaatgggtcatggacctcatggtgaccatatataatgtagatgaataattgtgaggtgaagaagaataatgatggtg

SEQ ID NO: 65951 - DNA, 101 bp, Arabidopsis thaliana landsberg
aatccagtatcccaaatccaaaaactcttctgggttttacaaaaaattcgatattttccagtcattgtttgattccaatactcgtcccctgcgttcttgtt

SEQ ID NO: 65952 - DNA, 572 bp, Arabidopsis thaliana landsberg
gacaagtgataattgaaccaaagtttttgtcggctggtgagttttctgtggatttagcacccgcacggataacgggcaagtggggatacattgatgaaaaagggagctttgttattgagccgaggttcgattatgcagcatcgttttctgaaggacttgcacttgtttacattgatggtagcccttttttcattaataccaaaggccagaaggtgtttgattgtaattttcatgcagtagaaaaattctattcaggaagagcaatggtgaagacaaaagcaaaaaaatatggctatatcaatagggaagggaaattattcattgatactgtatataccagaataggcgatttcgtggatggaatggcagtagtatgggggaacagcgatagaaaaaaaacagaagttggggttattgatacgctgggcaattttctgatcccctacggtaaatttgaacggatttcagattactatcatggattgttcgttgcatcaataccgcctgaaccatgggattcaatcacaggtacaacgggaaaaaccgctattattgacaaaacaggaaaaatg

SEQ ID NO: 65953 - DNA, 803 bp, Arabidopsis thaliana landsberg
cactaagtaaaacaaacaaaaaccagtttctgacaaatctacgagctttccaatttcgccgaattgaactgaaacattctctgattcatcaaaccaaagactaccccaaaatcgaaaaataacattaattcgagattgaatctcccgacattcatcagaaaatgacccaattcgattgagaggaaaagttgtctacctttaaactaaacgaagcagaggaatgacgaatcagagaagtactttgagagagagtcagaggagcttcaatggcggatcgaatactaaagagttcgcctttaaagtttcctccttttgttcgaaagcaatttcacttttcttctgtttgttgtatttggtttgtttctatgaaatcattaggagactaatcacttttctgtttttaaaaaagtgtgaagcacgctaatggtggaaacttcttctaattttaccccacattttattctctcttccaacaattggccctataatattattatcgatatccaaagtcataacatggtatcaattgacaatttcttttgattacttgaaattcttaaattgaccatttcttaaaaagtacaaatagtcaataactaaactaacatttttttattccaaatttttaatctagaggattgtattatacatatgtaaattatatgaataaaaaatacttaaagaaggaaaacataatcaataattagtttaaaaaattgcaactcagaagtttagaaatgatgtatcatataaataggactgccaaacaaaaaaaactcttctgtatgatttgggcaaatact

SEQ ID NO: 65954 - DNA, 452 bp, Arabidopsis thaliana landsberg
ccgcgctgcacgtcaaacactatactaagatagtgagccagtcataatagatagtataacatacctaccctggataacacattccttaacctggagtcagcgtttgtatcggaactacaccagatgctctggacgatgatgaaccacagagatacctcataagcacctcctgctctgtgcatgagcacctgatgtaactcttaccatatgcgcactgcacttagagagatgacaggatacactacatgtctgggtcagacgcgctcgccttgagcggacttaaaaaaagaacagagaagatttgggccggatgagacggaacgatagaggcacgtttacctcatttgggttcaatggtgactttctgtatcgaaagtgtttagacatggataaacatgggctactcacacgaacaactttctgatattaatgcatgaagaagagctgcgacc

SEQ ID NO: 65955 - DNA, 491 bp, Arabidopsis thaliana landsberg
tgtatataacattagggaagcagtcaattcatttcattatcctcacacactttgaatgctcaatcaaaggtgctggatagttaaacttcctcacaacgtcaaaactcgagaagaagatgaaagagagagattcagagagttttgaatctctctcacatcaagttctcccaaacacttcaaattcaacacacatgatccagatggccatggccaactcaggttcatctgcagccgcacaagccggtcaagaccagcctgaccggtcaaagtggctgcttgactgtcctgaaccacctagcccgtggcatgagctcaaaagacaagtcaaaggctctttcctaaccaaagccaaaaagttcaagtcacttcaaaaacagcctttgccaaaacaaatcctctctatcctccaagccattttcccaatcttcggttggtgcagaaactataaactcaccatgttcaagaacgatctcatggctggtttaaccctc

SEQ ID NO: 65956 - DNA, 260 bp, Arabidopsis thaliana landsberg
  unsure (1)..(260): unsure at all n locations
cacagagagggagcaagncaaaanagaaaaacccacacnaaacgggaacagggagaaagaggcaccaaccgaggacgaccaccacgacaaggagacaccccaccggggagcaaaaacccagcccccaacaagaaagagaaccgacaaaagccaaggcaaagggacgagaaacncaaggccaaaaaggcagaacaacacggaccggagccgggcaaaccgaacgcacacaaaacggggaagaaacgaaaaaaaaggaaaaa

SEQ ID NO: 65957 - DNA, 464 bp, Arabidopsis thaliana landsberg
atgtaagaatgcgctcataatgcttagcgctgaaaaaagaagacgaacatattggctaggaattccaagctccaacacacacatgaaaccatcgccttactgtttcgtatgtggttcatgatcttttggagacataaatcctttacactcaagccttttttgatagtgaaatgctttcgcttttcaggaacgcgacagcgatcttacacgcttaactgataatctcgaaagctgatttggcggcatataaatttatttgcgtagtggaatagcttaaccaatatcgtctctgagcttactttgaatcatctgatggctacagagcgggtttgcgattctcaagatagtcctagagtgtgaacctggcttcttggctagtccggatgctttgaggggcaaggagaatctgtgtgatcttatagcgctgtgaggatgtgtttgggtgaccaaacggtcaatcattc

SEQ ID NO: 65958 - DNA, 1703 bp, Arabidopsis thaliana landsberg
  unsure (1)..(1703): unsure at all n locations
aggaagagatgtaggacttaaccagattgccctatttgaagggaaggtagcaggtggaaatggagaacaagttcttagcagggatgtctacagaattgggcagctgtttgacttttttagaatgatgtcattctacttcacaacagttggattctatgtctgcacaatggtactttcattctcttgtgttctgtaagtctgtttcccccataaccacatgtagttaaaaaaattctttgatgcagatgaccgtccttactgtgtacgtctttttgtatggaagagtttatctggtatgttacggagccttctatcttttcattttttcactgtatcttcttttaaaatgatgggtagtaattgctctctgaaaggtgtagagtagcggatgtgtactctaaaatcagtgttgcttactgcataattttttaagagtacaacctcaagtagtttaagattgatttgccgtcaactatattctgtaatcctataccaatatggatgcgtagtatttgacccaccttttcaaatatcaaaggcatattgcacttttcacacacaactgggcatcaaacttgttgattgacctttttcatggaaaacgttcttgggaaaagtattgttatctaattcttgcaacttggttgtattatgcatttctttcctttttcatctgttgtcttttatttcttaagacacttcccttgcctcctttgatatcatttacttcttggtatttttcaggccttttctggtgctgatcgtgcaatatcaagagtagccaaactgtcaggtaacactgcattggatgctgcactaaacgcacagtttttagtccagattggaatctttactgccgtccctatggtgatgggtttcatacttgaacttgggttgctaaaggttggttgacctattcactccgtttccttttggagttcgagagagctcttctactaaagtgtcctgaagcatatgttttttcttctatcacaggctattttcagcttcattacaatgcaattccagttgtgttctgtctttttcacattttctctcgggacaagaactcattactttggacgtactattcttcacggtggtgcaaaggtatacttgcttttatacatagcaatgtttccgtttttttcttttttcttttaaactttctcaaatgcctgtgcgttctttatttgatcaacagtatcgagcaactggcagaggttttgtggttcagcacataaagtttgccgataattacagactttattctagaagtcattttgttaaagcgtaagcccatttgttaatcagttacatatgccaaataacatttatcatgtggatgcttagtgaactgcttcttactaactttgnnnnnnnnnnnnnnnnnnnnactgttgatcatttacattgcctatgggtatacggacgggggtgcctcttcgttcgttttgctaactatcagcagttggttccttgtaatatcctggttgtttgcaccctatatcttcaatccctctggatttgaatggcaaaagttagtactgtgcttgttacttggtcttcattccatttccgtattcaattgattttctctggtgacacagatggcactatgtcttaaattgcattggatcgtgacctgtaatctttcatgcttaaaacaggactgtcgaggattttaagactgggtcagttgg

SEQ ID NO: 65959 - DNA, 1831 bp, Arabidopsis thaliana landsberg
ttattcaacattacatatttcactatccatatcaaatcatggaacattcatagccatccaaaacattttgagtgtcaccagcaaaaaaggcctaatcatacaaaaaaaaaacatttttgtaagtgtaagagttgaacctactacctattgttctatcacccaacgattaaccagtatagttataagagatatttggaaaatagatgacggttaattaataactatatcttataccgtaaacacatgcttccctagcttgtgactaaggcagattctggtaacaactcatattttatgcataagataaagctcacatagaccttgttcaaaagcattacatatccaacgatttacaataactctatcatttacatttccaaatgttatatattttagtgtttgtttgatttaatggaaaaaaaacagttttgcattaactttgtaagggatacaacaattaaaaaaagagtcagaaataaaatagaaaaataatataaacaaaaatagagaaatctactaaagaaaactagatatttgatcttccaacatattaaacagaaaaataaaaaactaaagagaaaaaaaattagaaatggagtaaagaaaatacagcaattcaccgttacccttaactaccttttaaaatattaaatgatattttcttttagaatcttgaaataaaataaagttttcttttttgatatcaaaaccatattaaaaactcatcttttactaattttagtataataattaaaaaacaaactaagtaaatgtttttgttttgtgcaaactaaatgttaagttcatgaatttgtgtaagatattttccctataaacctatctcaatgtggacccaataggccaccatgcacacaacttggcttttactctttgtgtcagtaaaatctaaagatagtaaagacagaccaaatcgcagccgtttatttcccatataaagaagtacgtacatggaaatgacaataataccctcactccttaaaccctcctcttctctcactttatttttcagtctctctttatttctctctatcactttttatcgattctgcgcaaattcatgcaaaaaggggaaataaaaagttctacactgtccccaagattctgcgtgagtgtggtattgaattcttcgccgtcccctttctatttatcatattttgttccttctcttattttcctcttagtgtcaatcatggactagaatcaactctctttttccctcaaaggtgatatattgattttgtgttctgatcataaagttgtggttttttcaatctgggtttgtttgttgttgatgacgatcatgtttcgtttttcattttgatacgacactgttactctgttttacacctttttagtacaataatgttgctttcgcacattaaccaatatgatcaagttttaaagttcatatatcatatatgttctgggttgtctctagttgcagataaagtttgaatcttttttttatttgtcaagtggtgaatgaatcctaatgaagctatacatgtattggttacaggagatcatatgtggatccacaagtgatcttgaagggaaagaaaaaaatgaagagaaagcattactttgagtttaaccatccatttaatccatgtcgtaagtgttttacaagatctgatgttttattttcttacctaaaatgtcatgcattgagatttgaatgactgctgtttctttacctaaaatgctctgttttgtctgttgtggtagctttcgaggtgttctgctgggggacatggaacgccgtggagtacttaaggatcgagaatggaacgatgacaatgcgtctctt

SEQ ID NO: 65960 - DNA, 572 bp, Arabidopsis thaliana landsberg
gactcgatcagctaggcgttcagcgtagccttgcagcttgctgaaatcaaccaacttgccatgccacgccagcttttggtcggggctggagtctccaagcagtaacgcttgataaacctgatgcccaagttctacgggttgcatatagcctccagtaggggtgaaaggggaaagagagtaagttatttagttatcggcaattcatcccaatgtcccaggccacacttgctatcacgccaagacagtttattgcttccttcgtcggccatcaaaagattaacgaagcacccgcagtcgatacattcgcccttcacgtcattgaatttattagacgggcaggctgaacatttcttgaaacgtgtgagaatttccaggaaagtactctctggcttaccgcgagcgatgtgctgcgcgtaagctcgcatgtagttgcgagctttaattagcaaaggctgcgattcagttggtggtacaatggctgcatcaatcctgggacagtcatgctttacttcctctacagaagagacaaagtcggatacccaaccgcaacacgagcagcgacaggcgaactt

SEQ ID NO: 65961 - DNA, 348 bp, Arabidopsis thaliana landsberg
acccaaccgctgatataatatccttcaaaaatgaccagacaagcccccgaatatatattgtggtccataaaatcaaggaattgtaattttttggcccatcaaaagaggagttatgggatgagagttgtaacaaatatagataagcattgtcaaatcaaactaatcccaatacataattgataacaactcatcattcatcatttcaaatcattttataaactagaagcctaataagtggacttcattgatttcttgagacttattcattcacttggaccacattttaatattttctttttgacttgtccttcaatgatttcgtttattcacataacattttgctagtac

SEQ ID NO: 65962 - DNA, 332 bp, Arabidopsis thaliana landsberg
tcggcgaccaacaaaaacggcgttatgatcatgatgactaggcctaacttgctggttctatgaccacatgtttgccggatgatttcagagggaatccctatgattttttctacatcctcaccatcaatatcaatactgctccacagaactcccaatattcaaccaaaggatccacgcataccattcaactgtacgactgagcataaaactacacatcaggcttcgctaatgtgatcactaaaatctaatctcgctgcaaagataagagctctgactgagctaacgcttatctagaagagagagcacgaataagccgcgaatttgtttgataa

SEQ ID NO: 65963 - DNA, 589 bp, Arabidopsis thaliana landsberg
  unsure (1)..(589): unsure at all n locations
gccgaataatcatgaatgggatatggataaaagggtcggcctgcagaatcagccagtgattgcgcactctgacgcaaagcagacagcataaggataccggctacccataaaaatcgatagagaagtttatgatatatattactcaaagctgaattctcacttcttttgggcagtttgtcctgccaaagtattaaaacggaattttagcttttaaagtataatagcaagggctaaattcatgaaaaacaacactaaaggttctttagagataatttgatgaggctctccagatccgtggcactctctgagctggctttcagcgtcttacggatggcgctttctnnnnnnnnnnnnnnnnnnnnnnnnnnnnnnnnggcgtccagcgcatctgactgaaccgatctgcctattggcgctactccggatacgacctgctggtcatgcattttggacagtttgtcttttagttcaagggtcagccgttgggctgtttttttgccgatgcctttgattctttccagttcgacggcactgttttggactatggcccggataatttcatctggtttcatgccggacagcatcatgc

SEQ ID NO: 65964 - DNA, 2922 bp, Arabidopsis thaliana landsberg
  unsure (1)..(2922): unsure at all n locations
gtatgagatttggttacggaagtgtagtctgtccttgtgctgcaacatttatccctttaatcaatatatttatcacttttgttggtgttcttgtatacagaggaattcatattgtacgttaatgatctaatgatctccaagttgcttatatatatactcatttttgcatctaggttctaaatttgattccagaagagggtaaaggggagacttttgaagatgctcttgcacgtgtccgccgatgcattggaggtggaggtggagatgataatgccgacagtgatagtgacattgaagttgttgctgatttcttcggtgtcaatcttcggtgtcctgtaagttactaatagctcgtagcccagtttttatacttatcctcttcctagggctatcttgcagactgaattttttttattgtcttttctgtttgcgtcattagatgagcggttctaggataaaagttgctgggagatttttaccctgtgtgcacatgggctgttttgaccttgatgtgtttgtggagttgaatcaacgttccagaaaggtaggtctactatccttgtctagatattgggttatgtctctttttctgactttagttgttctggggtttgttaacatgcagtggcagtgccctatttgtctgaagaactactcagtggagcatgtaatcgtcgatccttattttaaccgtatcacgtctaaggtatgtattcttatgggaattcaagaattcttaaaatctttgtatctacgcttttattcagtagttgtcttcctgcacgacagatgaagcattgtgatgaagaggtgactgaaattgaagtgaaacctgatggttcttggcgtgtaaagttcaaaagagagagtgagcgaagggaactgggggaactctcacagtggcatgcacctgatggtagcctttgcccctctgctgttgatattaaacggaagatggaaatgttaccggttaagcaagaaggttactcagatggtccagccccgctaaaacttggaataaggaagaatcgtaatggcatttgggaagttagcaaacctaatacaaatggattatcttccagtaataggcaagaaaaggttgggtatcaggagaagaatattataccaatgagtagtagtgctactggaagtggtagggatggtgatgatgcaagcgtaaaccaggatgctattggaacttttgactttgtagccaacggcatggaacttgattccatttccatgaatgttgattcaggttataactttcctgacagaaaccaatctggcgagggtggaaataatgaagtcatcgttctgagtgattctgatgacgagaatgatttagtgatcactccagggcctgcatacagtggttgtcaaacagatggtggacttacttttccactgaaccctcctggaataattaactcatataatgaggacccacacagcatagctgggggaagttcaggcttaggtcttttcaatgatgatgatgaatttgatacgcccctttggtcatttccttctgaaactccagaagcccctgggttccaactatttagatctgatgctgacgtttcaggaggtttagttggtttgcatcatcatagtccactaaactgttctcctgaaataaatggaggttataccatggctcctgagacatcaatggcatctgttcctgtggttcctggctctactggccgatctgaagcaaacgatggcctagttgacaatcctcttgcatttggtagagacgatccctcacttcaaatatttttgccaacaaaaccagatgcttcagctcagtcgggttttaaaaaccaagctgatatgtcaaatggtctccgtagtgaagactggatctcgcttaggctaggcgatagcgcctctgggaatcatggagatcctgcaactacaaacgggattaactcaagccatcagatgtctacgagggaaggttctatggatactacaacagagactggtttgttccctgtctgagactaatgctttcctgaaaacatcaaagggacctaaaaatgtggaccatgttcttgatgttgcattacctttttcatcactttactaagctgctagctaggtcttatgaacaactgaagaagaaatatctgttttagtttctatgtggcgtattttgtctttgaatatgctactttatatatgtccatagtccatgtggtatacttactgactattactgcgtatttgcagcgtcgttgcttctgggtatgaatgacagtagacaagacaaggcaaagaagcaaagatcagataatccattttcatttcctcgccagaagcgttctgtaagacctcggatgtacctctccattgactcggattctgagtaatattcttcctgatttgtctgtactgatgtgtctctcttgggatgattcggtgttccttttgattcttaacgctatgcacagancatgagcaggatcatcagacaagacaccggagtttaaacaagatttgcataattctctgtgcaggcaagaattgaaccggtattgatattttcacttgtatgatgttgttgactctctcttcaatatcggttcagaatcttggccttgtctgctacactgcaggatgtattttgcaaagcgaagcactggctgatttagtttctctgatagaaaagaaaagtgggcacagtggttccgatttaattagtagtttgtatactcgaaataggttttttttgtgtggacgatgataaaattacttcgaagccaggagctatagagagatatagcaatgtaaattatgggctccaaattttatttattaattagaaaaattcagctcttctcctccattgcaaattgtgttgaatgtgattaacttcatggttatggtcaaagccagaagcccagaagcgtt

SEQ ID NO: 65965 - DNA, 144 bp, Arabidopsis thaliana landsberg
  unsure (1)..(144): unsure at all n locations
aaaaagaaagngagcaaagcgcgaaaggagncgagaggagcaagncccggaaaaggagaaccaagcacccaagcagnagagcgaccaaaganacacgcccacaccaaaaacgaacgcaaggagaacncgcaaagcagcacaagc

SEQ ID NO: 65966 - DNA, 540 bp, Arabidopsis thaliana landsberg
ggttcgtccatcagcaggacgttgggctcgaccgcttgcgctttggcgaggccgcagcgctgttgcatgccgcccgacatttgatagggaaacgccttctcgaagccggcaagcccgacgagcttgatgaactccggcaccttgcgctcgatctcggccttcgacgcgccggccatgcgcaggccgtaagcgacgttttcgtgcactgtcttccacggaaacaggccgaagtgctggaacaccatggcgacgccggcgatcggctcggtgacgcgctggtcgcccacccagatttcaccggcatcgtgcggcaaaagaccgtcgatgcaacgcaagagcgttgtcttgccgcaaccggacggcccgacgatggcgacgatctcgcgcgcgccgacatcgaagtcgatgttgcggaagacctcaagcgcgccgtagcgcttgccgagacctttgacgcggatgcgcggttcgcccgccgccggcgtgaccggcggcgtggtcgatacagtcgtttcctgtatgctcactctgcggcctgcg

SEQ ID NO: 65967 - DNA, 560 bp, Arabidopsis thaliana landsberg
  unsure (1)..(560): unsure at all n locations
gaccaaccattagtagtatctcaaagcaatagaatatagcacacaatgttaaacatagattagcattttgtatataccttggaagcggccatcacaaatgaagtgtccacaaccgacgttttgacaaggttggtcagtgtaacaagcattacatttagccttatagcaaaaaccaaccaacaaaaagaagattcataatttttccaagagttgattaaaaagacagagttcaatagagataaataaatacctgggcaggatgaagctgaggatatcgaacgaaataacttttcatgaactcgtaagagtcagactgtaagtaatcagcagtaaggatagaatcgtccgtacaaaaaaaaaaactcaaaagtgaattcaaaaaaagacaacagtaaactctaaacgtcgacggagaagtcaaggtaaaaacataccagtgcaagtaaactaggtaagcagcggcaagatcaggactgatactaatccgcttagcgagctntttgatggctacttgtgcagcaacgagaacctgaaccaaaagctattagctactaaacacc

SEQ ID NO: 65968 - DNA, 539 bp, Arabidopsis thaliana landsberg
  unsure (1)..(539): unsure at all n locations
gactgatggtcaagttccgtgcccggcagcagcgagacgacgacaatgactagcctgtccgtcatcatccttgtatacaacgaagccgatgggataggcgacacgctcaaggcccttacagagcagacgtgttcgccagagtcaatcatcgttgttgacgatggctcaacggacggcacggccgagatcgcccaggagttcgagggcgtcaccgtcattgccccctcgtccaacctgggcagcaaggccaaggcgcagaacttcgcgctcgaccactgttcaaccgacctggttctgccggtcgatgccgacaccgtattggcgccggattacgtggagctgatcaaggctccgttctcaaatccccacacggtcattgccgccggatgcgtgctcacgcgctttcaagacacgctctgggagcgcgccaggcagatggagtacctttctggcttacactggttccggcccgtccagaaccactacggagcccngctcgtctgctctggttgctgctccgccttccagctcgacgtact

SEQ ID NO: 65969 - DNA, 313 bp, Arabidopsis thaliana landsberg
acagtgacatcaacgtaaaggtgatgataatgagatggtgcaacaccgcagcggcgatgtatatttttacaattataacagtgacacaggcacattgcaagagtagcattgaacagaacacagacttgtatggtgaggcgtatctggtatgggatcgaaactaactctactagaagagaggaagcgacctaacctaattctggaatagaatgacccgagacttggattgcacgacccaacgtaaagatacaaagcagagttggctggaccaaacctacactgcgcagcgccgtcggatagcatgacaaggaca

SEQ ID NO: 65970 - DNA, 918 bp, Arabidopsis thaliana landsberg
aaagcaaaccaaaaagctacttacaacgatatctgcgccttggtgatctgtgtgaagtcctcttgtagtccccgtgtcgaccactatattaaacgaaataggatttggaagtaactaagataattacttacaaaacatttacattcatataaaaatatgatacaaacacaagaaaacggactcttcaccttgtaccgttagtagtacgcatttcttgtggagttttccggttctcctcagcgaaaacaatggctatctcacgcccaccaataactttgtgattcattcgtttcattgcctcagctgcatcttcagcataacgatacttaacaaatccaaaccctctcggctccctaaaccacaaaataatatcacattaaagttaagagttcctactcaacaaacaactacttgaactgacaccaaaagttaccaatcaaattagtcaagaatccatacacattgacaatgtgacattgttaagagaaataaccagtaagctaaagctaagctaggaaatagctaaaagcatctgattataaaagacaaagcttgacatatacccagtataataattcctaggcaggtatatgtccttgagtggaccaaaccgttcaaacgaatccctaagatcgttcggcctgaaaaacaagaaaacattccaaaactcgtgtcaattaatcaacattagagaacttgtgatgtccttgatggaatctgaacagtagagaaggacggagagacctagcatcgagagggagattacggataagcaaaccagaaggaccagaggattcgtgatcacgagaagacggacgttcgcggaggcgattatcgtcgtagcctttccgttcgcgaggtggtgacctgtcacgaggacggggactatagcttctgctccggcttctcgctctagcc

SEQ ID NO: 65971 - DNA, 232 bp, Arabidopsis thaliana landsberg
  unsure (1)..(232): unsure at all n locations
acaggcnggnaaaaaaaaggngaacgcaccgggacaaacaaaggagcggacaanggcaaacgcccccggacaagcccaaagaaaccacccacgacacaaacagaaagacacgacncaaccaagaaacagaanaagccgcgcaagcgacaaaacacagagaagcagagcaacggcagagaagccgcaaagaaaccaaaagcccaagacaggaggnaaagagcaaacacaaacc

SEQ ID NO: 65972 - DNA, 395 bp, Arabidopsis thaliana landsberg
  unsure (1)..(395): unsure at all n locations
aaaaccggatattgtaataaattacacgtataatattatgtatggtgttgatatcgcattaggtcnnnnnnnnnnnnnnnnnnttaccaaagaaacataagtaggacccatgttttgaatatctttaactaaatcaaacggtggagggaggagttgtgtccatgatcgtcatggtggacggtgactttacataccatttctttctttttaactttgttttttttatgacacatatttatcaataattttagtcttttctttgttataagaaaaatatatataccccacttaacaaaaatgtttattctaccagcatagtattgtcacacatgtaaaaaaataagcaaaaataacctaatctcttaatctagtcgttgacaaactttagtattttc

SEQ ID NO: 65973 - DNA, 573 bp, Arabidopsis thaliana landsberg
  unsure (1)..(573): unsure at all n locations
tatgatagattatttttccctcgtaaaatacattttacttgtatttatctaatgatacatcttttgggcaagggagtcgacaagtttaacaaaatagataacatcataaagagtttaagaatttttttttaatgttgttttagtattaagatcaaaaccaaaagtcaaaccttaaaggacgtattatattgtgattggttgaagagtaagtagtttttaatttctatgcattatataaaaaaacaagcgttattacttttatttttcaaaccaaagcattctaatttgatatagtttaatgccgaagaaatttgttaatgcatgctcgaatgtggaattgtctgtaagattataaatttgttcttaattgacaagtgtacgttattaggcctagtgtgaccacaaacaaaatataattgaaaataagatagccccattaattataaaagtactaaaaagtcaatatctgaatttttcaacaacctatatctagcaatattaggaattttgccgacttttacaaattttcaatgtatccttaanttagcacatattatatagcgattttcgatg

SEQ ID NO: 65974 - DNA, 613 bp, Arabidopsis thaliana landsberg
  unsure (1)..(613): unsure at all n locations
acgccgaangccacgtccgctcggggtataataacgggccacggncaaatgcagttccgaccttgcatatttctcctcgaggggcgggtgcaccaaacctttaccgaaggtcctgcgtcccacaataggtccgcggtcgttgtcctgtatggccccagatacgatctcactggccgatgcgctgttgtcgttcaccagcaccaccaatggaaggtcttccagctcaccattggaggtagcaatgtattcatgcctgccctggttatgcccatcggtatacacgatcttcatcctgtctttgaggaactggtcgcagatgttctcggcagcctgcaggtaacctccgccattatcgcgcaggtcgaggatcatgcgtttcatgcctttttccttgagcgtacgcgcagcattgagaaaatccacatacgtatcttctccgaactgggagatcttgataaaaccggtattgttgctgagcatgaaggcacattcgatgctcgaaacgggaattannnnnnnnnnnnnnnnnnnnnnnnnnnnncgttttccaaaaggcctgaaaattttagttttacctgagtacccacactgccttttaaagcaccctgcactt

SEQ ID NO: 65975 - DNA, 577 bp, Arabidopsis thaliana landsberg
  unsure (1)..(577): unsure at all n locations
gaacggaaaaatccaaaaaaaaaaaagttatttatgaaacaaaagatagaccgacgttaatggaaagatttatttacccaaacatgtggcctataaacccatgggacttatacatgattaagattggcatatacatcaatgttnttcttggtaaaacatatatatcaatgttataccatcaacactaatttatttttaatatttgaaatataatttttaaaaatatatgatattaatttcttccaagctaagtgaaaaaaatcaaagcagccgtacagttacagaatcaaacaagaacttgacagcgtaagaagacataactcatcatactttcttctttttttcaaacaaaaactacatttcacatatttacgtaatttttcattattattataaattatgtctaggctcataagatttttaggataaaagagaaatttgcaaagaagaaaactagtgtattaatttatgtatatgtttgcatttgaatgataagaaaatatctcgcatgactacaaatctttggatataattatcttactatttatacactaacttctatatatcaattttatcg

SEQ ID NO: 65976 - DNA, 157 bp, Arabidopsis thaliana landsberg
  unsure (1)..(157): unsure at all n locations
atgccattaaanngggnaagctagcagaaaaatgtgctatcctcatcacaattgccgatgactgtttttatgaaaaaggaaccttcaatgacttggaagggtttacttaagcagtttataaggttaattaaattattattccggttaagacatgggg

SEQ ID NO: 65977 - DNA, 561 bp, Arabidopsis thaliana landsberg
  unsure (1)..(561): unsure at all n locations
tgcaataaatactaaaatttacaagaaatcacatttcctaaaaaagtagagaagtcgtatctggtggtattctagggccttttggatttgaaatcatgaatattagcccattcagcttttcggggtttaggtactccattctcacattaggacttcaagccttaagatgcaatcacatgaatatgacagtgagccattttcttatgcaggttgttgttaagtgggtatgcagattttaaaaaaaaatacaatcatacagaggaaacaactgtgtgattaataaaccagcgtaaaagcaaaaactacactcttagtttcacatttttggaataattagaaacactaatgcagaactacaactatttttagccgtgttctcaaagttcaaactgctggttttaatttccttttattctcttagaaaccttattgtacttatattgatcttaatacactntctaactatgtgtgttaataagtgttataaatggtttaataaatcattttctgtgctaataatagttataaatggtataaaacccccttttaaacatagattat

SEQ ID NO: 65978 - DNA, 641 bp, Arabidopsis thaliana landsberg
tgaatttggaattgacaatttagactactagagacaaaacacagaaaattaaaggaaaaaaaaaacaagatagaaaaagccaaaaaggcttgcaactttgcatagttatccagaaaaaaaaaagaattatatgcataatatttgaatgaatttgtttttggaatagttaatattgttttcattgagttattcttatttttaattggctgacttgtaaatttcatttcactaatacctctaaccaaactttctaaaactatttgataaaaagtaattttttttaccataaaaggaaaaaactatgaccgagaataaaaatatgtcaaaatgatgattctgtaagatattcctttatttttcagttggtttttatataccaattacattttttgctttaactaggtatatttcaaagacgtaaaagattatacagagaaagtatatgtcaaaatcacgttgatggagtaattaggtgaacgttaagatttatgtttaatgtttgagaagtaaatgaaacacgtttgaattgttctcatctaccttcatgacatctttttttttaggctttgatatggttcttgtttttggaatcacgtgtgaagataaagatgcgttgaaacgatgggaactttttttttttt

SEQ ID NO: 65979 - DNA, 576 bp, Arabidopsis thaliana landsberg
  unsure (1)..(576): unsure at all n locations
ttcgtctgaggactcttctgttcgagacatatctaaagcacgttttttattaagagcagcctcacaagtttccctgacacaaacatgaatagttccataaagccacaaaagcacagttccaagtcgaatgatagcactggattaagaaagttacagaacctacttcaaactattcagttcccatgaccgcattgcagaaaccagttcccactccatgtattttgctttagaaagctcttcccatatttcttctaccatatatcctgttggattcgagcatcttccaagatctaaagcctatatgaaacgtagctacatgaagttaacaggaaacaggtatcaaaccaaaatttgtttgcagtatttgatggcataaacaaaccaacccatctctagtgatttttctaactaaannnnnnnnnnnnnnnnnnnnnnnnnnnnnnnnnnnnnnnnnnnnnnnnnnnnnnnnnnnnnnnnnnnnnnnnnnnnnnnnnnnnnnnnggaaactacactacttaggtctcaacgttacgacttaaacaatcatgtccactgataacttttacagaaaaaagc

SEQ ID NO: 65980 - DNA, 382 bp, Arabidopsis thaliana landsberg
  unsure (1)..(382): unsure at all n locations
caaancagagagaaagcaacattggttgtgttgtgggacgtactgggtagagctgtcaaagccgaggaagagggaatcgggaggaagagagagatccgccattgttgattgatccaaagtttttcacaggtttagaggaagaagaagacgagagagagatgtgtcgtcgtttttataaggtaggatcatttaaaacagacactaatcagtattttggataagagcggaggtcagtagtcattactccgaatatttagtgactaatcgttatcagattgttggagtttcactcctaaccttaattagcgatccacgtcatgtacacaacatacaaatcaaaaatattcctaacaaattccgaggaaataaattaataattgat

SEQ ID NO: 65981 - DNA, 399 bp, Arabidopsis thaliana landsberg
atcaaatcaaacaaaaacagaatagaaatcatccaaaactgattggtttcacttcttctatatctaaaaaaccataactaagggtactatggctaaaaaaccaactttgaaccgtatcgtaaatctaatcaaaccaatctgaataagattcaaattctatatttcctaagttgaattgcttgtccagagcagttgttacaaaaaacctaataggtacaatgttacttcaaacttacatctccttcctaatgagtgttggatatgcatacatttccttctatttggatgttaaacacaacttgtttttcttgattaccataggtttggaaaaaggctgaaatagtccttgtactgcaataaaattctttctctctactgcagaaagaaagattttatatg

SEQ ID NO: 65982 - DNA, 527 bp, Arabidopsis thaliana landsberg
ctcttcacattaatatggtagctagccactgaacacaatcattttttggagagcgtgcagatgttgacgctgggtcaagattttaataaaaagaaaaatatccagtgaattttaaaaataaacattgggtgcttatcatgtgagagacgatcagctgagaggacaagcatgctaattgaaatatatggtcataccctttccgcctccaagaatcctagaagccttggatgggccctctcttttggattgacttccagctgttaggtgagagaatgagtctatcgtcctccgtataccttcctgcaggatcatcaaggcatgcatgcaatatataaagaacaataaaggcttcaaatatctctctctttcaaatcaaatattgtataacctgaagtgggaccacaggagcatagcctagtcgatcctttgctttcgtggaatcgaaagttctgctgcatgagagaagcctaactcttgaaggtgttagttgtggtactgtcatcccatatggtcccaacactttatat

SEQ ID NO: 65983 - DNA, 259 bp, Arabidopsis thaliana landsberg
ttaatggagctattggattcgcagacggtgctttttcatagccagatcgatcagctccaagatgtcgtcgttgctcaatgcaaacttaccggcgttaatccccttgcgcaagaaatggtgggttattgtttctatgttttttggtatctaaagttcgtgttttattggggtatggtgatatgggcatagctgatagggacaggtgatactgattttggaataaaatgttttgaatggtgcttggtctaggcactaaatt

SEQ ID NO: 65984 - DNA, 487 bp, Arabidopsis thaliana landsberg
  unsure (1)..(487): unsure at all n locations
cgcttacatctttaaggattccgcttattctttatgtttgctgaataaatgctggcggctacggatagggggtattccaattataaacaatgcaacacctattgaaacacataccccaagcctgattctgctatttggatgctattgcatacggatcatgattggaattcatagatgcagatcgttagatcaacgctatgcactgtagtgcaggactttcagtttatacacaagtatacttgataccggcattgagagtcactcttatagggcgggacnnnnnnnnnnnnnnnnnnnnnnnnnnnnnnnnnnngcgttcgcgaggacggttcaaattatcatctacgaaataacatccttgatgagaaacctctgcatttgagtgcacaatgacctcatataatctatatatctactcgaaaaatgaacgtacccatgtatcttctgatgattttaatatctcgaatgtaccttctgcaaaacagat

SEQ ID NO: 65985 - DNA, 529 bp, Arabidopsis thaliana landsberg
  unsure (1)..(529): unsure at all n locations
ctcctttctcttatacaaaattcaggtttaatttttcgctttttggtcaggacaattcggcattaaaatttggaaataaagttatttagatcaataaccttaattagtttctccataacctctgtctctttctcttgcttgtgaaattcttccttcttcatcaattctctttttcattttccacaaaatttccttttgaaaaccctaaaccaaccgactcacttacctctaatttcaatttcattttcctcaactctaccactaatgtactaactcagatccgaaaatctctcctttcccaaaaattcttctatctttctcctcaattctcttattcacatgaccaagtcttacttctttcctaatcaacaatgtngatctgatcaattccccaggtttcattagatctacaaaaatctcaccttttcttcttccaaggatctaattttgtttctgggttccttaaatttcgaaccttcttacaaaaatttcacttctttagctagatttttattaaagttagaatctt

SEQ ID NO: 65986 - DNA, 586 bp, Arabidopsis thaliana landsberg
ggaattgaaccaaaacttacctgattatattcggttttggtatgttttacaaatttatacagattgatttcgcaggcaggagtattgccacactgatattctatatataaacactcgtttttacatattctattaaacgttgttaaggatgtgacttcttctcttgatcttcaccttaagcccaccagccatatgagccgttaaaagaggaacaaaaaccggccggtctttgttaaccggcacaatctcaaaccgactcaaaacagaaccaacgacgtatttcatctgcataaatgccatctctttccctacacaaaccctcggcccggcttgaaaaaccggaaatttgtagggactaataggtttcaaaaccggtcgtgtactccccggttcagaatcaaaccaccggttcgggttaaactcttctgaatccgtaccccatagcgtctccatcctccccataccgtatgggaaataggtcactttgtctcctctcttgacacgtgtcccatcaggcaaaacgtcgtcgtttgcagcatgtttagagtcccacgaaactggaggatatagcctcatggcttcacat

SEQ ID NO: 65987 - DNA, 202 bp, Arabidopsis thaliana landsberg
  unsure (1)..(202): unsure at all n locations
gatcacccaggnacgggnccaatagcagcgacatatgccccangaagacncggggncgctacggggccggagcgggcccacccccaagccaccgccnangagncgccggcncaaacnncaacaggcacgcggncagagcccagggcnccccccacggccagggagcccacggnnncaagnncaaanncacaccccgangggg

SEQ ID NO: 65988 - DNA, 1484 bp, Arabidopsis thaliana landsberg
  unsure (1)..(1484): unsure at all n locations
aatatacattatttgtcagaaagataagcgaagtgagaaagctgtaatatacaataagcaatttccttccacaatagaaaaaggtatgaaattgagtatttttttatcagataagagcgaccaccttatcgtgaaatgcccgcgtgaactcgtatagtgtaaaaggacctatgtcaagagttactgaataagtatataggaaatggacaacctgcaaagagagtactgagtcacttccaagaaagtcagaaatgagaggtaatttatgaacacattaagatatcgccaagtgccaattttgacagtttaccttaaacagtttcttaacagactctggagaagaattccatggatgcaaaccaaaaggcatcctcatctgaacagagtttgggggaaacttgggcaataaatctggaaacaataaagaactgtcagaggaccgcatgacactggacatgtaacagaagaacatgaacgaaaactctttcatgtaagactgacttacatacctttgcaaagaaaacaaccatgagatccactactaggatgatggcatgaacatgtcaacggatttcctcgctcatgtcgctcacgcatctctaattcctcgtcatccactagtgtcgaaattgtctggcaggtttctttaaatacctccccgtccgcggcaagctcacagttttctttaaattctctctgagtttcatctttgtttaattccgcctgcagcaaagagtcaagtctttgtttgcatgtgactataatgaatcacaagtgccaaataaagatcaagctacctctctatgtatagaacgcctcttcttttctgtcgacctcttctgcaacagtttctgcttctgaaaaatgaaaattgcagttagcaagagatttaagagaaaaaggcaacagaaagaaaatgaatcataattatgaaagataaagtaggcaaccaataccagtattgatgctaattgtctttgctttttcttttgatgtgggggattacgtgctgagctttgaggtaatgtagctctttcatccaataaatcaacgcaaggagatacatccctcctgtttggattcattacacgccatacagtcatcaaaccctttccaataccatgtttcatcacagtagcattctcttgaatgcaatcctgactggtatgatccatcagctcagaaatctaaagaaaattaagatcagggactaagtaacttagcgtatccaggtaaaactaccttatgaaacaacacatatccactacctttctttttcttgccactttctgtttctgttgatcgacagaagaagtgcccagccaagaagctagcacaagagaaagaagtccacgttagaatcaatataactatacgatacttcttgaagtcatacaaactcaagtccgcactcatccagagtccaattatccagtcatgcatanttttcattagaaaaatcaatactaatatgaaagcattaa

SEQ ID NO: 65989 - DNA, 548 bp, Arabidopsis thaliana landsberg
ctgctcattttatggtctaagtctatccctcactgcttcttatgatagacactattcatcataaaggagggatttataaatctttacgccccgatagaaaagtgtttaatagaactcaacagatgttaaataaggctatattttaagaaaataccgattacatttgttattatcctatgtaaggcattcccccctaatttctttacaattgcttttaaatggcgctggctgtacggtgtaaacctatctatgaatcgaccattgttgacgtatgatatttcattttcaataaagggtaacaaattgtatttattaaatgaacactagatcgaataaatgtcatggaaatgtattctcttggatagattttgctgatatccaaactgattactttacactttttaccaagacctggattgcatttaatgcctggttctcatcatcctatacagatgaaagtgctgacatcacgatggtaaacacattaaataaagaggttaacccctctcgcacaagtatagtggaccatctcatgagtgcatgagatg

SEQ ID NO: 65990 - DNA, 310 bp, Arabidopsis thaliana landsberg
  unsure (1)..(310): unsure at all n locations
aaaaagagcccgccccacaaaaggcaggcagaccaacncncaaacgagcnccgggcgnggcaaacancngaccanaaacnagggccacnnnggagnccgcaagaaaangnncannaangacnccagagncnnncannnccaggnaaagagcagnnccnncacgagaccgnncgccnacaccaccaaaaacggagacaccaccangagcnnaagcaangnngnngancaanaccanaannagnacggggnnacccacgccagccccaccgaagagaccaaagagacccccacgacgaaaaggggccaaaag

SEQ ID NO: 65991 - DNA, 446 bp, Arabidopsis thaliana landsberg
acccaacaaaaagacctcgtttttaaagctaaaatcaagagcagagttttaaactgattctgtttaagtaagaagagcagagaggagagattatacacagattagaagaaatagaaaccttgtgaagaagcagtagcagaagaaaattggagagtaaactagaagaagaagcagtgaagagaagaggcttgatgaggaaggagcagaggggacagttgtctacgtttcgctatatcagcgttactttgtgcaccgattgacgtcaccacgaaaacaacctcttacctgtcattactcttaattcatttgtcattagtagttccccaacgcttttttcttattactaaatttttgacaatgaagacaatacttattttatttgtttggtaatgaatgaatgatatagatatagtttcattgtggtgtcggcaactgctattattatt

SEQ ID NO: 65992 - DNA, 376 bp, Arabidopsis thaliana landsberg
  unsure (1)..(376): unsure at all n locations
tgcgccgccggccgaagtgccgacgcgaatgatgttggccaaggccgcctgcgcttcacgatcgccacgtagattggcgtgaatggcgtgtcgcgcttcttcaaccagggccccatttcgatcggcgcctgcgactcgcgcgtcgcgccgcttgccggccggaactcgagcgcgcccatcgcgcgcttgcccatgtaggcgaggcgatcaagcgtggtnnnnnnnnnnnnnnnnnnnnnnnnnnnnnnnnnnnnnnnnnnnnnnnnnnnnnnnnnnnnnnnnnnnngcagggcgtcggcgagcatgccgggcagcagcttgtaagttggctcgggcaggttggggaaggtgaaagcgtggtcgcgattgccgaccg

SEQ ID NO: 65993 - DNA, 1612 bp, Arabidopsis thaliana landsberg
ggcctttctgcgctgttgcgtaaaaagacaaaaacttaatttattttaagaaaatcaaaatgattcattttagtttcggtatttatccttttgcatgtcattgatcaatacgttttgaatcatatttataaagcattgaaaactatagtatatgaaatctttattaaagccaaaccaaaagccccacttattttacgtatttgtctctgtcgaaacgcagattttatcagacaagtggcaccaaactaactaaagaatcaatattgtattaggcaaaagaagaaaaagataacaaaattaatcattttcttagagttgggtaggtcactagaggcccaattattactcactaagctaaggaggagtacttaagttaaaagatgccactgcatagcactgagaaccctccaaataaagcgaataaaaattaataaattgattaaaagtattaatcttccactcttgtcccacaaaatgcgacctaatttcttggaaaagtttattcaatttctgaataacaaataattcacagttattcaaatatttatacaaataaattatcagctatatttaaaatcgttaccataacatatatttaaccaagcggtagtaatctcgtggtacaatacaaatatcaattatccattttcagatcaaatcattactataactattttaattttaaaactatatatatatatatatatatatatatattatatatcaactttttataatgtgaatcataagtcgactattaagttttgatatatgatattgtatgtttttttctaacaaaatcataaacaaatcacatcttatatatatgagattcagattctctatgttaaaaaataaaaattaccggaatattcccctcaagcatctgacgtgtcggccgacgatgaagaatccaggtcatcaaaaggtgtagtttagaaacagaggcgcacgataaggtcaacttttggaatagaggaaaagactcaactttttttatcatctctctcgatttgtttttctcccggtggtgatgcttttgtcgtttcatcgttcgtttacttcaacttgcttattattctacgctcatggactaatcaaagccatgaggaaaaaaaaaaaaaaagcaacaacacaaatatatgtataaaaaaataaatatctctgcttttttttcaatgatggatacgcttcacctctaagttttgaccaaagtttttcttcatttctctcttctctcttggggtcaccgtttgatcggaatattccttttagaatgccaagattcattcttcatctctcgagctcctcatgaatttcttctctgcttatcaatggaggttggtttttgtttctcatgttatcttttcttgctttgtgaagtccttgaattttccaattttggtttttagtcgttgcaactttctagtttcatgggtattactctatttggctatgttacttcaaaaggctctgttttggagagttgggttctataaagtttcaacctttatagcaaaaactgaaactagagcttcttgtttatggtgtgtgttagtaagcaatgcaactttagagatatggattggatctatatatctattgaaagctg

SEQ ID NO: 65994 - DNA, 560 bp, Arabidopsis thaliana landsberg
gatcaggcggacagaggacgcgatggcaatatcatacgcggtatcgattatcggaagtacccctgccatagtggcttcactataccatctgggggaaaagccaggtattgacgcaggaaactgacggatcgaaatacgtcctacgatgccttgggccaggaatcattggccgcgggatagacttgggtcaagggatgagcggtacaatcatgctttcgcgcagggcatatatgccgtccgtagagtacgaggcgatgattgaacccccaccagtcacgaggcggcatgagctccatgaggtcgcgctcgatccgtataggatccttgaaatcagacaggtcgaatcgtatcgcgaagcggcgcacatgggtatcgacggcgatccctgagtgcgtatcgaacgccgtcgaaagcacgacattcgcggtcttgcgggcgacgccgggtatgcgtagaagatccttcatgcgatccgcaccgtgccgcatactcatcgagtatcatgcgcgctgcggctcgaatgttctcgtctgttggatagaagccgatgagaagacatg

SEQ ID NO: 65995 - DNA, 740 bp, Arabidopsis thaliana landsberg
taatttcaaatttaccttttttaccatttatttatctttcaccacatctctttatttatttacaatttacacgttaaatatccgaataactaaaataattaagataacaagatagagattttgttataatttgtcaccctctatagttgtaaaattgaatattttttatttattttaaagtccagtcatagtcattagtcattagtcaaaacttgtagtcaatctttttagtaaataaatttaattttatttgaatacacatttgttgataaaaaaaaagaaaaaaagaatacatatctaccttttgctatttgaatacacatttattctatcgtcttcttgtgtaacagagctaaagatgagcaacgatgataatcacggatcgtcttcttgtccaagaaaatttacgagtttgtatatagcaaatcttgatgcccaagtctctgaagaaatgttgtttctgatgttttcggatttcggaaaggttataagatcagttctagcaaaagattttaaaggagagtcgcgaggatttgctttcattgagtttgaaagtgcggatagtgctggacgagccatgctttatatgggcggaaggttaataagttaaaacatttcaagtttttggttgagttagtttatatatatgaagaacaaaaatacaaaggtgaccaaaatacccaatcaagtattcggtttcgatgagttaacataaataagtttttttaaggctaataatt

SEQ ID NO: 65996 - DNA, 449 bp, Arabidopsis thaliana landsberg
tacgactaaagcttcaaaaagaatagcaaccattatcgatgaggacccttgccgctccctttcgaactttgattttcatactcggctttttattttccttcttgttctacttatttcgtcctgattgtgcgctctggaatacatattctaggttgtaaggagtccaagtctcgactactcacactttgtatcactaccattagccatacatcctgagatagtggacaagctagtgaattttcagaattctatcctcgggatccatagcataactagagataagcaagacgaccaagctaatagagcaaccacatgtgtggcagttgatctaaaagctaatagtgaaacaaaccacgtcaatgtgggcatcaagagcataccaattgtcagttacccgcctaaggccaaatcaaagccatctactcctattggggaagaaaatactgaag

SEQ ID NO: 65997 - DNA, 99 bp, Arabidopsis thaliana landsberg
gttgagggagtctcggctgtccgagagacaccccctttattttttccgactcagcatccaatccaacaaaggtataggatatccatactagggaatacc

SEQ ID NO: 65998 - DNA, 576 bp, Arabidopsis thaliana landsberg
tttttttaaaaatgatttaaattgtttttttttttttttaggaaaggcttccattcaatttgttgatacggaaaggaagaaaaagaagagaaattctcattattatcccgtgttttatactaaacttttaaatcaagtcatttctactttttcatggaaccatacgaatcgtagttaattgcttcaccaaacatcaaaataaataactgaaaattaaaaaaaaaaaaggagtgacaatattacttcttgccacaacacaacaaaacacaacctcgctcacattaaaactctcttgtcacttctatgtcctaagaaactgagcttcaaagttagtttctcaatgcattttctcttttctttccctttccatgattttcaacaaaattataagtaaacaaatgtccacagatatttctttgtgggtggattctttgcttgtatgtagtggatttggggtatgattctctgcctcattttcagaccagctggttaaaaggctttttggtctttctctctttataatccaagggtcattttttttcatcgaaattcataattccctttgttttaatggaa

SEQ ID NO: 65999 - DNA, 2408 bp, Arabidopsis thaliana landsberg
ggcattcaggtaatttatcgactcttttgaacttccttaccttataaattcttttcactaactttcaattaattaaatgttggagtattacattaaatttttaagtataagaaagtgatcaggagcggggacctccgtttagttggagaggtttagggttggtgtaaccgtttcttgatccgtacgttactcatgtgaagggattttttgtttgatgatgggtttggtatttgatgttgtcacaatcccatccaatatgatattcttttttatttcctcgttactttataacaaaattgcggtcaaaaatgacgcttctaaaggtaataaccgatgtctctaagatatgggtgtgatagcaattaattgttgactatatttgttaatactatgagttattgcctctttctcgattcgggttctatagttaatagtatgagactgttaggttgagattgaagttatgattatctttgaaatttctattgtttagcaactcgcaagattttgtagtccgatcgactagtccgagactgaaattgacaccttaccttatccggacccacgtttcctgataaagaagatcttgattaatctgacagcttgtaaatttacatagtatattgtttgtatgggaaaaggtattccggtttttcttgcatttttataatttatggtaataattttacgaaatggctaatgcgtggcatgatgatgctaatgtgtggcgtggtgatgatgtgaatccgtaagctttttcgtgtattttttatcaaggaaatggataatgcgcagtatggcattaagtattataaatatatacattggtataaacttttgttgagtatcagtttacgtgtattgagttaatattatgcataacattttgacatttcatgtctgaaaaagggattttgacatgacaatataagtagtctactaaaactagcattttaacatcaagtaatttgtttctgttatttattatgttgttaatctactattttcttatgtgttttttcttattggtctcaatgacagggcttactacagtacttcaaccttgtggaaggttgcatcacgatgattcatgcataccaaaagcagaataacttcacatacgactggatagtccggacccgagttgatggttactgggctgacccgctcgacccggaatacttcataccgggtcaatacctagttccacctggatcttcttatggtggtctcaacgaccgttttggcgtcggagatctcaacacctcgacggtagctctctctcgcctctccctcattcccgacctcgattcagccgggttaactcatctgaactccgagtccgctttcaaggctcagctcacaacccaacgtgttccttacgtcaccaaacctctccctttctgcatcatgactgatcggacctacgatttccctccatatagatacggagttccagtggcggcactatcgagccgtggaccgttaaacggtgccaagtgccgtccttgcacggtcgcatgcaacggctcttgcgtggcagaagtgatgggaaagctgaataaagagtggagctggacagagtgggaaaacgagacggtggagctgtgcgacgcacatggagaatgggagaaaggttgggagaagatttttgacgaaaccgctggagaaaaactcgcacttgcgaggaaacgagtcggtggtttggattcgaggagatgtgtggaagagtttgaaaatatgagaggaatggccgttaaatgggaagctcccgcctccgaacagatttgtactttgggcttacggcccaattagaacaaatcgggctttaggtccaatttaattcgctaacaaattttcccaatctgttttagttttttgccttttagtttggtttgaaatatatatatcaggttacatttgatcaaatgcaaactagatatatataattgcacattgagatttgagctgagccaagatcttccttttctgggaaacaaaaaaaaaatccaaaatatagatttaccacgtgaaagaagcaaatctgttcctaattttgaatctgtaacaggattcgattttttccactagtgcagattttatacatcttttacgcatccttacatgcacccacacagtgatacactcttaaggaacaaacgattttaagttttactactggaaacttttcctatggatttggaagacattgatatgtgtatacattgatatggatacatgactaagttatctaacatttggcagatgaattggaatctcgtcacatcacgcaaggaaagatgcgtatatatattacacatggaaagctgtaaaatatttttggcaaatgttttgtttcgaattatctaatctcagaccacttcggtgatatatttcaaaagagattt

SEQ ID NO: 66000 - DNA, 1419 bp, Arabidopsis thaliana landsberg
ttccgcatgagcctcagctgtggagatctcgccaatcacaacgatcgtgtatttagcttactcaatgtctgcagaaaagctccttcctttgcaaggaccaaagctcttcacgctctctccatcactttatgctctgttcttttgcagccagtttatgtctgcaataacattatcagtctttatgagaagcttggcgaggtatcacttgcaggcaaagtgtttgatcaaatgcctgagagaaataaagtgtctttcaacacgatcattaaagggtacagcaaatacggggatgttgataaagcttggggtgtgttctctgagatgaggtattttggatatttgccgaaccagtcaacagtgagtggtttattgtcctgtgcatcgttggatgttcgtgctggaactcagttgcacggtttgagcttgaagtatggcttgtttatggctgatgcatttgttggtacttgtttgttgtgtttgtatgggaggcttgacttgctggaaatggcggaacaggtttttgaagatatgccgtttaagagcttggaaacatggaaccatatgatgtctttgttggggcatcgtggttttctcaaagaatgcatgtttttcttccgtgagcttgttaggatgggcgcttctttaactgaaagctctttcctgggtgtattgaagggtgtatcttgtgtaaaggacttggatattagcaaacagttgcattgctcagcaacgaaaaaagggttagattgtgaaatatccgtcgttaactctctcatcagcgcatatggaaaatgtggcaatacgcatatggcagagagaatgtttcaggatgcaggttcctgggatatagtgtcatggaacgccataatttgtgcaacagccaaaagtgagaacccgttaaaagcactcaaactctttgtgagtatgccagagcatgggttttccccgaaccaaggtacatacgttagtgttcttggtgtctcttctcttgtgcagttactgagttgcggacgccaaattcatggcatgctaattaagaatggctgcgaaactggcatagttttggggaatgcgttgattgacttttatgctaaatgtggtaatctggaagattcccgcctatgcttcgattatatacgtgataagaacattgtttgttggaatgcgctgctttcgggttatgccaataaggatggtccgatttgtctctctttgtttctgcaaatgcttcaaatgggtttcaggccaactgaatatactttttcgacggccctcaaatcttgttgtgtcacagagttacagcagctgcactctgttattgtgagaatgggatatgaagataatgactatgtcttaagctctcttatgagctcctacgccaaaaatcaactgatgaatgatgctcttcttctgctggat

SEQ ID NO: 66001 - DNA, 1658 bp, Arabidopsis thaliana landsberg
ctacagtttttttttggatttttccgttctttagccttgtttttgactatctaaaacatggtatgatttccatattttgggttagttttttttttttttactacattgttgggttagtttgaaagagcatttgatttgagtctatgaaatgaagattacgagctttcatgttacaatgagaaaataggtttagcaaatgattttatttattttaatgtttttaataaattacggatttttacactaaaatcagttgccagttagtaaaagttatgttctatttacagacattccacatgcctactctagacaaactatgtcacgaacaaagagtaacaaacctaagtttgtcccaaaaaaataaaaagcaacaacaacatagtataattgtacaaggatatttccctttagcaataagaagttactattcgacgaaaataaaataaaatgcattaactattttatagctactacatttttttttagaacatttctatagcgattattttaccaatcataaatatgtagatatgttacagtaaaaactcatatatagcactatatccatatttttgggtcatatctgtgtttttttcttctaatgatattctgtttcttttaagcaattgttgtaggtatttttcgtctgcaacaacaaatttgaagatataacctagatatatatatatggagactaattaatttatatatctacaacatgccaaccttatgcaatagattccttaatttcttatgatccaaaagataaagatcagaagaagaagggaaaaaaaaaacaatgaaacagttggggatgaaacatcacggactaataaagtttctttcatcataaagaccttgtctcaaagtttgtcttcattttctaaaaaaaaatctatcactcacaagtcacaaatctttcttgtaggccatttaatattctcagaaataaataaaaataagaggttggattaacttggtgaagaatttataaacttaaagttgaaagctgcttgattgaaaacagctagcaataggtcccaaatagttaatggtttggttatgggtattataccgacctcttgtttatgtcaactacgtaatagaatcctagtcaccttggcttttgggtctccattagttcctgatttgtttcgggatttcatattggttattatagaatatatataatatatggcagtgtgaaagaagttttaagattgctgaaaagaaaagattgtgggcacgtgtaggttcacaggtgcgactctatcgattatgttacctctcggtgattgtggacacatgtagctctgcttcagcctcttcaacctctttaaccctaagtaaagtatcactataattgatagagttgcaactgtgaagcttgtgctttagagagtcattaaaaattgggacaaacagtattagtctgaccttgtgatttgcattggatccccaataggtcattcacgaacgtagtatataaataggataacacatcacgtggtgtaagtaaagggccgacgaggggttacctaacaaaataacaacaatcttagtttttatttttttgttaaagggtttaaaataggaatcttatgcataaaccatataccactataagtctatagagatgttgatcttacagcgttcca

SEQ ID NO: 66002 - DNA, 122 bp, Arabidopsis thaliana landsberg
  unsure (1)..(122): unsure at all n locations
ccgactccttcgggcctataatgggtagctagcttgtctgtagagcacagttaagagtcactcctctcctggttctacgtagcttgatgagatagattgctggcgtagctgngattcctaag

SEQ ID NO: 66003 - DNA, 965 bp, Arabidopsis thaliana landsberg
actatgaaattttttttttttttattataatgaatgttccaactgacttaattataagtacttgttttgtcatattttacgtaaactaaattacaaatatacaagataaacaactctaacaagccaactttttaaaattcgtttctacttaacatttttggttataaaaaattagagtaaatttttttaacaacaatttattgaacaaaattattattattattatttttttttaaaaacaaaattaatctaccttcttttttttctcttttttgtaaacgaaatttcataaaattaatctacctatacgtttgatataagtatattaccataagaattttatatcaaagtctttactaatttgatctctaagacatgtgggaaatttggctttttttggcaatcatagtagctaaccattgcagagaaagatttgaattctagtatttcaactactagatcatcatgagttggataatctaggcaatgtttatagactaatcatatatatatatacaccttcttaaaatgagaagttttggattttaaggatggtaaaataatattggtatgcataatctcttctttgtcgcagttaaaaaggcagtttactaccaccgttttgaaagtcttttgtacgtcactgtggctaagttattaattaatctatctaatatatttgatctgaatggtattcacaatctttttgaaaagagtgatttgatgtttgtttgtttccataaatgattggtcgttgcggaatatgagactgttgtggttaaaacaaagatatatcacccacttggtctttacgccattattttcctagctaactattgttgataatagtatatgttactatttatacatttttaaaccgttaagtaattatcaggtgaaaacgtgtaaattatttttttgtttaacgatataaaattatgagggtggtgatggcactatatata

SEQ ID NO: 66004 - DNA, 639 bp, Arabidopsis thaliana landsberg
  unsure (1)..(639): unsure at all n locations
tctaaanagtcactatagtgtaattatcacgtgcctggtcggctgattttccatattcggttcaaatgatgattgtgaaaatggctaccatcaaataaaaggatcatctataaattgttagttgagtctatttgatattattatttaaatgtgtatgtccgattctttgtttgacatcatgtattcatgtgctagtttaaatttcaaaaccctttgaaaagcactattaaatttttactcagaatgccgtcaaaaaaaaaaaaaaaatttactcagaaatgaggaaggtatggagcataacttactgactttaaaagtaagaaaatagaaagatctcaaaaaggaacacagttcagttagtgaaagaagatagatttcattgtccaaataatccctcatgctcgtccggtttgaactgtgctctcctaagcttcggcttttgatattgagtgtaatatatagtgttcgtcggtgaacatattaattgacgctaaaatattaattgatgctcgatcgcctaaacatttttattttcgctttccatatgtaccacatataatccatacaaaaatacttatgtgatttgcttctactacgctccccttccttttaactattgatgtttttattatgtgctga

SEQ ID NO: 66005 - DNA, 189 bp, Arabidopsis thaliana landsberg
tttctattgaataagaaattttgtaccaaataaatctagtgaaagagggttggttgagaagaaatgtaattatattaaaccggaaatgaaattttacgtcgatgtgtattttgagaccaatgagatctctccacgtaaacagatttcacgtgcagcttcaggccgatttaagcgaatttaatctgtcgt

SEQ ID NO: 66006 - DNA, 142 bp, Arabidopsis thaliana landsberg
cacattgtaaaattgctaagagccactgcatgatgtttgaaacaattgatggttcgctacctagttgtacattgcccgatatatagcctacatcattgtggaggcataggttttatctaacactgaaatgtggttgcagctg

SEQ ID NO: 66007 - DNA, 448 bp, Arabidopsis thaliana landsberg
acctgcttgtcagtgtgcttaacgcgatctgagctatctaaacatcctcaagcacgtgtaaaaagaacttatcttcgatgtatgtgataacatttattaagactatggagctttatgtgatgaatgacggtgctaaactaaaaggcattatatgttcttattaaacaattatcaggcttaatgagacaacagggactgaggacgctacctgtgatcatcgaatgattaacgaaggattgctaaaacacttaggaaggattattgaataatggaataaggcctctataatagatagcacacccacagagatacagtctattcaaccaatactcgaacccactacctattggtatggccatagaacatgttaccagtgaacagagcttctcattaatacgaatgaccatatatgatcctcaccaggtgctattgataggttagggaaggc

SEQ ID NO: 66008 - DNA, 438 bp, Arabidopsis thaliana landsberg
aacaatgcagaaccgtcttccatcaacaagttctcacaagatctcttttataatatacgtatataaggggttatcatatgggcagagtgagatcaaggggacttgccaagaccgaaatctttctctttttgagatcagcttgatcttctttcctaatggttcggtcgagttttgatgaacctgaagatgataacgaaagagacaaactcttgatatcttgatgatcatcatgttcttttacttcatcttctaacaagcattctccaagattgtcgtgtgtccgaggtaccttaagggacaagcttacatccaaatcttgggctgacttattgcagacatgagaaaataataacctcttcctcttcaaaacattctatgatccttctgccactccagcattctcccattgataagaatgtagcgtcgtagcaatatgat

SEQ ID NO: 66009 - DNA, 502 bp, Arabidopsis thaliana landsberg
tttatgtatgaagaggtaaactctttcaaatttgtaattcgttactccaaaacatatagcagtctggggcttatgtgagagctgaaaaaatatttcaggtccaaagatatgaaaaggaaagagtagcaaataattcaacatactggtatatcttcatatctgagtattgtatctctactgcattctctttactcttggtcctaattgattagatatatgtttccagggtactttttgaactaatatggagagattacttcaggtttctttcaattaagtgtggaaactcactttttcatctaggtaactatgctttcgaattaaagctcaatgcaatgttgttacagtgaactttttaaatagcgcattctcttcgtaggtggcccgagaaatgtgcaagggaagtggagccaagatcagaaactatttgagtcttggagagatgccaagacagggtaattatttgatgttgtggcttttttttttgaaagatcaacaaagt

SEQ ID NO: 66010 - DNA, 530 bp, Arabidopsis thaliana landsberg
cctcagcggggccgaacttctggttcttcatggtgtcgaagaggtagatatgcccgcccacgagctgtatcaggtctttatccgaagaaatgatggccacgtccgcatgctctttggataaatcagcggcccggtgggcgaaagtggcgatcaggtcgttcgcctcgaagccggggcgctcgaacgcgggcagacccataagctccacgaactttttcacgtacgggatctggggaaccagctcctcgggcatggccgagcggatggccttgtactcgccgcacatctctttggggaaggaagggtgctatgtatcgtagatcacggcgatatgcgtgggccgcatctcttccaggatcttcagcagcatggtggcgaagccgaaaacggcgttggtgggcaggccggatttattgttaagggtgcggaccgcgtaaaaggcgcggaagatgaaagaagaagcgttcgatcaggcaaaacacagggcgcttggaagaagccatgggtatgacttactccaaagcgccccg

SEQ ID NO: 66011 - DNA, 607 bp, Arabidopsis thaliana landsberg
atggacatagacatatataaaggttcatccactttaaattttagccatcttcattttcacactcaacccctctctctcctttcattcggattctctctcggctttgttttctctttgatctgattcatctattctatttctatcaccacacaaaaagaagaaaaaaaacaaactttactttaagaattttgaagaataaaatcaaaagagaataaccatggttttctcctccatccaagcctatcttgattcatccaactggcaacaggtaaatgctttacaattccttatatagtagctagacacacaatttcgtcttgctttgcaattagcatgatctaattttggaatcaaactcaaaaagagtactaatattaattcaaagaatgaaaaagaaaagacacaaaagttcttcttgcttagcatgttcttgaatattcttgttaaatatcaatccttcttgttttgttttgtaactttaggctcctccgagcaattataatcatgacggaacaggcgcctcagcaaatggaggtcatgttcttcgtcctcagctgcagccacaacagcagccgcatcctaatgggagcgggggaggaggtggagg

SEQ ID NO: 66012 - DNA, 594 bp, Arabidopsis thaliana landsberg
  unsure (1)..(594): unsure at all n locations
agccaatcccaggcgaaccagtgaatgctttcatattgtgtctttctcgtccacgaagcacggtgaggggcgcagtggttcactagacactgtcgtatgttcacacgcagccctcatcttccgatgacaaggtgcccacgatgcgttactgctctttcggtgcggggtctggaaccttacgccgacaatggaatgttcagctacccttatggacctgttatacgttacgagccgcacgttcacgcggggctttcggtcgcgcggctctccctgtcatcacggtcagccaactgtccnnnnnnnnnnnnnnnnnnnnnnnnnnnnnnnnnnnnnnnnnnnnnnnnnnnnnnnnnnnnnnnnnnnnnnnnnnnnnnnnnnnnnnnnnnnnnnnnnnnnnnnnnnnnnnnnnnnnnnnnnnnnnnnnnnnnnnnnnnnnnnnnnnnnnnnnnnnnnnnnnnnnnnnnnnnnnnnnnnnnnnnnnnnnnnnnnnnnnnnnnnnnnnnnnnnnnnnnnnnnnnnnnnnnnnnnnnnnnnnnnnnnnnnnnnnnnnnnnnnnnnnnnnnnnnnnnnnnnnnnnnnnnnnnnnnnnnnnnn

SEQ ID NO: 66013 - DNA, 1183 bp, Arabidopsis thaliana landsberg
cccaaatgttaatcagatcggttaaaacaacaatttcatcgatcggtatcatattaatcagaaaacaaaacaagaataatctataaaaagtgatcttattcttatcgaacacgagtatcgtctaaagggatagcatgtttgtaatcttggggacaaattgtaaacagtaatatatgaagagaacattatcatgaaccgttgatgaatgaatgtacccaaatgaatagagtataattgtatgcatttatactgcatgtctaaatattatatgtctaaaatagttgtcacaagaaaaagtgttggctctggtgttatcttgtagactattgcatttttggactagcaaatatttatctcgtggtacgtagttgccgggacaagtttaaaactccgactgattttaataaaaaagatcaacaatagagatttgtattttattttatttttgtagttggcatccttaacataaatccaaagaattttattcagcattcaaataaaccaattttaatgttaccgaatgaaaatcttatacagttatcttaaacatgagttttcaaaaatgattaatagaaaaacctatgttatatatatagaaatttaataatatacggtattagaaccacattctgtcttaaataaaaagaaaagataattaaacatacgtaaatcatttgagtgaagttagtacaaccgaatttttttttttttttttttttttttttagtacaaccgaattttaagttagttttattactttaagcctgtcattcgatcgactatgatatttttagaaatatatgtttcacttactttttgtagttactgcaaaattgtgaaaagtatattatcaacaaaggattataaaattgaagaaatcatgacttcagtgatcgaattcttttagtgattaaaaaaatcaggaaattatgaaaataacacgaaataattaatttgcaaggatgataaaaaaaaatggtaaatttggtaaacgtatttaacatgtcaaagtcaaacccttcaaatctttaaatatacaatctccatccttgttttaaggccataaagccttaaacctcaaaggacatttaaacaacattcattattttcattctcactccccaccaaaaaaaaaaaaaaagaagccatgaactcctcgtctcttctaactccttcataatct

SEQ ID NO: 66014 - DNA, 508 bp, Arabidopsis thaliana landsberg
ccataaaatttctgatttaagaaaataattcttttgattttaggataaaattaaaatcaatttcattcctgaattatttcggtttttcttcttaaatttctgattttttaaatattttatacatatttaaggaaaagaaatatatttttttcatgtagtttggttgtagaaaagttaagacacgtaacaaaaaaaaagaaaagtagtttgttaatggtattttggtctgaaataacataattagctaatttgtgaaagctccatttcactttgtcaaaacatgagaacaaaactcgtaatatgggttaatgtgatttttttttataaaattatcatgctactttgttattcataattgagtgagtttcacttagctatacttttggcaagattattttcaaaagagacactgtcatcttgtttttcactattcaacattcttggatacaattttgcccttttttctatatttctctatttcattttgattaacttgctactatcattt

SEQ ID NO: 66015 - DNA, 517 bp, Arabidopsis thaliana landsberg
ttggctctgcaaaactccggtaatagcccactgatttaagtagtggaattgattaaattattaaaatctatagacagagaagatattaactttccaaccttatcttgtctcctacgacgactacgattattatttttagtacagtaaattcatctgtagttttggatcccattttatttcgtttggtcctgattccaaagttttagatagacaacgaaatatgaaatttcttgaaagcaatacagttatacaaggatacaaactaaaacatgacaaaagatgatgccgaagttttcgctttgaggtggaacgatcgatatcaaacgtaacgaggagataaccttggaaaattgtttaagatggacacttcgatccaaaacagatttagctgcataacaatactaaattagtcggcttaacttgcataaacaactggattcaacactttttgtttttgtcttagctcgttaatggattgttctgactttttcattgctgacagcgacacgtgtacgat

SEQ ID NO: 66016 - DNA, 1514 bp, Arabidopsis thaliana landsberg
aactctttcttcaagtttttctgatgcattcggttcagaaactaatgacaaatggtttcatttcatgttgatcaagttgcatgctgtagcaaaacagaatcaaagagcagatattaaagtgggagatagaagaaataagatctcaaagaacaagtttgtgacacaccataccatatgcaatattaatagccgtttccattttgtcccctgttaacacccagatcttaattccagctcttgataatgtttctatgcaggtaggcaccccttcctgaagtttgtcttctatcgcagttgatccgatgaggataagatccttctcgatgagttctgccaccttcatagatcaagacacgacacattcatcaaaaattataagttatttcctgggcgactcaaaaaaatgtattcattgatacaatcattcacattacttaaggacataatcataaaatcattttcactcctgtttacaaacaagagaatacatatgggtaagaaatagtagtatacctcatctaacttcttctcacggtctcgtaatgcagatttggcttggatgaacttttcattccaactatcataggtttcaggatttaaatctttataggctaggcaaagggtacgcaatccagaagacccaaaatgttccaaatgttctcttgttactttcctaacatcgtccataccattagccaatctctcaaagataacattatcagcgccctgtggacaatgttccaagcaatgatcaaaaactgatccagaagtacacagagaaccaagtatgtaaagaactattaccttacagtagagtacaagccttccatctgggaaacgacatacaacagactggcgcttcctagtactgttgtgcattgtgtaagatataattagtatgcttaaatcatgacgaaaagaaaataaacaaacaattcactgtcatatagacctgttgaactcgagaacgtttaggatctcataggccacgtcttgaatctttcccatcttctccacatgagactcgcgaacatacaccatagttggagtacgcctgaaaatacatgaaagtagtctcaaacaaactaccagagacttgagaaacaaaagcacttatgaaaacaatctataaattagaacaaggaatcatgggacaagtcaacaaattgtaaatttatcttgtcagatttaatgccagcaatttcaaatctttggaatttaaaatgtaatgagaattacctataaaagaagaatccaaaattcttggcagcagtaactaaggcagcttcatctggagatgcagcttgataaacaatcttctcaggggactcatcaccttcaggaaggacagtgtgacagatggccaggcatctaaacagttcctaaaaatgtcaataatacaataatttaagttagaatcatattagatagtgcacatgtgtgctcaaaaatagacactgcagaaatacggaacccaaaaccaaggaacaacgataaaacctcaaggactttct

SEQ ID NO: 66017 - DNA, 305 bp, Arabidopsis thaliana landsberg
gttctgtctatagatgcgattcgctagtccagataccccttagcgatatgaataaaaactttgacctgaatgaccggtgaaacgcagacaggaggattgtgattggatttcagtaacagctgatctacgcatgcatgagacaatccctgtcttactaatggctgctcaacgggtgaaaggcttcccgggggaatctatgttcaccattagcttgccggagtaaccagcttcctattgcggggcattatgctggttttgcttaaggtggcacttggttggtcctacctatgctggtacgctatgtc

SEQ ID NO: 66018 - DNA, 517 bp, Arabidopsis thaliana landsberg
cgtcagcggcgggtggcgcgagcctgttcggcggcggtgtcaacccgggcttcgccgactacctcgccgccgtcgcgtccggggtgtgccgcgaggtcaactacgtccgcatcgtcgagtccttcgacatcgggacctgggcaggtgacgccaaccaggatgacctcggctgggggcgcccggccggggacccgggccacgacaaggacatcgagcaggcgaccgcgccgttcggcgacgccgtcgaggcactcgcggagctgctgcaggcggccgtcgacgacatccgctgcgaggtcgcgtttgcccacgcgacgcaggacctcgccgtcacgaaccgggacgtgaaagccggaaccgtcgccggcatcgacgccaagtggttcggctcgatcggcggcatcgacgtcatcgaggtcaacgtccgatggaccatcacgccgttcctcgatccggcgtgggagatcgcgatggcctaccagatggaggtccgcggtcacccgcaggtgaacgtccg

SEQ ID NO: 66019 - DNA, 524 bp, Arabidopsis thaliana landsberg
ggttaaacgagaagcatatttttttttaattaatgattttaccttgatacgttattgaaacaaatatagaattttatgaaatttttgattgggaaaaataagaaatatagtcgttatttctagatcgaggataaaatataatgtaatctacaaaatgtctttctttattcccttggagagatcaaagtttttggtcaattggttattcttataattggttatccttatgagtggttgaaagcatggcgtacgacaaatcaaatcatacaaattaggttatatcacaagaggacatatatcaggttcatgaacctcatcattcatggctttcgatttttattttttattcgtttacgtcacgattcagcatttttatataagttaaatatgtttatttgtatatctataaatcacgagggcaatattgaataatgggaatttttctttttcgaaatattcggtttacatgaaagagatatgatgcaaagttacaatacatatatttcattctatgttgggtgaat

SEQ ID NO: 66020 - DNA, 493 bp, Arabidopsis thaliana landsberg
agcctgagaatagactgattcgtcgtgggagtcatcatcatctttctcatctctactacatttcctggattcagaaacggtggttgcgtcggcgtatgaatctccaaactccctttcatcattttcacaaccacagacatcggaggccgctgatcaaacgctgcttgaacacatagaagcccaatttgaagtagccgggacgcttctatcttgttgaagcgatcacctaagattggatccactgcctcttccacattgcttgatctgcacagactccatacctgaaatatgattgcaagattcacgaaaaaggatttgatctaaaatcaagaaaatgttggaactactcgtagagagttagtttaccgattgtgggagcgaaccagcgtcttgtacgaaggcagtgtttcgttttgcggctataacttcagtcataagaactccaaaactataaacgtctgctttcttagtgagatgtcctcgggctacatat

SEQ ID NO: 66021 - DNA, 483 bp, Arabidopsis thaliana landsberg
cacaaagagggagagaagacatttaacacttttcggcagtttgcagacaatatagagtttcagggtgctatgggcgttaccagcaatattgcagttaaggccaacggaagcttttttattccatcgggtaaagacagtgtgaataatggttcgggtaaaataatagaaattggcggcggttattttatgccgattaaccaagattttgtttttgaaacttatgctattataggcttcggaaatatgaaaaaccatttcgagccggatgggaaaaccaatccgcaaaccattggaaatatttctgcaaatatgataagatatggcatacagcccacttttggttataaatcaaaattttttgaagcagcaatttcctcgagatttgtaaatttaaattacagtaatatcaacggcgatctgatctacgaaggcgataatcagattgattatttacagcgtaataaatctaactttttaatcgag

SEQ ID NO: 66022 - DNA, 525 bp, Arabidopsis thaliana landsberg
  unsure (1)..(525): unsure at all n locations
ggcagtggcgtnccgcgatatcggccgctcttcagcatcacgttcgaccagaacgccatgattttttgtcaggtgcggttcccagtcgcggatgcgcgcggcgaacaccgggccgagcagcgcgtcgtctcgcgcgcgggcgtagaacgtgcggaccagttgttcgatcaacggttcgtcgatgccgttgacggcaaggccagggctggcggattcggaagacggcatcggatgcagcgcactgccgtcggggcgacggcggaacgaggtggagttccattatgccgctgctgtctacacgacgctggtgcgcggttggngcgcgccgctacactcggcgcatgagccgccacgttccgctggacgttatcattctcgccgccgggcagggcacgcgcatgaaaagcgcgctgccgaaagtgctgtacgcgatcgccggcaagcccatgttcggtcacgtcatcgatgccgctcatgcgcttggggcagaagcgaaccatgtcgtcgtcggccacggcagcgatg

SEQ ID NO: 66023 - DNA, 547 bp, Arabidopsis thaliana landsberg
atcactgtaggcatgcgcagtatttgtttggggggttaggggcgcgggttaaagagaaaccagtttggtgaattttcttccattgaacatacggcacaaggtataatcccggtattctttccacctgcccaggtcggtttctgaaacgatccgccagaaatttttcactttcagttcttcgtaatcaggtgtgtctacaaacacgccggttacagaattccgggtcttaaaaaatatcctgacaggtgtatctgccgagcgatgctgggagaagaatttttcgatctgttctagcgacattttattttctttacattgatagcgataggccctttcggaccgcgttccatttcaaagctgactttgtcgttttcctgcagcacttcagatgcctggctctggtgaacaaaaatgcgctgctttgtttgcgtatcgaggataaagccgaatcctttggtttcattgaaaaaatctacccggccctgcctctgcgggtcttactgctcccgtactgggatgcctgtatataaaaattcggaaaccggtg

SEQ ID NO: 66024 - DNA, 2090 bp, Arabidopsis thaliana landsberg
agatatcaataatgtagaagaagacaccattaactcaattaaaaagcttcaaacaaggattccaccattctcccactgatgaataaattaaagacttttaaaactcataagacaacaaaatcgtcactttcacaaaagggttgctctcattcatgagttacactgccttaaaacatgataaactcaaaacagaaaactaaaacatgattgatctaactttacagaacaaagcaaaagaaggaagaaaaagatctgtcattgtaagaagcaagatcaaacgcatgccaaatttttgacagaaattaaacgaactttgagctaaaacgaatcaataataagtacctccggagaatctgggtagagatcgattgatacacatgtagtaagaagcgagaatcttcaaaaaagaaaaaaccaatgcgtatctatgtttctctctatctttcggcgcctaaaagtaagggaatttgggaattaggtattgggatttatcaaaggaagagaaaaatctcatccttgtctctctgagcttccgtttcagatttttgtttggactgtttttttattttctgggtttcatttactttcttaatctattttactttttttggtaactgatgtaagtgattttagtgatagttctcttctttgccactaacaccaaccactcgttttctgaaaagtgtagattgttctttttcttctgcagtttttcagttttttggataaataaaaactgttgagattcccactaaaacagattaaaagcaagcgaatctgatctttcaaattcaccactgtattatatcatagatgatctttgcaaaaatctagaatttgatatcgctagaactcacatcagttgtgactttttcagtgcctagagaaaaatgggaagcgaaaaagtccaaattttggcgcataaattttacaatatagttgtggttaacagaatcatgaaatatttgtgatttttaccgctatgtaaatatttatttaaccgcatcgcatttttcgacaatcgcacgctagtctcaaccgcgtctgtttggcagtggaagcgttttgtccttttatcataagtccgtcagaccaaacgtttgtccaaattgtagagagcgtggaacccaaaacatccataagaaacgagacgcctcaaaaaatatcacttccatctccggcaaacattccggcgatatataaagtcagcaatggccgttctctcctctgtatcttctctcatacccttctcttgtacgttattcttctccccaacccagtttcgttatattgttcaagtcgattcttgtctctgttctactctaaatcgtcgaatccaatttccgattggggttttccggacaattagtaaaatttagatccaagtgtgaaacttttgaaagcttgattagtaaagatgatattctagatgaagattgaaacttttggtgttattgtctcaatgtgtttcagatggggcaacgagactgactagtaaagcttcattagcctcaagaacttccggattcaatctctcttctcgttggaactcaacgagaaactcccctaggttgtatctttcgagagcagtgacaaacaacagtggcaccacagagatttctgataataaaacagctccaaggacttactcatggcctgataacaaggttcgtaattctctagaacgatgtatgagatagaaaaagttcaattgctgatcccgtaacttaatcatgtatatgctctctctttacagaggccaagggtgtgtattctaggtggtggctttggaggattgtacacagctttgagattagaatctcttgtttggcctgaagacaaaaagcctcaggtgatgtttctactagttaatagcaatctgtttgcaagatacttgttgttctgaatactttttaatgttcttgatattgatcaggtggttttggttgaccaatccgaacgttttgtgttcaagcccatgttgtatgaactactctctggaggtaaagttagtatactttatgctaaactagtcttttgatactattatgtggttatttagtgtcataatcttttgatctgcagaagtt

SEQ ID NO: 66025 - DNA, 679 bp, Arabidopsis thaliana landsberg
tttgatgatatcctttgttccccctttatcgattgcaggtatatgttctgaatccaaagcaagatctgcatggattatgatatgatccttttaagcatgctcctgaatttagaggtacctagtttggactttttatgatgtttctgctgacagggcattcttggtcattgacttgcttcacattattctgatctgtagaaaagaaaagatctcgcatgtctgccaataaggaggttggtttcagaaaacctttatcaatgaaggaaagtctttttggacccaaatgtaagattttgactcaccattttttcttttctttcttgttaattttctcttctttgcttaaagatacttacatgcatctatagcgtatctctatgccagcttttacttggcattcttgttgcgtgaaaactacttatgggttttgttagttactaacatgagttgaacaatcagcaggaaagattgctccgggttttggcattggagcacttgaggaacttgatgttgaggatgaagatgtctatgctggtaaggacagaagtgcaatttcactaatcatggtttctttgttcatatatgcataagtgtctgttcaggttgaactattatttattctaaagattacaaaccattgtcccacagtcgttaatttaaagcttctgtatgttgaaaa

SEQ ID NO: 66026 - DNA, 328 bp, Arabidopsis thaliana landsberg
ttaaagggtaatgaagtgttgtgagtggagatggagatatgggcaagtgcttataaagatgcgtgacgagcagatataatttattgggtcggtgataaaagataggttaaagagtcacagttgacaccacaggcctcgaaaccgtaatatggagcccttgaatctcacgactgcatagagacatgcatccctcgttcacttaaaaccacacattcgtatctgtcacaaggagaactcttctttgtctttacctgcactagccctgaattctactgtatctgcaatgccccatacgcagttacattttctgcggctatttattgccttc

SEQ ID NO: 66027 - DNA, 573 bp, Arabidopsis thaliana landsberg
  unsure (1)..(573): unsure at all n locations
cgtatacatataccactatgtgggctagacatgggacttgaagggatcatcttagcatcaactccttcttttaatgcttgcctaaaaagaaactgaacagaacaaaaaggaaacggcgaggagagttatattttacagggtttttagaatgattgctaattccacgtgtctttgatcaacatatgtagatggcattgcattgacaacaacataaaataagatccagagaatgttgtagaatcactaacacatacctctacctccagcgatgtgtatgatggttccaggttctcaattaagagcaccctacctttttctatagccggctttagttcgtcctcaaaaggctggaaaaaggaatagtaatgttaaatgaagaaactagtgattttnnnnnnnnnnnnnnnnnnnnnnnnntcgtttaaccaactttatcttaattatttcatagtttctataaacagtaatattcccttggtctgatttcgtgtgatgaaagccaaatagcatgaaaaaatggctattggaatgaaatgttttcagattcttcttagaagcgtcaaagaacttacc

SEQ ID NO: 66028 - DNA, 735 bp, Arabidopsis thaliana landsberg
gcgatttccatcgctggctgcaaatccttgttgaaaggctcagtcgggcttggtggtagtgcgagcatgatccaggccatgaagctggcgaagatcaacgcaccaaagcccgcccagattgcgcggcgtgcacgggcgtagccataaacttcggtgaggatgtcaccaaagatgtagctgaaggggaaaaagatattgccggcaccgtagttgaacgtgccaagaaaaggcagggtcgctaccgcaactttcgcaggaccaatcaggttggagcagagaagtaccgtcaccataccggcaacaaggaaatcgtagtagcgataagagcgcatgagcagactcagtccggattaggcagctgtttttgcaaacagcggtttcagaaatggtggcgcgatcagtgtcgtggccacggccatgaacagcaccacgccgaagaggctgtcactgatcacgcccatgccaaggccaatctgggcgacgacgatgcccacttccccgcgcggcaccatgcccacgcccacttgaagtgcgccacgcgttcccaatgacaacgcgccgatgccgcagccgacgaccttggtggctactgcgatcgccgtgatcagcagcgcgagcaacaccacgctcgtgtcattgaagatcgcgagattgagctgcatgccaatgttgacgaggaaaaacggcaccatgaattcggtgacgccgagaatctggctgtgcagcttatgattg

SEQ ID NO: 66029 - DNA, 990 bp, Arabidopsis thaliana landsberg
tctaaaatagtatgtacataacacttttggtcgaatgtctccttatctgaaaaagtgtccataatgttctgttcaaattcatgtatttttacgtggctgcataatctttatctgaagtcccaacattttaactacctcaaactgtctacgtcttggaataatcaagtctccaaactatcaatcaagtatcataaaacttctccacaaggcaccaggaacacattatgatgtgtaattatatttaactcaaaaaaagatatgatattaataaaaaacctttctacaactctttatttgaaatcaattggtaatagtataaaacgaataaaaaatttgttaagaatatcgatagaaaattatatgccaaggtaaaacatcgatttcaatattactgaagagatattgaaaaacgatcttttacataccgaagggtcaaacatgataaaggcactcaaagattaatatgtgcaaaagatggccgctctgcctaccaaaacgacatgacatgcggatggaagatttttgcaccatcatacgtaagtgtatacactacggggtaaatttctcatatcgaatattaccatttcataaaaaagcttactatcttgactaagaaatacgataaaactgttactactattggaatgaaacctcaataaaacaccaaaaagaagcagctgcaaatcaaaatattacaaagattgtgacatttttagaacaagatccagatctgttctctaactgaccaaccaactatcagtctatcaccaacgtgtagacaagctaacacataagtttatgcagttagagaatatcttctaacacttaaaaagaaaaaaaacgaaaaacatggaagagaaagatcgaataaggaggagacagagacaaaggaggcttcgaaagtttgatgagggtatatgcaaaaggtttggtttatatagagaggcttggaaattaggtcaatggtgtatattagtcggtcgatggaaa

SEQ ID NO: 66030 - DNA, 355 bp, Arabidopsis thaliana landsberg
catgcgccgcgcggccttctcgaaggcgccgtaggaacccctgcacgtgcagcggcttgccgttggcggcgaagggcgccaggtacacccggtagcccaggcgcgaggccagctcgatccagtcgatggccaccgccgtctcgaactagcgggtgaaggcgtcctgcacgaacaccaccctgcgctcgcgttcggccgccgacaggccggccaggcgccggggccttgccagttgcacgtcccagcgcgcgcaggccgcgtcgaagtccaggcggctgagcagcgggctgtcgaccatgcccgctacccgggccaggaacaggcgcaccggggcgaagtccatcaaaccgttgta

SEQ ID NO: 66031 - DNA, 377 bp, Arabidopsis thaliana landsberg
agctcagcctgatgccttttgaaatcggaaccgtattctgcagcataataatggactatatggacgctgttgattgccttgtcatcgctaccatgcagagagagacggaagtcgctaccttttttttcgccagagatgaagtaatgccccagacctagactatctggccagacgtgcagcctgtcgagtctaatgcaaaaccaagtcactaaagggcaaaatcacatcggacttttaatgacgacagatatggttattgtgcatcagacattgcatcaagtacatgggcataggaatgacccacctatatacggaccatagatagctaccacgcgactatcggcataccccgaaaccattgggctatgcctactaac

SEQ ID NO: 66032 - DNA, 558 bp, Arabidopsis thaliana landsberg
aacaagcatttgtcaatagggattcatcataggtattgatgtattttataacataaaataagagatagaggcaatgcattgagtatcaataccatcaatttaatactaattagtcctctcttggagcacaaaacatatattttaattacatgaagttgctaaaatatatattttctaactatacatatatagtgattagagagattatttgtgagttttcttctttatatgtttaacacgatatcaaaggaaacattacaaagttaattactaacactgacttcaaaaagaattcatacaacccatattactcaacgatatcagaggttccaagtcttcttttgctgctatacaatattacgaatttcttgtagtctaaatgcatgtttcgctatcttacaataatggcgtaccaactttttagtttttaaatgagaagttgaattgagtgaaaatcaacccattcagtctctttgatatatccaatataattaactaaaattcagaagtgtcaatatgacatacacagttgagaaatagtccaaattttgatagaaa

SEQ ID NO: 66033 - DNA, 1395 bp, Arabidopsis thaliana landsberg
aacggttcgagagtgcgttcgagtgtcctaccaccatcgtatcttcttgtatgggtttattattaggttttttgcttggttttccaatgtctttataattgaaccactctaaatttcttttttaaaattaggctaagaatcttgaattttctgttgatttaaaccaaggttttcaattcttcttagcaaaaaaaaaagaaaaggttttcaattattaaagaatctaaattttttgagttcaagagtttaatgatagctgaaaagttatgaatgattgcaagtttgcaacagaatggtcgatgtagtacatatcaaatacatcaaaataaatattcgtgcttagcaagagaaacgattgaaataaacagaacaatcgttaaccacttaaaaatcttagaataattttgtagtgataattttctgtaagagagaggtatcatatcttacaaaaaaaaactcatttcagataaaataatgttgtccaatcgttaccaagtatgtttttgctgtcatcagttgtattgtaactcgtctcttagccatatagttctaagttttaaatgttttcaaagactttacaaaaataaaataataataaggtggaatttgtagggctaaaagcgaaaaataaaaataaaataaaagtaaagaaacgtctttctcaataagaacacagatcccaacggattcaaacagcaaatttgagctttgctcttctctcttattataatatcctctcaaaaaccctctcctatatcctcctaaagccccccttccttgtttctctaccgcaacaaagaaaaaacaaaagtttgagaaaaatggtgtgttcgttgtgtaaccaatgattgggttttagcttactacttcgagagattataagaaagagagagtgaagatacattatagaaagaagagaagcagaaaccaaaaaaagaaaccatgaagtctttttgtgataatgatgataataatcatagcaacacgactaatttgttagggttctcattgtcttcaaatatgatgaaaatgggaggtagaggaggtagagaagctatttactcatcttcaacttcttcagctgcaacttcttcttcttctgttccacctcaacttgttgttggtgacaacactagcaactttggtgtttgctatggatctaacccaaatggaggaatctattctcacatgtctgtgatgccactcagatctgatggttctctttgcttaatggaagctctcaacagatcttctcactcgaatcaccatcaaggtcagtagtagtaatgttggagtttttagttttcttggtgttgatgttgttgtgtcttgtttgatgagaacatgtttggttttagggatttatgttttattttttatactagggacattttc

SEQ ID NO: 66034 - DNA, 103 bp, Arabidopsis thaliana landsberg
caaaattaaaaaaatacccaaaaactgaaacctcttatgaacaaaaagcaattcacagcaatgtcgaacttccaaatatattagtgaattcaaaacttgtata

SEQ ID NO: 66035 - DNA, 491 bp, Arabidopsis thaliana landsberg
cagaaaagaaaaaggagcgctgacatcagtttttgtcaggtcctggtaaaacatatatcccaatgcactatacattatgtttatcgaagcttctctcataattcaacagggcgttgtaggtaagatgataataaaatgaatggctcttggtataagcaagcggagtatttatttctgttccatcaccggtaaataccagtgaatcatcaatattctggtcgcgcacatatcttgcataattttgagtagtaaacagcccgcctaccgaattggtctgataattaaatgtccccgttaaggacaatcccttagtgataaatcccaaattcaggtctattccaaactgagaggtagtgttggtaacagtatacctgacataaccgctgcggttaagcaatccataagcgggattatgcaccaaattggagcctgtgctaatgacttccccaccttcatcaattacatcccccgttacaggatctacaatttta

SEQ ID NO: 66036 - DNA, 650 bp, Arabidopsis thaliana landsberg
atctaccctcaaaatcaaaactactaacttgttatccgctggttcaacaagatcaagcatggtttctctttagtcccactctttgtttacaaccgagcaactaaactctatgttggttggttggtttattacactctaggtttgatgccgttggaaaaacgagaggaatggatgtatgcatcagcacaacggctaaaagcgatcaagaaggacagaaactattggctctaatgggaatgcctttcagggaaggaggtggtggcagcacaggcgcgatagtgcggaagaagaaactaaagtctcatcactttgatgctaaaggaaaaggaaagagatgatgaacatagctgcctattgtatgtatcgtcttctgtaaccaaccatttcatgtttcagaaaaaccatctccttttgtaatgctttatgagtcaatttgaaaataatatcagggatcttgttgttatggtaaaaatttatcaaggtttttctgtaatttattgaaagttttgtggattatacaaaatgtagcgcgtgagtgaacgtgaaaagctagcgcgtggatttgtcaattttccctcccctttgagagaaatcgctctctttgtaaacttggtttcgacttctcttttcatcacaatcgacaaacaaca

SEQ ID NO: 66037 - DNA, 1470 bp, Arabidopsis thaliana landsberg
  unsure (1)..(1470): unsure at all n locations
acccacgacggtttccatgaaaggaatcgccatggctgagaaaagagtgacctgaaccgcgatgaaagcagaagcaaatcgaagaaagcagaagcaaatcgaagaaagcagaggaacgacaaaagagaggtttttcgtttttgactcttctcaggtcggtgtggatatgtaaaacaacaaaaacacgggtacgggttataccttagaagcccaaatagtaaacgggctgagatttaggcccatatgaaacaacccctatattttatctaaaatctctaagtataatagtatattatcaaatattggggccttagttgaaatattatgttttaaaggggctaaacggaaaactccttatcctcaaactgtcaacaaattacgaaggtgccattgggtttaatcaacaacgaacgccgagagctctcacttcacactttatccacttggagcttcgacaatggcgtctccttcgcttctgcagtcttccgcttcttcgtttcacggacgtttctcaccattagcggctccatcctccgcacgaatgctctctccgccgctcagaaacgtggtgaaagtctcggcgtctggaactgtactggtcgagaaatctgaagccgagaaaactcaacgcctcaaaaccgcttacctcgagaggattatccctgcgctcaaagaagagttcaagtacgttaatattcaccaggtaaccccaaatccttcccctctgagctcaaacctagtttttgttctgttgcgattgattgaagtctaattctcagtgaattcgaattttttgagcgaatgttaaacctaatttgcttttaatgataagtttgaattgatttcttctagaaaatgtagtgaagaagcctagatttaagattgttgtgttgataaaatcgtgctgttgggatgtgccatttacaaatgtgaatgtgaatttgtcaatctcatcattgttgtatatctgcttggacatcttctctaccaggttccaaaggtacagaagattgtagtgaattgtggtattggagatgcggcgcagaacgacaagggtttggaggctgcgatgaaggatatcgcgcttatcacagggcagaaacctattaagacacgagctagagcttccattgctactttcaagatcagggaagatcaacctcttgggattgctgtcactctcagaggagatgtgagctatatttctcttgactaatcaaactttccttttgagttatttatgtattaacattttgtgattttgactgttgtgacaggtaatgtactccttcttggatcgtcttatcaacttagcccttccgagaactcgagatttccaaggtgtgagtcccagtagctttgatgggaacggaaactacagtattggtgtgaaagaccaaggataaattccctgaaatcaggttagttctattgtatctaccctcaaaatcaaanctactaacgtgttct

SEQ ID NO: 66038 - DNA, 418 bp, Arabidopsis thaliana landsberg
attgacggcggccgttactaccctgctgcttcgatgtacactcttcccgaccagtcaaactgtcttgtgaagttcaattttggccccagttttgagtttttccctgaggattttggtgggcgtgctaccccgaggccgatgtgggaggttccatatcatggatttaatggtagacttgaaactaatggttctgatgatatgaagagttaggcagaaccagcaggcgtattcttgacattttaacacagttttcccaaactagttcttggttcagatttggatgagtttagttgtaacagtcatagggaagcatatgaacaacaaatgagttctgtacatgtttactctaaaataataagactgtgttctctgattttacaactggattatccatatttgtttaaagtatagactgttt

SEQ ID NO: 66039 - DNA, 1687 bp, Arabidopsis thaliana landsberg
aaaaagacctccaccacctgaatatacctttccagcaattacagaagccaaagggagtaactggaagcactccaagcacttcttgtagacagctgctcctttatctccatacttggttaatacttcatttttaaatccatacattgatgtacaactttcactctcgtgactgccacgtagaagatacactcttgccggtagaagaacctagcagaaaaatgaaggtcctacaattaaaatatgctgcggcatgatttaatttagcagcattaaagtagagtatgtgtctgcgtcctaagctccactgacacgatatcaatactacacacatcaaaaggctaataagcttaccttccatgataatagaagcaagaaagtttctaaaccccatgctcctatgtctacataattcccattgaacacatagaaccgatcaccatccgggaatccagcatcctgcataaggtacagcaaatcatgtagctgcccatgtagatctccaaccacaacgacctctgctttctcactgtctatcctaacgcagtttggctcttttttcaggattttggaagcaaagagaaccagctcatccaagacattaaaaggcagaacacttgaaaattcacaaggtgggagattcttagacgaccaatcaaacaccaacattacttcacaaacccagctgaaagtaagtttccctcccgacggccagaaaagaggtttctgggaaactgatgataaagactgctcacatcctatatcctgaacaggtggcatcagttccaacggttctgctgcaagaccatcatctatctccatgtcattcaatggtaagcataccatttctccacccatcggcttttggggtattattgtaggtgtaggttgaggtaacatcaaaaatggttctggagttggagcttgagcaacggagcctatagcaaaggaatttcttaagttaaaagataagtctcgacaaaacttgaaagtttaagtcactaagaaaaggaattgtagcctaaaactattctgatagttcttatggaatcctaccattagataacgagcctaaaggcgcattgagttgaagggcgcctgcacacatatcaacgatatcttgtaatgtttgcctcgcggagccaacagtaagttcctcctcaagtgaagccctagatcgagcatgaatggctgcaaccctctgaacctgtaatttttatattgggtaatgagatttaagtaagctgaaaaaccatagaagttttgatgttggacataataacttacaagcacttggaaagcaaaaccagtgggtagaaattgtccggggcgcctctcgttcataggactaataattcttctagtaattctgcggtaccactccatataaggatcattatagtccattgggctacactctggctcaccggatacaacagatgacacacgtgcctcccacaatccaatatgtcgactatgacgtgctgaccagtcatattctgatttgcctcttttgtcaatagcatgaagagctttttcattatcacaaggtgctggtattgtttggtgaagaccaaactgtctaagtacccgatcaggacgatgccactcaaccacatcaaaacaaatcaatggtgcaacagttcgccatatgttctcaccactaacacatatcagaggaatcttgcta

SEQ ID NO: 66040 - DNA, 2629 bp, Arabidopsis thaliana landsberg
ggtttgaacaaatttgtatctcttcttagcaaagtgtatgttttggttgttttgtactttatctaacatcatgtgtctcttttcaggtgggttttccattttgctcaactacgccagctgcctgttcatgtcccatatatgcctacggataacccaaggcttaaggatactgtgtatgaggtttgtatatatcaacaactttctacagataggcttaaatgaaaatattttatttcatagaaattttaaaatagataaaaaaaaaaaaacttttcttgtaaacgcaaacatttgtttgaaacagtggaggcataagatttatcttgaagtttatttctttacgatgcaggttgctctagttgcactagcaaccaatccctcataccacaaggagcttttgtcagcggttaaatcttggccacgttctgtatattctgctttgactgttatctcagcaatagagcctcaactgaacacatcttcaatgacagatgccctcaaagaggtcagcattgtctgtcatgttatgctgaggtttattaacatttacggatttcagagttgtttctattatttcatgtatcaggcgctggcagagctgtatgtaattgatggacagtatcagaaggccttctccctatatgctgatgtacgtatgtactaagaaagtatttgtaaaattatcttcccagatcgtattcaggcctccttccgttgatagtcacctaaaatttccttttcctttttttatctccagcttctcaaaccagaagtgtttgacttcattgagaaatacagcttgcatgaggcgattcgcggaaaggtataccagaatttttttgtcacagtttgagacttctaacattatgtaggcttttcctggacgatccacaatttaatcatcatcattaatgttagcatcttaggggttcatgaattttttcttagatataggtacaacttctgtgtaatacataattcaaacaaatctggagatccacagctgattccaatttaaggttatgggatggtcttgtgagtagtattatcttgggatttaggcatatctactgctattttgttatggcctcagaattctgccatacagaccggtgaactttgttttccttatccaattgtgtaggtggtccagttaatgttgcttgattgcaagcgtgccactgtcttatttatccaaaatagggatttgattcctccatctgaagttgttccacaacttctgaaggctggcaaaaatccacaacttctgaaagctggcaaaaaatgtgattcaagatattacttgtacttatatctgcatgcattatttgaagttagtcatgataccgggaaggattttcatgatatgcaggtatgtgtagttaacttgatatatggaatgaatttttcctttctctttctcttttgcttaaatattttcttaaaatgattacatgttgtaggtagaactctatgcagaatacgatactaagatgctgcttccgttcctacgtagcagtcaacattacaagttagaaaaggtacttaacattacaagcaacccagcttactgaaatgaactatctctgggttatgtctttgtgaacttgatctattgcaacatctcaggcatatgaactttgtgtcaagaaagattttttaagagagcaagtgtttgtcctgggaaggatgggaaatgcaaaacaagctcttgcagtcatcataaataaactgggggatatagaagaggtgattgtcttaatactgtgtgttcagtaactgctcttttttccgcaatcccttgtacactctaattgatgtctttctgactggtaattaataaaacaagctatggtggttgactttgattgatattctgcaggctgtggaatttgtgtccatgcagcacgatgatgatctatgggaagagctgattaaacaatgtctaaacaagcctgagatggtaaaagctgtatttgtgatgcaaatcacaacacaaaccagtcttgattctgggaaacttgtgtccatgtagtattgtttccttaatcttctgttcttttccaccaaatttaggtgggcttgctgttggagcacacagttggcaacctcgaccctctttacattgtaaatatggtcccaaatggcttggaaatacctcggttagttttaactattacccctcattgctgttactctattcatgagttggttcaatcacgtgttcttacttaaataaacatcgaccctcatctatgtgatgccaaacctgttggtttacccaaagctaagttcgcacacagagcattggcagaatcatatgcttcctgaacacttttcatcaaaataatgttctcctcattgtttcttctgctttcagattaagggatcgattggtcaaaatcgtaacagattacagaactgagacatctcttagacacggttgcaatgacattctcaaggtacaaattcaatgtcaccaatgtccctctaatcatatatatctggaacagactccagggaatttgacgtgtgggggttgttgtacagacggatattgttaatcttctggtcaagtgcttcaacgaggctaggcgtggggtctgcctgagccatgaagacgacgatt

SEQ ID NO: 66041 - DNA, 2109 bp, Arabidopsis thaliana landsberg
ttaatggtattaatactttaaaacgtagctatctaatctatatatcatctatcgatatgttcatttttacagggagtcttgttcttatattttgcttacaagtatcaactttggttgcgtttcattctcttgttcgatcctctcgttttcttttatgttatgctccgtaatatatataaattgccttcaagcaactaaatttcaataattaaatatgttacgtatttcttctgtcagtacgatgtatgtacgcaccgtaacggcaaagcgaaaataaagcgccggtctaaagcaactctgcttacacatttatcggtggttcgtgacggagcaacagctattagccactcatatgtctccacatgtttgactacgacaccggtttaataagttgaaactaaaccacctaattataaggatatcattttttaaaagtttttaaagctaagaacggaaacgaataataaagattctttcttctaaacccattcgctctctccgatcaacacaacatttgatctaacggtttaattttctcgagaaaccgaaggaaaacaaacagaggtgcataacgattctgacggaaacttttgagatattttttttagagccaaaaggattcactttttttggttttatcttcgcatcgatctatgacgtacagcaatggcgtcgatgggacggtgcctgagctgaaattgagagtcgaagaagattccgataatggtgattatctgaaattgagaggaggatcaaatcaagaagatgaaggatcatcggcggaatcatcgagatgtccgataggatcggttacttctgtctggttctgggtgaaattgatctccttggtcgtttgtttgggttcattggcctttgttatcatcaaatgggttggtccctttttgattgaaaaggttcgttttttttttgtctctcgaagatctgatgcttattggttacatttgattggattagggtatgcataatgagtctggtttctgctgggtttttaattgttgaaaattagggttcttgaattacatgtatgagtatgtgtttataaggaaggttattcatttatcatcattaatgttggtgtaatgtgtttcaggagctgattccatttataaattgggtgagaaacacattcagcataccggttctcggtcttctactatttgcctcagtggcattgtttccaagcattcttcttccttcttccccttccatgtggatggctggtcttacatttggttatggaaaagggtttcttctgattttatcagctgcttccatcggtgttactcttcctttcttaattggacatctcttcctccacaagatgcaagtaagcatcatcatcccatactctttgtttcggatacttattattaagcttgtaccatgagatgatcaatttggactttttttctttcttgtcatttgtgcaggaatggttgaagaaataccctaaaaaagcagccatacttagagctgctggtgaaggaacctggtttcatcagtttcaagcagtcacactaatccgtgtctctccatttccttacatcatttacaactactgcgctttagcgactggagttcattatggtccttatatcttaggctctcttgttggaatggttcctgagatctttgtctcaatttacacgtacatgcctctctctctttctctatgtctcttgtctcaatgtttaaggcatgttctgcagaatcttaagactggtggttttctgttttgggatatttgcaggggtataatgctaaggacactagcagttgcatcagacacgagacacacactttcggttgtggagatagtcgtgaatgttcttggcttctgtgtaactgcgagcgcgactatagtctgcacaatctatgcgaagaagaagctaagtgcgatgcaatcagaggacgtagagacattacaaaatccaatactttattaactcttttcaccatgaccacaacataccatcatctaacacgatcttgaaattgataatatataatggtgttcttttgtttggtattctattcatatgaaatgatattatgcttctctttgaatatgaatgatcaatgatttga

SEQ ID NO: 66042 - DNA, 250 bp, Arabidopsis thaliana landsberg
ctatgccgttagaaaaccgaattctcaaagagccagcgatgttttgccaacacaggccaaagcaatcgatcgagcgcgtgaattgaacaagggtgtggatcctctggttgagcgtgttcgccacaccacagttggaaatcctgataagtggcgtaaaccatagcgtctttcgtttgttggagcctaccgacattttgcggtactgcggctggtttgtaaagcgaggtttatggagactttatttcgctgc

SEQ ID NO: 66043 - DNA, 463 bp, Arabidopsis thaliana landsberg
  unsure (1)..(463): unsure at all n locations
gtcgtgctgttgatactcagccataccgtcgcacctttgataacacgtgttcttacactctcttagcgtaaactcatgtaggagcttgataatcgcactcgtatcattcagcaaccctgacctgcttgctactggtgtcaccctttatacatttctgatcagtcccttgtacctaagacaacacttagcaactgcgtaaccctgatcggtcctactaacaccgtcattttgacatacactctgaactgtacatttttgtctgacaacttccttctttagcctgattaactgcactgcccttcttgatatcactttatgtccccacnnnnnnnnnnnnnnnnnnnnnnnnnnnnnnnnnnnnnnnnnnnnnnatataggctacgctgccggacttgcatcctgcagcacagtgccctgtatggactcatgctcgtggcctagcatagtgccatacatatcctat

SEQ ID NO: 66044 - DNA, 556 bp, Arabidopsis thaliana landsberg
gaagtatcggagtatcggatcatacaaatagttctgtttgctttccagataagagcattttcttcggtgaggcgggtttctaataatgtattggaagcagacaagagacaacctatgcaactctcttcttcagtacctggaagacacatgcctacggcatatactctgttaggagcttgacctattgaaccgttgaagaagccaaagtgtgatgtgacattagaaggaagcaatgagagaataacgcgacggtttgtgtcgtaagtcgaattaggtataaagtaggttgtgtttatgcatggaagagtttgaagtgcagagacaagactagtgctcgtgaggaaaaaccagaggaatagtaaaggcatttttattggttttgtgtttgtttttagaacagcatgaagctattgaaatacctattaatggaaatttttgggtattaatttccacgaacagaggtttgagaatgactgatcatacattaggagacatttgtcttcttggcatgttttagcggaaataagggtatatttacaaaaatggactagaagac

SEQ ID NO: 66045 - DNA, 559 bp, Arabidopsis thaliana landsberg
  unsure (1)..(559): unsure at all n locations
ctgagcttctccatagccaataacataagtaaagttattcttctnnnnnnnnnnnnnnnnnnnnnnnnnnnnggggagctttgacatagccactcaaagaatcctaaaatcaccgagtcaatcgatcactgcaactgaatctcacaaagagagagagtgttcaattacagataagcaaaaccctatctagctactcttctttgttcattagcctccaccagacaatagcagagaagcagcaagaggaacaagggcttaaaacgagtctcaagaaagaaatttcctttttgttctgacaatcagaaactaaaatgctgaaactttcttttcaagaaggcacaaaacaaaccaaagatcccaactttatgctccttttagctagtagatctgaagcaatacgacccagaagagtccacaagaagtacaaagaacaaagtaagatttttttcgaaatggagaatgaattaatggagaaaatgagaaaacaagtaacagaaagatctgggtttgaacaaaagaggcaaattatgttaagagggagaaagatacagaaaagctg

SEQ ID NO: 66046 - DNA, 626 bp, Arabidopsis thaliana landsberg
acattgacactcatccggtaatatggtccgtcctcgacggattcaatgtttgtatcttcgcgtatgggcaaactggttcagggaaaacgtatacgatggtatgaccatttctatttgcttgcatggtgactcccataaaccgtcagacattgttatttcttactctgcctttgacattggtttgtctctgttttgccttacagagtgggccagatctgatgacggagacaacttgcggcgtgaactaccgtgctctacgcgatctcttccagctttcaaatgcaagaacacatgtggtgacttatgaaattggagtccaaatgatcgaaatatataatgaacaagttagagatctactagtcagtgatggttcctccagaagatatcctttcatatactttatagtgttgaaatatttacatattcttctcgagtgtttcctctgagaaccccgtaatccttgaccagtttctcacattagacatacgcaataattctcaactcaatggccttaatgtacccgatgcatacttgattccagtttctaatactcgagatgtccttgatttgatgaggattggccaaaagaatcgtgctgtgggtgccactgctttgaatgagaggag

SEQ ID NO: 66047 - DNA, 1893 bp, Arabidopsis thaliana landsberg
agctttgatcacttaaacaagccacgcctagctgagaaagaaaaggctttggctggtttataagaaattaataataactttctggcctttaatttagataaatagaacatttaatttgtaattatatattttaatcatgcaaataataaattatctcaaccaacattataattttatatatctttgaggtcattatttttgtaaagaaaaacgctagaattgaaatatttattaatttagacgaatataagttggacaatttaatccatgtaagattaagattttgtatgccatcaatctaacaacttgtctagacaactaatgtttaacaataatttttgatactgcaaaatttgtttatgtgaagttacagaacttgtaggagttagattgttaacgttacaatactatatatagttgattcacgtgtttataggcaacatatcaaattaacatgtttgctttgcagttaaaaattgttcaagaaataagccaaaattcatcgacaaatttggagctaggggagattcggtaggtacaaattaaacaaaacttattcaagtaattaacaagtaaaataaataatcgtttaccacgtgcccatccagctgtgattccacttcaacttctgactaaggaacggaaaggcattccaagtttcctcaattaggctcaacttttcagagatgaaaaaaattagtatgtgcaaaataacgtatagattcacaggatgatacaaaatctttcaatgacatggttagtcaacgtaaacaaatttgttttggaagggtccatagagatttttactaaagcaacgtggagttttcatgtgtttgcaaccgttaccaaaacccaacagttagttaacaactttattataatgaataaaaataacacacgagaattaatgacatagtgtcaaaaagaagaagaacaagcatgatattttatgccgactaaagtattgtgaccatttgttgttgctgaatcgtcatctccaactcctaacgttaggcacgttcttgaaaaatatcccataacgcaaattctagattaagcccggtaaagtaaacttgaaaaaattataatatacaggttctttatttaaaggaaaatgtgacatggcagtgaggagaaactaacccatcttcctaatggacaaatgtcagcagagccatacatttataaagtattttaatgattaaggggacgatgatgatgtcatcagtagttgagttgggggtagaataggtaattcaagaaatatgtgattgaaagtggaaacgtaagctttctggcttttgtgtcctctctgagtctcagtgtcgggacaagacatgcatcagcatcacacatccgtgaatcggtgctttatcctcttctatctttttacttcacgactagaaaattgatttattgttttacacaaactgatattaactacaaattaagaataacatagaaattaagaataagtttctagaaatgtacatcaagtattggccgttaagtttcaacatatttataccatctggcctcaattacaatcataattcataaataatcttctgacacttaataagataacttttcaccgagtgatatattccttaaagtaaattcaacgctttagaataatgttcttatatatttaattatttaccaaatacacactatgcttcaaactccctataaaaagaagaaaccaccttatagcacttctcctcattcctcacttccaaccgccaaagaaaaaaatcaaaaactccaacaaaaaaaaactcccaaaccctaccctgagcagtcgccagatgggcacggaggactacacattccctcaaggagcggaggagcttcaccgcctgcaccacacggtggaggctccacaacctc

SEQ ID NO: 66048 - DNA, 603 bp, Arabidopsis thaliana landsberg
gttccaggttagataatatgggctcatggagatgaagcaaccttcatgtgaaatcactcttaaagtttcggagctggagttccgaggcgaacctgcgaggtgctcaaccccgaggttccttttgctcttttagatgttatcaccacagtgggctaatcaagacacctttgcaggttgaacctcagaaatatctttccttggtagtagagacaggtgttcaatagggaaaggatctgaatgtttggtttctctcggacctcgagtctgggagaactgcagggcagcttcacaactcagagacctggaggtgagttccgatatgacatcagcagtctcacaaagccagcttaggaatctcgaaaccatgtgtgtgactcatatgtcattgttatagctgtcggaaatacactagcgtgactttgaagagcgctcaatgaaaagttgggtttctagaaactagtttctcaatatgcttaaagcacacggtttaaaagccaatctcctcttgacagtgttcatggatgaggccctacattatgtgaccaaacagcttaacaagggtatagctgcttttatagactccgtgtctcacacattccagtg

SEQ ID NO: 66049 - DNA, 452 bp, Arabidopsis thaliana landsberg
gataatgttaaaatccatcatatcaccttactcttcacagacaaatgcactacaaggtcagtgatctatcaaatctatccatctcatatattgtaacacatattctgatctatattagatatatttcaaaatcccggtccaagtgaaaactgtgtccggacataagtgcactacgctcgaaaaccaataacgttaactgcacaagactatcatccaggaattggcttgacaatgacattaaagagaaaacacttcaccaatgctatgtggtgataaggactgtctgctcatgcactcacttatacttaatccttaatcttcaaccatcattgattataatacagatgatcatacaaaatctaatatctgtgattatattctgacataatacgatttgctacttgatatagatatgatagatcatttaacatgtctgaattgtgttattgatc

SEQ ID NO: 66050 - DNA, 1809 bp, Arabidopsis thaliana landsberg
tattctatattacgaattcagatatcgcctaagcttagaagggggtgtcggtactgccgatatccaccctgatcaaatctttgatacgttgttgtttcagtttttactttttttccttattttgtggaccgattggcccgtatgatacatactattgttaacctatttgggttcagttaatatatgccgtttaaatcaataacaaagagaaaaactttattcttataggtattacattctaattaaaaagcggatgaacaaagaaaaaggaaaaagaaggtattataccaaaaccggtgactcgatccagtttacaatacatataaataattaatgtggatcggtttcaactttcgcgtaatggtgtcgacgcttatcgagtgttggttgatgataatcaacggcgtgatcatcatccatcacatgcacgtgcgtggtactttctgtaatttgaagcaatcttatgactcttttggtaaagttgtccccaccactataccataattgcacatgtttgattcaattaatcctttaatgaagtcaaaaatatttcccacctttgtgtttgtcaactaaccaaattctaattttcccaacaaatttatggcttagtaactaggaaagtgtaaaaataaataactccccacaaacgtgactacacatgtgcttgtacaagcatgtaaaccaactaaaataacactaataattacaatttaacaaaggaaaaaaaactagtaaaaataggaataatagtaagtagtgagtgtaaaaagaaataattcccataaaaactcctttgtcttcgtcaaacttttccgaattagacctcttgtccccttcaagcgcaataaaagtgaaagtaaaataaacaaaagtttatcttttctacagagaaaccataactttctctaactttactcctttttaaactcacattttcccctcacttcactctctcctctctccaaagacctccgacgagagtttaccggaaaaaaaaaaaaaaaaaacaactctttagttttaatcaacgaaacttatggaagatgaagcacatgaattcttccacacatctgatcattttgccgttgatgaccttttagttgatttctctaacgatgatgacgaagaaaacgatgttgttgctgattccaccactaccaccaccataaccgacagctctaacttctccgctgctgatcttcccagtttccacggtgatgttcaagacggcactagcttctccggtgacctttgtgtacctgtacgttaatattaacgatgtttggtatttcttgaattttagttatgttttgtaataaaaagaacaaaaaagttatgttttgtaatttgttttgttttgtttttgttagtctgatgatttggctgatgagttagagtggctttcgaacattgtggatgaatcattgtcgcctgaagatgtacacaagctcgagctaatatccggttttaagagtcgaccggacccgaaatccgataccggaagcccggaaaacccgaatagcagcagtccgatttttactaccgacgtttctgtaccggccaaagctagaagcaaacgctcacgcgccgctgcgtgtaattgggcctcacgtgggcttctcaaggaaacgttttacgacagtcctttcaccggagaaaccattctctctagccaacaacacttgtctccgccaacctcgccgcctttgttgatggctccgctagggaaaaagcaagccgttgatggaggacaccgacggaagaaggatgtttcttcaccggagtctggtggcgcagaggaaaaaa

SEQ ID NO: 66051 - DNA, 351 bp, Arabidopsis thaliana landsberg
aaaccgaaaataaatcctaaccttaaactaaaacccatattcctattttcaaaccctaaaccctaaacccttggtattgttaaaattctatataaccaacaaccttacattatcttatataatcatccttcattattacttctaatactcaactatacacaaataatccattcatattttactataaatactctaaccaatctactttattattctcaaaccttttatttttaattcaaacttcttattattttttcatattttaatctaataccaaataaacactactatactttttatcatcctctttataatctatttttacattcaaacctacacattacatctaat

SEQ ID NO: 66052 - DNA, 536 bp, Arabidopsis thaliana landsberg
  unsure (1)..(536): unsure at all n locations
ggcgcatctgcggttcaccggtcatttgttttacctgcctgtttatacgcagccattcggtttgctccactgctagttcagttttcagcaggtcttttgctactgatttcctgtagttattcatnnnnnnnnnnnnnnnnnnnnntttttcgggatactctttcaccctatattctttcatcctggccatacgcgccgcgcaatccatggcatcctgcagggtgccgatcctgtcgaccaatcccgttttcagaccatcgctgcctgtccatacccttccctgtgcgatgctatcgatatacatcaaacttttctttctgccatccgctacccgggttgtaaatactccatagatcgagtctacagccgcctgcaccatccgcttttccggttcggtcagcggcctgctggtactgccaaggtctgcatgaggagctgtttttacgccgtcaaacgtaataccgagtttgttccggaaaaaaggtttcatattgggtaatacactgaacacaccaatggaacctgtgatgctattg

SEQ ID NO: 66053 - DNA, 452 bp, Arabidopsis thaliana landsberg
aaacccgcagttcgaaagataccaatagtggcaaatttaatctttttatcttttcagacggagtagatagttccctaagggcatgtgtggtacaagacagcgaataatctgatcttcatcttctaaccaaaaagcccttcgagttcttaacccaaaagcagatctgattacctctttgattgcttctgcactaccatcaacaccgattcttcttgtatagtcaccaaatttcactgttatgaccctaccaccaaaaggctgaccatgactatcatcacctgcttgtataaacatgaaacaaatgaaaagctctactcagttataaagagaccgaacgaataaatcaagcagaggagcataggctgtgaagcaacctcaaaatgagaaaacgtggattcttacacatattacaccatgcttggaacataaacatacagtttaaaaaacatatc

SEQ ID NO: 66054 - DNA, 554 bp, Arabidopsis thaliana landsberg
  unsure (1)..(554): unsure at all n locations
tgttcttgttcgttccagaatcttgtataatcttgtatcttattgaattattatgtataccaaaaaatttcgacttctattactgtgtatcaagggctcaatactctctagtcagaaatttgtgttttagtgaaacaacataacgaaaagatcattatataaaaggaaaaaacagaatgcaagaaacaaaccgtctctaaccaatcctcacatgaaataatgcatctctacttactgtagtatcaggtcatcgcatggcccaaatgaaataattcttgcactgcgctctttcaatctaataacggaggatnnnnnnnnnnnnnnnnnnnaaaatcgtcattagctgagacaaaagaggttgttatgaggtaaatggtgataatctcaaacttggttttcagagttataagctcatctgatcgcgcgacacgtgtatatttgtatgtattagattttgatacgtgaaaaaaaaaaattatgtaacaataaaaagtctagattaagacctgtgtatgaatgttttaaaattataaattatactaaatttaagaaaa

SEQ ID NO: 66055 - DNA, 511 bp, Arabidopsis thaliana landsberg
  unsure (1)..(511): unsure at all n locations
taaataaaatgcgccttaaccggcaggccttgatcggtgatgcattcattcaaaaaatcattgacggcatctctggcaatannnnnnnnnnnnnnnnnnnnnnnnnnnnnnnnnnnnnnnnnnnnntttgcttccagctttttaatggtctgctgagcatcacctgtaatgatgtactggttatagatatgattaacaggcaacagtaagcctaaggttgccgcaaagccgaccgaaaactttgttttatcggtggaatacttatcgtaattgatacggctgccgcataatgccggcagatcctgcgcatccgctaaagtatatagctgcacatgattgtcgccaaccttgagtccttccttcaatgctatatccctgataagactttttgtttcagaggaaaggaacaaataacgttcgatgatccccgctttttcttttgtactccttatcgcttcttcctttaatcttaccagcctgatccccgctttcgaaaggatatgcgcaaact

SEQ ID NO: 66056 - DNA, 506 bp, Arabidopsis thaliana landsberg
ctgggcgaaccccagtattgcgttcattggcgttcggatctcatggcttatatcgattttaaaccgctgctttgccttctccgggggtcctgcgggtttccttttcggcaatgaggttttgttcggtatatttaaggttctcaatatggttatcatgcgtagctgacatttcattaaaggcagtggtcagaatccccattctcatccttaggatcaacaggcacccgggcttttaaatttccctgcctgatattttgagcaccttacacattggcatccagcccctttttaaggcttctgtaaacagaagctgcaagcagcgcactgctgatcccttatcgcagggatagtgcgagaaccagccttaatacaatacttttcagccatcgtgcccctgcgtccactgtaaaagaaaagccgtccttcagctgtgtcagtgggtcgtttatgacctcaatatctttcagaactgccggcattttatcatgggctgctttcgctgcaac

SEQ ID NO: 66057 - DNA, 567 bp, Arabidopsis thaliana landsberg
ttccctatggtgcggaagaaggtgggtgcggtattggcgtccatggagaccgggtacgaaagtggtactacatcgtattctccattattcgcaaggaggagattccaatagatgcgcgaatcttcgctcaccatgttcgtctgccaatagccgatctcgtagagcgcctgaaaactcaccgagtgggaggagaacgtcgccatgcgctcgggccgctcctgctggaccatttcccagaatgtcgacgacatggcgaccacgcgcgcgagcggcgtcgcttcccatatattgttattgaagaccggtaccggctggaatgaactcttcaaggggcgcggtgcggtcatgaaatgccatacgagacagttgaaatagtccggatagacgacggtatcgatatcgaagatcgagacgagtacgtggttgtagcggataccgtgaggatcaaggacctgcgtacgcacctcttcagcagcccaggtcgcattcgatcctttcccggccagctcgccaacgatgtcggcccgatggacagagacgtggaaatagccgaacgtgcttccccac

SEQ ID NO: 66058 - DNA, 2780 bp, Arabidopsis thaliana landsberg
tctaacacaatatctggaggttaatatggtttggtacctaattttgtaccggaaattgcagaaatcatcgttttcttgtgttggatttgctatgatattacattcaaaattttggtacatattggttgatcatgaaaaccggaaaagtaaaaccaaaccggtagcttaccgtattttgctaagtgttgtcacttattaagattggtaatagagtacttattgtctgttcttcttcattcattacaacaaactctttgagacctaaagagagagagagcgatagtgagatttagatcaacagatttgaatcgatttctgaaaacatgcagtacaagaatctggggaaatcgggtttaaaagtgagcacgctctcgttcggagcgtgggttacgttcgggaaccagctcgatgtgaaagaagcgaaatcgattcttcagtgttgtcgtgatcatggagtcaatttcttcgataacgctgaggtttacgctaatggtcgcgctgaggagattatgggtcaagcgattcgtgaactgggttggcgtcgatccgatatcgtcatctctaccaagatcttctggggtggtcctggtcctaacgataagggtttatctaggaaacatatcgttgaaggcactaaagcttctctcaaacgacttgatatggattacgttgatgtgctctattgccacaggtgaccaatttcagatttgtttttttatttagtgattttattttttttcacttggttctttgaagatctagggttttgatatgatctgatttgagtgtaaggtttatctgaatatttctggtgtactatgttgtctgcgcatttaattttcttacatgtgcttgcctttagtacaaattgctgtttttgaatttataaaatttacaatttgaatccacttatgatgtagcttagtgctgtatagtgtggatctatttggtttccacttttatttcatatctgataattgggatctgcattttgccatacattgcacaagatattttggaaaagtggcatctttgcattgatctaagtgtcactagattctttgattgacatatgtttattaaaaatgtttcctttttttgtgtgaattgggtcatttattacaggccggatgcttcaactcctatcgaagagactgtgagggcgatgaactacgtgattgataagggttgggccttctattggggaaccagtgaatggtcagctcaacaaattacggaggcatggggagctgctgaccggttggatttggttggtccaattgtcgaacagccagaatacaacatgttcgctaggcacaaagtttgtaatctgactctctttttctttaatttactttcatgtttgcgtcttatcttgtacagtcttaagttgttgtagtctcgtgttatgtagctcaagttatgctcttctgttatgtaggttgagacagagtttcttcctctgtacaccaaccatggtataggtctcactacctggagcccacttgcatctggtgtgctcactggtaaatacaacaagggagctattccctcagacagccgatttgcattggagaactacaaagtattccttttttttcctttttcttgtgtattcttggtcatatttgctaagacctcaatctgcttctgcatctaactaatacactggtacatgtcttggttttaatttctttcgcagaaccttgccaatagatcacttgtggatgacgtgctgaggaaagttagcggtctcaaacccattgcagatgagctaggtgtaaccttggctcagcttgcaatcgcatggtgtgcttcaaatcctaatgtgtcatctgttatcactggtgccacaagggagtcacaggttagttcttgatcgcttataaagcattaacatagcgagtctcggtctagatttggatccaagatctgaaagattttgtttctttttttgtaccttgacagattcaagaaaatatgaaagctgttgatgtgatcccattgttgacccctattgttctggacaagattgagcaagtgatacagagcaaaccaaaacgtcctgaatcatataggtaaaaccaacatccaagatctctcttccctattcaatcgtttacaaaagagtgttgcaggaaaaagaaaacattagaagaagctctgtgatgtatgttgttggatgttgtctcgttttcgctttgtttgttctctttagcagcttatgcatttttaagactcagacagagagaaagagagactaatgtttttttttagtttttcttgtttcatcatttaaaaaacggtcttatttgttacttgttagtgcaacttaaagtttggttcttgtagtttgccatgtcatgacgtcaatatattgaatagctcatcaaacaattctggttatatcttaatgttgtgaagattttaatttagtgcaagggggttgatatgttattaataaagatttaatggaggtatttaaagctcaacgtgcacaacataatgtctcaactatataccatgtttttaaaaacatacatgcatagacatcctacacaatctttttaggtaagatcccaataaaaatctaaatttggatgatctgttttatttggttaacaaaactaagagatgagtaaagaaaataaaagagtttctggaattggctaaaaaaagaaagaaatagataaaaacgttccctcaaaaacctccacatgcaatttatgaatttactatttgaaaaaaataaaaataagataagacaaaattattaatag

SEQ ID NO: 66059 - DNA, 152 bp, Arabidopsis thaliana landsberg
cacctcccaccaccaaaccccccacaaaattttcaaaaaactaacccacaccgcccacaaaaaccaagggcccttgggaaatcaaaaaaaccgagaaacccaaccaccacaacatctcatacacaaccaatgcccaaacacaccccccaaaa

SEQ ID NO: 66060 - DNA, 2166 bp, Arabidopsis thaliana landsberg
gcattgattttcttcccctcttcttcaggagggtttctcggtgggactttgttttcagaatgtgtatcagatggaccatgggcttgatcctgatccccctttcccacaatttctgttccaagtgagagctcattaggtcctgcgattgggtgagctggagaggatttaatgctagatcttttcctctttgtcccctgcttcccatcagcttccttgaatacatttagatcagactgaactcgtgtactctgagccttgcttcttgtagcccttttagctttcacattttcatcagtattcacatcattcctgataattgtgccagaattcccacgactatcttgtttctcactaatggttgctgctgcagatgattccatgttgtcctcttgtgaaaccccaatgcttcgtctagcaactgtatttcttgcacttcctgctttgcggtttttacatttggatgatgcaactttaactttaggtagcttcttttgagtaagatcaatctcatctctacctaggacctgcaaatcgatgaaatttgagttcatttcaacacacttgatgacactatcatagaaaacaaaaagaccttgctgtatcagagtgaagaacagcctttaccttggccttcacaggactaggtagaatctccggagaacaaggcctctgagtccattcaaacatttcgctatcaaacatgtcacctggattgggcttttgttgctcgtcttcctgaaacattcatcggaaaaaaagtaagatcaaaggatccgacacttttttaggatattggatagaatgagggaattccatgtaactgagcatgatttttatgagtaataaatgtgtcaaagaccttttaactcgcagtattcaatctaaatcaaaaataacctccacagcataactaatatttatcaaacacatttctatcataaactagtgtagaatgtatcaatactacaaaacaatataatgcaatatcaatactgaaagatagcattaaaaaagactatcaaggttttcgagtactcactttcgatgggctctcatgatctgagtccatcaaatcgctgaaagagggaacattaactggtgtagtccctaaaagttgatcactttctgtacgctgacttgagttctccccatcatcttcatctctcaaccaaaagaagggtgaaagatttccttctttattcagagatggatgctcatccaaacgaatcacagtgttttcagtgtagtccttggggttttcagctgtttcaacagactcagtaggtttagttaagctttcagcagacagattctggagcagttgcaccctcttcttggtttgggatgaaggtttcataacaataggcccaggtgcatctacatctgtttccttggttttcccatactcgttcctcttggatgctcggcccttcctagatccctgacgattcttatcacttgccttttcaacggaagcatctcttacttgcttttctttatctgtagacgcatatcacagaacacaagttagaaagaaatacagatttcttcattcaggtaaaatccgagcattctcttcattcatgtgggaacttaatcggcatttttagtgttttcttactaccaaattccactttttagaccattcaattgaattcagagacagttcaatttcaagtgaaatgattaaatccagttactacgcttaaaatgaacttaacgagtctatcactgcctttgtttcgttcaagccaaccaaaatgttaaagcattggtcctaattttaagtacctgatggtgacggattattctggctaacgaataatttaatcccagaagcatcttccatgttcttgtaaatgctcaccaagctatccatatgtggagcacctcgaatctctaacatattaacataatcatcaaactgcaaacttaggtttaacaacagataaagctgaactctgagatcaataaagagcaagagaaagtacctctacgatggtaagggattttacaaacaggacaagtagcatccattttcatagatttcactatacacgcactgaaatcaagagaagaccatgtgttcattactcttaaagattgatgaactgagaatacgaagaaagaacaaactaaggaaaggtacttacttgcaaaatacat

SEQ ID NO: 66061 - DNA, 510 bp, Arabidopsis thaliana landsberg
  unsure (1)..(510): unsure at all n locations
tggactgcataatggatatattctcagttgagtatccatgaaattcacctgttttggaaattggaaatataatttagttttagaaaaataattttgaaacttaaaattttaaagatatagacaaattttaacaaaaccgggaagaaaagatatagacaattttaaggcttttaaatgtgagggattctcacttttttgttgttttctaatggttccaacttccaattcatagttatcgtttaatattatttaacgaaacattagtcaaataaataatctatctattcgccgactgtatggctgaaaatattagctggagctagactcgtattgaaaaaattattccatatatttgttgcctaggagagtgacactgtgaccttttgtaataacataccaaaaaggccgtttatttaatatattatccagatagcagcgttgaatcggattttggttggttttggtttatgtgttttagatttttggttnaagcaaatcacttaactaaag

SEQ ID NO: 66062 - DNA, 1050 bp, Arabidopsis thaliana landsberg
cccccgaaaaaaaaaaaaaaaatacccccaggggtggggaaaaaaaaaaatctctataataaaatattttggcccccttctttttttttgggtggagaaaaaaaagaaaaagcccccaaaaaaaaaaaaagggggggggtttttttaaaaaaaaaccaaaggtgtgtgggggggattttaatgaaatctttcagggtaaaaaaccctttactccaaaaaagaccacgcttcaccccacatcaaattatgttctctctttcatttaaaatcaaagagaccaaagcatgtgtatcttcatttttgtcgtcctttcttgacatttcctcaactactaactaactattcttttactcctttagcaaatcccccattcatcacaaactcttccaaactattgctttcattgataaaaatacatggaattgctaaaatggcaaaatccctcattgatgctaaggttttaccaataatggaatctcacggaatcacgatttatattccccttttttgtaaattatattcttcatttcatttttgtgcaatgcttaccattcataataatacaaccaaacaaccaaccttctgtaggaggaattgaaaatcgtttcggtttttcttattggcacatgtatgaagtgatcaacatacaccctcaaaactaactaactatctaaaaccattcactcccgctaacataatataaacaaaagactatataacaactttgaagctttcctctttacctttgggaactctctattgccatgtaacttccctggaagtctcaccgccgctatcatcagtcatatctgatcttgtatagctgattcctgctccttgaaggtaatggttactatcctgttctatggcattgtaatgactgttgttaccattgtctggaacaaggttttgtgatgcaaggttaacgttttgattcgaagaagatacgccaaccatttgctgacgttcggcaagaacagcaattgcacaagctagcccacctgatggagatgatgatgacggagttgatggttcctcatacgatctttt

SEQ ID NO: 66063 - DNA, 297 bp, Arabidopsis thaliana landsberg
acaacagcacgcagctgcaagatgtgagagatcgctgcctctgctagagaagccgactctagggggacgatatcttagcaactacttcaacccgatcatacgtgaccttttctggacctccccaacttcacgaaacatgtccacaaccctcgaccataccagagagtttctaaacccctctgtgtgttgtgagtgataactcagcgtccataccatacatttgaattaactagggcactgggcccaatgccttaaccagaggtgccaccccctgcactgaagggatgttacggtggg

SEQ ID NO: 66064 - DNA, 1849 bp, Arabidopsis thaliana landsberg
aataagatactacatagagaaaaagacagaacatttaactgttatcatatgattcatagagcttaagtaaaggtaaagaaggaatcagcacgcatagcataatcactatcccaagccatgatcgtatatatgaaaacaatgtacctaatactctgtcggtattagggcaaacattgtcaagagtaatgctaaatttcacttctcttctccatcctggtggcaaagatccaggctcaagatcaagatacacggaaaagtaacgatcattcttagctcctttgagaaaagaaagaagacgcctgaacaaaagcaaagtctcacatctaagaatcaaattccacaaaaaaaaagaaaaggatttctgtaatcgtttctcgctttaccaattgcagccggcgaccgtgaagacgggagagtagcactgatctttcaaagatgagaacttttccaaaacccaagtaaatttatcttgcatcttcaaatctaatgacatgatcacaagttatcgccagtaaaaccctaattcgtaaacaagtaacgtgctttgaaatccagtgtggtagggtttgtgctggttatataaacttataagaaaggaaaaataataagctttccatatttcacagacccgagataaaccaaaccatacctgatccaaaataaaaattgattcaaactaaaccgaactaggttatttccaaaataagtttgttacggtaattgaaccaaacttgttgttatccgaaactttgatagaccgaccatctagtcaatatatacttaccacaagaggacctgttcttttgaaaccattgtggaaaataagatatcagaacaccaaatatgacttagaacactcagcaaacaagatcattgaaagacatagagattctagaggctgacaactctgccttctcaaaacttgatttaagctaattcaaaccgaatttaaatcggttcgttttgggtttatctttttctgagcagaacgaaaccgtaaaattgaaccaaactcgattctaaaccaaaagccttttctggatattcaaaataaacagttgtctatgttgaaagaaagacacgtgtctatgacacaggtgacgtgtcaatccagtatccatcttaaacatctgttaacactcttcatcttccacctactcaatcacacactagcattacgtaacgtatggtacgatctaaattattatacatatcaaaaagtggctggagccgaacaaaaaaaacatacgatagagaaaacgtacggagtaaaaaatggagacttacgttgatgcgattggagaggacacggcagccacaacaacgacggcggagacggctgcaaataagaacaagaagaagttgaaagtgatggttgcgattgatgagagcaagaacagcttcgatgcgttggaatgggctgtggatcatctcagagttgttattagtgccgaaccggaaaccggtcaagaaggcggtttacttacgttgcttcatgttcacccaacgtaccttcaatatatctatccttctggtggaactggtgaagaaaaaaacgcttctctctttcttttattctctatgcgtatatatatattatatgggatgtgactgtatacaatattgagtgagtttggaaattcttagcttcggcggtgtatgcgacagattcagtgcccgaaccaatgaggaaagcacgagaagagagtacgacaaacttattcacacgggcattggagatatgccgaggcaaaatggtgcgctatatgtgtgaaataatttcctaaaaattaccatcaagacatgtctagtttcaactttcaacatactacaagtttggaaaaaattt

SEQ ID NO: 66065 - DNA, 527 bp, Arabidopsis thaliana landsberg
gtgatacatccattgatattcttataagttaatccaccttatccttcaacgttttcatttttgtgtttatcattatcctaactatgtgtcatctatcgtaatattgagtgattgttgatatatgatgctaaattctcggccagacgctcaacgttatcatcttgttcaccaaatcgctactggtattatctaaattcttatcatgaatttttcttcaggagtgaaacctctttgaacctattgtttggacatgctaaaatgcagtctttgagttattcttagggttcacataatgacttaacactttcttggtagaatttatagatcatgtatgttccacataagggttgtctttgataaggtgagagatctggcgaagaatatttcgcccataagagttggcggcgatgcggtttaaactcaacctgaaccgagtatataaaaagtggtttaaagatggcacacgtgcatttcttatgtcatggtatgtgtagataaatgattcgaattgtgacttaaatctttgt

SEQ ID NO: 66066 - DNA, 503 bp, Arabidopsis thaliana landsberg
taaaattatatcgagtcaaaggtatttttaaacaatttgtaagattcataaaaactttatttttttttcattcagttttagccatagtaagtgtttgtatcttgatgaatttgtcattatattcaacattggtttggattctctcatacaaccaagtcattaattatgttaacatgaatacaaccaagtcattaattccgtagaattatagattttataattatataattttgtttatttattaggtattattttctgattatctgaaataaaaaaaaaagtgaatataaggattcacctcttaaggaaaaacttctacggacaaagaataacagttttaaaattaaacaagacacaaaattcggatagaggacatggctgtggaagcccacgaccaatggcctaagaggcaacgaaggcttaaactatttttttttctaaagattcaaattaatatgtgttattttttaattaaaatctcatctgtatttatgataaacaca

SEQ ID NO: 66067 - DNA, 585 bp, Arabidopsis thaliana landsberg
agtagaatttaacatatttaaaagaacaacacaaatttggattagctaatggtgtggcttggattataatgctaaactttcttctcaagattttgtttttgtaaactctacatgttcaattatatatcataaaccgtcatattaattgacgttagtagacaaaatttccaacagaaattacacaatattgttctaagtgaatttctgtcatatttcaaactaacagaattaaaattcaaaagaaggaaaaagaaagaaaaaaaagaaccaaactcataaagaaacttgtttattccatctgtgttttctacacatcaatgattcatatctcaccaccctctttaggtctaaattctaatgtctctcacacaccatcaaagaacaagaacattacaagtcgttaaccccacatatgagtcacaaaactaataaaacagaaacaaaaacttcatttttcatcttcctaatcagtatcagaaagtaaaaacgatggcaaagaacgcgaaccagaaacccgttggccattttacgaagacacattctgcaacttaagtatcaactccttattacaaaactcatcatact

SEQ ID NO: 66068 - DNA, 438 bp, Arabidopsis thaliana landsberg
gccacaggggtggggcctttatgctacaactttttatataagaggattgaatttttttttctgcaattggtctatgggccacaccttccactcttggaggtgcaactatattttgcaccctacaaaatggtcacgtgacattcgttgaacgcacgtgttcctgacacaaaccctatcgacttgtgattcttttcatttcaaaatatatactaacactaaaactgctgaaagtttgagcttacgtaaaatgattggcagcttctcttgatttaatgcaaattgcgagctgagattttatgttaaaaaaatttgttgaaaattgtttaatcaacatgaatccatctaaaaaagatgttgtaagtagtcttatatagttttacaaatataatactagtagtgatggagattattatggagaggattacttaagctacgcgt

SEQ ID NO: 66069 - DNA, 470 bp, Arabidopsis thaliana landsberg
tttttcacaccctcttcaactttccttctagcgtttcgtcgaacacttcgttggcgctttatgttagccttccttgtttcttcctcctcagatctcttttgggaaaatggtgaaaaccaattatccgttttgatatgcaaaagcttaaaacttggatgattccgaagataaaacacagagcatgcgattaacggagaagagtaaaggacgaaataaaaaaggcgtggaagaaaaatgtataggaggaagataattgcagaaacaccagaaacaactgggtgattccttacgtttctataaacgatgttcgtggaaaatctgagaattttccagaacagagttccgacatctttggcatcgattcccatgttttaaacagttcaaattctcagaacactttgagagataataacccaaagcattttgcctatggcgggctcttgcttggtcctagttaatcacatatgctt

SEQ ID NO: 66070 - DNA, 2094 bp, Arabidopsis thaliana landsberg
gagtcagccctcctcatctgtatactgcaaggaggcgggaaaagagaaagagagtaaattaaagtaagtaactaaaaccaaggaagccaggtaaatataatgcaggtgatgctagttttaacatcaagtataccaggatagctacagccttactaaattataactgcattagtttctgttcagatactacaagcccaaagcagccagcatgcatgaaaagacactgttctgttcttaatttaggaaaatcaagcaattctgcgataaatcatttgtcgctcccacgagcaaattagaagacactcaaagaacaagatataagacaccaacaaacaagtgggaaattgacaaaacattctagaaatctatagctacaaatatacaaacaccaagttaaactaagtttgtctctagtactgctatcaaggcaagagagggcacaaatacaaaggcccatagtttctgtgatcgagatagcaatcacataataactaatctatcaatcaggtaggatacaaagaagtgaaccgcaactccaatcccgcccaggttataatcatgcacctccactgaagggaaaccatcaatgtctgatgtaagttaaagaagatagtaacgagaataaagaaacaaaccgcagaattctgtaaattcaagagcacgcagcaaaacaaaacaaaacagaaaagaggcagaggaactgtagtaagtttgattcagataatgaaagccgagagtaatactgtaatagagaagaactaataattatcaggatactagcatcaggagatgacagcggttacagacctcaagcccctcatcctgttcccaagtaataccaggaccattatacatgttcttcataagtagagtgcacgatttattggggtagaaatgaactctgctgcaacgctggccaaaccgacaagctccagttttcaaatggaaaggacaatgagctttatcctggagaatgagagaacaaacaaagccaaattactaaaaggaacataagaatgatacataaaactaataccatctcaatcaagggatacaacaagcacctgctcagttccaaagttgggtacttcttgtgcaacactctccaatatctgttgcgcagaactaacattctgataattggctgaagcttcacttcccggaggtagaggatttgaagtaggcctgtcagaaatctgcaaaacaaactccgcattggaactctacacaaaaatcaaaacactgaagatggtatgttcacctagatgatggtcaattacctcgtgtccatcgacctgaacaaccgatttctttggaactctcactttgttctttttgagaatgatctcatttccctggaatataatttctggaggtccttcttcgatatattcatattcaccatcctcatcctcaccacactcatcattcccactagcctaccaagagaagcacaaaagtgagctcgatatagcattaacacgatatgaataagaaattgacaacaatcaacaaagcacactacctcaagctttctcaactcttctagatccttccaacgcctctcttcctcttcccgcttcgcttcctcttcctcctctttcttcctcttgatctccatagcttctctccaagctctttcactctcctcaaagtccttcaactccttttctctcctccgcgcatcctcttcctcaatcgccttcaatctctcctgttccgccggatcgtttaacttagccttcgcttcctccctctccttcgccgcaatctccttcctcacttgcttcctcttcaatttcttcatcgcttttcgcttctccttacgactcatctccgccgctttctctttactctcttcaaaactttccttctctcccgccgcttcttcgtgtcgctcttcttcttccttttcgtttgcttgctccatttttttcccggtagcgttaacctctggcttcacggtggtggaaacagaatttaatttaggggtgcaaattcggttagtttgaaccgaaacggtatagtgaagaaatcgaaataaaaatggattaaaccatactaaaccggagacccctagttggttcacctatt

SEQ ID NO: 66071 - DNA, 596 bp, Arabidopsis thaliana landsberg
cccatcctctaccacccaattgagtagtatacctctctactttatttttaactatttatgtctctatgattctttcaagttggaaataatgggattcgagtattgttaccacgatttcaactatgtatgatcgatcattaattgtttcattcggttggcacataaaactatttaaagacaaagtgttccgttttaactgatttatgtctaaattgatgtattcaaaagaaagttagtgtttctgtgattatcatgtatatagctccattaatgttttgtttttttcaacctagctactattccttttcttaccattcatttgatatatgagtattaagacaataatatttcgtcatgttttagaatgcttttacaccttttttcgaccaacctatgaaatgtagaataaccttttattttgttgttttgcttcaactttttatttctttatggtaacagtaatgtctagccgccatacttgtaatatttatttctttagatataactttctatcaaaatattgaaaaagcaaaaagaagctgagggaagttccgtcgttaattataccttagacaagggacaaacatatcttgccc

SEQ ID NO: 66072 - DNA, 488 bp, Arabidopsis thaliana landsberg
ccctctggcgcggttttctcaagttaaggtactcgcctttagttttttacgtcacgataatcagcagatggggataggggtcgcactctgtggtaccagccggccgaacgcctgtcaaggaacaacaagcggacacggcgtcgctgtaagggtgcgtaggcatacctagtggcaaggtgtaatggcaacgtcaggagagaacggcgatgacgagccaggacgacgaacggtggatggctctcgcggtcagtcaggctcacgagtgcccgccgtctgagaacgcgtactccgtgggggcggtcatcgtcgccgccgacggcaccgaactggcccgcggctactcgcgggagaccgacccccacgttcacgcggaggaatcggcgctggccaagctcgcgggtccaggagacgctcgtctcgagggcacgggtcttcggggcgcgaccatttacagcacgctcgagccgtgctcacagcgcaagtcccgg

SEQ ID NO: 66073 - DNA, 603 bp, Arabidopsis thaliana landsberg
  unsure (1)..(603): unsure at all n locations
aatagctgaacattctgaattttactaataatttgaaatttgaagctaaagaatgattctggaaaaaagataaccaataattctgtaaactgaattagaatccagggttttcgtaagaaacaactttgatacatcaaagatactgataacgatgaagcatatactaacatctatccacataaaggcactgctaaacaaaacgaaaccaagtagaaaatcaaacttgatcaagaattagcagtaacattggtcaaatcattaccttacagagaaccatcaatcacaatgttgattaatcctcatcatctgagcttgcatcatcgctgctgtaatcactgctatcatcatcctccagaatgtcaagttgaacagctcggacctgtannnnnnnnnnnnnnnnnnggagtccctgagaaggtctcatatgttgatgatcctctgctctaggtgcagcaattgactccagtggcggtaacacaactgggtcgcctggtttccatccaggaggtggcaatggtaaatctctaggcaattcgactggcattcctggtttccatcctgaaggaactgcgatattcggcggaacgaggttgtgaatagcag

SEQ ID NO: 66074 - DNA, 569 bp, Arabidopsis thaliana landsberg
ctccaagcatcttatttttaacgtggtctacaccacatcatatgtcgaccggaaaagccagtccataccgacgcaccggggatcggcgggtttaacgagcggcgctgacctgcacgatcaggccgccccggggctgcagcgccgcgtagccaccggcgcgtatgtgctggtcaggaaggctcagctcggttcgggccagcagccgggccaacatcaccgtcagctcggcggtggcgaaactcgacccgatgcagcgatgcgtgccgccaccgaacggcaggaactcatacggggccggccggcggtaccccggggtggcggggtcccagcggcacgggtcgaagcgcagcgggtcggcccacagctgcggcagccggtgggtgacgtatgggctgaacaccaaggtgcgtccggcccggatgcgtcgtccgccaaacgacaggtcgcgggcgaccttgcgtgccgagatcaccgcgggcgggtagagccgcagcgtctcgtggacgacgccggtgagataggtcagggacttcacgtcggcagtctcgggcgcactgtcaggcgcgacg

SEQ ID NO: 66075 - DNA, 510 bp, Arabidopsis thaliana landsberg
ctgaagttgttaaatgggtatcgtatcttacccgagagagaaaattggactcgattgtcggttctcgtcccgcggtaccaccagctccaaaaggattatatatctatggaaatgtaggatgtggtatgttaatggatgctacattatgatcttaccgtgtagataatatggttaggtatttaagacaatgtttggtgtgttttcatgtaggcaagactatgttgatggatatgttttatggtgctactgatgggatcattagacatggacaacggtttcactttcatgaggagagtgagcctttaaaggttcttatttcaaattaattcaaactcatatattgtttatttctttctttgtaggctatgctgaagataaatgaacaaatgcacaagtattggaaggagaatggtgctgacaagccaacgcaatatagcatttcgagctggattatgaatcttcctgttgatgaaaaagttaaggaatggctaccaagagaagaattttata

SEQ ID NO: 66076 - DNA, 2179 bp, Arabidopsis thaliana landsberg
ttaggtgctgattaaacacccatctatacgatcacaaaagcagaactctttcatttttagtgacatataatcctttcttctatcatcaaccattacaagttagaggttaaatgctctacaaaacttcacaggtgatgcttgaagttccaaaaatggatgccattagctatacaaaaaagataacaaacgatgaaaagtaacttcctgcgtttaaagtatcaccctgcgttacagacatgcatactccccatccaacaaaatagtttcaaaacaaaacttgaacatgtgtagtccacgtaacaatctccatggaagaacttgagccaatcagggtgcaaaaacggagataacagtatatttcaaccaataaggaggcagaatcagatcaccagtgggttccattataagtttcctcttgactaaccaccaatggctagttttacacagaacttaatttttttcattttttttttttgtctttttaatatttcaacaagatcaattttattatttgatattaaccatctacaacagtgtttgccaacgaaaaaaacaccatctataacagtgtcttcaccaaactgtatttcactatgacttattttccaaaaagaatgatgaagtttagtaccatacatgaactagcggctagatcgtaattaagaatttgaggatcatcttttactatattatgaaaacggagagagagcaaaattacaaacattttggttcaaaattttattaagaataaagtatatatatgttctaattttccaaaaaaaagaggtacagtatatggttctaaacatttatttgaaagtacgtaatatattttacaatgaaaacaaaaatgtaaatttgaccgtaaaaaattcgtgaaaagtcctcattctaaaataccatttacacatacataataaactatgaatagaattgttagagtttttatttctatttctatttctatctccactccaaataatttagaccacacaatgtaatgaagaaaaaaataattctgaagaaaatgaaaaatactgccgggaaatcgagacgccacacacactagtgttcgttgcaaaaccatatatattacagtatttggttctttcaaggcctctctctccatctcagcaactctctcactgtgtaatacacacacacatagagctaatcaacgatggtggtcgatgtagagaagatggcggcgcgtggctgtgatgcgtgcatgaagagatcacgtgctagttggtactgtccagccgatgacgctttcctatgccacaactgcgacgcctcgatccactcggctaaccatttagcgaaacggcacgaacgtgtccggttacaatcatcttcgtcgccagagacggcagacaaaacgacgtcggtatggtacgaaggattcaggagaaaggcgagaacgcccaggagcaagggtttggcgtttgagaagttgttgcaaatcgagtcaaacgatcctcttgttccggagcttggtggagacgaagatgatggctttttctcgttctcctccgtagaagaaaccgaggagagtctgaattgttgcgtgcctgttttcgatcctttctcagaaatggtgattgatgatataaacggcttttgcttagttcctgatgaagtcaataacactactactaatggagaagaattaggagaactcgagaaggcaatcatggacgatgaaggttttatggggttcgtgccattggatatggatcttgaggatctcactatggacgtagagagtttacttgaggaagaacaactttgcttgggattcaaggaaccaaactatgttggagtcatcagagaagagaataaagtagggtttgagattaattgtaaggatttgaagagggttaaagatgaagatgaagaagaagccaagtgtgaaaatggaggatcaaaggatagtgatagagaagcatcaaatgataaagatagaaagacaagtttgtttctgagattagattatggagctgtgattagtgcttgggataatcatggttcgccgtggaaaaccgaaatcaaaccggagtgcatggtaagttggtgtctttagctatatctctcatctggattttagtctttagtagtgtcgagttccgttgagtaaaagctgatcaggttataaaagacgaaataacgttataaa

SEQ ID NO: 66077 - DNA, 602 bp, Arabidopsis thaliana landsberg
  unsure (1)..(602): unsure at all n locations
agtagctaaaacgccactcatagaaacatacgacaagacgctgagattatcccaccatagagttggcataatgacaagggcgacggtcgccatgaaagcttgtttgccattcaatctcnnnnnnnnnnnnnnnnnnnnnnnncccgggaaaagattgtgaagattgtcgccctcgaggatcaagaaacccgtggtgactagatagagctctaggtgcatgaagactgacacaatgattcttcccggtctaccaaatgcgcgttctcctatgtcgggatatgttttgatgttgcggtccgcattcatacattttgtaatgagtaaggatgtgtagaaggcggttacggctaggagtaacaaaagtgaaagactcaaccatcctccacgagcaagtgaatatggtaccgataatattccaattcctaaagcaattcaataccctaattagtgatattcattaataaataagtctatcgaaccaaataagagatatgaacctgaaagagcattgagtgcgttgaaacatgtttaaagaaagatgaagatccgacattntcacgttgaatttctggttatcttctccatagctatgacctctaata

SEQ ID NO: 66078 - DNA, 465 bp, Arabidopsis thaliana landsberg
gacaaccacgcatcgggcgaggcgtaacccagctttggagtctcagaagcgttgaagcacaacagaggacaactggatgctcgattgatttcaatcctgccctcgggacaagaacggaacgggctatccatctccaatttgtcttagccctaaaaaggagtcacaaggtggctatgtaccaattattataacacgaagagaagagtggagaagaaaaaacacgctgaacaatatgcaagggggtataaagggggccataaaaagacaagaagtcccgttcgtctaaaaggaacgagaaagaaacacggtcattccgaaacgaaaacataagacgggtccataagttatagcggaatgtagatgagaaagtcttcttttcaagtagggaagagaagaggaagggggggggcggggttattactataaagaacattctgttgttcccgggcggcattctttattggt

SEQ ID NO: 66079 - DNA, 540 bp, Arabidopsis thaliana landsberg
ttaaaacatgaaaaagttgcaatattttaataaaaaatatttatacgtctttgcaaaaaacaaggaaatagtgggacgggaggcaaaagttaactattcaaaagttaatcaatatcacacttccaacatatgattctgtaaataagaacaaaagaaaaaagtaagaacaagtgaacttttttctttgcagtcgaatgagcttgtatgcttagagaatgagaagagagatgtacgtgacatttatagagatagtgcgatcgtaaagatatacgttaatataacaaaaagattgtgatattattatgatgatcatggtaatatatattctaagtaatatggttctattctttagtagcaactagaatattatgatgatcaaggtaatattctaattgatatgattctgtactttttattttaattgacatgatttgaataatgaacaatgttttacagtataactccaaaagcttagctgtaacatagatgatagagctagaataactcgttcataactaatagtattaaccgtttacaaaa

SEQ ID NO: 66080 - DNA, 149 bp, Arabidopsis thaliana landsberg
gtcactgttttagctgagcttaatatagctactgctttcagctgactgtgttctgttttcaccaaacagatacgtcgaggggggctctgacgataccacaacagactaaccgcggaaaaagcgctcgactacggaagagctccatactg

SEQ ID NO: 66081 - DNA, 573 bp, Arabidopsis thaliana landsberg
  unsure (1)..(573): unsure at all n locations
tctccaacgtcagttgtgattttagtatgaattgcttttgggtttagaagtttagggtttttgttctgtctgaagtgatttagcatcattggtaaagcttgaatctttaatcgagtttgttcttatatagaaagaaagacttacacttttgagtttttatcgatggataatggtaatgtattgagatgagagtgaatttggttgttcatagatgagctaatttggtgtgttttcttggtttaaaccagttacnnnnnnnnnnnnnnnnnnnnnnnnnnnnnnnnnnnnnnnnnggtcctgatagtgtaggagaaaagactattcatcttcgaccaaattgtggtcaagaatctgctactctctctgttgttgagactagtgaaggaacttataagcttgaggagactacttctttgggtgaattgcattttattggttctacattacagcttagaggaactagtcctataaggcaaccattggtggattcttctgggaacattctagcttacaatggtgtggtgttattcttaaggctttttgattatcatatgttttctcttacactatacg

SEQ ID NO: 66082 - DNA, 539 bp, Arabidopsis thaliana landsberg
ccacaatgtacaatacactggtcagcaaaataatgaaggcatcgtgctgatactgcgtcagttgggtttaactgatcatgaggccggcattgttgaatgccgcaacggtgtggaaaatggcccgacccaatgcgttggtcaacgttgtatcgtgccaccagcgtaaggtgaagagcacaatacctatggcttcagcaaacagggtaattttcaggatggcggccgcaatgtggcgcaccatcgagacattggtctggttgaaggcttcttgtgccagggcctgatgctgaaggctgatacgcttgcccagtgtcagaatggctactatggaaaaggtgacaaaacccaaaccgcccagttgcaccatggttgccaacacggcctgtccaaacactgtataggtgttgccgatatcgacggtactgaggccggtaatggtgacagccgaagtggccgagaacagtgagttgaggaagctgaccggtttgtgtaccgatatcggcaaccataacagcagggccccgacaaatataagcgcc

SEQ ID NO: 66083 - DNA, 230 bp, Arabidopsis thaliana landsberg
  unsure (1)..(230): unsure at all n locations
ccccgcaaaaaaagaaaaacggggaagtgaaganaccccacacggacgggaaacagaaacagnncccaangganccccccgaagcacangaaagccgcggaacccaaaacncccgagcaacggagagcccacccgcggaccacacccgcaccncgcgacacangaaccaagcaaacangaaaaaaaacgggggaagaaagcaaagaaccccagnggccaagnaactcaaa

SEQ ID NO: 66084 - DNA, 2305 bp, Arabidopsis thaliana landsberg
cgtccgaccagattgaaaagttaaatgctttgtaccagtctctaagtgagcagtacactcggtcatccgctgttaaggtgagataaggcatatcagtgcctgaagtgtaatacattttctagtatccttctacttcatagggagctagtagtggctacccatgttttacccgtctgatgttttttttggctgctgatacgtaaaattctaaaactggtattaagttattttctatttccccatttcagaggataccattggattttctgcaagatgagaactttaaggaggctgtagcaaagtacattaaacctcttttgacaaaggtatcttttcattcccttgaatctctttgtttagacagtggtctaattgaatatgttcttacatttcttgatacttgtctcagggtgttccttcattattttctgatctctcttctctggatgatcaccctcgcaaggttagttccctgctttgtccttgagcttgctgtctccaatttcactgatctgggcaacaccttactttttaatatgttttaatacttattttgttacccagcctgatatattggagcaactagttgttgagatgaaacattcgattgggactacaggaagtttcccaggaaggtatacaactgaatccattactgaagtagtcactgaattattgtcatctattatataaggtcttactttttacaaaacaacattgaaatgttctctacgttaatgataatcagtcgattcttttgtttaattcttaattgatgcagtgatgtaaaagagcccccttctacactattgtggacattgtttttcttggctcaggttcacttttgctattgctgtcttaattctctctattttttaacagttttacgttttgtgtatttttattttgatacatatttttcataatgcagcattatgacaggcgtggtcaatatgatgttgcgctctgtaaaattgatgaggccattgctcatacgccaacagtgattgatctgtactccgtcaaggtatccttgtttatcatggccaaaaatcttcgtataagcttttgatccatcagtttttttggtgtcactattgctgcttgcactatgtgtggagacacattttgaaaacttttttgacaggatggctgggtttgttctttttttgttatagcgattgtgttaacagaatttctatattgtgtgcacaccctggatcaggttctcttgtttgtgtgaggatgttcttgtttcttcttaacccttgtacttgtttctctcaacacagagccgaataatgaagcatgcaggagacttgactgccgctgctgcacttgccgatgaagctagaggcatggacctagcagatcgttatataaacagtgaatgcgttaagcgtatgttacaagcagatcaggtttgcatctcggttttgttcgtattatattgttttcgtcgatttcttttgatgttaagcctcaacgccagttctccattctgtaattttttctggtgaaggtgcccttggctgagaaaactgctgttttatttaccaaagagggggatcagctcaacaatcttcatgacatgcagtgcatgtggtatggctctatagaaccctgagtagttttgctaatggaaaattgaccattcagctatctttctaatggctgtcttttgatcttatttcgttaaaggtatgatcttgcatctggagatagctatttccgtcagggtgatcttggacgtgctttgaagaagtttttggctgtggagaagcactatgctgacatttctgaagatcaatttgatttccactcgtattgtttaaggaaaatgactttgcgttcatatgttgatatgcttaagttccaagaccgattgcactcattcccatatttccacaaagcagcaatcagagctatcaggtgaactcttgttgcataaatgtaatctagaaaatgtttatactgtatagctacagtatctactgtatcgatgcatgagaggttccatttaactatagctcatttgcctctcggcctgaatgttcaggtgctacctgaaattgcatgactctcccaagtcaactgctggagaagatgaaatgtcaaagttggctcctgctcagaagaagaaaatcaagaagcagaaaaaggcagaagcccgagctaagaaagtaggcgtgtgttcattgatttgactagagaattgacactaagatggcttaagagtgctctttttgtttcaggcagctgagagtaagagtgaagaatcacctgccagtggtgcctctaagtc

SEQ ID NO: 66085 - DNA, 604 bp, Arabidopsis thaliana landsberg
  unsure (1)..(604): unsure at all n locations
gaccggcgtgatgacaagcacgtcgaccggatcaccgtcttcggacagcgtgtgcggaatgtagccgtttttgcagggatattgcatggccgtgcccatgaaacggtcgacgaaaatggcgccgctttccttgtccacttcatacttgaccgggtcgccctggcacggaatttcgatcacgacattgaaatcattgggaatatctttgcccgtagnnnnnnnnnnnnnnnnnnnnnnnnnnnnnnnnnnnnnnnnnnnnnnnnnnnnnnnnnnnnnnnnnnnnnnnnnnaatgtgtccgctgccgcttcggcatcgcgctgacgccggcattcgacgataattttatccggaatcagcctcagcgctaaataaaccagcgccggcacgatgaccagctcgtcgagttgccccagcaccgggataaaatccggaatcaggtcgaacggcaacagcacgtagcctatggcaagccccagcagccatttcgccaatcgcggcgtttccggatgacgatgcacaaggcgataaaacgcaaactccgccttgagctgccgggcaatctgcttgagtttctgcttcagatgtcgagcactttcccgtcag

SEQ ID NO: 66086 - DNA, 581 bp, Arabidopsis thaliana landsberg
  unsure (1)..(581): unsure at all n locations
catccacgcacgttcgcggcgggtcaggcgccgtcggaggtggatttttgcgtgatttttacccgtgataatcttgaggctccttcactaggcnnnnnnnnnnnnnnnnnnnnnnnnnnnnnnnnnnnnnnnnnnnnnnnnnnnnnnncgaacaacgccgaatacgcgaagaccttcacgggtccgctgcccatgccgccgagcaagcatgtcgcgatcgtcgcctgcatggacgcccgcctcgacgtctatcgggtgcttggcctcaaggagggcgaggcgcatgccatccgcaacgccggcggtgtgatctccgacgacgcggtccgctccctggccatcagccaacggctgttgggcacccgcgagatcatcctgatccaccacaccgactgcgggatgctcaccttcaccgacgacgacttcaagcgctccatcctggaagagaccggcatccgcccgacctggtcgggcgaggcgttcccggacccggtcgaggacgttcgccagtcgctgcggcgggtcaaggccagcccattcatcacggcgaccacgtcgctgcgcgggttcgtcttcgacgt

SEQ ID NO: 66087 - DNA, 1789 bp, Arabidopsis thaliana landsberg
  unsure (1)..(1789): unsure at all n locations
ccacggcttccactgaaatcgaactgtagattcacaaaatccattattcgcataaatacctaaattcgtcggtatggggtatagagacggagagactgacctggccttgttgcggctcgtgaatgttccagaacacatatgtgtctactacatctattcctccagattttgcctttgctatcaaggacggccacatctgcaagttcgatttcccattaatatttgcagaagaagaagaagacaaagagatcccgccaaattttattggaagtttcatacgatttcagaatgtttggggtcgaataataataaatcagaaaataagagcacttaatttcacgaaatccataaaactaaaaccaaatcagaatgtttggggtcgcataagaataaataagaaactaagagtacttaaactcgcaaattcgataagttcaaaacggcctagtcggaaaagacgattttatcctctctctctctctactcttaacggctcatgtgtttcgtattagcaacctgccgccgacttagtgtgctaattcacgtgactgatcggcgcgatttcgccgggaaattgcagaaattaaattccggcgacgttacgaaacttctagatatagacggatcggtgagaacggagagagaattacctgaggagtgctgcgagtataatggattgagccggagaaaaggatcttatgttcgccgtcgatgatcagcgagcgaccgtcgtatgttacgtttgcgacgtctccggcaactataaccgccatgagaacgagaaaaactagcgagtactgaaaagtcgtcatttcttatgtaaacactgacgtttgaagattctagagagtttttatagtttgggactatgcacaactaactgtgcagtgtatctcaccatcgtctcgaatttatgcgacccaatcataaatttcttctttattttttcttaaatccggtttatatatgattcaatggaaattgcaattataaagtaaaagcccaatagcgtcaaaaaaaaagtaaaagcccaataatagtgaggcccatcaataatctggagtcaaacaatggtggataatggaaatctctcaaaatccaaatccggttttagccggttataaatggatttgactggtttcgggtcacaatcgaacggttgacgtcgatcatcattctggtagttgaaaactttgtcgtcgtcgtcgtcgtcgtcgtagcacgtgttgcacgtgagaaatttcccgcacaaaatcttactcttttcgtcttcttccccaatctgggattgaatctccagaatccatggatcgtgctttaactccgcgttttgatactccagctactctctcccctttccgataccgacatgggagctctctggccatcactcgacgattcgcgccggcgattgtttgcgcgaaacgatctccgatcgatggagtgagcgacgagctgaatctgattgcttcacagaacttagatcaagctcccgcacgaagactagcccgttccgcttttgttgacttgcagcttcagctggatcactgcttgttcaaggttgcattgactcatacctttatagcaaaataattaacataatctccgttctaatcatttgtatctggtgacagaaagctccgagtgggatcagaacagaggaggtaagcagtgattttgtttatttggtctcttcgaaggagatacaaagtcgntgaatcttcttctctgaataatgatagtggtatgagagacattcgaaaggggaagatattttctgcaagagttg

SEQ ID NO: 66088 - DNA, 422 bp, Arabidopsis thaliana landsberg
tcaataacccgaactcaccgttaaacaatcttccgatttagctttcaacattcattgctgtcagtgtgcgggatacacctctctatattacactctattaaaggaccctgaatcacatttacaaaagtatcgttctactctatggatacactgaccgcatgctcgccttgtcctattctgatgtccatagccctgcgccgtcgtacctgattccttgttgtttataggcctcaacatgaacatgaatatacgttatgaaccccgctcttattatcacagacttttctttaagcaaacccttaagctctgtctccacccagctcggcgaaacgcccatcgctgaagcttttactgacacccacccaccttgcctaggccgatcactctacatggatggatgatttacatgacatcttatatga

SEQ ID NO: 66089 - DNA, 521 bp, Arabidopsis thaliana landsberg
  unsure (1)..(521): unsure at all n locations
tgaatatcccaggactcttccttgtatctgattttgtttgttttgaagaagaacaggtacaaacattgttggtgggtggtcacaatatcaatcttctcattgtgttgtattttcccgtttcaattcaatatgtctagctattaaactacacataaaaccaaccaatattacaataaataaaaagaaaaccatctattgcaacgatgggcaacttgcaataccacaccatatctctcatggttggattctgctgtctacaagaacggaactggttattgagtcttcatgtgtaccttactagcatcagcctaccaagtgctacaaaatgaaagcgtgactcataaacgttgatgacacgcgagcaattctctctaacatagtaaacatacattttagcaaaccnnnnnnnnnnnnnnnnnnnnnnnnnnnnaaacacttgattaaatattgaaactaatacgtcatgagagggtacagcttttttacatacatcgaaccgggaatcagtgtaaattattgga

SEQ ID NO: 66090 - DNA, 545 bp, Arabidopsis thaliana landsberg
  unsure (1)..(545): unsure at all n locations
gcttggccgaggttaactgcttgtcccgcaaggttacctagctgcccttgagcgccttcaccccttcagaaaacatctccgtcagtttggattgcgcatgtgtgcgaaacacctacggcgattttagacacggtcccaatattctgaactgccgtgggaacaagtttgttggtgtttgaaccgtttccaagccttccgctcgagccatcaccccagcaataaagcgaattgtcggattttacagcacaaacatgagtgctttgagttgcgacaagttttacgtcagatgtcatccctacaacatcgacaggaataaggctatttgaagtcgagttgtttccgagcatgccgaggttatttcttccgaagcatttgatgccgctacccgacaatgcatcatatacaacgcaagtgtatccgttaccaagtgcaatatcgtttatgctaagagggctgtctaannnnnnnnnnnnnnnnnnnnnnnnnnnnnnnnnnnnnnnnnnnnnnnnnnnnnnnnnnnnnnnnntaccccaacacttcatgct

SEQ ID NO: 66091 - DNA, 549 bp, Arabidopsis thaliana landsberg
ttctctctctctaggcttcaaggcctttaagaagaagatatactctttcaatgcagccaataagggtgttggtttggaaaaaatatatataaccatattttttgagtattttatttatatttgaaaatttaaatattaatgtatgattgtcgacaaaaacaagttggatataatttatgtcaccatctagttcagaatcaccacaaaactttttctaaaatcatgagtttctaatataaaactaattaaaaattatttagaagttcatatagattatatactatgctaaataaaactctttatctttgttagatattctaatagacttcttcgaaatgaaggcgagaacaactcagcatcttgaaaataccaccacacaacaaacaactataatacgaaaatcgtcaatcgagtaaacatgggttatgataccatttaaaaattactaacgttcaaatcagaaaaaaacaattgacaatgagtagaaagattgcatttgattatatactaggctagataccatacttcttccagtgtcagaccttttaa

SEQ ID NO: 66092 - DNA, 123 bp, Arabidopsis thaliana landsberg
  unsure (1)..(123): unsure at all n locations
taaatttttagggccaagccgagtgatcataaacacccaaaaacnnnnnnnnnnnnnnnnnncattcgacaaaacggaagaaaattatctgggaagggtcttaatcaaaactattctaaaaaa

SEQ ID NO: 66093 - DNA, 513 bp, Arabidopsis thaliana landsberg
ctatatctttgtgtcagtgtgtgtattgtataatacaacattagtgaataaaaaagaagagttttaattgtggggagcatcatctgatgtctccaactcaaaaggcttatttccacaatcaacggtagagatctaaagataatgagaaaatttgcacaatcttctttaatatcgatatcttcttccacgataatcttacagatccagaagaagatcacacatggtttttgtataaattagacaaagctttacttgcagaacagagcagaaacagaacatatattctctgtctttttttgtggcaaaagtaaatggcgagaagacaactcttttaccatcgaatgttcttggttttagctcttctctatctcatgatctcatggaagcctctcctaatcactgcaagtctgtaatacctctctctttcttctaacctcctcaagtttctttgttctgtttctttcttggattaacttcttattattgcaggacctgagacatcaacagactttg

SEQ ID NO: 66094 - DNA, 418 bp, Arabidopsis thaliana landsberg
cttggcctgtatggtgagtcctgcatgtttttattaatagttttacttcttttttatacctagggcttacaggggaagtttagttaaagagtcgattcattacaagtggtttctggccttgtagctgaggatgatcaaatgcgggttgtaaatgagacggtacacattctattacatcttcgtctgggctctacagtttcacaataacaaaaatgatcacagaaatggaaaaaaaaagtagattaattccataaagggtttgtttggttacatggattgttttgatggaaggtttggtgattttgctgagatatgcttccactcttctaagcttctgaatctccctgctgggtctgaatgaagtctggtttttaagatgaatagctgatccgagtaataagttttgttgaagagagag

SEQ ID NO: 66095 - DNA, 575 bp, Arabidopsis thaliana landsberg
atgcatctttattgttttatgtacatagtagaaaccgaaaacataagacatttttgaaaaaaaaaaaaaaaaacaaatggtgaaaattggagaaaactttgtgggtttcatcacaaccataagggcatgaacttgctaaagtgttgtgtttctcttttagcggtgataatattcttgatctctcaatcaatcatttggaagattgtgtgtgttgataacgattgcatgttacggaggaaattgttcatttgtttccataaatggaagaatgatgcttgaacttttatctttctgagaatagttggggagtgaatcatgatccaaaaaagaaactccgacctggagcagaacaagacttgacgatctaatcatggaagaatatggcgtcatattttagaggcaaaaaaaaaaaattgggaacaattggtccgttgactcctcatatgaagagcaaagaaaacaagcacttgaaaagtatacatgttttggaataatacattaatttcatccattccttctcattttgcctaggtctaggaaccgcgatgtttccaaagatgagaacacatgtgttt

SEQ ID NO: 66096 - DNA, 326 bp, Arabidopsis thaliana landsberg
  unsure (1)..(326): unsure at all n locations
accgggttttaatggacagctggggctgggtgcggagggtggggagacaccactgggcgttcggatctatggtgtagggcctggcggaagggccagagcgcgaggtgatcgccttaccgatagaccatgcaatgtctgctcggaactgacgtgacgtgggaaggggagctcattacctggacccatttcatgttcatgatgacgggaacccggccctggcggggcatcatgtggctggtgnnnnnnnnnnnnnnnnnnnnnnaatctacaatagcacctttctacactacacatcacacgcggatagggggaccgtaaggcagttt

SEQ ID NO: 66097 - DNA, 710 bp, Arabidopsis thaliana landsberg
tgtcctttggaccaacgactggtctcctgcttgctttgtttttgagcctgcaaacaatatccaatcctcagttttaaaatatgttactttgagaacagaacctgatgcttcagaatgttcttagtttgcatgtgattaaaaatatttgttataaagaaatttaaatgacaacagtaaagaaaagtgtagtcagataaagaaaaagatcttccctcatgaataaatcagataaggataaagaacaaatcataattaagggagcaatatatcaaacagaagtggttctttttgaatcattgcattgaggattaagatctgttgatgaatcaacaagtgggaaaaagtactaagagtaattagcataaccaaacacaaacaaagtactaatttcttgaactttggcaagcaaatattgaatccctcatgctagaatctaatggtaatttctacactagagacaatagattttatcttagactactattacatagtattgcaggcaaaagtgactatgtggagttatggtatgtgttttttcgatattggtgtgatatttgtgagaagatgtaaagatgaagtagcacaaataaacatgcagccgatgttgttgcttaaaaaagtgagctagggatcctaaagtgaaggggaggaagatcttagaataatataaagaatcattcttaaagaggaaaaaaaaaatgtatttgttt

SEQ ID NO: 66098 - DNA, 560 bp, Arabidopsis thaliana landsberg
gcattgatatgacggctttgccggcaaaattagcgttcaggtgcttacaaaagttttgacttcttttaagggcaaatattctgcctctgtagtttctttttaacagattatcgataactctaccataaccggcgccggcttcaattaatgagtttgtatcttttataaaaggcataatcaactcaatatcgcagccgttttcaaagccgcctcgaataggaagttcttgaaacacagagggtggaatggcttcaaaataagctgaattatcttcgtttttccaggttgagctttcctgtgacagatcttttcgctctatgctcatttagccatcctaaattgacagttgcagatggggaatcagtatatagaaaatatgccgttatgttgtaataatttttttcaaacaaggggtatgagcgatgaaaccgaagctggtaaagcaagcttgatttatttagaatgcctaaaaattataggaaaacactatggcatttgctaaacccgctgtttacttcccgcttaatcaaaacgcagttgtacggcttcacgagaaaacc

SEQ ID NO: 66099 - DNA, 181 bp, Arabidopsis thaliana landsberg
tttctttacgtggaaacggtcctaccgtcgttgcacactacccatccaaagaggctcgagccaaagaggcattgtttcataccctcatgggctggctgaattttcagtcctatactacgttgcgaatcttcaacacgtctcaccactcaccactcttcgaccctcacctgtatataaaaat

SEQ ID NO: 66100 - DNA, 693 bp, Arabidopsis thaliana landsberg
cacacaggttaaattgtatacattttaaacctttaactctacggtatattaattgatgtactaaacattttatttttcaaatccaaaatcagttcattatcattggctcattaagctcaacaatctaatctttttttatttattttacaactcactttcattattgtttcatgtttttattgatcttctttcttagtttttttaaaacaatttttttcctaaactatttaagcttgtcaagttattataggatgagtgagataattaaaagttatgtttcaataaaaattaaacatgaggaaaaatgtttatgtctacattttaaaattaacacaaattataatatttattaagtatctctattactagaatgactatgtttcttgcgactgccaaataaatatggcctaaataatgcttattttccattttttttttttttcttttcaactgcttattttcgtttgggaaataattttttgacatgttaaatattttaaccttagaatttaccaagagaactaaaaagtttcttttaaaaaagatccatactaaaaaataattttaccttgtttttattgggaaaaaaaaaaattaccccctcccaccactaataattattatttttttatttatttataaaattaatttattattcatactataataacagaaatcttgataatatatatt

SEQ ID NO: 66101 - DNA, 1574 bp, Arabidopsis thaliana landsberg
atggtgtaacaaaggcttttcttgagcacgctttcaaagatgcaactggtcgtctagtgaagtgtccttgcaatcgctgcgagaacaagtggcctcagaagaaggaagaaatggagaaacacctttgcaaaagtgggtttatgccgaactaccttgtatggtaccggcatggagagtctattacacacgttgacgcggaggtggaacttgatgacgatcatgataggatggacgacatgttgcatgatcttggtagggatgttgaaatgaacgctgaggagccggggcagcttccacgcgatgctcaggaattgttccggctactcgccgcgggagaagagagactgcacgagcacactcagatgtccgttcttgggactctcacaagactaatggcgataaagtcgaagcacaacatttcaaacagtgcttacaacgacatcgtccaactgatgggcgaggttctcccagagaatcataagttgccaaagaatatgtacttcgcaaagaagatgttggctggtcttgggatgacatatgagaagatcgacgtgtgtcccaacagttgcatgctattctttgaggaggatgacaagctggaccgttgtaagcattgcgaacgttctagatatgtcgaggtgacaaatgatgagggtgaattggtagttacgaaggtcgcagctaagcaacttcgttggttgcccatcattcctcggctttcaaggttgttcctcaataaggaaatagctctgcatatgacgtggccaaagaatggtgtacgtctcgtcactgatccatacataatggtccatccgtcagacggtgatgcgtggaaggcatttgacgagtttgatcccgaatttgccaacgaccctaggattgtacggcttggtctatcgacggacggattcacacctttcaatagcagtgcaagccttactcgtgttggcctgtcttcattgtgccatataatcttcctcctgagttggtcaataaagaagagttcatgttccttgcactagtcatcccaggccccgagcatccagggccaaagctgaatatgtttgttcgccctttgattgaagagctgaaacaattgtggagaggtgtgaaggcttatgacagccatactgaaaaggagtttaccatgcgcgctgcttatttgtggtcagtgcatgatctgctggcgtatggagattggtctggatggtgtgtccatggtcggttgtgctgtcccatatgtatgaatgatacggatgcattcagattgaagcatggtgggaaagtgtcattctttgatgctcatcgacgttggactccattcaagcatgatttcaggaattcgcttactgcattcagaagtggagccaaaatcagaaatgggccaccaaagaggcaaactgcaccgcagataatggcatggcatgcttgtctgaagcaaggagaaaatgataggtttcaaggctacggggaggaccacaactggacccatatttcatcaatatgggatcttccgtatgcaaaagccttgatcatgccgcacaacatagacttgatgcaccaagagtgtaatg

SEQ ID NO: 66102 - DNA, 1720 bp, Arabidopsis thaliana landsberg
actctcaggtttacataaattttctgatttcaggctcaagcgaaggtgatggtaattgatgcattgagtcacctaaatgaagtaatctcgtatgatgatgaggtttccatgatgaggaacgttctcaatgccccggcttctcaaggcagtgttgccgggattgattattcgggtctgagtttgaccagtttggacggatacggttttgtgtcaagtcttcacaacacagcagaatgtagtggcaagcacagtgatgatgttgacatggaagttactccacatggtttatatgaagactacgacaatctctggaactgctctcacattctaggcttagaagaaccgcaatctgagttgcagagtgcgcttgacgatttcatgtcacagaagaatgcttcggtcggtggtaaggctcacagcaaaagatggacaaagcttttcagtgtctcgagatggctctctgttttcaagtatgtcaagttaggaaaaatataaaatgagtttagtacacaaaagaacaaaacgactcgctgcgccgcgccctggacagattcgtgtatatatatactcggggaaagcttgggtttctgatgatccagaggcgttcaaaagtgttttctttcttcttcttcttctggttgtctccatctttgtgttaaagatgtgaatatatgttttaggacagcttcatttttgttgaaagcttaaaaaacagggtcttttataatctctgtgattagtaccaaattgcagatttgcagaactacgttttcttggtttgtcaggtaatgtgaaactgaataaaatgaatattatttgaatcaactgagattttacattatcttctagagttttgtgtttgagattcaaagaacactagactgagtatgaagattttgggtgagtaaaaaaaatcagggtgataatttatcatacaatagttttggggtcaaaatggaataattctagagtatagagcccatgttcagaagctcattctcccttgacgttggcaccgcataaggctcagctgtttccctgtgagcgatcttctatacttgtctgggcatggcgtttttgctcaacaacgcttcaatatcatctcattgacgctcgtcttcttcacaggtttggatcaaatcttgttaatcgattattgttggaattttgtttgatttttgtgacaattttttcccttacgaaatttttgaagaagacgggtgatgctttatcaatatcgcgtcgtggattccacattgagccaggaactcgagagaaagctgtaagttaatctctgtttctgttcgagtcctggatcattttggactcagtttttgtggaattttctgcatctattgtgatttgaagatactaattagggttcatgaaagaattggcttttatatagattccctgagactctcatgtgtgtccctagtaatgttcgttgtctgaatctatttgaaagagtaatttttatgagagttttgagttgttgttgatgcttatgctgttgttatatggcattttcttaaagctcttgatgagtttgtgtttgcttaaattgaaatcctgtgtagctcttggctgaagattctgctttgaagagattcaagtctcataagaaaagtgtgcacaaactgaagaggattggtgatgtgctcactgttgttgttgttgcaggtaaaaacactttagttcataacttttggtcgaagct

SEQ ID NO: 66103 - DNA, 489 bp, Arabidopsis thaliana landsberg
atgcctctgttgccatgctagccaagaagaatccagtactgaaagatgaattttagttctctacgctgtgtaaagtcaagactttcaacactggtgaaggagacgtaaggctgccaaaggcgttgttaactaatctataatatctttctcgaggattcttctagatctgatgttcttcacctcatgcagtatggactggtggacatgcaacaatactagccctctggaaaatgctccagtagtgtcatatctttgtggctcaccatcttttatgaaactttttttccagaaaacagtacctatggagaagacaccatacgaaatcaacgatccttctcagggcgatgcactcgttcttcctgattgttcctcaacagaaaaggtaaggttactttttgaacactctgctaaaattggatgtatattatgtcatccaaggccttcaatcgcacttttattgatctttacagggaaaagaccttatctcct

SEQ ID NO: 66104 - DNA, 1471 bp, Arabidopsis thaliana landsberg
  unsure (1)..(1471): unsure at all n locations
acaggttgatattgtggacaagaaagtgaagaactggcacgagcatggtatgataccatctgaaccattcttcgtgcctcgacccggtgcaacccatgaggatgatggttagttaaaaattctttagatcttattggtctttcttcgtcgtgagtttaatagttttggttttgtgaaggagtggtgatatcgatagtaagtgaagaaaatggaggaagctttgcaatcttgcttgatgggagctcctttgaagaaatagcaagagccaagtttccctatggccttccttatggcttgcatggttgctggatccccaaagattaactacaaagtctcaacaaagataccttcattatacaaaacacaacatatgtataattaataccctctgtgcaggttttgtaaattgttgtcccttatatatgctttttgtctatatatgtgatgtacaaaaccaaaataaaaggaacggattgtggtggatacagttattaaaaattgcactagaccgaccatttcttgcaattcaattaaattacatcatcctacgatacatcaatatacacccaactgagaaacgctatattacaatttactctattttcttgtttatttccctaggtgaaaacaaattacaacaaaatgaaaagaaaaagtcagaaaattcagacacttctcctctctgcagaaaattcaccttaggttataatggtgctgcaggtgtggagccacaactatccccacccagtgaatcgggtataatcacctgcacaaccttaggagcaggttcgggttcactggttccacctatcaattcgcaaatatgattttcagtttcatggggtttgttttagaactttagagtaagagaaaaaatgaaaacactctctcttaagattttttttcacaaggtttttcaaaacaagtccacaaggattgactatgtatccacttacgaacattcattctctgccatcaataggaaaatccacactgagtagcggcgacaggtttgctatataagatgttccgaatctttccataggattcccccaaaagtaatatcttaacaaacctttgcagaacgaccacaagcacataaacaaggagataaaagttccagatagattagagtaactaacctgattgaaccgaaggaaccactgatgaagttgaggctcctctcttcatttttggctgcgattgtcacaaacaatttctaaacgaatgagttttagcaaccttcactatctagcaacagccctaagaaaacaagtttgtaaatgaatgactgttgtagtctagcaatcgtaacctaggtgagtaagttttacaagtaggtaggtataaacgattctttgcagggtaaagactaagactaaaataatgagcagactggtattccgtaccttggtattttcttccatatanttcacgacctgagagatgcttncacaatgtncatgaaaca

SEQ ID NO: 66105 - DNA, 308 bp, Arabidopsis thaliana landsberg
atatttgttagatactcaaatttctatcatatttgttgatacttattcataaattgaatcgtaagcaatatgtgtgtattttttggacagagtgagttgtttgatgtgtaattgggtacacaaattaagaatagcaaatatcacattttcccttctagcgacaggaatcgccctgcaaaggccaaagctatagagcggttcacataaactctgattaattgacaaacctcttattaaacatgattagccttatttataactcacagggtctttcaggacatgaatacatctaaatgtcaataagacct

SEQ ID NO: 66106 - DNA, 536 bp, Arabidopsis thaliana landsberg
  unsure (1)..(536): unsure at all n locations
atcagcaccacgatcttgtcgaggcgttcctgagctctgacctgctccgccatgacctgagggagccgggtcagcaagacgcgggggccacccgacgcgctccgcatgtgccnttgtccttccctgcgggccccggcggcgtccgtgccgcaggtctcccaatcgtcaaaatataaactttggctattttacacgtcgcgagggcgcgcaaaaacctgcttttgttcccttcggggcggccgcgcgggcgcggcgatccgtttaggccgtatagcgaattgcagcttgttttgccaagcaaatcccctgccaaatttgcgggcagcagggatgcttggcggtatttctgacgggcgagagggcgcggtcagccggcatgtgtcgtcagcgccacatagccgttccagatgatctggatgccgatgcagagcaggatgaaagccgacagccgcatcaccacgctggtgccgcgccggccgagcgccgccaccagattgccggcgaagcgataacagacgtagatcgtcgccccgaca

SEQ ID NO: 66107 - DNA, 296 bp, Arabidopsis thaliana landsberg
cgggtgatttgctagattatggatatatagtttgttttctgatttttgatgcggctctatctcttgggctattgggggtgtattacatttgtatccgccttttgggcttatatatcttatcatccgccggttatgtttttgggatcttctctttgattgtcaataatgttagaaagtttctgatgactacttaatcttactatatcctgtagactgaaaagaaaagaaggtaaaaaccatgtaaatttatttattttttatatagctacaaaggttcaaagcgctcaactacaaaa

SEQ ID NO: 66108 - DNA, 1193 bp, Arabidopsis thaliana landsberg
atcatatttcaagttaaaccaacaaaaagtcattacatgtaaatgttacatttttatatgagatctcgaagagggagtacatgtaaatgttacatatatattgatataatctccttacatcaaattgaaagtttttaaaaaacattattctactctttaactaatgctattttgaattaatctactaatctctctatttcgcgcgcacacatctcgggttatcatttaattacttttataagttattgatccaataccatcatattttgaatgattttagtataaaattcagtaagactagatttgagaagattattaaatcataagttccataataagggatttgacattaaaaaaaaaaactctttttgaaatcttagtgaaatatgtcctctatgttttcttgaagataaacaaaagatttaggaaacattaaaggttttagccttttaggctttgattacaattctcttgtcctcttattttctttacactcttttaagattagttttcttcatgttcttgaatttgttttggacaaatattgtcttttacctaacttaatttgtgccatctgttgggaaacataatggtgaattaaataaacttctatataggttgtcccccaaaagaaaagaaaaatcaacctagattggatattgtatagttaatacaaatcaccattttgtagcaagattaagatcaaatgggacaattttattaattagaaaactggattatcaaactataaatatagcacaaacagaacaagtttgtatctcgatatatcccaatagagaagggaaaatctcccttcaccttcgactcaattttgttgtttgaggcgtaagctactagtaaaagccttgactctattctttataagtttatctttctctcttttggtagtttatcgattaatctatctgatttttttgttattttgaagaaaacaatggagaacgatcaacaaggatcgtacttgagagatgaggataaagaagagatggagaaaaggatcagaaccgttgtgattgattcgaatctagttttatgtaatacaacttgtggcatttgccgtacgcgcgaagatgaatatattaaggtttaagatgctcataaccatgacggtgatggtgatggtgatggtgatgaggatgcggatcggatgcggacgaggacgacgacgaggc

SEQ ID NO: 66109 - DNA, 650 bp, Arabidopsis thaliana landsberg
acaaatacaaggcccaagccgaccacaggcccaaaaacacaaaatacaaggatgtgcaactacaacaagaagataataaagcgacctggaaaatacaaaaacagcaccagaaacttactttgcctgaaacaaagaaaaccacgtagccaaaagtgaagaaccaagaaaagcagaagattgtgccctgtaaaaggggtcaagacgagctctgagaatcaattggatctcctttgtgataagagcaggagatgtactgatgtagagttgtcacttgtcagaatgaattcgcagattgcgctccctccaaatacggtacatggaggctcgaagatgagtttgatgattagcgaaatatttgataccatgagtttgcttcttccacattgtaccaaaacatttttttggtcgaatttactttacttgtatatgaattttaataggtcactattttctacaacgatgtgacatttgtttctactaatcgtttaattttttatgttattttttgctactcttactacattttcttttgccgtctgagtatatacttacataaccctaatagcccaaccaactacataatgagcaaactggcccaagcccacaataactaaagtgaaagattgaaaaccagctgattaatctgcata

SEQ ID NO: 66110 - DNA, 406 bp, Arabidopsis thaliana landsberg
tgaggaaccctgaccgtgtgcttgagtttttatagcattgaatcgcatctgctctcatggtgcggtgggatgttcgaaagtcaccgctaaaaccatggagtggggacgagatgaatcttgattctatggtaccgcggctgtttactacgagcctatagagaataaacggatgctcgaacaggaggataagtgatgcattgataatttctaccgggagttcgcaaggaccatgagcactcttatgaacataatgactcaatgagcaagaacgcatatgtgacatggctactaatagccgctccgctctaatggcgaagcctggctgccgaacagataccgagctataacatgtgagatgcatgtgacgaccgactgtgccctatgtaacatcgaaaaagcgacagag

SEQ ID NO: 66111 - DNA, 370 bp, Arabidopsis thaliana landsberg
taactaaaacaaatggaatgaaatagtagcaagaattaatgtttttcttttcatttaaatttattataattgcaaatagaaaagttttaccaaaaaacagtcgagtccaataatcaatatgagtaaatgattcgcatttttattttaaaaattgaatttttttaagagcttgaaaattgaatttaacaaaaaaaacaaaaaaagaggatcggtcaaacaaaacaaaaagggttgaaaattgacttaccaaagtctttataaagttgataaacttttgccttgttataaaaaaaatctactataaacagattgcgcgtctggagataacttttttttttttttttgattttggaggatcattatcccacat

SEQ ID NO: 66112 - DNA, 513 bp, Arabidopsis thaliana landsberg
gggggggggggaactggccggatgctacaggctttcaccttcaaatgagacctcaacaaaaggcgggtcggggggactaacgcctttacaaaccgcttcaccgatgcagacatctacgtgctatatccagatagctacagccgttacggatggatgctgaaattgaccagagccttatacgggctacgccggtcacccatactatggcggaaaggtctatgcaacacattcgatgagctcgggctccaactctctccggaagacccatgtgtattcaataacagccggataacagtcttcttctttgtacatgaaatcgtgctgtacagagccgggcaccaataaagccgtagaccagatgatcacacagctactcgccaagtatcagatgaacggcccacgacacctacattggttcctcgggatcggtgtcatacgagccagacccacagaaaaaatgggaggcatcaactatgtggcagtcattacacggcctgatgaggccaaagcacc

SEQ ID NO: 66113 - DNA, 520 bp, Arabidopsis thaliana landsberg
gcacggcgaacatacttactatggcagccccttccccccgcatgcgcagctgccggtggagcagagtttactttgatgtctggctgaagctatggcacgagaccatcgatgaacattttgctggagcaaaagcaggtgaggcaaagtggcggggcgataagatggcggccatgttcctttccaagatcgggtattatcgtgatcattcagcaacaccattattatgagcactaccgtacaacaacctgtagctgtagcctgcctgtttacctggatcggctttgtctgcgcgatcagcttcctggaggcatggcttaaattccgcgcacccggtgtcaccctacctgttggcttagggatcggcaggctggtattcgctgcactcaataaagcagaatgggtgctggctattgcaacagggatcagcgcagtgctgcacgggagaccactattcaccttacccaatattttgctattgttcatcgctgctattcttatcgcgcaaacagcgtggctgttg

SEQ ID NO: 66114 - DNA, 478 bp, Arabidopsis thaliana landsberg
  unsure (1)..(478): unsure at all n locations
accccgtcgagcgccacgccgatcggtcctctgttgatggaccttgttgtttttcttatcganacgcgcgatctcattggctcgcgcgaggaagaccttcgatcgcagctcactgatcgcttcgggggtgcgcgcaagtcctgactcttgtgccattcttcttgtccctgcaaatttgaatctgcgcgtaggataattcctcagacgctcacgtcaatactggggacaactccttcatttttcttgtgcacaagattcttgcataactgcctgtgcgagctacaaagaggagagcagaggaggggaatcatgctcgatcggattatgtacacgctccctcctgaattacaggaagggacgtatacgtggaatctcgcgaagcgggcgcaagagtttggctataaggtagaaattgtccgtgatcgtttctacgtagcgaagctcacgctcctgatcaactaccggtgctggcagctgc

SEQ ID NO: 66115 - DNA, 343 bp, Arabidopsis thaliana landsberg
ggttgtcaatattcaaatttccgtttgttgcctgcggatatacctcgccgggtgactgtatacatgtttcttctccaacaaaggaaggctaactcaacggaacatgctcatgaccccagcgctgctttcaatgccaagagagaacacatactgggaagactgccctcttgtaactccaaagcaccgcgcaacaccctatagagtagaatggggtgctgataaatgtgctgtccatcttcgttcaggccccctcctacatcagcattaagctgaactgaattgttatagatcctcaccttcgatttgaaactgttgtcatagcttgggtgggctcgcacaaacg

SEQ ID NO: 66116 - DNA, 156 bp, Arabidopsis thaliana landsberg
ttacgttttgcgttgttttcgaaaaatgtgagtaatgaaacgggttgaatagttctgaaaaacagataagtgggaactatctctgagactttcattatacgagactcgatcacgacactagaatgtggatacattaccataaccggagaacgaact

SEQ ID NO: 66117 - DNA, 1528 bp, Arabidopsis thaliana landsberg
agacttgtgttctgggttacgagaatttgattgtatgaattcgagagattcggtgtcttggaatgttatcgtttttgggcttctcgattatggttttgaagaagaagggttatggtggttttcgaagttgagagtttggggttttgagcctaatacttcaacattggttcttgtgattcatgcgtgtcgtagtttatggttcgatggagagaagattcatggctatgtgatccgtagtgggttttgtgggatttcgtctgttcaaaattcgatcttgtgtatgtacgcagatagtgattctttaagtgcacgtaaactgttcgatgaaatgtctgaaagagatgttatttcttggagtgttgtaatccgaagttatgtgcagagcaaggaacctgttgttggattgaagttgtttaaagagatggttcatgaggcgaaaacagagcctgattgtgtgactgtgacaagtgttctcaaggcttgcacggtgatggaggacattgatgttggaagatcagttcatgggttttcgatacggagaggttttgatttggcagatgtgtttgtttgcaattcacttattgatatgtattcaaaaggatttgatgttgattcagcatttagagtatttgatgagaccacttgtcgaaacattgtttcatggaattcgattttggctgggtttgtacataatcaaaggtacgatgaggctcttgagatgtttcatttgatggtgcaagaggcggtcgaagtggatgaagttacagtcgtgagtcttctccgggtttgcaagttttttgagcagccattgccttgcaagtcaatacatggtgtaataattcggcgtggatatgagtcaaacgaagtggctttgagttctttgattgatgcgtatacaagctgcagtcttgttgatgatgcaggaaccgtgcttgattcgatgacgtacaaggatgtggtgtcatgtagcacaatgatctctggattagcccatgctggccgatccgatgaagcaatctcaatcttctgtcacatgagggatacgcccaatgttatcaccgtcataagtcttcttaacgcatgctcagtttcagcggacttgagaacttccaaatgggcacatgggattgctatccggagaagcttagccatcaatgacatctcagttggtacctctattgttgacgcatacgcaaaatgtggtgccatagaaatggcgagaaggactttcgatcaaatcactgagaaaaacatcatctcttggaccgtgatcatttcagcatatgctattaatggtctaccggataaagcattagcattgttcgatgaaatgaaacaaaaaggttacacaccaaacgctgtgacatatctggcagctttatcagcttgtaatcatggaggattggtaaagaaaggtctcatgatcttcaaatcaatggtagaagaagatcacaaaccttcattacaacaaaactcttgcattgtagacatgcttagccgagctggagagattgagacggctgtggaa

SEQ ID NO: 66118 - DNA, 996 bp, Arabidopsis thaliana landsberg
attaaagttgtcttaaattcatggtctactctctacagtctacatactacaatatttagaccatacgagttatttagtggaacgattgtgcctatgaatgctaatcctttttttatagacccctctttagatttctcgactaaaacaattcccacatctatgaaatattttaattttgcggtagttttgccgcggtctgccgcagccgcaagcggcgaacaaacgaacagactaaaatatgatagtcacatggaccatgaaaaccagtgttaacaaaatatacactgttttaagtttcactcaaagactatcaaatagaaataagtaaatccataaagaacactaatgctgatgaaacaaaacacgatcgatattaaaaagctcaagcaaagacaaaagcaactgtttaaacgctactcttttttacagaaggaggccaagatagtctccggttcccattgttattaccatcttcttcttcttcttcttcttcttcttcttcattttgatcattgttttgtctccttgttttatgaacagctaaatcgtcgaagcttgactctatcctcccttgaggtggagtcacacaatctgagtctctatgtgtcatttcgttacctcctggtgttgttggtaaagaaactgcagagttaccaactcgaagctcttgaagagtcgcgaatgattctctcatcgcagacatggcctcaaagaatctcgtgcatgacgctagtgccacaggtattggacgcagcatttcctataattttgtggggaaaaaaagagtagagagattgagattatagcatgtaaaaccgaaatcaacaactgttatgcaacacattacgtaaaagtagcaatctccttctctcttgatgcaaagagtttaaacacatagaaatctaattcaaggacctgatgacacaactgatccttctgcaatgtattctatacagttaaccatggcgtagtgtaatacagtggggatccttcctc

SEQ ID NO: 66119 - DNA, 309 bp, Arabidopsis thaliana landsberg
agacttgtgttcatcaggaacaaatgttcttgtcacatcttctgtttcagatagtaaagacacgggagtgttatgcggcgtcagtgtaggagcccctcttctctcttctttctccggtacaccggagtgttttataggacgagacattgcttcgtggccaactcctctcactggctcagagggtttgtatgtgaagaggaaacaactggaaaagctttcgatcctggagggactatctcctccttcaccggaatatgagcttttcctcgtgctggtgggaccaatccaaaacattaatttctctgtttt

SEQ ID NO: 66120 - DNA, 322 bp, Arabidopsis thaliana landsberg
gaaaaaacgggggtgcaggcccgcccataagactaagaagaatgactccatgagcaaagccacacaaagcaaggtccagagaagatccctagcatcgaatccactagcggcggaggctataaccaagagggagctatcccgaaccaaaccaatcctatactacttgcgaccgtgctcccgcgggtgcccatgcacaatgaagtcagagagcgagactcgggaggcctataaacatccaacggcgacaccaggatcgataggtttaaaactgagacacaggcacaacagggcacgcggtctagcggcaagattctcgcttggg

SEQ ID NO: 66121 - DNA, 583 bp, Arabidopsis thaliana landsberg
aaaatattgtagtcttcttttatgtatcgtttcaccggtgaaaactattcgatctagtagagtacaatttttctgaatattcgaaaattgactttagacctaagaagtaggaacttggcttttgtagtgacgtaacttgaagtaagaagcaaactctctgaactcaaaaacgttacttgttgcctaaaaaccggatcttgcttctcttactctcttcgtactgtaataaagttcacaaatttcttgcactacaattgaccaatctatttgccaatttatatattgatcgtagttattcaattcgaattattaaagtctaaaactgatagttctgatatatattccatatcttaagtttgtatcttcttttttttttgtatactaaaatgtctggattggtagcggcacgtgatcaaagatatgagtcctatgacaatatgtagcatcgagataatcaaaattaaataccaattaggacattgggttacgtgatttaatcccgtgattaaaaagttacataagtccattccacttgttggcctgttatattcgacactcgattggcatcactcatcattattag

SEQ ID NO: 66122 - DNA, 552 bp, Arabidopsis thaliana landsberg
aataaatgtgatcaaaagtataaacttaactgatgaaaggcaaatgagtttcggtcgatcttgcccttggggatataagtaacttcttcgttggacgtgcaattcttaaacctgacggctcttctaattgcagcccttgctttcctcaactcttcttctcttttctcaagattgctccttctctgccgacatttcatttaattttgttattacctttacttcattttcactactacaaactatgaccgttttctatgtatatgcatactatatataatatacacatgtacatgtcaagttgaccagaataaaagattagttatgtacgttccaaaagtcgaacgaatcattacaatatacatgaacatcgacatcgagtactaatatagcaaatgactaattcaaataatatataacacatgcatgaatcatcggaaaatcatgtattgattttgagaatttcaccatatagcatgtcgatttgcaaacgttaatatatgataacatcctcttcgctatgaaagaggaaacccttccctttgaatccctggc

SEQ ID NO: 66123 - DNA, 425 bp, Arabidopsis thaliana landsberg
gacccgagtgacttgtaagagaaaaacccttgaaagtaaagcaatcccgttgattttagcgactgttgctcaggcctccgcccgccactgaaatccgcctcaccgaccggccggcggttccggatccccgcaaccgccccggaagttatcggcatccgaaccgccacgtcctgagagcgaacgctcgtctttgcaggccgcttggaagacctttcatgtcgtgtatttgcgtgtgcggatcgggcggcaggggggagcggcgtgtggtcgccgccgtcgtcacgatctggcgtcggcgacggcttggaaggcttttttggcggcgcggagggtttgttcaatgaggtcgtcggtgtgggcgaggccgacgaaccaggcttcgtactgggagggggggaggtagatgccgttcttgagcatggcgt

SEQ ID NO: 66124 - DNA, 368 bp, Arabidopsis thaliana landsberg
atggacggttcagatttcaaacgttgagaatccacgtggcgtccatgttgttgtgtttggataaggataatgcatacaactgtgaccgtttaatagaaacgtaaggtcgcatggtctggttaattggttacggttttggaggaagaggttacggttagggatgaacccggtctacacggaccaatgaagtgatcttagataagtagtatctagtaaaatccggctgatacctgaatccaaatataaacaactgagatatcaataatctcatatagttttgtgcattttaatccgcgttacaccgcaggactattttgttttttaagaatcaaaatttaattgtttagtcgattacaaatatatataaa

SEQ ID NO: 66125 - DNA, 418 bp, Arabidopsis thaliana landsberg
  unsure (1)..(418): unsure at all n locations
ggggcggggttctgaaccaaatgcccaacttttcaattagcatcgagccataaatgaccatgggtgcggggacccagcaacatcttgatgctcaaaactactcctgtgaaaacagagttcttctgagaggcttgatctaaaccatgttgcaggcaatcactgctgtaaccctcgacacgctcccaggcttcacagaagctatcaccccattcccgtgacataccagaatattcaactctgagacgcnnnnnnnnnnnnnnnnnnnnnnnnnnnnnnnnnnnnnnnnnnnnnnnnnnnnnnnnnnnnnnnnnnnnnnnnnnnnnnnnnnnnattaccccaaatgcagcccctgacccctaacgcgtgaggcatcaatcggagacccaatgcctgcttccttgcaccatagactcttgac

SEQ ID NO: 66126 - DNA, 558 bp, Arabidopsis thaliana landsberg
cgctcggttgtcgggttgtcggcgatggttgctgcctcctttgcttttagctcgggagacacgcgagccttgggcccagcccttacggatctgcttccgatatggcccattcttgcgggtctcgctgtcggcgtggtcaccggcgtgatcagcgggttgttgatcgccaaaaccggaattccgccttttatcgcgactttgggcatgatggtttgcgctcgtggtgccgccaagtggtacacgaccggtgctccaatcgcgatgctgacgccggaattcacgtttctcggcaaaagttttgtaatcctcggattcccgggtccgcttccggtcatcatcttcctgatcgtcgcggcccttgcccatgtggcgctcacctacacccgatacggcaaatacacctatgcgatcgggtcgaacatgcaggccgctcgcgtctcgggtatcgatatcggcgcacacctgatcaaggtatacgccgttgcgggcctgctctccggtctggccggtgtcgtcacggccgcccgtgccgggtcggcgcaacccgtgatggggacc

SEQ ID NO: 66127 - DNA, 279 bp, Arabidopsis thaliana landsberg
acggacttagccaacgacacgagacttagggagcctaagctccaactgagggtgggcgatcgggcggacggcgcatgcttatcttatagcctggatagtgactaaaaggcgaatattcataaccctatacagggaagcaaaatgcaaaaaagggacatatcttacccaattaatggaagtgatgagtgaccaatgttccacatctactaagaaattcagataatgagtgagaataatattgtatatatgattaaaatacatcccaattcgaaatgtatt

SEQ ID NO: 66128 - DNA, 559 bp, Arabidopsis thaliana landsberg
  unsure (1)..(559): unsure at all n locations
ggcggagaaaatatgatcggttagaagttaacatcattaggtgaggatttcccaaacttaaattgaattaattagtgcataagtttagtctcttttaagactcagcgtttgatcattgtataaggatttagttatttgattacatttacactatcatcaagtgaccaaaaaaaaaaattacaagtgacctaattcagattcgttgtgatcttcatggtgacataaacacagaagttttcgcaagtacctcatgggaagtaacattattcgaaccttgataagacaaatacactgacatagtagtcggggacaaatttaaagaaacatgtcgttcctagattttgacagttttcatgcacacgcatacgttacatatgtgtatatgtttgtattaaaaacattaaaacagttctcaaaagcaaaccttaaaaagagtagtgagcttgttaagtcaaacgattaagcaaaaacagtaaaacactgttagattgtaaaataacaattaatggttaaaaagcataaattgaaacagagntaaagagttgaaaactactattac

SEQ ID NO: 66129 - DNA, 559 bp, Arabidopsis thaliana landsberg
gagtttctctacgttcccactcttctcttcctcgaactctttcctgttccatcaaaccaattggttaaaaaaactgatgatgaatctttaacagttacttgacacgtaaaagacaattcttttaccgtaatctctgatgctcctctttcaaccgctcaagctcttgactcgacgcctctaaactctctgcctcaagacaaaccttcttcaaatctttcattcccaacttcacctttgaagcaagctcctcacgttctctcgccaatctatgagcctcaatgtgagctgattgcacttccctccttatattctctcgattcttgaccataccctccattttcgctattttctcaagagtcgatcggatctgaatctcgtggtctgtttccgtctttctgatgtgagctcttagcccctggacttcgcggtcagccacggttaagtcttccttgagagctacgtagcttgaagctagttttcggttgtcattagagagccggtctatctcagcagcttgaaactgcatcttgttttctagaatatcagaaagtgaaatctg

SEQ ID NO: 66130 - DNA, 524 bp, Arabidopsis thaliana landsberg
gtgcgcatatagcgttggcgtcaatggaaagaaaattttccccttcgccaactcccacgatcagtggtgagccgcgccgggcgccggcaatcaacccgggatgatccaccgaaacgacgccgatgccgtaggcgccgatcacttctttcaaagcgttcttgaccgcgagcacaagcctgttgttgcccagagcgccgttaccctgtttggcggcttgcagtttttcatagtgttcgccgatcagatgcgccaggacctcggtgtatgtggaggaatgaaaggtatgatcagtggcgagcaaacgcgatttgatccggacgaaattttcgatgacaccgttatggacgatggcaatccgtccgctttgatcaaaatgcggatgcgaattttcatgcgttggcgctccatgggttgcccagcgagtgtggcccatgcctgtatggacagagggcggtgcggaatcgaccagactggcgaggccttcgtgtattatgaccttttttttgcgggtttggaacacacct

SEQ ID NO: 66131 - DNA, 241 bp, Arabidopsis thaliana landsberg
gtctggcaaagaagcactggttttcttggacaagaagtcttggcccaatgtgtatatgtagattcggctaaaattcggccaataaaggagtggatacaaacaatgaatgccatctacattatgagtgttctcggaccattcggggtgttaccgtaagagccccactcaagatatgctagcattgaccaactcatgggtcgactgaacggaaaagacaccgtatttaactggtaggatgaat

SEQ ID NO: 66132 - DNA, 344 bp, Arabidopsis thaliana landsberg
  unsure (1)..(344): unsure at all n locations
nnnnnnnnnnnnnnnnnnnnnnnnnnnnnnnnnnnnnnnnnnnnnnnnnnnnnnnnnnnnnnnnnnnnnnnnnnnnnnnnnnnnnnnnnnnnnnnnnnnnnnnnnnnnnnnnnnnnnnnnnnnnnnnnnnnnnnnnnnnnnnnnnnnnnnnnnnnnnnnnnnnaaatcgggtgaagacgatacatatggatatgtattaaacggggcggcgatacatcgactgtgtgaccatatggggcacgagctacggtgacgagacatnnnnnnnnnnnnnnnnnnnnnctatatcgtagacggaagagcgtgagcattaaacaatctcgaggcgcccttattcgcttttt

SEQ ID NO: 66133 - DNA, 467 bp, Arabidopsis thaliana landsberg
tgtgattgtgcaccattgaggtttatacctttatatgaacaattttactttacttaccaaagcgaaacctttatatgtcaatgatagggtcgtcactatcaagaaacgttattgggaagtaggacttatagttacatcaaatatcaaatacaatcatattttgtttaaaatatagcaactctaaccaatactccatactatgcttagaataaaacttaaccacattttaaaatacctaaacaatctcatgatcatgatcatgagaagatcttgagtgtccttatatttgttttatatgatatcatatcaaatatgtctgcatcacgatatatgtttgctttctctacgtttctaagatttatgtttcttgaattcttgggaagaacttgcatatgtgtttttatgatgtggctgctacaatgggcttctgggcctgttttaactggactgtagagtccattcatgat

SEQ ID NO: 66134 - DNA, 435 bp, Arabidopsis thaliana landsberg
  unsure (1)..(435): unsure at all n locations
acacgatttgggtaacgtggacacatatgtcggcggaatggtcgagtccgacttcaaagtgtgtcgagcggaagagctgttccgcactgttattagagaacagctttcccgtattgaagatgccgaccgattctggtttgagaattcacagaatggtaatctcaccggacnnnnnnnnnnnnnnnnnnngaaaagtgcgtgtatatgatattctggtcaacacaactgccattcctatcgatgccattcaacaagacgtgttctatcttcgcgtgaatgatccctgctctctaccatgacagcttagcagcaagatgatggagccgcgtgtgattctagccggttggaactactatcatggctatgaactgacatatattgcggacatacttaatctggcatttataccgacggggacctcaatattgaaacact

SEQ ID NO: 66135 - DNA, 312 bp, Arabidopsis thaliana landsberg
gggacagcttttctttagatcaggtggatggctgggcttactgagaaaataaattggaggacctaacatcatatgtttatttaccaaaaactactagaacacccctgccattctgaggtgacagacggatcccaccggtcgagcccttttttgatgttatctatacatagtctaccaatgggagcagggactataaaggcactcatagcgtccactggaccaccaggaggagttactcaccgctcatgtcattcttttaaattactctaccccacaaatacttattattgtaaggcacaagctgggcacact

SEQ ID NO: 66136 - DNA, 517 bp, Arabidopsis thaliana landsberg
aagaaaacagagtatttgagtggctacctagttctgtgaacccaggctcgattttagcctgctctagtaaagtatccacaacttctttctgattcatgtaaagttgaaggcatcgttctataaggttttgaacctgaaaccaaaagtaagttttattgagttggaagaggacgaattcaaattgtcgcagattcacacaatgaaaccaaaggccttccttcatcatgatctatttttgttgttattaccagttgtatatcttgacgtgaaacccttctcactgttccactcgacatctatgagacttttgtaaaccagaccttgttcctgtcaggcaagaaccagtattaagagagggtacaagggaaatcgattcgaatctgtacaagttcaaaaatttatattaaatcattagaggtttttatctcccactaatgaaacaaggttctttctctagggttcaaattcaaaccaaaaaacagaaaaaaacagagaatcagaaataccaaatgattca

SEQ ID NO: 66137 - DNA, 339 bp, Arabidopsis thaliana landsberg
tgagacttctcgatgatcgacgccttggttgtgtcgtcccacatcagctgcagcgacgccaagtcggcccgctcctcgtcgcccatccagcggaagcacaagctgatgaccttcgaccacttcgggtccactcggtcgatgcggtcatcggccttgccgacctggccctcccgcgacagcgacgcgccctcggcggtctggttcgccgagtccggggagaacacatacatcggcgtcatcgtggccgcggagaactgctgctgcccgtccttgacggcctgcaacacgccagtcatgtcgacggcgggcgcgatccacatctgcgagtccgcggggagc

SEQ ID NO: 66138 - DNA, 1563 bp, Arabidopsis thaliana landsberg
gaatatatatatatatacatatatgtttgtcatatttagaagaacaatcgtaaaaatatcacaaatctctcatcactctatatataatcctatcggattactagctgtataaaggtaaaaaaaaaattttgttctcaacttttcaaaaacttttttatttatccatgtgttacaaatttttaaagcgggttcattcctagtcgaaactcatttaaaccaggaccaatttcaaactacatattggtcggacactcggtctttttggactcagtgctcagctctagaccggaccgtctcgtttcacatgctagtggtcttgatgcattttcaactacgttcaaaaaccaaaatcatgacacatatgattcagggcacgtgagaaaaaaaaaacaggatgtggcacggaactccataaagactccactatttttgtatcttgggaacgtacacattcccttcactgcatctccatttttatcataacaaatttaaagcaacaacacgttaaaccataaatacaataaaacactatacatagtttggttgaagtttgtccaaacttgttcaagcaagacttatacccatttttagttaaaataaaatggattgagaactgagaaatgaagtcgatgtcatatcaaaacccaccaaataaaagatgaacaaacaatagcaaaggacaaagttaaagtatatacttttgggagagatctctaaagtttatttaatcacttaatgcgcatcgctgtgtttgttttggtatgttcttattgtagcctctcttgcttttcattcatatacatgttcatgagccaaggttgatgtgtagttttctgtaccacaaaaatctagtattatacaaaagagtacagtaactcatttatcaagttgtctgggacataggatcggtgccacatatatcgtaggtataaccatcgctatagcttctaatagatggaatttattgatcgatcgatttggtggtatgctttatgtatttatctttattgttttcttattataagcattgttgatgttgtgtgcttagttcagtatactggattcttaatcacaagagccaacaaacatcttaaaaactctcataatatcaactaagatacgataaatgtccacacaacatgttttgtagcatgttctttcagcttgagtgtcaaatattgtcgactataagtctatatccatgtaatgataaacctgttttttttgttaagaagataaataattacaaaaataagtcagcagacgtgaactcacgatgaactcatatgtaaacgatgtaatattatcctacgtggcctataaaattaaagatactatgccatgaacctaacattatggacgtcaataataattttacataattcacactcttttgggtagattagcaaacttgagggtctttatcacaaatattttaaatgtgagtttttttttatttttttaaatgtaaaaataaaccaacgtcagtggatattcctttgataaaatttgggtttcatgatttatcccaaagtctcctaaggcgagaagggagccggacgt

SEQ ID NO: 66139 - DNA, 314 bp, Arabidopsis thaliana landsberg
ctcaaactgtaatctctttggagacgaatgggagagagattagatttgcttaggaatgttatctcttctcttggccacgcaaataagctaaaggctgtggtcgtcagattaaaatcaatggagcggaaaatcaattaaaaagtaaatgattgcgttttggccacaaacgcaaacacaaacgcaaacgcaaacgcaaacgcgaacgctgtaccagataaggttaaaatggctaagacggtaaggttgcaattatatccactacaaacgtaaatacacaatgccttattcattttgcacacacacaacatccaagt

SEQ ID NO: 66140 - DNA, 470 bp, Arabidopsis thaliana landsberg
gatccagcttttatcttggttcagagaatcgtcgttcctcttcttctctgcatatcattcacgcgattgaagttgggctattcgcgtgtacaatacacgcgttcggtcggagcttgaagttgttgatgaagacactttgtcttcagtctttttcccttgtcgtaacactgtctgaaacttgtcgctgggctttatatttgtcgaaggcctaagttgttttttccttcgaagcccaaaattttctttcttctggattgaaagactttttggtttcaatatatttcttgcaaattccccccccccccccacaggccctcactattcgtgaaacagcaacaatatctctgataaacagccgacacaaaaaaaaacaaatatctctaataaaaaactttttgacgtttccaaaagcgaacgaaaatgcagcacagtgagtaacggccgtacgccacaaacattttcatcataac

SEQ ID NO: 66141 - DNA, 735 bp, Arabidopsis thaliana landsberg
gggtttatgggtggagcagccataattgtatcactccaacagctaaaaggtctgcttgggataactcatttcacaaagcatatgagtgtagtccctgttctctcctctgttttccaacacaccaacgaggtttaatttctcattcttctcctttttcctaattcatgtattttagtcaattttatttacaatgttactattgtacagtggtcatggcaaacaattgtgatgggagtttgcttcttgctcttcttactcgcgacacgtcacctcgtatgttgcttacctctcactattcatttatcattttcattctccctcaatatgcatgtacaacatttgttacgatggaccgccattgtttctctatacattcttcccgccataaataacgaactaaattgttttggagtaggaaaacaaattgttatttcatcaaaaagttaaatatctaattaatttaatgatttaaatagttattatatactttgatctagtttcctcttaagtaataataagaatggaaatttaacgcagagcatgaagaagccgaagctgttttgggtctcagccggagcaccacttctttccgttatcgtctctacacttcttgtctttgttttcagagcccagcgtcacggaatcaccgtcgtaagtttcctcttaccttaaccattctctgtttttgtttctttggtttgcagaatttttgaaaacttaggaataatttgttga

SEQ ID NO: 66142 - DNA, 1771 bp, Arabidopsis thaliana landsberg
  unsure (1)..(1771): unsure at all n locations
ttatcttcgtacatcaatgtttgtttaaattgtttattcagtattttatgatcttcttgcggaaatttgggtgaataattttgcgtgtggttagaattactatatgaagggaagttgcttaccaaaaatcctatgatcaattcagaaaaagttggaaaataatgagaaagaatagtgtttgtagtgaaaatactttgtgtggggtccaaatctcctgcaaaaagaaactaatgtgtagaagcatgcatggaaacaccaataaatttttctgaagactctatggcactaaagtcagttaatttgatcaccaaatatgactgaaaactataaagaatcggagaacaacaaagaaaataggtttcatttcatggcatggagtcaagggaaatattcatgacattgtcaatgattttaggactatatatgtttcgaagaaaaataagaaaattggtatttttgatgaaaaaggaaagtgaggaaaaattgagtcgaacaaaaagaaaagcatcaactttgatgagatagaatcaaattattgaaagaagagttgttttaatataaaaaaaaaaatggcccagactaatagaagatttttgttgaccgggntaagtacggagaactcaactgatgtcacctaatattttgccatttgtagccgagaaacgaatctccaaatgtagagttatgtagttttatgtcattttagttgactcgttgtaatatttagttaaataattaacagtttacaaaacatttaaaaatattatttttagaattagatttaaaaataatatagaaagatcataaataaatttataacgcgaatgtttcaattgaacataaatcattccaaatgtttactaattaaattttggcacagtgattagaaaaggattgattatatgtttttgttagcacaagataattggttcccaaaagacgattgctataatacggtagtacttataccaacccatccaaatttaaacataaacaaatgttttaaagtttaccaatattttgttctccgaaaacaatgtttacaaactaattaactaataactaaactgtaaattgccaatgtttacaatgtttaaaaacataaatttattcttcttaatataactctgagcacggaacattgtcaacaattatagtatagtattagtctatatttacagaagctaaataaatttctatttttcttgataaatcgtgatttttatgttcactcatttcggatagtatcaacaatttcataaagaaaataagtaaattgtggtggggaaatgagaaacttatcttaaaaacatgtaatccacgtggtcgtatgggagctttctaagctgcaaacccaccgtccaagccctaaatggaaaccaagaggcaagagatcacaagccttattccaataacttgccgcttttgcatcacacatctccttgtttctgttttggattttccaaaatagaagctactcagaagctccctttgctttattctcatcttcactatcgacttactatttttttttttaatatttggtctatggaattttgtttctaggacaagtatataaattgagatatttgtcgtttctcaaaacaacctgaaactttggtaaaccaatttcatgtcaaagtatatcgatctagctctaaaacttatcgtttcaaaccgtattagatatcaaatttaaacttttgattttacaaaatttttaaactggtctggcggtatttaatttgaaagattatatatctactctgca

SEQ ID NO: 66143 - DNA, 265 bp, Arabidopsis thaliana landsberg
gaacgcgactgactcgtaagttcttaattagtgaggatgcttcgtttatattttcgtcggacatagtgcgaatgctcggggcggataggcatgatagactgtgcacccgaagccatgtttacagaacggaaccgatacatatagtgaggttagaactcggatttgcaccattggtgttgaacgattctcactgccgatttcctaggagttacaaaaatcttaactgctgaaagatatgtgagtgagaaccctagttagaatacct

SEQ ID NO: 66144 - DNA, 556 bp, Arabidopsis thaliana landsberg
  unsure (1)..(556): unsure at all n locations
actaccgtggcctggaactctccactttcggtgaatttactttttgtctgaaagtgctcggcggcgtgagcctggtcgataccgatgcgtccggtcatgtcgccatcggcgcacccaagacccaggccaacgtcggcctgcaatggctcgtcccgtccagccccggcctcgccctcgacggccgcgtgatttataccagtgaacaatacgccgacgccgtctacactcagaccgtccccgcctggactcgcctcgacctcggcgccagttatcaagtcaaactcgccggccagcgcgcgctcacccttcgcctgcgtatggaaaacgcggccgaccgcgactactgggcctccgccgggggttatcccggcgccggctacctcaccggcggggccccgcgcaccctgctcttatccgccagcctgaacttctgatttcaggacatcattttccgatccacaggtcggataagcaaaaatccacgaacccggnggcacgatgctcccgtgttcactagttatcggagttgcgcgggttttattatctgggaagttct

SEQ ID NO: 66145 - DNA, 653 bp, Arabidopsis thaliana landsberg
gaagcatatttgatgcaatcagagctcgagaatatctgcgagcgcaatttccttggcgcattaaatttatgaatataggagtgggtgcaaggggatctttgaatggagtagcatatggttattgtactcatctgtatattggaggcatcagtagccagtgggagagggatgaaattgtccatgagtcgcggcaagccctttataaggggcctcgcatggtgactgacctgtactatgaacatgcccttctgatggagtttgatacacctgatgatgctgcaattgtaatggcccatctcaggttttttcggggagaaaagagtaaatttcatttggcatcaatcaatcgtcctttgcctcatgaagatggaggaaggtttgtcttcgcttcttctgacctatgttttctttgatgattttgaactattgacattatttttaataatgaaatatccacaagactttgtatcttcttctcacaaactctgaagcgttttgactttggtatagttatgcactttatgtcgctttttatgtctcattggtttaatgtggaagtttcttgtctgaacagtcatccagagaggcaccttcaagtacctccctcattaaaacaggatagtggttcaggagattatgttttccccttaatg

SEQ ID NO: 66146 - DNA, 250 bp, Arabidopsis thaliana landsberg
tctaaggctggatgacgccacgctgggcctggtgttgctggccttcggcggcggttcgatggtctcgatgccgctggtgggctttcttacccaccatttcggcagtcgcaaggtgatcgtggtcggcggcttgctgacctgcgtggcgttgccgttgctgacgctggcgccgcatgcgctggcgttggcgctggcgctgctttatttcggcgcggcgatgcgcgcggtggacgtgaccttgaatcacaca

SEQ ID NO: 66147 - DNA, 719 bp, Arabidopsis thaliana landsberg
acaactaataagttaggtttaaaatttcgtaacctagaatacagttagaagtatttttaacaaaaaaaagggttagaagtattatcaagtgatctcatatacttctgaaccgtttcaattaatatataaaagttgccaaaaaaatatatatcaagtgatgtcatattttaacaaattaaatgaaactaatttatccaattagtgaatctcagttatccattctgaatataaacctaaatctaaatttacaaagatatgatcaataactttgagttataaaaataaagcctaaatctttaaccattaaacctaaacttaaaaccatgattttaaaattcttttctattttttatttctcataagaaaatatataattaattatcccatatattatggagtggcgcattcttatcaactaatctccaatctaggtaaatgacatatgtatagattttcaaactttttataaaaaaactattatttgttcttggtaacatgtatctatacgtattccaatatgaatgacacatatataaagagagacagagagagaaagatagattggtacgtacgtagattcgcctgtacatataaccaatgactacaagaaaattaaattcctcagaagacaccgcattgaaatgtgtcccaccaagacacattaaaaatatgacttgttttcccatgttggtgcccaccttaatttttattccccacca

SEQ ID NO: 66148 - DNA, 544 bp, Arabidopsis thaliana landsberg
tggattcgaccggctggctggttgcgtcggcaactggaaatccaggcctcgggactgggtgggcacctggatgaaacctgtgccgatgtctgacccgacagcggctggcttggaagcacgggcgaatcgtgtgaacgcggaccgtattttctggatgggctgctgccgttggcctgtcaactggactcggcgccgctgaaggcgaaggcgcagaagttcatcgactggacgctggaccacccgtggcccaatggcatgttcgggccgcgcagcatcaatgactggtggccgcggatggtcatgctcaaggtgctcacgcagtaccacgagctcactggcgatgcgcgggtgataccgctgatgacgaattattttgtccatcagctcggcgcgctgccggcacgaccgttgcgcgactggggccggtcgcgctggcaggacgaactgctctcggtgttgtggctttacgaccgcaccggcgacaagcgtctgctgcaactggccgcgttgctgcaccggcagggttttaactggcagggcatgt

SEQ ID NO: 66149 - DNA, 161 bp, Arabidopsis thaliana landsberg
  unsure (1)..(161): unsure at all n locations
gaacggccaaccacacacccccccaaagcacccaaagacgggaaagcaaaaaacacaacacgacagccncacaggncaacccagagaaanaagccaggacgngacggggaaccaacaaccaaaaacaaacaaagcaccaagcagacagcagcnacacgaag

SEQ ID NO: 66150 - DNA, 403 bp, Arabidopsis thaliana landsberg
caaggcccgcgcgctggcgctcgagcggcaagggcgaattgatctggccgcgctgctggctcagcagacccgcttgtcccagcacacgatctccgacattaccggcgtgagtcgcgacacgatccgcaaatacaccggtgagcagccggcgggggcgaagaagatatatagaagaaaggctgacgcatgaatcaacccaatttcctcatcggtcgcggcgaactgctgacccacgacatcaaagggcccaggcgcccgccaggcaagacagaggtgtacagccttcagcaggcgcagcagcggctggccccgcagttctcgcggaccgccacctcccttgacaccttgccaccggaagcatgtccgggcgacttcggtgtcgtgcgcttgatgaagaacccca

SEQ ID NO: 66151 - DNA, 549 bp, Arabidopsis thaliana landsberg
  unsure (1)..(549): unsure at all n locations
ggagggggtgtgaatttgcctctagcctacgatttattacctgtcgctacggagctgaagtaaccgaggcgatgggggaatttaaagctcgaacgaccttcaacaaaagggttcnnnnnnnnnnnnnnnnnnnnnnnnnnnnnnnnnnnnnnnnnnnnnnnnnnnnnnnnnnnnnnnnnnnnnnnnnnnnnnnnnnnnnnnnnnnnnnnnnnnnnnnnnnnnnnnnnnnnnnnnnnnnnnnnnnnnnnnnnnnnnnnnnnnnnnnnnnnnnnnnnnnnnnnnnnnnnnnnnnnnnnnnnnnnnnnnnnnnnnnnnnnnnnnnnnnnnnnnnnnnnnnnnnnnnnnnnnnnnnnnnnnnnnnnnnnnnnnnnnnnnnnnnnnnnnnnnnnnnnnnnnnnnnnnnnnnnnnnnnnnnnnnnnnnnnnnnnnnnnnnnnnnnnnnnnnnnnnnnnnnnnnnnnnnnnnnnnnnnnnnnnnnnnnnnnnnnnnnnnnnnnnnnnnnnnnnnnnnnnnnnnnnnnnnnnnnnnnnnnnnnnntgcacctgacag

SEQ ID NO: 66152 - DNA, 214 bp, Arabidopsis thaliana landsberg
  unsure (1)..(214): unsure at all n locations
ctccaagctgatgatttcatcattcctcaggatcttgcaagcatctttactggtgaaccttgtagcctctccagcctccattaaaagagatgatttcttagtcttacaagcgttttctggtgtatgttttgacttggggctcaaggaacggatcaaacctgccctatatcttggtgaggatggaggagaaagggtnggatatagggtcagtgga

SEQ ID NO: 66153 - DNA, 2119 bp, Arabidopsis thaliana landsberg
accctgcacaaggttatgctccgccgcagtactctcaagctccgcagcaaaagcaaaacgccggtatgcttgaaggatggtacgttcttgatcccatcttttctactttatattaactttattttggtttcttgttttgctttgtatttaggttttagtggaataatactgtattagttaatatatgtctttgctctgttcataaatacgtcacagtttggctgcgctctgttgttgctgtctcttggatgcatgtttctgatcggaggatgattatatacgttgcctcagtcaacttttatttcctcatatatgttatgtaatgttcaacaatctttcttctgttgttatcttctttcaattcgaattttggtatcttatgttttattgactccgaccataattatctctctctttcataatccaatcacacgaattcgaaataaaccagtaaagaagtgatcagaaatcttgatgaaatatcaaaggagtgtgtttcatcatcatcatcatattattgtaataagtaaacatagccatggataatggttcttttcaaccaaaaagctcacagatgctaaaataacaaagaaacatgagaattaatatcaaatgaggtttcttcttttgctcgagaagaattggaagaaggtgtaacatcagttttctggttgaggattgcctttccacttgaagttgtccgagtaagacttgacctgcagttagatgttagatgatgaacaatcatggggttaggttaaaacttcaatctaccgaatgttctaccaaataaatcaaaggaatgaaagagactatcgctcgtcaaactagtagctaaatcttaaactagaggcaccaaaccatttctgatgaagcaatatgagttaagttaaagaatatcctatctatttaacacaacattcaagggtcgttccagtgaatctccagctttagggttaaacacctcatatgagtagagctcgtaagtcataatgcggcattagcaaaaagatagttactaaccttcaataatggtgtgttgggcttcttgacctgcaatgatttagatgtaagtttttcagtactctgaattctatattaagggatcttaaaacagaaccatcacaatggtgatcgaaaaaaaaaaaaaaacagaaccatcacattctcataaaatgtgagtgaatgcgaccagaaaaaaaaatgagctaaaaacgaagaaggaaaaaacgtaccttataatcccaaccatgacgctcagcaaaagacttagcagcttcttcagaatcaaaagcaagagcagagtcaccaacattagcataggggtcacctgtagaagtccatcccatcaacggattctcccacctagaaacatatgaatgccatagataagtgatgtcaatcgaaatctaatcaacaagtgatggactagtactagtcacaagcagaagacttaagttttgaaaagataggaattttaaggataagaatcatattaggacataaaatgtgaggaaaagaggattatcttaatcaaaaagtagcatactttaaggtggagacgaagttaatcttccattttccgagttttccagatcctgactgggtagctgttctagcaggtgagtatattatcacctgttaatttccaaattcaatactcttagcactattcgattgaccaaaatcaaatcaagaacacgatgtagctcaattaagacgattctctgatcacgaaccctaattttctaaactgaattcgtaagaaatcgaatgcttatttaccttgcgagaaagatgctcctctgggattccggagaccttaccgatctcaccacgcttgtaatccgactcaaccaccgcgtcagtagcgaaaggtcgagcaacacgccggagcgtcgccgctatacggatagtcctttgagtagtagcacgaagcgccatcgtcaattagagaaatctggaaaattgctgagctttttgatttcgctttggtttcttctacttctgtagattttagaaagaaaaaaaaaacacatatttcaatctagccatcaaaagtttataaattacgctttcggtcttactattatatgaaaaatctttgatagcccctaga

SEQ ID NO: 66154 - DNA, 434 bp, Arabidopsis thaliana landsberg
  unsure (1)..(434): unsure at all n locations
gcaaaacagcaacctagnacaaccagagaaaggaaggaatagctttgtcttgtacatcctctcagagtttgtatgatgtgtggatgatcatgttgtcgatgatgatgatgatcatgtatgataacaggtttggggagatgataagatcagcacgattttgcaacatacgaatgtttcaagcctacagcaacagctaagtgaggtaaaagagaagaaacatgaacacactcacagacaatacacatggatccaagacatctaactttagttgtttgattttggcttggaatctctgtctcctctcatgctatggaatttaacaagccacacatcaatgcttgaatcaaaagctcggtgtggttattataaactatgaatgatacaacagattagaatatggttaccgctagtacatggcatctactatgagaaat

SEQ ID NO: 66155 - DNA, 334 bp, Arabidopsis thaliana landsberg
aagaaaacaactgaacccttcagctatacgccgagactgcaagaaaaaactgaaaccgaccaattatcgaatcgatataacagtggtaaccgatctgaaacacggaaaaaaacattggtataaatatcatcggcctgaaaaatcacaaagacgaacaaccctatctgttacgcagcaacgggagaactcccgaatacagaaaagcaagacggagcgggcaactatcagtcccatgaatagaccacgcaggaaacctgccattcgtggtatagggctccaaacgccgggcaaaatggcttcaataagtccgaatatggatgctgccaaggagggc

SEQ ID NO: 66156 - DNA, 589 bp, Arabidopsis thaliana landsberg
  unsure (1)..(589): unsure at all n locations
gtgcgtgaaaccttccatcgatctttcctccaaggttcagggccatatcacttcgcggcagccgacagggccgaccacgacgcttgatactttnnnnnnnnnnnnnnnnnnnnnatttcggcctcggcgtaagcctgagcgccctcggcgcccgaaatcttgaagctcgcgaaatcgcggtcgccgccgacgaagaacagcttgcaacctcgccacagtcgcgaatcgttgacgtagacgcgattctcgccggtggcgggtgaatccagcgaccgagcgccggatcagcctcgccgcttcgttcggcgaaggtcgcgggcgtcggttcggcagctttcggggcgaccttcgtcgccttcttttccgcgaccgcagcggcctgacccgcggcgaaagcctccacgattccgttcgtgccgacatcgattccggcagcggcgagcaggctcttgcgatccttcttcgagcagaattcgccctgcttcttgccgatttcgaaagcgatcgtcgtggcgtccatcgtcgcgttcatcgntcgtccctcggttcgcgttcacgtcccccaaccacacaagcatcttaccaatag

SEQ ID NO: 66157 - DNA, 527 bp, Arabidopsis thaliana landsberg
gatctttttttctcaaagtgtacgtgtgtatattgtaaacgtcaaacactaaacaatacatatttgcatatgaccttcaaatttggatacatcatattaattgtttttgtacacataaatttattcgttcaattaaaacaatagttttttcaataatctttatataaatgtaaaaaaaaatcacagaaaaaaacaaagacaatagttctttccttcttttattaaaacaaccaatgataacaaagttcaatttaaaaaaaaaaaaacaaatccaaattatcaagtaatttccatcaaagtttaatgtaaaaaataaatctatattccactaattaccatttgacattttttaaaagactccactaattaccacacaccaacaaatcaactatttaggggttcagaaatacattaaattagcctatacggaatttcagaatggattgtttccctatataaaaagaaaactatacgtcactaaaaacatgacctacccacttatttccccggaaaatcatcaaaacaat

SEQ ID NO: 66158 - DNA, 527 bp, Arabidopsis thaliana landsberg
agatcatcactcattcactctatgacttgtcattgctgatttgcggtttgatgcaaaactgtggaatataatgatttaaagaaatttataatgcgaaaaccttttcatcgtcgtggtagaagtgaaacctcagttctttttacacacgctctttttttacctcaccggtggattaagaaaaccttgcgaaataacatggattaagctaagatttgctcttacctaatttgtaatgtatcacattcacaccccggattacaattccattctgcatattaatattgccaatcaaaacatacatttaactagactagaaatgtgtttaattaagtcttcggagttctcttatctaaggtagcatgcgtaaactatagggtgaattgaatatatatgttcagaaggatgaaaaataatgaatctgaccatgaagctttgtgtggtcatagaattctatttcgtttgatttacactaatgccagatatacgacttagtacatttactcggtaccatgaagagtgtcacgata

SEQ ID NO: 66159 - DNA, 253 bp, Arabidopsis thaliana landsberg
tcctgagtcggatgtgacaggtcgctctggctgaactgcactacattccatcttatcggtacacattactgacgcttctgattttgatctgtactgtcgaaggcttattgaagagatgtgctcggttatcttttgtgcctgattgcacttaaacgagaacccatagaatcgatacgaaccatgatacccacgcctgagacattgcatgccaactttttcgtatgcttcttacctcgtgagagggcgagagacc

SEQ ID NO: 66160 - DNA, 401 bp, Arabidopsis thaliana landsberg
aattacatgaattacggttggttgattttttaaatttttcaagatatatgtaccggaaaatgcgttttgtaccaattgatatgttcgtcgtactataaacagtcaaaaaaactggaccagaactgtgttaatgatcaaaaatgtgcattataatttgatattctcgataagcggtcatctggcaggccagctatttcttgttcgtccaattttatcggatgtcacaaggcaaccatttacactctaactatatattgtctcctctttctactgataccgagtgggactattatcgcttagtatatggaccttctttctacttattatgccattataatatatatctaccgtataaaaaatcactagcgtttcccactaacccatttaatggaaatgactga

SEQ ID NO: 66161 - DNA, 432 bp, Arabidopsis thaliana landsberg
cttttcaagttacccatcgctccaggctattaggtgagaccttcaaacagtgactttcagggcaacccaaagatctaatatgttgatcaccgtgaaccataccaagctaaagctacactcacagctcgtcttaaaactacccaagcattattggattgagacccatcaaacagttacttttagggcagaccgaaaaagctcaatatgctatgatcacccatagaagctaaaatgagaaaactaaagactgaaggagagagaatggcatgaacattacatcttgataaacttttgcaactgggcgtattttgtgacgtgctgaaaatattactgttgcatgggagcatctgaaatctctgcacatcttcgatgcggtaagacagtgagtgtaaacaaaatattaggatcgagaatatgagtagaatacataca

SEQ ID NO: 66162 - DNA, 2032 bp, Arabidopsis thaliana landsberg
gtgcagagatatgagacacatgaaacttttgtgggtttttgtgcccgttaaacaaaatcatttattcaaacaaaagtccaacacgattaaacaagaagaatcaaattctagtttattccatcctttgcagtagtaaaaagggacttcactaatcacttgaaaagccaaatgatttagttttttttttgtttcttcgaagaaataaagaaagaaaccttcttttagcccgagagagctgcgttgatggcactgtgaacttcaacaccaatctgtgcctctgctttctcaagatctgttgtggcagaagcaagtttctgttggaactcagctaaacccttttggacttggctagggtcaatgtggtcaagcggcacagcttccaccgcgattatgtcagcgacggaatttgcgtggaggaatgcaaaaccactgctcaagaagtatttcttcacgtcagtgccttcatggacggacatgatgccaggttttagctcagcaattgttggaacgtgtccgggcaagacacccatttgtcctgttgatgcgggaatgatgaccatgtcgaccttcaagtatatgaagagaaaccaattagctttcagttatgattaaagatataagatatgaaactctaggatcagcggttcgttttaattttgtataaatagaatatgaagatgatagcgcagcccaagatggttggaaaatgcatcaagaaaaaaggctggcaagatttaagctacctacagcgaatcaccatctacgcgtactgatattcatatgtactacaagaatctgaatactacatgaaataacaatgaatatgtataactactggctacagagattaactcataaaaattaaggcgttataatcgatattcagtctacgcatatagcacatcatataacaatagtggagaataggtcatatacgaaacagacattatatgtgaataccattgtaaccgaaaccaaaaaagccagacaaacactaaaattgggatcatttccatgaatagaatttcaataacagacctcttttaagaatcccaattcaaacatcccatttcaatgattgatcaacagagaatatagaagcagtaaattaatcgactagtctcaactttttcagtgatgaatctaacaaaaaaaactcacctgagaaaaagaatgtaacaagcaacattttcagatactgtacacatagttaacctgtaaattctaagatgatcgtgtatttacaagtttcactacaaattgtttttgagagaaatcatgaaactaaaataattatcgtcattgtaacgcaaacaattgctgctagactcaggtaccgctatcaaaaccctaaaatgtagcgccgtcagatctaaccaaaatcaaacgtcctaagacctaattatgcacatttgcataagttgagatgaatcataaaaagcgtatcaaatccgaaatctcgagattttcgacaaatctacaaatcaatcacaaaccaaatttccacacacaatccaatatccagacgtatccacagaaagaccacaatgaacaaaatcatagatcaaaccctaagaaaacaaaatgtgaccaaaagatcgaacctctttcccggtaagctcagatgtgtaagggaggacaaaattgacggtgagcttcgtcgggatagaagaaggagtggaaggacgaggtttcatgaaagcagaaggagtctgcggtgggtccatattcggtgcgactttcttccatgcctcgacgaaagtggaatcgagcgtcgatggaagttccgttgaaaaggcacgagtcgtcaccgatttggaagatgcggcggcgacagatcgggagaggagacgagaagcttgtttaaacatggcggcgatttggtggtggtggtgattttgagtctctctgagaaattggggaaattatacgtcgcagatgagagagagaatccgaatactcttaaaaatgttgtagctcaagtgtttctcagactctcaagttcacgcgcatcggtggcgagtgaagtgag

SEQ ID NO: 66163 - DNA, 554 bp, Arabidopsis thaliana landsberg
gcagattgtggcgtcgtatactacaacatctggtgaatctaaaactagtcttctcttaacgtctggatggggagactattgtacattatacagttacaaccataaaaatagacgttgttcatcatcaatggctttgaatgtgcaggtggggattggctcgtcatttccattatgttcctgagatcttaagtgctttcttctggaccgtaccggctctcttcgataacgtaaaatactatccatctatttgctatattcgaagctcttcttgcaagtgaaacgcacttaacatataaatcatctttgtttaaaccagttcttggcatacttctacgtcatatttctcacccttcttctctttgatcgagccaagagagacgatgaccgatgccgatcaaagtaagcaccaaatctaaatgatttattttacacatcctctttgatcttactctgatttgctgacaatattcgggttttgttttggtaaaaaggtatgggaaatattggaagctgttttgtgagaaagtcaaatacaggatcatttccgggattta

SEQ ID NO: 66164 - DNA, 590 bp, Arabidopsis thaliana landsberg
ttagatacacatccactcaaattttcagttttcccaataattcatttcttaaagttgatatttgaattttgagttgccccaatttggatgctcggtttttatgtagttcttttgaccattggtatgtctcctgtattttctacttttcttattggtgaacttatcataatagctaatagtgtttctttgcaaacaagaaacatcacttaaaattaagatgaaagtgagtatttatttagctagcatgataaatgaaaatccccacaaataacactaaacaaatctcttttttttttagggttccttctttttttgttctcatcccttttccacacaaaagaaaaaatttacaacatagtaataatgtagacataacttgcgaaaagagataatgggaggagaggcctcgtttccttctggtgatactccttagcattcacaccctgtagacctctgttgattgctcgtccctacatcgattgtgtctggcaagtatctattgaaagagaaaaaggtaagagaacattgagactcacacccgtaatataaataatgtatgaagtaagacttgtttttgaaacttacagttc

SEQ ID NO: 66165 - DNA, 374 bp, Arabidopsis thaliana landsberg
aatagttggccagtttttctaaactagatcaacccagaaatacaatttgaatatcggttactaaagtgtaattttgttgggacatttgattaatctattaattcacaattcaattaatcttgacatattcgagaaagtgacaatatttgtctctaaaacttatagtgacgtattagagaattttgttagaatacttataactgtgaaaactagttagtcatagataattttctaggcaattgggtttgttgctactaaactaaattaaagcaaacgcttcaggaaaacagattggtttctctatgtgaggtgttgataacttgtatcttgtttgccaactagtgagtcttcccaaacgaggtggtaatggtttg

SEQ ID NO: 66166 - DNA, 485 bp, Arabidopsis thaliana landsberg
tagcagaagcaaaaatgggtttggttaaagaagaagctttaccagtgtgaattttgcataagcgaaaggcgacgaagaactgttaaacgaggaacaagacggagacgatgaaagtacaagtttatactgacagattcgcctcaattttttctctgcgacataaaaagattcattttttaataatgtaatgaacaattaatatactttcagtcgaaatgaaccgaaaattaagttttgcctaaagaccatacaaagaagatgcaactaagcttataatcagagtggagaataattatttagtttcttctgaatataacaaaactgacatacgtttataatgaataaataaacgttacatagggttatgcgtttaaatgagtatttaaatctatcttataagagaaattactttacttctaaatcggattcgaactaaaaaagcggcctatggatcaagttgatttttagttaaactaattaagagt

SEQ ID NO: 66167 - DNA, 334 bp, Arabidopsis thaliana landsberg
  unsure (1)..(334): unsure at all n locations
actaatactaatgggnctgctaataagcctactccaattttctttcatgaatctcctagccccctccctgtagggaggggatacttcatatcattgattttaccttttttacatacatgacaatattataacaaaacataacatatctcaactgccataatcgttactattagaataaacacaaacttacgatatcacacttcgataaacaacgccagtgataattctcaacattgcaacaatcttgtatataaaattcaacactattccatttaacgaacttttcctaatcttggactttttttccttactttgtatatcatacctcacacta

SEQ ID NO: 66168 - DNA, 506 bp, Arabidopsis thaliana landsberg
ctgtgctcgttgagtttctaaaagtgtagaagtttttgttgtttatttatatatactctagttgcaaatgctgcatagaattagttagatccattctcgtgaatccttaagaggattatatgctagaataaaaatatactactaagaagatattttattgataacataattgaccaaagagaaaaaacaaaacggaaagtcttcttatttctgtcggtttgacacaactggtcaacttttgctgtcagtaaagtaaactcttcaagttacaaaggcatattttaacttgaccactctaaattttattcttcagaagttttagtagtggcccaagttacaaattcgtgttttgaataaattgttctaatttaaaatataagaaattcatacattgatcactttaaactgtttttggttaggaagaatttaataatttgtgttcactatcacattcaaaccctctcacatgttgatttgatgataaagaagttagagagaatgatttc

SEQ ID NO: 66169 - DNA, 922 bp, Arabidopsis thaliana landsberg
agatgagtaagagaaagaactttatgtgtttgatagggcttctcgaggatccgcagatttttttttcccttcaatttgggtgtagagaggaaaaaaaaaaagcgtttcgcagttaaaattgcaaaagagccctaaaatttgagattcttatagaatgatccctaaatgttttccgacctataataaggatggacccagcccatggacctataatgctattctcttgtaaaaggccaggaccataatattcctcaaaatattgaacatttaatttaatagcatgggcccattacactaaccaactagtcaaaacttagtaagaaaaaacaaacagtcatggagtcaactagaatccaaaacttttagaaactttccctccaaattccatccggtattagggtttaatcgaaaaagaggactaattcaaagtctaatctttagtaaccaactttaaaaagtctataagacatggtcatttcataagtccgtaagaaaatcaacaatgtcctaaataaacggcaaaaactagagaatcaccactggtatcaaaaaacgtaaaaccaaatatataaaacgtattaaatgtactatagtttattactcgaaagtcgaaaaccttgatgattcattgaaggtcaaagaagtcaacaataatattgatgccaaattaaatgactgcagtctctttgcgaggttggtgtttggactggtggaccgctggttaataattaactcagcctttacgtgaactcaattctcacctcttctttattacattttcatcacgcttaagctaagcaactaataaattcctaaattaataaacacttcaacatcctcgtttagagattgataccaaccatgaatgtacacatcttaaacttctctcaacaaattcaacatctatatcctcatgataaat

SEQ ID NO: 66170 - DNA, 1335 bp, Arabidopsis thaliana landsberg
taatcatcctctctgttcttcactaggacatagaattaatatttgcatctgtttattgacgatttctgtatatgtcgtgctaagtttcttccgcggtttatttctgcagtggctaggtcgtttctgcaggcgatatcgaaggatgaggcggtggctcctccgcttagagttgttcagatcgaaggactggtaacgtttcttagtgttccctgattttacggttttaagtgtttttcctcgttttctgctgaccgatggtgtttgataaataaaaactctctaggtgaagctaatttgcccattatcatttggtaggaagttgtgatgctgagaattttgtttgctattgtgataggctgtactaaagataatcaaacactgcaaggagtttttaccgacccttgtcactggacagcttcttggacttgatgttggtagcgtcctcgaagttaccaattgttttcctttcccggtatgttgatgaattttacacgcattgtgaggatttaagagcttgttcatgattgatgtacatgtgatttactggaatttgtatcttaaacgaggacaggtcagggatgatgatgaagaaattgaagctgatggtgctaattatcagcttgagatgatgagatgtctgagggaggttaatgttgacaacaacactgttggctggtaggttttttaatgacatcagtctgagttcacttgttaaattttttcttgtgaatgtatttagatctgcctaattctttgttcaggtatcaatctacagttcttggttcgtatcagactgtggaactgattgagaccttcatgaattaccaggtacttttttttttgttaaagaatcctgtctaccatgtcattataacattctagattctggatttggtctgttcatatgttatgctcttcattcagctggaaatttatatgtatagcatggctactctagtgtatgataggtatattggcatgtgtaaaagttgaatgtaaattggaccatgaatatattttctgagactttttttgtccgcaactctgttacaatcccttgcagaatcatgatatgaactcttaagaaatgattcttctgcatctacaggagaatatcaagaggtgtgtgtgcatcatatatgatccctctaaagctgatctaggcgtcttagctttgaaggctttgaagctttcagattcctttatggagttgtaccgaggtggaaactttactggcgagaagtatgtatctcgatccattgaaaatctaggttttatgagtccacttaggatgattgttgtaacgttttagtcactatctttttcaggttgaga

SEQ ID NO: 66171 - DNA, 595 bp, Arabidopsis thaliana landsberg
ccacagttccagcatccgaaatctctaaagtatattactcaggatatcagtaaatatcccttgaatcaagtaaaaccgggtcaaagtcacgaaagagagagaggagacgagaagaaaactgacaagaataatgattactgttgggccaagatgggcctcgttatctgtttaagtgggctgctattatgttagcatgttaagtccttaatctctctctattcctcaattcttcatctccaacctctatgtcttctatttctcacctcctttctgttacttccttgatagaccccaaaacgggttctatcaaaaaccgaaaacctagatgatgaagcagaatcagaatcagaaagacagatacttttaaatgagattgaaaggaaacgattagggaatatttggtccatctgaaagtttgacgagagattgacagtgactcgtgtaattgaaatgaacaaacaaaaaaagagaaattgggcctaatttaatatttaaggcccaaacatttttgcttggtttttctttttcagatcaaagactttaaatttggatgtttctctcacattcaaaatgtccattaatttgattgtttttt

SEQ ID NO: 66172 - DNA, 207 bp, Arabidopsis thaliana landsberg
ataatattttttggttatacttgtaaatttcctttttttttttttaacatagaatcaacccaaaatttaaactaaatttccacaaaattgctatccaaatcgataagctaaccgaaccaagtttttgtatggattttagacatataacctaaccaaattaacgaaatcgatgacgaagacgacgaagagatttcatgagaagttagg

SEQ ID NO: 66173 - DNA, 705 bp, Arabidopsis thaliana landsberg
tttattggatactttccctcatgagtgagaatttgagatgatgaaagaaaaaattactgtttgatttttagacacaattataagtacaaacagaagttatatgttaatatgttaatatgatatgataagaaaacagaagttatatacaaattataaacaaaataggccctttaacaaaaaaaaaaaagttgtaaacaaaatatttggttttcttgtttgtaaaattgttcggaccaacaatttctttttatgtaaagattgttggagataacattttgtttataatgtagctaaatgggaacatggtcaaagctttcggaagagtatctttcgtgttaacggcaattaagagatgcatccattcgtgatatataatacataaaacaaaaacattatcatgtgttataattggagcaatataatccgccaatcttaaccaatatgcatgcatctgtttattacaagtttttggttcaaaaactatagtccattatgtttttatatagggttcaggatttaaaaaatatatattgtttttttttgggttttaatgttaagctaaaatcgatattgctttaggttggataatttagtttacgtgataatctttttataagttaatcaatgagagaaagcgtaacaacttaccagattcatgagttttcaacacttatattagatttatgaagaaaaaaatatttgatt

SEQ ID NO: 66174 - DNA, 501 bp, Arabidopsis thaliana landsberg
attctagccacaggtctcatatacctttgaagctcgtttttcttttgaaactttaccactctgccaaaaaaaattgatacaagtatcaaaacatttaaatatcgaaacagagcatggaattagaaattgcaaaaccggttcacatcgattcaccaacacattcacgggccagtatcaatctcttttcaattttctattttgggccaaattcttcatcctttaacccaaatcttatctttcatgggccgagattttatatttcgtatttgtagttctcatatgcgattttccgatttttttaaacaaattacttgctacttcttaattcttatgatgatgcatcagacaataaaacaacatcactatttgcactatgctcacagattgagggtttttaatataatggccacgtataatatgaccgtttatgtggaatattttattattatttggaatgcaaatggacaaggacaacatagatactaattataaaatcaaaat

SEQ ID NO: 66175 - DNA, 438 bp, Arabidopsis thaliana landsberg
  unsure (1)..(438): unsure at all n locations
aggggcggtcaaggctcagtccccacatcctacttttgcgacttctccagaaaaagaagtggagggggtgaattgttttatacgannnnnnnnnnnnnnnnnnnnnnnnnnnnnnnnnnnnnnnnnnnnnnnnnnnnnnnnnnnnnnnnnnnnnnnnnnnnnnnnnnnnnnnnnnnnnnnnnnnnnnnnnnnnnnnnnnnnnnnnnnnnnnnnnnnnnnnnnnnnnnnnnnnnnnnnnnnnnnnnnnnnnnggcacgagcccctccacgggcagaggaactcttgtgccacacacactacggggtataagcataccccctcagctgtggaaaacataccaagggcaagcactcacacagtgcataacagaacggcactggaaacaccaatggccgtacgacatggatgcgataagataccgacagcgttcacactgag

SEQ ID NO: 66176 - DNA, 396 bp, Arabidopsis thaliana landsberg
taagaaaatatttatgagactagcaacttttttacttattggttctaaactattctaatgctctagattccctatacgtctacttctttgctccaattggagctcttttttttttttttttttttttcataatggaattcgcaacttatgaataaacggctcaacttaaaacattttaagcctttattaaacttgcaccataatctacaaagatatttcatgtttttagaaatcaaacttcaaagtagcaccataatccctaactaaaaccaacaaaaaatctctaattgttacatcctttgttttcaagtgttagccactttaagttatgcaaaagaatcatcagcagcagcaagaatctgagattgaattgcaagccttcttgtcgtctgattc

SEQ ID NO: 66177 - DNA, 1939 bp, Arabidopsis thaliana landsberg
caattggtgaatgtggattggattatgacaggcttcaattttgctcatttgatatccagaagaagtaagtttgatcataaaaagtttcatgtttacattgttttcttctatttgaaatatcttcctatgttttctttgatgagaaaggtattttgagaagcaatttgaactagcatatgctacaaagttgccaatgttcctacacatgcgagcagctgctgaagatttctgtgaaattgttgagagaaacaagaataggtgaacatgcaggctaatgatttttcgagttgtgtttagataaacttcctggattgattttttagtcatcttaatcccatgattcactttcaggttcactggaggagttgctcattcatttactggtagtgcgtcggaccgcgataagcttctctctttcgataaaatgtaccttggtaaagacttccactttttttctattagagactatgcctgtaggctttaactcgcctaggcgtttgtaggatcagatttggtcagaatatcttgaattactgttctggtcttttgttttgctgatgtgtattctatctgcaggtgtgaacgggtgctcgttgaaaacagctgagaatcttgaggtaatgaaaggaataccagtagagagaatgatgatcgaaaccgactctccatattgtgatatcaagaacacacacgccggaatcaagtttgtaaagtcgacttggccttccaagaaaaaagagaagtatgatcaagagtcccttgtcaaaggccgtaatgagccttgtttagtcaggtgagtgtagcttctagattaaaatcttgtcaaatccataagcatatacagtcttcgaacaattcttaggcaatcattttcttctccaggcaagtccttgaagtggtggctggctacaaaggacttggcgatctaaatcaagttagctcaaccttgtaccacaacacttgcaggcatgttttctctttttcggtttcacataatttcatgacagaaatatgaagaactgttctaacgtaaaacgttgtcttgatggcttgtcaatatttctgcagggtcttcttccctcaggacttagattctgcagcagatgctctgctttccgggcaccacgagaccgactagcattaatcgtgacagaaatttgcagtttactggaatcaagatatgttgatacattacaccatttatggattaaaaacattctcaataaaaattacaaacaatctcttgttttctatctcatatattgtcttcttcttcagcctcactagaacaaaacaacacatttataaagacaacaaaattttcatttttggcacctcgagcagatcagtctgaaacttatccggaatctattgtgcttttgctgcttcatgcactaacattcgaaagcacctcgttactctctagactggcctcctcggtttctccttcttctacggaaggaggagacacagtgggtttctctctctctgaagccaaatttagcctcagcgctcgtccttcaacttcctaaaaaccaaaactagtgagtctcaaaacccaaaccacccaaccaaacaagaagggagaagaagccttaccacgccattcattgtagccaaagcagactgaacattttccgctgactcgaacgagatgaaaccaaaccccctagacctcccagtatttctttcatagataactttagcaccaagcacaccaggttgatcaccaaatgcatcctttaaaccttgtgaggttagattccaaccaaggtttcctgcatataccttatgaggactatcaacataactccggttattatcacggattttggttctcattacttcgttctcaccgccaatcggcacctccgggaagttcactttcaccgttctaccaccaatttgctgcaaactctacacacaaaagatacagagg

SEQ ID NO: 66178 - DNA, 1106 bp, Arabidopsis thaliana landsberg
agaggacgtacgtaagatgtcacaattacacgggacaagattcaaatttcattttacttacaaaaatcatatctttctaatttttttctgatcggtctcaagtgcttcttctttttcttacttaaaaaaaaaaaaaaaaaacaatgtgatgtgaaatacacataaaaaaataaaaaaaaattatcagttcatttaacaatttatcatctattagatccattcatataacattagatgatgttggaatcccacattactaaatcaatgtgaaggttcaaataaaaatgtaatcaaatgttgttgtggatctcgttgttgttcatatagttctcgcgacataatttacctcaagggaaggcaaacaaaaaatctattcacaaggtgtaactattttcgtaaactattatagtttttttttggacaaacaacccctactaaaatctatttggtgtatgttttttgaataattgatcctaccaacctaatttttttgaactatatgtgttttttgttgcctgaatctcatcttcccttctttagaactgttgtctatcatcataccttccaacatcttaggactagtttggcaatgttgacaattctttgtgatgtatgacaagtataattataaggaaaaaataaataaacattggacataaaaatcagaaatttccaagctaactatatgaaatttctaggcacatttcttggttcttttgataccatttctttttccttttggacatctggatatcatattgtttgtttgggatactagttcttcccaagtttttaatcttaattagctgctttggatccttaatagaaaaataaacatttcatatattccggaaattagtatagccatcggttttagattttctggtgattaagatataagaagatattttttcaaatataataataaaaaaacaaaatctacaaatcattaaaaaggaaaaaaaaaatcaaatttgaattccaaacattggtctcattactataacataacccaaaagaagcatccattaaattttactaatagtttaataagtcccagaaaaaatcgaacaattctagaaatggtaaaggtatttttttaaaaa

SEQ ID NO: 66179 - DNA, 402 bp, Arabidopsis thaliana landsberg
  unsure (1)..(402): unsure at all n locations
tttngttatattcaatttctggttcattttgttttctttagtctctaacttgcgcatgaaaaaaaaaaaaaactttgcgcatgaaaataaagttctttttcatctcatgcaattaaatagcatttttatttttttgacaaatacttaattaatctcaagcaaatgaaatggataattttttaaagaaaaaattcaccaactacattatgtaggctacatatgccaaaataactaaaacaacatgaagcgaaagcagatcaattcgagtttaagagcaaccgatttggccgtcgatgacctttgaaggcaaagcttgtgtcccatacgtatttgaaacctgaagtagagaaagtgccgccattattgttaagacacgtgtcaccagattntgatagcatctaa

SEQ ID NO: 66180 - DNA, 1150 bp, Arabidopsis thaliana landsberg
tgtaatttaatatgttcacaatggaaatacttttggaagttacgttgtcatttcgaaattccttttctaaagcaaaatccgttatatttttgcttcattcacatcaaatttggtaactaattgaaacggtcctatcggaaagtataccatttaattgacatatagtatacaactttacaatacataattataaataaagaaaactttacaatacattcatagttagcatgcacatgcacaaatgttgatgatgatattgaattctaacgttctagaacaatgaattgtgggaattttattttggggatgtccaaaaatatatacaaacaatatattacctagctatagaaaaagaccagatgcatgaaatttcagcatccaaaaaaacacatacactaaacggtagtaattatatgttatgtctaattctgaataaaatccacaaaatgatacataacatattccaaagtaaaaaaaaaaaaaaaaaaagatattcaaaagatttggttctgaattctgataacataacataacaaatcatgaccattgttgacattaaaacggacaacaagacctaagtactatgttctacctattcttctttcttccatcttcgcaagctcaatttatcctcttatatgaataacgcttagttaattgttggatatattctctccccctggtcaagaaataaggttaccacctcacattgtcccgttacagtacttactgttttctctcaaatccactagattttgagccgtcaatcatcaacttattagctcgtgactcgtgaggttgttgttgatggttgattctcaaataaattactttgaattttgatttttgtagatctttcttaaaaagctttagtgtccagcgtgtttgatatgagcactcaagaaattttctaagccttcaaaaataaccaaccgaccatcaaacaaaaagtaaaccttctaacgtaattagagtaaaccaagagatatttaaggtcatctctagaaatgaatattttcaatcacacaattgggaaactgcaaacctcacgaggccactattgggctaaggaaactgataataatagcccaactacacgagttgattcctccgagtactaggtatatctccttttatagtttttgttaaa

SEQ ID NO: 66181 - DNA, 575 bp, Arabidopsis thaliana landsberg
  unsure (1)..(575): unsure at all n locations
gggaancaactagaagctgaattacattaagatggcttctagaacgtttcatgagacataaccttgcatatattctctccactctctacaatcatcagtatttaaagtacatggctaatacggagtaatcaagcttatctagagaaaactcaaattaatcctgaaaatttcgtagcaatctatgtaaagatgagggtgttaaatgaactggtatctatgaaacttacttatgctgtaagttgcatgttaaggagatgtctaggtagaaaaaatagggagctgaaagagtgataagagggaataataatgggaagtgaagatcctcatgaaccataaaattaagatatgttttatgtgatgcatgacgtgtattacacagattctaattctatgaagaaatgatatactaatttgggcgactttacgttactaatcatggtctgtcccatgacgctaatatacgctggcgtataaccaaagacccataaaaaaatctagaaacaacaaaaaggggaataggatctttttcagctacgaaatacttttttaatctcaacaaagatttaaaactaaca

SEQ ID NO: 66182 - DNA, 480 bp, Arabidopsis thaliana landsberg
cataactctactccttccacatcatggacctgttttcaactcaacctttatatgaggaatgatttccacaagtaacaacttagccatttaacaaccaggaacaaaactaaaagaagcatcaagacttcttaccggtgtgaccataaaatacggagtactaaacaactgaacccatgtgtccgctatttctctactccctctatatccaaccgttgcttcactaaacttctccacagctatctgtataacattataattagtcacagaaatgttaaaacagaaatgaccaaaagtagtcaaatttggatcatgtaacaacctcgtttgcaatgtttgcgcccataagaacacaacaattgataccaagttgcttggaaatgagacttgagatcatacaaggaccttccttcttcacttccattcctttaacaagagatatagcctcaacatctcctgtgatctttccatctaacttcttgc

SEQ ID NO: 66183 - DNA, 641 bp, Arabidopsis thaliana landsberg
taaacagctctcggccggatcgtcgggttcaggcttcttgccgtgcatggccaccgtatccggctaacggaaggccgcctcaagtatcggccagtaccttttcctgaagcacggcggcaagatcgtcttcttcgggcggttcctggcgtttctgcggaccttcgcggcgctgctggcgggcgcgaaccgcatgcagtggcgtcgcttcctggtgatgaacggggcaggcggcctggcctggacggtgctcttcggtggcggagcctaccttttcggcaaccgcctgacaggcgtggcaggacctttaggcaccgcggcgcttgtcggcgttgcaatggcgatcattttgattgccttcctgatgcatcgctacgaagcgcgcttggaggcgcgcgcccggtcgtcgctctcgctgggccctgagcggaagctgaggtaatgcatttcctgctcacggaaggaccctggaatgcctgatgaaaatgccgagagattgattggaacggacaatcacgagttagtcaggtggctgtcttgcctcgcactggccggcctgcgaacgcagtgctggctttggagctgttctcgagtcctggaggcgtaacttcgctggcagctgaaccgaaaccggacgccaatga

SEQ ID NO: 66184 - DNA, 488 bp, Arabidopsis thaliana landsberg
ggtacattatggaagtagagagactaagtgtcagctatttgagaatccacctatagctatctcatttctaacttcacacctaaacttgcatcatctcaacatcttccttctacctactctataactctgggtttctcttacttggtccagtctttccactattgaacttcctagactccttcaggcgcgttgtaagtttgtctatttactttcatttgacgagagcatagtgctaggttatctgcgagcgaatacaacataatgacttcagaaaaaaaaccatcggagcaaaacaggttcctacttagtgaaaccaaacccacataatacatatgctaaattctttacctgtattttttactgctattacttcacctcattggatttaacccctggatcataaagctccatcgggagtttactctccagaaaaacatctgaaaaaaagattgctttctcatcagaaattgtatttgtaccaaaaacct

SEQ ID NO: 66185 - DNA, 252 bp, Arabidopsis thaliana landsberg
aaaatgattgggaaacgatgtcatgttaagccagattgtacttattatctaggggaacaaacgctcgagagagggctaattttgaaagtccactggagcctaccctcaaaggacatggatggacgtaaactgaagccaatattgggcagaggtagagaaaagttttagcagaggaaacataagtggaggctacggacctgtcactaaaccatatggtactttagtgaacaaaaaccatggccacactgaggg

SEQ ID NO: 66186 - DNA, 452 bp, Arabidopsis thaliana landsberg
ataaaattaataaaagactagctatctggtatatgtttttcacgtctatatgtcatactttataaaaaaaaggggttattttgactaacagtgtgacaggtttacatgaattacaataatatggtgacaggacttgatatttaaatttgcttcgcgatttactaatacatgcaagattttataccaaagataaataaatagtatagaggaatacctaaaaataacacgactttgttttccataattttttttttaatgaatattattaatcttttagtaagacttccaacaacacatggagaaaaactttataacagaaaaaattgattgatttgagatttcctaaacaatttggatcatataaaataaattagtagaattatcgttgaatgtgtcgaatacgataaaacatgtgagattctgcttattgtgaattaacatttatactatgc

SEQ ID NO: 66187 - DNA, 528 bp, Arabidopsis thaliana landsberg
gtgctatacagccttttcatcaacctacaacttgagctatactttgacactagaaacaatggcaatagtaacagagagaacaactttacgaaactatatatttttaaagattaaaaccttgtatgaaggatcatctgccttatttgtatgatccggtttatataatgcatttgggacttggtgcttggtgcttagtgtaatagtaatccattaaagatgtcgggtgtattattaatggaagttttgtgagctaattcttttttttttttttttgggtgtatgttacctatagcttatctggctagggtactatttaactttcttgttcttatgtgcgagttgtatataggagactcgatgcttgattagacggcttgaggtttatcatcctcaactaggtgcgataattagttgttttgattatttttatcgacaatctagttttaaagttaacaatgactagccaatgggtaaaatatattttgcattctggaagatagagattcaataccacatgtcctggtctta

SEQ ID NO: 66188 - DNA, 514 bp, Arabidopsis thaliana landsberg
  unsure (1)..(514): unsure at all n locations
caccaagtggaaaatatggggtaaagaacaattttattttaaattttgaaaacgatattaaaaacttggagccttgccgtggcgttaaccgcactatcgcaccagggtcaggcacaattcagcatgggcttacagggtggggtcagtaccggtaccaccaggatcgaccaaataggtgccggttttaccgatnnnnnnnnnnnnnnnnnnnnnnnnngctataaagcaggcctgtacgccaaagttaagctcggtcctttgtatgttcgccctgccgcactgtacaactaccgttacggtgacgtaaattacgtggacatgaacgggacttcacacaccagcagcttttccatgcacaagatcgaagtgccgctgaccgtaggacttaagcttattggtcccctgcgtattgaggctgctcccgtgtacaattacattatgtctgttacgcatcaatacaacgattatactgtagaccttggcagaaacggaatgggatacagggcccgtgtca

SEQ ID NO: 66189 - DNA, 719 bp, Arabidopsis thaliana landsberg
  unsure (1)..(719): unsure at all n locations
gtttgatattacannatcaaaatatttcttagaaaaaaaatttattcatttctaataaaaagttatatcaagataggtcatctcatttaaatatcttaaatctttccaaattacttctaaaatatttttcaaactacttaaatctggtcacttcacctaattgttagataccaattactattgttcttgttttggtatttgcatatttttatacactaattatttctcatctttgtttgtatatgcacattctatggatactactactatagtcaatgagtcattaatgtctatatgcgcagaggccgttgacacaaatttggtcaacacctctggattctttcaactaccaaaattcggcaattatggaggattattatttcttaggataaatatatcaactgggaaatgataattaaggacattgttaagattttcgtcgattgtagactcagcttgtgagaagcaagtagccatgtgaacgaaaacaaatacatccttttgatgataacatgtataaaagtctccattattacgcctaaaaggataattagttatatatatgtaagaatgtgatcattgcaaaagcgtttaatttgcaaaatctacaactacaaagggagctttctagtgagatgatcattgaaccttaccaatacttaaagaatacaaaagagtcttaattgtactatttcgatatccgatttttatttattttt

SEQ ID NO: 66190 - DNA, 412 bp, Arabidopsis thaliana landsberg
ggcgaaagcatccccttccccgatcgaatggctacgcatttcgttgtccgcgcgacgcgcttttgcttcttgcgcagggccgattgcatagacctggtccgcacgattgaatatgtagcgcaagacgagtcgagaaatgagcgagagcttgtcgagcctttgatcggcaagcgtgatgagaagtggcaaaccgctcttgcgtttgaagaatatcccggcgagacccgcatagctcgccatgagcgaccaggcaaagagatagcggtgcttcttccgaagctgcgcagcgatatcagatccgtcgaacggcaggacatatttatcgagcgatgaaccactcctgacccggtggaccgtcacgtttgcaagcggcgttttgaccgggcgcacaccagtcggaaaagctgtgtcg

SEQ ID NO: 66191 - DNA, 598 bp, Arabidopsis thaliana landsberg
ataaaattgcatatataacatgtatatacttcttttatgagttatataaaaagaatcgatcattttttagtagtttggcaatattacacgatagtaaagtcatatatattttgttaaacatttttaaattcttcgacctaaattccatatttcttcctatatatggacttttaaaccgtaacttcattcccatgggatgatgtttaagccctttcgttcaatttatcggatgttttttttactagtaaactcggatacaaaatgtcatttttaaaagaataccagtttatttatgatatactcgtaattcataattcataattcatataataatatgaaggagagaaactagtcaagtgctagttgcccgaggagaagcagagcctcatgtgatatacacatgacctaggaaattaaaggaaaagtggtatatacacatgacatacttttagtttttattacataaatttatggttttcacatgaatctataagtcagaagttatcaataattaaaggtacacttttgcagatccagaaagttaaaaagctcttattgattttaaattactgtatatatctaagaatgaatgctatta

SEQ ID NO: 66192 - DNA, 433 bp, Arabidopsis thaliana landsberg
ggccatcgacgagaattgatgccagccacggccagctcgtcacaaccgtgtaggagcgcaccctgtgctcaatttgttctcggctggatatagcgaaatgccttccgtgcactgggcacgctcctgcgagcgatatcgaaaaactttcgtcaccctgccgatctcaaccaccgaaggactgggattgcccatgaggagacatggggctgtctttgatgcatgccgacaaactgatgatcgccgagcctgttgctgccttctaagcaatatagaccagtctgccatttattgcctgactgagtctttagagcttgaactcggagttaagacgaaatctttgaaacctcaatcgttctaccctgcacgatgcaacctccctacctcttgactatacacaacgtgtgccagatgttttacagacattgatgacgtg

SEQ ID NO: 66193 - DNA, 560 bp, Arabidopsis thaliana landsberg
gcatcccgggcgcgagcgacttcgaggtgctcccggtgtgcgcgacggactccggagcgagtgcttgcttggcggcgaccggggaacggtcataccgctggtctgcgtcgtagtcgtcctcgatgatcaggccgccggaccgcgcccagccgatgagttcggcgcgtcgttccgccgccaggacgacgccggtcggaaactggtgagcgggtgtcacgagcacgctggacgcattcgtgcggcgcagcgcctccaccacgagcccggccgggtcgacgggcaccggcgtgacgcgcagtccccagtaggacagcacgtcggaagcgccggccgagcccggatcctccaccgccacaacatctttcgcagaccgttgcaacatctgcgcaagcaacgcgaatgcctgggcgacgccgttgaggacaagcagctggtccgcccgcacccgcagtccgcgggtgcgtgtcagccagccgcctagcgcttcccgcagttgaggatgaccgcgcgggtcgccatacccgagctggaccgcgggagtgtcgctcagcgcggcacgc

SEQ ID NO: 66194 - DNA, 2895 bp, Arabidopsis thaliana landsberg
ggcttctccagagcattatagtcatcaatacttgcacacaccctaattatacttctaacaaaatacattaaaataaaggtaagctcgagagctgaaccttgcagcataatagcatcacaggagaagtgtcaaaaatagtatcaggtctatcgggtctgtggtgtgaaccacaagactaaaaagaaaagtttcctatgtatgtaagaaccctacctgtgataaaacacccagcatgcttgtggcagatattcgaacttggtcatcctcatggtgcattagatcctttaggagatcaaaaatgcgtactctaacagcaggcccaatgctcttcccagcatgctttattacacctctcattgcagataggatggcctcacgtaccccagaatctgcagcctgatacacaaaacaattttatgaacaattaagaactagatagactgataaaaaataactgcattagctgctgaaagaaaatgcaacaagtacctggaaacttgtcatcaaatcaccaactaatgggtcaatccttgtgcttaatgcactaagctttcccagggcaaccgcagcactagaacggatggtcctacagttgtaaaggtattaaaccgaagtacacaagaacaagatattgacaaatggagcatatgttagatgttcttacgaaagaactccattttataggaaatgtattccatgtgtcatgtaaattcaacagtacattacttggaaaagaaaaacatgtgagagagctgactataaactttaagatgaaaaatttcacactaatctactccagcaaggcagatgtagccttcttctaattgaagacatataaaactcggtaaaaaggtatcatatcaaaattaatatttgtgaatttcattcatgtatctctttaattgtaatctagtctcttcgattaaatccaaactgtgtagaagtagttctttcctatcactagaaattcataaacttcactttcactcaagttgacacaaggactaaccttgtagagtcttgcagacacttgacaaatgttgtttgcagttgagggaggaatggctttagcgccatcccacccctttgtattaggatgattaatgtagccaagatagcacttttgacttgccatggaaaccggtctccaatgattcgaataagaggcctgaaataataagacaaggtatctcagaacaatatacaatgattcataataaaatttgatggtaattttcagtcaaaaatcttcttaacaccatgcacaatcacttctaagcctaagaaattaaagcttgtttctggacctttgcaattcagaacatcaattcatccagataaaactatactacccaagcaaagtaaaaaaaataatacaaatggatttgtaacagaagaagaagtatcgacaaaaggaatgaagattcacacactacataccctgttataggtatgacgaactccttcaaagcttgctcgctagtaacttcaataagttcaccaagaccaattgcagcttgctctcttagttcagcagatccacttattagaccctgaaatcaaagcaagaaaataatgaaggatcgagctgagaacgaagtacaaaactgcctgattgctcttgtacgtgcaaacaataaaggggaaatttttttctcattctttacaatgcaactcgcctttgggagtaaaaaagccaatgtgatattagctcaagccacccagaagctactgctaatacacaatttaaatgatctgatttaaggtggccttaagcgctagaaaagtaaggtataaagaatacctgtagaaatactggaagtaatggcttaagggacttggggaggcatagaccaggaataacaacatatcctccctgcaattcaaataagtatatattttagagatagtagtctacagaaaatatcgattcatccgtattatgaacgctcattaatctcttatatagtgacattctttgaaaatagcaaaaagttcaccttccgcttcgtgcgctctttgtccctagctgtagatacagcatcacgtacaagttttatatatgaaggaagtacttcctttggaactgaaccaataaccctagccaaagcttcccaggaaacctgtttaaaagaaaataagttagacataacattgcttcaattcttttctttctggtcaagtagcctaccgcaaccgttgttgaatcagaatcactgagcataacaatcaaggtagatatcatgtttggagcttcatcaattaagtaaagcttgctactcttgaagaagtaaccaatcagatatgcggaacttcttctaattgaagcctgaaaacgaaatacaaacctaaattacttacatgctaaaataaaaatactttatttaaaaaattacaaacaaacctgactatcagacactcctttgagaagttctgataatagagtctcaacgccttcttcatcaatgacaagcaccactctctctgcggcctcttgtgccaattcttggacttcctgcaaaaagaaagagaatcttaaccatagataacaatagctttcatacaaatataagagtgaagaaaatcttaattttttttaccttgttttcacctcccattgcagagagcaaagcaggaagtatggtcccaagatgcgtgttaaaaccagcaccagcaacctcagctaaggctcccaaagcatgagcatttaaggcactatacacatcatttaaacgtttaagacagccagaaagtatttcatcatgcttgatgatgcatatctatataacgagaaaaaagaaacacatacgagagaggaagatggacaagcttgggcaagatgtgtggaagaacagctgctgtcctaacactgcaattccaaaagtaaattcagta

SEQ ID NO: 66195 - DNA, 404 bp, Arabidopsis thaliana landsberg
gttctctacagagctcatgagaagtcttcttcttcattggaaaactctttcctttaaatctccaatttgccaaagcaaagcctgtggtggtctttgacagacagacatctaagttcatgtcccaatacattgtctttctctcctcctcactctttcattgaatacccaatgttcttatcatgttgtctaccattgaatatatatcaactcaatacataattcacatccacaaccatgtacactacagtatttctccttaaaaaaagatgtaaacctaactttgtctagtttcatactgctgattgtattgaatcacatgaactgttttgcgtcaacctggaccacattttgaacacactaaggatcagaacaccaagaggtgtctcttactgaatgtctttgaa

SEQ ID NO: 66196 - DNA, 754 bp, Arabidopsis thaliana landsberg
aaagaaaaaaaaaaaagcaattacactctcttttatttttgtcaactcttaattccactatattacaatatgaatggtttttgatgattaattttgctgaagactgaagagagtgaaaatattaaattctttcaaatgtttttctagatattctaattagttcttaaaacataattttagctaccatttcatctaacatattctactacaattcactctctgtattttattcatctatcattcttatactaaaacttatctatataaaattttcttggtaccccttttcttcttttttattcaatatattattaggcatataaagacacaaaaggaaaaaaaaaaaggattaacatcaccattagtaaggaatgtaagaatagatgtacaagtagaacgaataaaaggttgacacattaataaaaaaacgagacacgattaacaacgatagattataataatgctaaaaatactcataaagagcgaattaataacaacgtcgttttatggaacaagaagagaagaagaaggacaatgagccacttgcatgcgcgtagggacgatacataaaacccgtacgtgtgaggtgtggcctctctatctcttgacttgtccaatctggtgtactaatgtcttgaggagtgttactttcgtagttatttcagattcccgtatggggtaatggatgtcgttttcaacttattcgaccggggttttggggtgggaattggttttttttccctttaacccttta

SEQ ID NO: 66197 - DNA, 582 bp, Arabidopsis thaliana landsberg
ctgccttgtctcaacttatagtatataccaaacactttctaaggtaacatgagatatttcacatccttttctctcttattcgtttctgagattcccttcttgttgttgtagccatggacaacgaaggcataggtctttacccgcttcatcgttgcaaaaccattcaccttggttcgttccgtacaatccggatggatcatcagagataaatgtgtggttcttattctctctatgttttctgatgggttttgtttttgttttggttaggtgagacatgctcaagggattcataatgtggctggtgaaaaagatcacagtgcttactcttcggaggattactttgatgctcatcttacccctcttggttggcaacaggtttatctctattatctctgttctgttctgttctgttctgttctgttctggatcttaatgctcttgtaacgaccctgttgtcatcatcatctctttatgacacaacaggttgataatctaaggaaccatgttcgtgcagctcaactcttaacaaggttgaacttgtcattgtttcccctatgcttatgtaaaacggtttacaatgtt

SEQ ID NO: 66198 - DNA, 9057 bp, Arabidopsis thaliana landsberg
aggcatacaaatagagtatagaggtagtgatatatttgtttaccttggacattattgactgcagcttctctttaccatttgacgatctgaaggcaccaatgatacaaacaggagtgttctccccacaaatggagtcaaaatttggtcttgacagaagaggtatcttttctgaggactcgttaggggcttggcccgcctgactcttagaagagaccttcttgttcttcttctctaatccttcaagcaatttaccaagttcctggacagctgatttcagatttttcacagtgatacctgttttcaagacttgcttctccccattcgataaccaaccaactattgccggaaacttgtctacccccaacttttgtatctttggatcagaagtatcatggacctacaagatcatgagaaaaaaatactttagctaaaaagatttcatgtctaaggaattctaataattaagttcaaatttgctgactcgtcattaaacgtggaccagggaaccaccccataatttctacgaccatcagactctcgcagtaacaataattgtaggaatagtgatgtaagtggaaattaaagccaaaatataacaaacctctgtgttgtaaaagacaaatcgtccattgtacaagccacttagaacccgccagatgacaggagtgtctttctttgttgacagaagcaaaactttaggagtcttttgtgagctaacggcagatacatcgaatgtattcagatcaatcttttttgagaatctcggtagatgttcctggcagaagcttttcaccttctttgcaacaagctcttcagtatattctgctaaggtagctttgccacttgatgtgtatgaataaacaaacatccttggagccctacgaggaactatgcctagttgtttgcaaagagaggattctgtttcacaatttaatcgcccaacctgtaaacataaagttaaatcacgtaaacaacaaaagaaactacacttcttcttttaagaacgaaacagaaaacccaaaatcaactaacttgacaagcatatgttttacctttaaagctccttgcaacgactcagcaacttcctctatgatggattcatggtactggcttcccctctgagatggaagatacgacaacaaaagccaagtcatcccttggtccacaacgtccttcttatagacctgagagtttatggttttgatagctgctacagtactgctctttgatttagattcagcattcgatgagctaccaaagccaccaaactgctcctttcctttagaactaccgcccgaaaacatggaaaagatatcatccataccaaaaccaaaggagctttcactaggaccgccaaacgagaaagaaaacgatttggaacctcccccaccgcccatattttgccaaccaccaggccctccaaagttgaaaccaccaccacttgaggagtaagaatacccaccattacctccgggaaaccccgaatcaaatccaggctgtcctttctcatctccataaagatcatagtttttcctcttctcttcatcagataagatctcatacgctgttacacatagataagggtttaaacttgtcaaagccagatcaacaaaaattcaatttgtgccacaaacacatggccatagaacaagaataatcttataatatactaaaagattcgattacaggacacatctcctagggaaatttgatacctaccattattaatctcagcaaacttctcctgagcacccttatctttgtttttatctggatgatatttcagagattgcctgccaaaaaaaatcacaagctacatgagtaaactatttgttgatcatcattcgaattattagcttaatcagcgactagaaacgaagggtgcttacttgtggaaagctttctggatttcacgctgctttgcatccttagatactccaagaacctgaagatgcattcattagttaataatgtttataatcaatagcaaaaactactgagcaaaacctaatatatcaaaaatccttcttttctataacacccacaaatttgtcagcccaaacttcaatgagaaaggggacaatcaaaagtaatcattatttccggccccaatcaaaagacttgtgaatggaaagaaaacaagatgaatcacaaaccgtaccttgtaaggatcaacgctcttcgctttcacattcaacaacaacaatgtcgacacaagaacaacagatatcgccaatcttgttctcaccatcccgaaagtacaacctctcaatctttttctcttttattgttttgttgtcaacgaatcttcttcttcctcttctaagcgtgtcttattcacgaaactcaacgcttcgagaaaaatcgagaaggacatcattaaataggttcgcagggtttaaaggaaaaaaaggaaatttctcgaatgacatatatattttaattaatttagagtattccccatatttaatagtcttacaaaagacaccaaaattgtcaattggattaagaaattggtaggggcaattagtcacttcaaaaactagcaggggttgtttcgtatttcctgaaaataaattccggttgcttcccgttctcaatttaaggcgggtatcatacgtggcaaatttgatgcaatcccacgtatctccaccaataagattttagcaaacacgagcgatcgttgtttatttgcgttcacgcgccgttaagatcacgcgcgattattaatttgggcttatttattataggcccaataatctgtagttagcccaaaacgaaagtctccggttgggtgatcggaatccgatcagagcgacggtaagtatttcttttttcttcgactgttaaaaaaaaaagaggaaatcattttcactagtgacattgttacgtttcaagagcttaagagaagttgaaagacggaggaagaagaagacgatctttcttctcttctctgtctctactagcttcgcgttttccttccttcgccgtgagattttatcgtcgtcgtaacaaacctctagggttcatcctcgacgtttccttggttaattaggtcaacaatatcgtcggatctgatggcgttatcggcttccgatttgccggcgatgtacacgctattagctaattcaatgagcggtgacgagaccgttcggcggccggcggaggcggctctatctcagtcggagagtagacctggtttctgttcttgccttatggtagcgtttctaatctatgtgtcttgtggtttctgcaaatgtcagcttgattttactcgctcatttcctctggtttggttgcaggaagtaattgcatccaaggatttggtgtcccatgtggacgttagattaatggcctcagtgtatttcaagaacagtatcaaccgtcattggaagagcagaagaaattcatggtaagttcaagttgtttccggaatcggcaattctacttataattctttttagctggctcgtttagattcttcgctctgcaaagatactaccctgtatgttaggccttgacactctttctggcaattcttacaggagtatgagcaacgaggaaaagagtcatctgaggcagaaattgttgtctcacttgagagaagagaactaccaggtgttgtagcatttacttttgatttttttccttgactacaccatttgaggcatatactttgtaagcatatctatctgactttgtttgctttattgcagatagcggaaatgttggctgttctcatatcgaagatagcccgttttgattatcctagggaatggtcagcattttcccttcttaattcatattaactggacactatcttccttgatttactgagtttatgcattgcgtgcttcatgatatcaggcctgatctcttttcggtactagcgcaacagcttcactcagctgacgttctggcttctcacagaatctttctgattctttttcgaaccttaaaggaattgtctactaaacgtctcactgcggatcagaagaccttcgctgaggtgagtctgctactaacatcaaccccttatcagtttcctttctcctcttgaatgaatttattgttggaccaaagcttcgttttttgctttagttaaggataaggtccagtttaatttgttggcagatctcgtcgcaattcttcgactttagttggcacctttggcaaactgatgtccaaacaattctacatggcttttcaacaatggttcagagctatggttcaaatagtgccgagcagcatcacgatgagctttttctgacttgtgagaggtggtttttatgtttgaaaatagtgcgccaactgataatttcaggatttctaagcgatgccaataatatacaggtagatacactatactttttcatgaatctttttagttcattatcacattcaccttcagctatctcccttctatgaacttgtggtatagtttcgccaaatatgtgttccgttccccgcactttccatttcttctgctatcttccaatggttaagttgaaatcataaccttaatagattggttgactacatcgggatagagaaatctttcttgctctccggcatatgctcttcatgcagataaaagaatatacagctaactcgtttctctcaggagatacaaccagtgaaagaagtctctcctgcgctcttgaatgcggctcaatcctttcttccatattgtgagtttttttgtgtggtggaaactctttttcatgcatatgacctgtcagcacacatatatatgtatgtattgctaacttgtgtggagcctccatgcagattcatcttttcaaaatcgagatcctaaattctgggagtttgtaaagaaggcatgtgtcaagctgatgaaggtgttaggtgctattcaaagcaggcatccattttcgtttggagataaatgtgctcttccagttgtagtggatttctgcttaaacaagataacggaccccgaacaggcattgttgccatttgaagatttttttattcagtgtatggtgatggtgaaatctgtgcttgaatgtaaagaatataagccaagtcgaactggtcgtgtgatggatgacaacggagatacatttgagcagaggaagaagaatgcttccaacacagttggtggcattgtgtcgtcacttttacccaatgaaaggatagttcttctctgcaacgtactagtgagacggtaacactcttaactaacagtaagatatgtgaattcaaatttttgggtctctcttagttaccaaactgtggccctgttatattcatattatttcatgccttagttcttattagttaatttgataatacataaatttcaataccaatgcaaaatccaaaacataatatgagctggggcaatcttgtggacacataatgatctagttgctgtacatctatgtatctctggtctcaatctcttcttgctgcgtgcatggaataaatgagaaggcaatgttactgtcggggcctagtggagctagtttgaaaattattgcatgcattaagttcatttattgtgttgtgaactgtgatggtgtcatggtcgttgtatgaatgatgcctggaagaaaagtttactgaaattaaccatcgacattccaacaggtattttgttctaacagcaagtgacctagaggagtggtaccagaaccctgagtcctttcatcatgagcaggacatgattcagtggacagagaaattgaggccttgtgctgaagctctatatatggttttgtttgagaactacagccaagtaagtagcaaatagtcttaggcacttcatcctgttctgaaaagaagtctgctaattgatatagatatcattaaacgctataactgatgcgtattccatctgtctctataattgtggacagctgctaggacctattgttgtgtccatccttcaagaagcaatgaataattgtcccccttctgttactgaaataactcctgcactgcttcttaaagatgcggcatacgctgctactgcatatgtctactatgagctctcgaattatcttaatttcagagattggtatgctcttgatcttctaatgtctgaatcttttttccatctgctctaaacatcttgacccttcattttgctagccagcagaatgtgacaaaagttttgattagtcaagtaattattgtacccttcttaatgatcggatgattggctgcaggtttaatggtgctctatcccttgaactctcaaatgaccatccaaataggcgtatcatccaccgaaaagttgctatgatattgggacattgggtttcggaggtactgctgtttacttgttttacaccggctttaccatgtttatgcagctaagcttgacaaggctttggaggaaatcacatcttatctttttttctaaaagcatcttaagattataacataatttgcaaattgacataatatcttgtccataagttgagtcaatgagggatagccatctaaaagcagaattgtttctggttatttgttacaaatggctattagggttagttaccctgttggtttgtgttctcttctctaccctagttttcgtcaattagattttggttgaaaaatggttggctaatggtaaatggttgatgattacaacctttcagattaaggatgacacaaaaagagcagtttattgtgctttgatcaaattgttgcaagacaatgacctcgctgtaaaggtagtctcatcttatctcatctttgtttcttttatctttctgtcttgcattaagggcacattctctcatttttttctttatatgtattggtgacctctgagatcatctgtttacttatgtagctggcagctagtaggtcattatgcttacatgtcgaggatgcaaatttttcggagcaaagttttcttgatcttcttccaatctgttgggattcatgtttcaaaatggtcgaggtagttcaagagtttgattcgaaggtacttgatgtagctgcctcaaattcattatagcactccattcttgccattatacttccttcgatgactcatacaacatctaactattctcaggttcaaattctgaatttgatttctactcttattggccatgttagcgaagtcattccgtacgcacaaaagttggtgcaattcttccagaaggtatactagctttctttgtggatttgtttttttgttttttcttttcttggtccgcaatttatagctgactatctatgtggttgacttaagaacaggtttgggaggaatcttctggtgaaagccttctgcagatccagcttcttgtcgcactgcgaaattttgtgattgcacttggttatcagtctcccatttgctatagcatactgctcccaatactccaaaagggcattgacataaatagccctgattcactcaaccttctggaggatagcatggcagtaagtttccatatcataacatgtatacctttcttttctgctgatacaaatgcgctatatattaataacactgctctacatatgcagttatgggaaaccacactttcctatgctcctatgatggtgccccagctattagcattgtttccctatatggtgaagatcattgaaagaagttttgatcatttacaggtgagctttttaagttttcaaggagttgtttgattcattaatgacctatacatgtgtgtgttcagatttacttcaacatgttacgtcttgagacattcaaatgaccatatataggttgctgtcagtatcatggattcgtatatcattttggatggaggagaatttctaaatatgcatgcttcaagtgtcgcaaaaattcttgatcttatcgttggaaatgtaaatgataagggtttactctcgattcttccagtgattgacatcttagttcaggtgcgtataatttcccattttcccaattggtcgtatccttattgtgatggtgtttaagttccagagatacttattcttctgttaagtttgtatctagactgcatttatttttgtattacatagcctcatctcttgggatacatatatattgaccagtaatgaaacttttggcatgattacactggaattttttgtcatgactctctataaatgtgttgcaaattacgccaagtttaacttcttgatatgaacatgtgcttgtgtattgagcagtgttttcctgtggaagcgccccctctcatcagcagctgtttgcaggtgaatttttctagtcttcttttgatggatgcaaaatccattttcttccttaatgcatctgatggagttggtttgttcgttttctcgcagaaactggtgattatttgcttgagtggtggagatgaccgtgatccatccaagactgcagttaaagtgtcttcagcagctatccttgcaaggattctggtgatgaacaccacttacctggcccagctaacatctgattcatctctttcagtgttactccaacaggcaggtgtcccagtcgaagacaatatactcctttgcctcatcgacatttggctcgacaaggtcagtgaagaacacatcttgaacattactggttgttcgaatagctttctagactattaactttcagataatggaatattaacttgtttcatgtctttacatggtctttttcttgaatcctaagcaatatctcattgtcaaactgctctacatgttgaaatgcatgtttctttttcattatctgacgcactttagtcttgcatctactcgtgcaggtggaccatgcgtctcccatgcaacaaaagacatttggcttggctctttccataatacttacacttagaatgccccaagttcttgacaagcttgatctaatactaaggtacaggtttgcacagtcgagaattaacagtttgacttatgtatctttgtgatataatttatcgcgtttctggaaacagtacatgcaccagtgtgatccttggtgaaaacaaagatttaacagaagaagaatcaaggtcagatactttttttaattactaacattacataacattagtaaattaattttaagtgacttttttatttgttattgaa

SEQ ID NO: 66199 - DNA, 1847 bp, Arabidopsis thaliana landsberg
agtatgaatcaaataactgcatgaaaattttagatcgcattttacaaattttaaactaatacactatattttaataaacttttaaaaaattttaactgaataacaacagattctatataacatttaaatcacaaaaactctatttaattcgcacacaaataacatcccactgtatatatcatcacgtgcttgcccaaaaaaattaaaaaataaacgagcccataataaatgggccttgaacagattctaagcccaagtcaattaacgaaaaataagagacgaaacgaaaacttatgactttgtttaccagtcttcttctgaaaacagaacttgcaaatgcgagaaacatacaatctctgaggttcacttgtcactattagatgaatcagacgccatggaagttcaaaacttttcgagaccttctactgaaatctgtagcggagagagatctcttcactgggaaatcacttcacgcgctctacgtgaaatccattgtagcttcgtccacttatctctcaaatcacttcgtgaatctctactccaaatgtggtcgcctttcctacgcacgagccgcgttctactccacggaagaacccaatgtcttctcttacaatgtaattgtcaaagcttacgcgaaagattcgaaaatccatattgcacgccagttgttcgacgaaattccccaaccagacactgtctcttacaatactcttatctcggggtacgctgatgctagagaaacttttgccgcaatggttctgtttaagagaatgagaaaattgggatttgaggttgatgggtttacgttatcagggttgatagcagcttgttgtgaccgtgttgatttgataaagcagcttcactgtttctctgtctcgggagggtttgattcgtactcgtctgtgaataacgcgtttgttacgtattatagtaaaggcgggcttttgagagaggcggtatcggtgttttatgggatggatgaattaagagatgaagtttcgtggaattcgatgattgtggcttatgggcagcacaaggaaggagcaaaggcattagctttgtataaagaaatgatctttaaaggattcaagattgatatgtttacattggcaagtgttttaaatgctctcactagctacgaacatgtgaacggaggccgtcatgtccacggtaagctgatcaaggctgtatcataccagaactcacatgtgagaagaggactgattgatttttactcaaaatgcgggggttgtgatggttatgtatgatagtgagaaggtatttcaagagattctatcgccggatttggttgttttggaatacgatgatttctggatattcaatgaacgaggaactctctgaagaagctgtgaagagttttagacagatgcaacgtattggacatagacctgatgattgcagttttgtctgtgtcacaagcgcttgctcgaatctctcctctccttctcagtgcaagcagattcatggcttggcgatcaaatctcacatcccttcgaatagaatctctgtgaacaacgcgttgatttcgttgtattacaaaagcggaaacctgcaagacgcaaggtgggtatttgatagaatgccggaacttaatgcggtatctttcaattgtatgatcaaaggttatgcgcagcacgggcatggaacagaagctttgcttttataccaacggatgctggactcgggtattgcgcctaacaagataacctttgtagccgttctttctgcttgtgcgcactgtggtaaggtagacgagggtcaggagtacttcaacaccatgaaggagacgttcaagatcgaaccagaggctgagcactattcgttat

SEQ ID NO: 66200 - DNA, 174 bp, Arabidopsis thaliana landsberg
  unsure (1)..(174): unsure at all n locations
agaccnaaacacnaaaganaaacccaacacccnaaagcccaaacccngaaagcgaaccccaaaacccaaaacccgagacccaaaacccgaacgcnaaaaacnaaaccncaaaacccaaaccccaaacccgaaaccgaacagccnaaaccngaaaaccgaaacccgaaacgcaaa

SEQ ID NO: 66201 - DNA, 353 bp, Arabidopsis thaliana landsberg
tctcttatgtattgaaatgtgcatattcttgatgtgatattgatttttatgtgtaggcgaaatgttgttcggttctttggagctcactacatggacaacatatgagatggtttatatagctcgacgacgtttcacattgtcaagagcatcaaacacatgatccatgttagacataaaaccgctcttacttctcttctacatccatcaccagagacattcgagcacctagacactggcgtgagacaacgagcaagccacgagggccacccaaggcctcgaggatacatcctcgagtggagatttggggaaagagtaacacactctcacactgatcactctagaacacacgccca

SEQ ID NO: 66202 - DNA, 2414 bp, Arabidopsis thaliana landsberg
ctcgaaaaatactatatgtagtgagctcatgtcctgaagttttactctcgattttcatgtagaagttcttttctctgtgactttgtaaaggacattaaactagacgctggatgcttacgttcttttgtaaatcttgaaatccagggtcaattggttcctcatcctgaaaccttcccatcaggaattaagcttcttgctgattatgttcattcaaagggtctcaaactcggtatatattctgatgctgggtaggttaatattcatgtacctattttataagctcgatgaagttatatgacatgatctcatgtcactgttttgaatattgcctctttcagcgttttcacttgtgaagttcatccgggatcccttttccatgaagtggatgatgcagacatttttgcttcttgggttagttttcagccaatgttgttcaaaatttaaagtagtcaataacctttttaagtgaaccttattgaggattatcttgtatttctaattacaaacaaagaccaatatgtttttgatacttggtggtatctttgtcttggtttctcattggtagccttgatttccagggcgtggattatctgaaatatgacaattgtttcaacctgggaataaaaccaatcgaaaggtttgatctttatgatttgatatggtaccttttactcacaaaatatttatggtataattttctgaatcacttgatacggattctggtttccacattccagataccctccaatgcgtgatgctctaaacgcaactggccgctcaatcttctattcactatgtgaatggtacacaactacacgtccaaaatgtcttcacacaggacgagttaatttgaaacccacagcattcttccaagttattaatttgtattttgctactttctgtaggggcgttgatgatcctgccttgtgggcaaaagaagttggaaacagttggcgcacaaccgatgacatcaacgatacatgggcaaggtggatatctcttagcataatcttgtgatttgtgtagatggacattaagttggtaggaggggaattactttgattgaatcatgatctgattgttttactctctttttctgttgttgtttatgaagtatgactacaattgctgatttgaataacaagtgggctgcatatgctggacctggtggttggaatggtaaacaatcatttaagatctcaaaaaatgttttccattggagtaacaactattacatttgaagattgatcacatttgtttccattgcattagatccggatatgttggaaatagggaatggagggatgacatacgaggagtatcgaggtcattttagcatttgggctttgatgaaggtatgtaactaattcatggtgttttctttatatcctagatctctcatctcatccccatggttctcttgcaggcacctctcttgattggttgtgatgtaagaaacatgaccgctgaaactttggagattttgagtaataaggagattatcgctgttaaccaaggtgaactttcaatattcttttacttgttagcttcactgcatacatgattttccacaaatccattgtccaagaccgagaatctgagaacatttctggttgcagacccacttggtgttcaaggaaggaaaattcaagccaatggagaaaatgattgtcagcaggtatgaattgggagtcacagaattatcaaactcatagagaaagcagaaaaaacaaactcaaggactcaaattggtgataactgtttcattgcaggtgtggtcaggacctttatctggtgaccgtatggtagttgctctctggaaccgttgctctgagccagcaactattacagcatcatgggatatgatcggtcttgaatctaccattagcgtttcagtaagagatttgtggcagcacaaagatgtaacagagaatacttctggctcctttgaagctcaagttgacgcacacgactgtcatatgtacgttctcactccccagacagtatcacactctgatgtatagttctttattgtgaggcattcaaatcccaaagaacagagattgcctttgtgtttctgtatactcgtgtatcttgtaaaacgtgaaacctgttgttacccggacaactttaaatgtttgtcactctctaaacaaattgccagaagtgacaagaagtaaaactgaatctcatataaaaatttagataaaaagtctgaaggatcttgattccaaagaaaagacaaatgccaaatcaactcttaatctataccacttttgtatattctgacctaccaacaatgaagaagagatctctaatgaaacattggtcaaaacaagttcctgatggatcttttgaatcctatatagagttttgaatactaaatagagtttgtccatgtggttaagagaacc

SEQ ID NO: 66203 - DNA, 543 bp, Arabidopsis thaliana landsberg
ctaacactgatttacatcaatcatatcgtttctgcatcttgatatcttctactcctaatatcaagatattattatttatatgggccctagaaatgaaatttgtctgaaaacaaaagaaatatgtttgtagaaaacttaactatttctctaaatagtccataggttcattattgttttatttgtaattattcattttcattgatatctatcgtcgtttcaacatgatgtatcgtccgtatacgaatactcaattaccaaaaaaatgataagaattcaaatgggttttctatcaagtagctttctgttgagtacaccaatttgaggtaaagaccaaagtaaccagtgaaaaactaaagagccgtcaaatcaatttagatgaagaaaaagtaacattgaatactactattaaaacaaacaaatcattccacgtgatgactccaccacattcccaaagtttagaaaaattatcaaaccccgtcataaagtaacacttgcctaaaatcgcaagtcttttttttctaccaaaaaccaaagaaaggtttt

SEQ ID NO: 66204 - DNA, 539 bp, Arabidopsis thaliana landsberg
gggctcctctctgcgtgagaagtttcatttgcttcgttcaatcactgattctcatgctgtaattttattccacaccattctcttttcttactttgtttcttattttgatctatgatactaaatcaaaatcagtctagctactacttatatatttactatctctctatatatatgtgatttcaattgatatatgaacattcgtattcacatatatataaacttttttcacatatatatactttggcatgccgatttatcattacttgatttatatatctctttacatacattaattagagagatcaaactaatttacttcgtacaaattacatatctacgtagctttaattttattttcatatacatgaatgaaactctggtttggcggctgatcattaataaattcgaaattttgactaatcgatgatagagcctttttcctttcttaaagtgccttcttcattgagaaaagagtaagagaaattttgaatgagaaaacgtccaaaactatatgaaacttagaaactatctatatatgg

SEQ ID NO: 66205 - DNA, 607 bp, Arabidopsis thaliana landsberg
  unsure (1)..(607): unsure at all n locations
gtgtgttccacaaacttcccgtcattaccatgaagcgctatgctcgtgttgccattcttatggtctcggtgtttgccttgattacctttgccttggttgcctgtagtggcagcgctgggtcatcagtaaaaggacctaaagcaacggatgttgtaagtatttgaagattgtacttctttttcacgggatttataggactcttgaaaccggagttctagttttatttaccgtgttttttctgtccgctaggtcactttctccatcagcattggtggcgagcccgccggcgacattgaaattggactcttcggtaagacggtgcccaagactgtggaaaactttaagcaactttgtgtgcgccacttgacggaggtaagagagattgggcagataaaatcaggcaaaaaattgcaactgtttgtattgttttcagaaatctgaagatggcaagctggtcggctacaagggctccatcttccaccgtgtcattcctgaattcatgctccagggtggtgatttcactcgcggcgatggcactggtggtcgcagcatctacggggaaaagtntgctgatgagaacttcaagctgagccactacngtgctgga

SEQ ID NO: 66206 - DNA, 528 bp, Arabidopsis thaliana landsberg
aataacatcttattaattagtataattactttagttgttaaaattgtttatttgcatagtggcaaatcaatgagctttgacgctaagtttatatggaaattattcaccactcatagatttttttttaaatgaatcaccactcctagattacctttctttggttattatcacttaacacactacaaaatttgcaatggacttattctcataacttttctagtcaacagtcaacaccgctttctttaatacaaatcttgattccgccatttccttgatattttggaccggagaagaaggaaccgacctagttacatgggtaggagccatggccctattctcttacgtttacgtaatcgatttacaatcattttctttgaaatatgtttgacaattacttttgcttgaaactactataggataaaacggaagactttttatgtatgacccttaaaacatatttgtggagctataaaaagctagactaacttaagctgacgactcatttacacactcctataaaaatctaga

SEQ ID NO: 66207 - DNA, 320 bp, Arabidopsis thaliana landsberg
  unsure (1)..(320): unsure at all n locations
nnnnnnnnnnnnnnnnnnnnnnnnnnnnnnnnnnnnnnnnnnnnnnnnnnnnnnnnnnnnnnnnnnnnnnnnnnnnnnnnnnnnnnnnnnnnnnnaccttgaaacttatgcgcaaccgtcccactgaccgcacctcgaccccagagattgcgaggtcatgtctagaatacgctgcttgacaggactgtttgccgtactctgggacgacacctacacacatgctaacccataaatgatgatacaccggcactaccatatcacatctatgggataaccagatacttctggcttcgagcggcattacacccctaaccgcatct

SEQ ID NO: 66208 - DNA, 721 bp, Arabidopsis thaliana landsberg
cacattactttgcattgcttccacaagaaaacataataaagtcaagaataagcacatacctctaatagtctaatttaccacttttttttttactttgacttgctcttccataaaattcaattgctgtcgtcaagaatccgtcactggtgacgatttcagtattgagctcttattactatctagatgaacaatgtatcaaaaaggcttttgtttggtctctagtgcatgtgtttgaccaaattgaattttctcttcgaacaaggtaatgattgtattcgaacttggatctgaagattacttttgtattttagctttgcgcaagtttgaagatttatttttttataaaaaaaaattcttgaagaatgtaggttttttttttactatacaataaaatatgaaaaaacagtttaccaaagggaaagaattacttatttagagctctttaaggctgtattttccaatgattagtctaaagtacattgaaatccttaattttatattttttgattaggatacagttggttaggtgttgatataaattattaagttatgcctgtggcaagcaagtccatgagaaaccaagttgcttgatttattctgtgttgggtacacatgtgttgactatgctacttttgttagattcacatttttagcagtagaagtttttaaaaaatgaaaactatgtgatgtattacgggaaaagacgatatttaccctttgt

SEQ ID NO: 66209 - DNA, 276 bp, Arabidopsis thaliana landsberg
acctgtccatcttccgatcttacatccatagggtgttcgtctatacctgacaccgtctcttcctgatggccagggctggacaagctggcctgtgatttcttgcgcattttccctctggtctctattgtccgcttctccctcttcgataacatacccatcctctatatcatcgtctgtatcgaccactccacaaacatatgcaccgttgccggtcacaaactatagagtccaatctttacccttggcccatacatccagctttttcctgagctcctc

SEQ ID NO: 66210 - DNA, 314 bp, Arabidopsis thaliana landsberg
gaaccattgaccggggctgggaatgcattgaatcatatagatgcataatccactgttattggaacaaactgagagcgcaatctcttagacctcaggtgggatatcttctagatcgaccgctaccatcggagttacattcaaaccatggtcccaaaatcgcgtttaacctttgaatattgaacgacgatggtgcccagatatgtaacctcgctttccgagatttagacagtgtatccgatgcgcccagaacaaacacgtggtgggatcttagaatgggctcacccatatctgacggacggatacctgtctgtggt

SEQ ID NO: 66211 - DNA, 770 bp, Arabidopsis thaliana landsberg
aacttcccggcaaagggtactgagaatcccggtgagttaccttccgatgctaatgtgtttgataggttttcttcatcaagtaatagaatctcaaacctgtagagtatagttcaaagggaaactatttagttcactgactcatctgtttgtcacattgctcggttttattcccatttggctttcatgtttttgtgtgatgtgtctgctttatttcaactatatagttgatgaatatggaacttctcaggtgaaactcagcagtgcaacaattcatctacggcctgtgagatgaaaagttctgaagtggttcaagacagctgtgaagttccacctgtggaagttgaatcagcttcagagaatcgacaaggtgcacagcattctactgaaggacactctatgtcatctgaaactgtgattgagtcatcacaggaagctcaggtcattgacggtggtgataccatatcaaatgatagattagagacagaatgcaaagggaagttaacgaaagaatctcaatctaagttagcatctgcattaggaaagagagaggatacttcagattcatcgtggaacgatgaagtgatttactcagatgtggagggtccctatggtttttcatcagaagcaactagtatgactcatcctgatgaagctagctgtatagtcagtgaggatgttccagtccatacttctccagtaaaagctgatgcaactcaagttatcagtggcagtaaaactgttcctgatgatatgccttttgttgaaaatgc

SEQ ID NO: 66212 - DNA, 664 bp, Arabidopsis thaliana landsberg
gagcgagcgtgctggcgcaggcgcagtatttcgcttcgaagcccgccgaaacgcgtgagaagacactgctcttcacgaccatggacagccactggaccggctaccaggtgcacaaggcgtttgcgcagaaatacattatcgacaagcaaacgccgtacaacattgtcggcgacgtcaccatcgaacacatcggcaagcaaggctacaaggacgacaacggcgatttgcaggtcaacgatcaacccgagttccgcggcatctttgaaaacctcgggccaaccctgaagctgaagatgatcgacggcctgatcaagcatgacctgcgtcgcacggcgctgttgcaggctacgctgctgtgcccgacggtcggcattccgaccgatgccttctcctgcatcgccggcgtgccgacggccagcctgatctccgggcccaactacctttatgacgaagccgacaccctggacaaggtcgccaaggaccagctggtgccggttgcacaattctttgccgaactggtcgaagcgatggacgcaacgccgtcggcgctgatcggtgttccgctgctctcgtcgacgtcgctgtcgacgacactgcaatgaaattgcgtgctcctgctgcgatgctgatgagcgtgctgctgactgcgtgcggcagcagcgac

SEQ ID NO: 66213 - DNA, 408 bp, Arabidopsis thaliana landsberg
catcactgaacagcaacggggagtgacttttcctggcgcctgcattgattgtgaagaggaggtagaccgtttggtcggccccgccatccctctataccagaatcgctatggacaacctggcaaccaccgtgctaccacatactacgcaggatgcatattcaactggccagccatcaacgggcactctgacgagttctgtaccatcaacgaacccaacacccggccctacagatgccacgagaacagggggcggcccaggaccaagaactggtggcggggctacaaccgtagcacatacgacagcacaggccccctgctcctcatcagccgcacataaacctgtaaaatcgaccgccagcatcaacgtgggatcagcagaacgctctaccagcattgagatcaccttca

SEQ ID NO: 66214 - DNA, 137 bp, Arabidopsis thaliana landsberg
cgaatgcatcgatcctctcatcgcgaaaactggatcttttctagcatatctacacaaaacattattgtgaccagtttaacaattatttgagagaaccggaactaaccagatattgaaaaaatcaggcttacccgagt

SEQ ID NO: 66215 - DNA, 536 bp, Arabidopsis thaliana landsberg
tttggaagtgccggatcaacttttggatgcgctccgtcaatacttacgatcagacggatgttcgtctcccgatcacctgaaaccggctgaaaagcaaaagatctctttacagctcaaagcccttttcgccagggaaaaatggcaatccgaaggatattaccgggtgcttaacggagcggataaaatgctgaataaagccattgaggtattgggagaatgatcggcagaaataatggcgggtaaatatcaaatcccaaatgacaaacctcaaataaattgcaaatctcaaaagacaaattgtagattcctgcccatgttgacccaccattcctgtttatgttgccccatcattcctgcatgttgacccaccctatttagatggatggttcaagtcctataaggtgagattcttgcatgttgacccacccatcgaaaggttattcctgcatgttgacccacctgtatatttaccccttggactgacattcttgcatgttgacccaccccgcatagctatagagtaaagttttttaact

SEQ ID NO: 66216 - DNA, 682 bp, Arabidopsis thaliana landsberg
  unsure (1)..(682): unsure at all n locations
ttaccgtaattnatcatttgtactaattcataattctttttattttgtgttataaatatcatctggaaggtccatggccataagtattgacgaattgtttaagaatctttccaatagcctttttaatacatggcttttttgtatcatggagttgagtcatccgtgttataggacttttaaaataccgattgcagcatgttttcgatgtgaaaaatctgcattggtgtatttgttgatttgttataacgcgtaaagcatgcaatgtatgcttttagatggtaagttaacttgtaaaaatatcgatctgctaatgttaagttgtgtacaagaaatactatccacaaaagcgtatagagacaatcgtacctaacctaacacaatgtaacaaaatttgaaattagttttgtaacttaaaataaaccccccaaaagaaaggtttaaaacttctttttatgggcctatagcatccgcctgtatgcccaactggacccggtcatttctaagaatcgcaatcccaacctacgtgtaataactaatagtatgaatagtatgaatttcacgcatgcacgacgcatttttattttcttttacgccacacacgacacattaataaagtttagacaactttttttgattcgtgaatgccttctttgagaaagattgtgttaactatgtgtatatc

SEQ ID NO: 66217 - DNA, 479 bp, Arabidopsis thaliana landsberg
agattgtagttgtacaattacaaatttacaatccaaacaaataaataaaatctaatcttttgaattgaagatatagataaaatacatttacacatactttgctttaaattaacaataaatttaactaacatgttttcaatttttttttttgtataaagtaacattagtttataataattaaatacaagtttaataaaaaaaaaattctaatttcatttttttatcggctttctaatttcatttttgtttccttaaatacatttatacaccgaataaaattatttattagtttcctaaattatttatatatctctgaagaaaaaagaaaagtaaagtaaagtagccgcctcatcctcctcgtctcttctcgttgctctctcaatgaggagcccgatttagggtttcctccattggttatatcaattcgatcatctccacaaagctctctaagactctttcggtgatctcatcttcttctt

SEQ ID NO: 66218 - DNA, 555 bp, Arabidopsis thaliana landsberg
cgataatttcttacttttatatagtagtgttgacttattttgtttcatttgtcgaatcttaacacattatatttctcttgcacagcaaaacaaaacaaagatatcattttttccacattcatctcgaattgactttcattttttcatatttgacgagggaacttcacaatattttttttatcatctggattttgactaaatggcttgtaaaagctacaatgttccattttaatcgaaaactttataaaagaaaactaaagtataggcttgtgagacaaagaggacggtcacatatatattatcaccaagattacatatatataaattactaaaatatatagaaaaataaaagagcatgagaaagtggaatctctcaaaagatcgaagagacagattaacaactctctcgtgcaaattatattattaagccgcttgggtccaaaataaggccatttccacaaattttatggtctctttaaatttataactatgacgtgactaatttaaatcggacgatttcatcaatttagttataaaactcactaacatcaaact

SEQ ID NO: 66219 - DNA, 397 bp, Arabidopsis thaliana landsberg
  unsure (1)..(397): unsure at all n locations
accggttcccaagacaagggcctgtacggtcgtgcaacaactaccggccatttaagaggacctgatagaccaccattcgcgccgtggcctgctgcgcatggtcagccggcgacgcaaactgctggactacctgaagggccgcaaccccgactcgtaccgctcgctcannnnnnnnnnnnnnnnnnnnnnnnnnnncggggggttggctccccatgatgcaaccgtgcgcaccgagaaccgatacacggagcgcacggtttttttaatcgtaaggataccccgcaatggtcaacaaagtgaccaaatctttccagtacggtcagcacatagcggttctcgaaactgtcgagattgctcaccagccctggagggctgtcatggcctgcgtcgacgacac

SEQ ID NO: 66220 - DNA, 696 bp, Arabidopsis thaliana landsberg
agagtattcattaccgcgagttagttaaagtgtataacatgatttttgcgtttatctctcttggagggtgtttcatcattctggtgacgatggaaataggccgtacttatttcacttatctggtgaaaactaccatttgattggtgatctttttcctaaaccagacgaagtgcctgcattcttgcagctgtacatacacaacacattaaatgagataatcaattgtaagactgcttacgggtacgtatcatattatacgtaaatatatgaacacacatgtctatatatatatatatataattttttgtaaaagcctaatttacatattaattttatttggtgtttaggaaatcgttgaaggagatgttagatgctcataatcctcatgttaaagctttcagaacatcaagcgagaggtttgcagcaagcggtaataatactggtctgaagttggtgctctattttgatcgtaagcatgagggatgaacgcacaatcttcctacttcagatgaagttgtcggtctggtactcggtgactttgaaattggtgataatacacgtgatattatactagagacctcgactagaaatgcctaaaataattataacggctggtataattattcaggtcggataattgttgggcattaactgaagatatttgcattcatttcaactagcatcgtgacacgtctt

SEQ ID NO: 66221 - DNA, 505 bp, Arabidopsis thaliana landsberg
gacgattttaccaaaaaagttatagacgaaaagaaataagcactttttatggagaaggcaatgatgctcataaatcatcttgaggtcatgaggtgtgaagtaagttaattggtttcttaaaaaaatatatatatatgtgttaaactcttagaactggatttgatgttcttgaaacgaattcaggtctcagatgaaaaaaaaacaaaaatatctatcgggggtgaactggaatcgctttcatttaaatcttctcagggtccataacctcatgctaattaaagtggtcaactaagttttgtagtttgattagttttgtgaaacaatctactaggattagctgaagttgaaaagtcaaacatatggcaaagtaatagacgtataaaaaagggtggctcgtgaaacatatgaatggaattgatcaatgatcaaccctataaaaaaaaacttggaaaacagcttagggcttacaaccatgttttcttttgtacattcttatataacaaaa

SEQ ID NO: 66222 - DNA, 192 bp, Arabidopsis thaliana landsberg
taaaccaaacaaaaaaaacaaaaaccaatactaatacaactaccataccaccaaaaaagaaagtttaaaaaaaaaacacgccaaacccccccccacataaaataaaaaaaaaaaatcttatacacataaaaaccatccaaacacaaaatacaacaaacacaaaacaaaaaaaaacaacaaaaaaatcaaaaa

SEQ ID NO: 66223 - DNA, 545 bp, Arabidopsis thaliana landsberg
taccatgtatttgtagtacgtgacgactacctacagattaggtgatataaaattgtgaatattacaaaaaaataactttcttgtcagttgtttataatagcttaggtatgatgaatgtataatatacgtacaatttgcttaagttttgtcatattaataagacgaaattttgagaatattttcaagaaacagtttgcacccaaaccattatttctaatacagaactagataattagatgatcaacgcttccaattcctcttcaacgaaccctcaaggaacattaatgagtcaaaacatacacaaaaaagttgcaacgaaggacaatatccacagtatatataaaggcagtttgtttatcttagtgttaatggtgctaattgctaaataacatctgcgttcaccaaaagatgcttcaagagtctctggttcatagttttctttggaccagccctttgaaaaaatcaaaactgtagttgaacagatacacaacatattagcttaaaatatgaactgtaacattatccattttatcggttacacatgc

SEQ ID NO: 66224 - DNA, 637 bp, Arabidopsis thaliana landsberg
acatgatcctcgtcctctttctcgtagcctcctccttctaccttctacgccacctttaaacttaaactaaatctttaatcataactcaaaacattttgctctcaacaacaacgacaacaacaacccacacaggttctgttttttcccctgcatttgtgcctcgtgtcaaaatcgtttggtgttagttttggttatttatcgaagtttgtgtaggaattagagaatggctggttcatcaacgaaacgatttcctctatatgctaaagattatgagctctttgaagaggtaggagaaggtgttagtgctactgtgtatagagctcgtggcattgcttttaacgagatggccgctgtaaaaattttgggatttgaaaaaaggcaggaaaagattgggtttgtttttttaatcttttgacaaatgatttggataaaaagcaactttgggtgtataaaaaaaacaaatttttttttttttcttgtggaaacaattcccaggggagctctattaagggggtggggtggacccccccgatttttgagaaggcttttttttttttaacaaaaaaatatttggggaataaaaatctattttatggggggggtgttttttttttattgaaaaatttttttcgggggg

SEQ ID NO: 66225 - DNA, 300 bp, Arabidopsis thaliana landsberg
ataacaaccggacacgaaagagaaccacataggcgtggatggtaaactaacgtagggcgcgaaatagaggaaatcccagacaccctaaatcatgccaagctaggtaactaacatgaatcgagagaaggggtacaacaacacggaagacgaattaagatgagcatcaagcaggactgcgcaaaatcatggagcctaaataaaagataacgcatggaaatcaacacgtatgtcaaaagaacgatgacaactaatcaagagcatgagagcaacttacagacagtaaagtagagcctccccacc

SEQ ID NO: 66226 - DNA, 282 bp, Arabidopsis thaliana landsberg
  unsure (1)..(282): unsure at all n locations
gcaaggcggacggaccccagagcccggacaancaaaccaaaaaaggggagaaccgcaaaaaacaaaggcagagcacccaaggaacgcccacgcggcggacaagagacacccaaagaggaggagaaagggaacaaccaaccacccaagcgggggagagaccgccgaccaggcggggccaaagcaacgcagaaacgacaggcggacacaggcgaaaccaaagggcaccaaaagaacgccaccgcggagacaagcgaagaaaggaccaaaagagccgaagcagcc

SEQ ID NO: 66227 - DNA, 749 bp, Arabidopsis thaliana landsberg
gagggaagaatttgagatcgaacatgacaacgatgctgagcaactgcttgctgacatggaatttaaggattctgacacagatgctgagcgtgacgagaaactgcaggttcttcgtatttactcgaaaaggtacacttatcacaggaacaaccatttttaaaccggagaattttttcataagccaatgctacaagccaagattgtgcctttgttggcaggcttgatgagaggaagcggaggaaggaatttgttctggaaagaaacttgttgtaccctgatcaatatgagatgagcctttcagcagaggagagaaaaatatataaaagctgtaaagtgtttgcgcggttccaatccaaagaagagcacaaggaactgattaagaaagtcattgaagagcaccaaattctcagaagaatcgaggatcttcaggtttgatgcttaaaattttaccaagcttgagtactggattacaaactcaattaggtgggaacattaagttgagcttttaataaatgttgcaggaagctagaactgctggttgcaggacaacttcagacgcaaatagatttatagaagagaagagaaagaaggaagctgaagaaagtatgctgctgcggcttaaccacggtgcaccaggcagtatagccggtaaaacactaaaaagtccaagagggttacccagaaatttgcatccctttggttctgactcactgccaaaggtcacacctccaagaatatacagcggtttg

SEQ ID NO: 66228 - DNA, 1806 bp, Arabidopsis thaliana landsberg
aaattttttaccgttgaacattatgtttatttattactactagctagagagcctaggcttctttcaatttttagttacgatattaccctcatcgttataggctttattaggaaagtaaaccggtgttgttaaaaggttttgagggtattatggtaaaacgtagtactgcggctgtatcttttttttctttcctaatcgaagacgacattcgtcggaaaagaagttgtctgaataaggaaactctctctctctctaaacagtctccgcatattttctctctctaaagactctgtcttttttactacggagagagagagagagagagtgtgcgtgtgctggtttcgagcgtggatattaagggacagagcaaaatcttctttggtgggagaaataaagaaagattttgcattttgagcaaaaccagtagtgaagtgacaacattaactcctgacattgttagggtttcatcttcttttctctctttctcaacctctcttgccgattgagaacttggattaagtttggaaatactgagaattggaaagttcccagctcaatgctggatcggcaacaggaggatcttggtatgttctttatggattttgcatgattttgagttctgagctttggttttttttttccggattatattaaagttgggatttttatggttgggtctttacttagagtagtggaatcagatctgagaagcatcgtgttccgatgaattagatcctcgatttctatgtctggccatttatatggttcatgacctgtttttgtcttccttttcatttcccgagattctttgtttctcatcaaagttatattccgtgattgtcctacttatttcgtgagaatgactctggtttcattcatcttttgctttcaacattgttagcaagttggcttttttttttgtaatctctgagtaacagtttctattattgttttctcaggtttcttggcattaatttgagtttgttcagttgaattctgttaatctcagtgatacttctgctggttggttagcattagcaatctggtcttgtgagaatgaggtcagatacggttcttgactacgtggtattcgaattatcgccaaagcattcaaagtgagtatatgttccacttcaagatttcatgatttctagtttgttctgtataaacaagtgtgtgtttttcctttgatagatgcgaattgtttgtatcaagcaatgaacagacagagaagctagcttcagggttgattcaaccctttgtgaatcatttaaaagttcttgaagcaaaagcgtcgcctgttgctcaatcctctattagattggaggtggagaaaagcaacacttggttcactaaaagaacattagagaggtttataacaaagaattcaatatcattttggtttcttttcacatagccttttttcgatatagtaatagtttcttccaccatttgtcctttcagatttgttcaatttgttaatagtccagaaactctcgaaaaggtcaatacatattattccgagatgttgcagttggaagcagctcgaacattatattcgcaggttgtaaccactattttgaaacttgacttctaattgtgattcttgaccgatcgatctttcctaaagttttggtgtcatttttttggttcttaaagcggagtgaagactcaaagtttggtgcatcaggtgtgtttgattttactgatgttactttgctcgtacattgatctttaacatcaatttgaatcctatttacttccgtttcagatgatggagctgcagcagatgccacaaagtaaagc

SEQ ID NO: 66229 - DNA, 482 bp, Arabidopsis thaliana landsberg
tctaagaacccttaggtctttgagataggtagtgcaagtgagatttgagatttggtttagaaagatgttagtaccgttagatgaaggaatagctctgagagggacgaccatgatgattcgactgagatttctggttagctactttgggattagtttttttctgctttctctctgggttttggcatttagggtttttgggatctttatgggagggaaggcaacaggacggagttgtcaggtgaagacaagacaatactatggggacacgtgtctcttttgcatttgtgatttgcaccagtattagtttgacacgcgttgtcctctttttgtgaaacaactgtcgttcgtcgctttgcattttattgtattggttgcaaaagtaatgttaaattcattttgcaattcaatagtgacctttgaaactgattaacaatttagagactcataaatggcagtgggttatagaccaaataagttgtgtc

SEQ ID NO: 66230 - DNA, 373 bp, Arabidopsis thaliana landsberg
tcaggctttaggttaggcgagggaagatattggcgataatttccggagagatctgaaacttatcagtgaagtacgagcaccgtttcgtggcgttagaaaattcttttattttgcatttgcagcagcagcgggtatctcaatgttctttaccgtaccaagactggttcaggcaattagaggcggtgatggtgctccaaatcttctggaaactacgggatatgctgcggttaacattggaggtgagtcatagacaccacttgaatcttaaattcctttttttctctgttatgtgagtaagctttcggaaccagcatgtgcaggttttgttggtatggcttcattgctcctttgggaaaacaggaaggaggaggac

SEQ ID NO: 66231 - DNA, 153 bp, Arabidopsis thaliana landsberg
gggcaaaacgatgatgtgttttatgagattgacaacacaaaacatcgcattttagcctctggcattagaaggagagacgcaaacataatgatatgatggacccacagacgtactggaatgcaacagacaacaagcggggctagagaaccgatg

SEQ ID NO: 66232 - DNA, 250 bp, Arabidopsis thaliana landsberg
gaaaaaatccacacacccacacatataaaaccctaatcgactaccaatcgacacacattatatccacgtatattttttctacaatataacatttatcccccccaaaaacaaacaacactataacacctaccatatagacactctaaaatacatatatctacgcacaaactcctctcctccaattaacgaatacaaactcatacaaatgaaacaacacttatacaacaatcaatcacccccattattacca

SEQ ID NO: 66233 - DNA, 453 bp, Arabidopsis thaliana landsberg
tgaaaatgccaacctatacaaaaattatgtatatgtaatgcatgatagaccactttacaaaaaaaaaaagagagggaaaaaagatagaccacttagcaaataattaattacttgggaaattagaagatcgataaggaacgagttattcctccaaaagaggagatctaatccatgttcatcacatcacgtgtcacgtacctcacatttgcttaggcttaaatagcggaataaacttgtaataatgtattttatctataagatatcctataattatttaaagatatattttctcttttcacactatacattatttcggaacttatataatctcctttaacacactaatgaagtgcctcgtccaataaataaaaacaatcacgaatgatgatggttgctaaaaaatacatgttcgttaacgcatggttgttgtttttaacatgtacaaccgaatca

SEQ ID NO: 66234 - DNA, 1540 bp, Arabidopsis thaliana landsberg
actatcagtgtctctcctagactcatgatctgtgtttcttcttgagttatcgcggccatagcgatcatcgtctctttgtcgtttccgatggtagtctgcaaaaacattaaaaacagtgaattgtgctattgtggctgaggattacactattactacgcattatgtcatttgggataaaaatacctcctcctcttccatggcgattttgtcctccttgaccatagtttccaccaccacgccttccatttccatctgtgattaacatatgcaaaaagcatttaggaatctagtgttttgcaggctctatttacggattctcacataatttgacttgaataagatacttaacactaagatccatatcttgtttcacattttcactatctattcgaaagggaactgggaaaacaataagcagatgctttgcaagataaagagtcttattctgagcactacaattctaagtaaagcaacttaagactcgcattcatggtacttttagttcaccatttgtccacagtatagtgcgaaatcatgaaaccaggaataagatcaagtaaatttggtagaaagttgaaaaaaacatacaattcgttggcgcagcttgaggataagctcccaatgagccagtaccgtaatccacgagctgcctttgtgcttcgagttccttctgaactaatttcccataaccacctctaggtaatcaatgagttaaggaaaaaacacatggattggcgggaaattcataaccgagaaatcaatctttcctaccacaaaacaggtatactaaacaagaacaacagagtgcataactatgcggactaaaaggatatcaggatcgtaatctgtacggtattcatcacgaacctgtatgaaattagaaaaccatgatgaccttttaattgtaaagaaacggtcagggaattacagagaggatgatgcatctgatgaatacctggccaccgcttctaccacggccccattgtcttccttcttggaatccccaatcaaaatccacacgaataggccggtcatcgagaatagtcccacttatatacttgactgcatcttcagtatcctctctagagtagaacctgataaaaacaagacacaaaaccaaaactcagcaaccaccataatgaaacttacatataaaactgttgaagatgaaagcttacaggacgaaacaaaagccacaaggtgttttagtgttcttatccaaacccatgatgatctttttgatttctccagctctagagaaaagctcgtaaagctgttcttcagtagtgtaaaaagacacattgccaatgtaaaccgttgtagatgctcttagcgcttcatcaaactcctcttgtgttcctgaaaatcttctatctcgataagctgatagctttgcttgctcctgacaatcaaaaaccccatacatgaaatcgtgagaccaaaccctagacaacaacttcaaaaatcaattagaatcgcttcagacccatcagattccagacaacccggatactaaattcactaaaaacattaacgaatc

SEQ ID NO: 66235 - DNA, 581 bp, Arabidopsis thaliana landsberg
gcaatatactataatattctgattcgaaatatttaactttccctaaaaggatatactcttgctctttctaatcggtcaccatttgattttttctcaataaacaaccaaaactaagacagtaggttgctggttttaacgtgtctgatctaatcaacacaaatcaaaacttggtcgagcgcgctacgtcattcagattcgtttctatgttacaacttggtacttaaacctaagtttgtcagcacttaaatattaagatgaagacaaggtccaccatcgtctaaggttcttttcttttacacaatttgcaaatttttaagattaccttaatccaataattaatctccacgattatgtttaatgattgtaattagcgtcagaaactttattatatgtggtcccgtgagacgaaagacaactagttgcattaggttccatgtactatataactcgtgggggtgatattttttgtcgcgaatccatattctcgttctagcaaaaaaagagaaggttttgtcgcgcattgattctctttttatatatactacaattaagtgtggtcctatcctactagctcaagtaat

SEQ ID NO: 66236 - DNA, 298 bp, Arabidopsis thaliana landsberg
ctaagaccacgtaagcgaatccaaaccgtagatttacaacgtcgtataatcaatgttatcaaaccttacaaaaaaaaaaatatagagggttgaaaccttaggaggatttgagctaatgctaaacacatgaaatggaaaacatgttggatttgggaatgtatgaccaggtaaacggaggaccaaacggtagttttacaacgcaataattatattataaccttaaaataaaatcataaaaaagagtgaaaccttaagaataaataaacataatgctcatcaatgaagatgggaacatttg

SEQ ID NO: 66237 - DNA, 789 bp, Arabidopsis thaliana landsberg
ggcaattgtatgttaacacatgtaaaatggcaatcgttagtatgccagattacttttaatagtattgttttaggtgaagggagactaatataattttattttgtttgttttgagtactgattttgaaaaaaaagtgtatgttgattggttacttttctacacattcaaaactttataagaccagacgaaggcacgaggaagataaccgagtgtatgttgattggttacttttcacttttacacattcaatatttttctataagaccaaacgaagtcacgggaagataacaaggtcatgatgaaaaaaaaaaaaaaaaaaaaaggaagataacaaggtcattttagtcatttaaataagactaaacgaaggtcgtctagtaaaacagaatttgattctctgggacccactattgcacaacacagctcatgtactacgcacctgtctctttcttgtaagtatcgaattcttgaacgtgtcgtctcacacaacacacgtgtcgtattttaattcgctgcagtttttgtgtggcttagcctatctcggagatctaaacgtattattaaatctttaaatacattttgacaaaaacaattaattaccaacaagtaaaacggattaaactctcttatctttttcggggtcaaaaaatcgcgagtatcaaagactttaacgtggctgcttcgaataattcacgtgtcacttttaaaattcgttgataaaaataaatgatttaattgacaaaaatagcgtacccccaaaaggattttattgcttgtaaaatggaattt

SEQ ID NO: 66238 - DNA, 728 bp, Arabidopsis thaliana landsberg
attgattttgaaaatatattcagttttaatagatgtccaacactggaataattgttgataatttcaggaaaagcatatgttaaaataatgctaataacaaaaacaaagctagtgatgtgtatcaaactaccaattgtgcagagacaaaaacaaaacgccaaaatgctgtgttgtacccttttttgtcaactgcgtatctgtttttttttcagtataaaaaacttaagaaatctctaaacctaattattgagagtaaaaaaaaaaacaaataaataatcaaattttactgaaataaattgtaatgatcaaatatatttaagcattgaatttttttgtgtagtcctaaagttgaatcttgaaaggctgctgatcttaatttgtctttttttttttgttcgtgcaaagctgctgatctttgttattgtctcatatgtaagtggttagcataaaataatattaatttcttgaatatgcgttgtatattttggtgaccatatacaactacttacatcgatcttgtaagaattgcacatagtaaagtaaatatatcacaaatcatatgtccgataacttcatttatttatatatttaatgatgaaaatttgagtttgataaaaaaaataaaaaaaataatgatgaaaattgtagaaacgaaagtattttaatcgtaaaatggaaaaaaatgttagattttaattgatcattttttgggaggttgctatactggt

SEQ ID NO: 66239 - DNA, 760 bp, Arabidopsis thaliana landsberg
  unsure (1)..(760): unsure at all n locations
aaaccctaaaagcaaactatgtaacaaagagatcgttggactatttttgctctctttctagtattttaaacaaaactaggcttgaaaataagcatttttgccctcttttaagtaaagtcttgagaaatcaaaaatgttttatttatgatggtggctaggagtactctggttgcttcctcttcatcacccgaggacgatcctttcttagtggttgttggtttatatgggccgatacgtatggcccattagatagatgcttcaaccactaatccgattttaatccatttagtagaactaatttttaacaaacattttaatatgaactttttagttgcggtgatgtttttgctgtatttctatatttttttaacaagcttaataaaatattgtgtttttgctgtcgcaaaaaaaaatcataggagagttttgacttttgactacataatgtcacaaagtagacaaaagttttcagaaaaataaattatttctctacaactagaaaaagaattaaagtagagagaaaatcttgtttagtcttttgctttggaaagttagatgggaacagaatatgcttaatacataattacaaagtcaggctgtattttatgataaagatataaatgcatgatctgtacggtcattataatactcatggttttgagtttcatttggatagagcttctgactatcttgctttttcttctttgattttgggtactgagtcgagaagttatatctncccacgtatgatctatgactg

SEQ ID NO: 66240 - DNA, 1917 bp, Arabidopsis thaliana landsberg
  unsure (1)..(1917): unsure at all n locations
cacatcccgcacgcatagcatttcacttgtgaaaacctgaactaagcatgaggtgatcatattatagagatgaattctatctcttaatataatttcggaaatcacaattttatttcaaaaaaccgggtaaaatccatgcaattgtttgtaaatgtgcagcagatgaggcatgaccgctttcattgtctgtacctgttcttctttagcaattttcactttcaaatttgatgatgtcaaatgttcactgatattactatattcagatctgttgtatttttgatagatataaattagcaactggttaattaatttgagtcattagaaattggtaaaattacatgtctactaaaaattataataagttcggaaactaaaacggcaaaaagggtcagtttaagagcacactcgaaaatacaagagaaaatagccctaacaaaggagacagttttagagcacactcgaaaatctaaactaaaaccgcaataatttaaatttttactaatttgtcattactcctactcattagttcttttttgagatcataattgtcttgatgtcgatgaaaatcacaaacctcaccgaaaattcaaattattggtcttcacatcctcggttgatacttgttagacttcttagactttcttattccgacttgatggggcctctttcttgagattttggaaccattagttattcaccgaaatatactcaacgaagatccaattgggagaaagcaaaaactaataggatctcgaatagatttggtcttgaaaaaaaaaaactaataggagaaaacaaaaactggaaaagttacacaaccgcttcacttgccaccggagatttgaaaatttatagatcgaccggttgagtgtaaaaagaagaaaacggcaaaaatagaaacaagaaacatctgcaaaaacttgacacaaaacagcagaccaacaagccacacaatcttaagaatgtaacatgtccattcaagatctcaattttaaaaatagtaaacattattattaacaaaacaaacaatattaacagaacacgcaacattttttttttcatactagattttacccacggtgtaacattttaggttatattaaaaaacatctcaatttttttaagtttctaatttctaaaatctaaaataattctctcaaatctcacaagtctaaatcgtggtcaagggtttacacaccgtcccggaagtgttttggaggctttgccatctaactatccgtggtcatgctctttcccgccccattcgtccaatgaatgtctggactgtggactaacaatttctataaggatatgcaatggcgattgcagattaagcaggccaaggagcttcaaagtgataattctgataacctacccttacctgactctgaaactcaggttattatttttgcaaacctttgtcgttcttgtaatttttgccggcttattcattgattcttacaacttgcattcagcgaattcgcgcctcactcaaggtatatctatctattcatcatcaccatcaattctctatctatggatgcttacggtgattgatgctgttggttgctgtatctcatatatgttaatgttttcacctgactcagcatgcacacgcaacacttggttttgcaaaagacacagaagacgcaaggaataaatatataatctcaatcccannnnnnnnnnnnnnnnnnnnnnnnnnnnnnnnnnnnnngcagcaacaagaacaaaacgagcttatcttctgccattgcaatgagaacttcaaattattcttcatacaaatttaattttacttcttctatcgacaacacatattctttgctttcattgaaaaccccaacatagcagcacagatggngcctagcctataaaaacanaaaagaattgagaggaaccccttaactttggcag

SEQ ID NO: 66241 - DNA, 236 bp, Arabidopsis thaliana landsberg
acataaaggcgcggggaaattaaacatacatcatatttgtagacttgtagttgtgaattttgaaaaagtaatactatttatgtaatggaaaaaatgtatcgtttctagacttggaaaacgttgggctttgaaccagaagaaggaaacatattgcgtttctgaaacgtcaacgagacctacaaatacagtgcttgataaataatggggccatgacatccatacttgtgtgacatata

SEQ ID NO: 66242 - DNA, 1629 bp, Arabidopsis thaliana landsberg
aaatatatcatagttgtgtatattatatagaagttcatatgaccaattttaaaacatatgaccacacccttaatttaaaatatttgccattggatctaatttttcaataatataattgagccatacctgctgaacggttgtcctccagcacaatgataactccaaccaacttttcttttttgtgataaatactttaaaattaacttatctaaatcagtttaagaacttgctcttaagctacgagctttgtattaaattaaactaaaacatatactaaagcatgggttgtcttgattttgacgctatttgatcttacgaaaatccacttttttcatattttaactcttcatattcaattttttttcttttttctttttcttttattttataatattttcttataaataataaatatttgctttttcctcggtaatgaaatgaatcgtccaaaaaagtgcaagctgatgaaagtagtttgacccctccacatctcccaacttggtacttagcgtcgcacacaccacatgctctctctctctctctttcttctcctttctctttgtagctcttctctcttgtgctaagccaaaaatggaagctttactctattgaagacgagatccttctctaatttacaggtacccatcttttatttttaagtaatttccacaaagattttggttcttgcaaatcttgtagatatttggtatttacttagcacaaaaaagttttgtgaaacgaatgataatattaccataaatggtgagacatccatttgcggctgaggttttgctactttactcttttctctctctctatttccatttgtattgtcactcactcacatacaaaaacaacatcataatcagagatatgagtaaaagtgaaagaaaccctaataccaacttactctacaaggttaaaacaaatgttgctctttttcattagtcctatggatctcattcccaaaataaaagatgaaactttagtgggtttggttcatcatctcttatggggtttttgtaaattactgattttggtagatgtgttaggcaaaaagtacagacaaatgttacggaatgtaatattaaagggatgattttgacagatgagaagtttaatcttacatctgtaaccagcttttgataatgaaatggtgtgaagggagggtcctactttcttgaatggttttgcccccacaatctctaatgaatgtgaattattggtgagccaaaaaaaaagttttctgatgaaagaatgagagagggtatcttttttgttggtcttgctataaatgtggatgaaaattgtgattgaaacttactcttaatctttaaaaaaaagaaaaaaaaaacagaacaatttcttcttcctctgggatccataagttttgaggtatgttgttgctgattttgtccttttatctctgcaaataacagagaagataaatgaggattttctcctaggttgaagttttatgtgagtacttttcttacccttgactttggttctgtagtgaatagtggaagagagaaagcttcttagagatctgtttttggtactttcattaaagtcatatggttattgatcagaaagcaaatctctcctttttgtcttcaaaaaaggatg

SEQ ID NO: 66243 - DNA, 533 bp, Arabidopsis thaliana landsberg
aagtgtaattttctatattataccacacatatatatttatttatataagtattatgcatatatttcaacaatgcagatgtaaaagcggattttaaaataaaaataaaaatccggatatgaagatgaaaactttgaataacttgctttatgaatcggatcgtatttttgatcatgaatattttcctcaccatgtagataaaataaccaaattacctatttgttttcgaagataagtgtccggactgatttgttgtgaagataattgttcggaacaatcaattaaaacaatttgagttctgttggtaccacattttaacgcttcttattttggtgacctagaaacaaacgttcacataatggaatttccaatatctatgataaacaaatgattgtaaatatgcacggaaacgttcttaagcactacttggttgataaaatatgtttgatgttctttttagcgcatttacatatacgcatggtgacattacaatgagggtaaaaattggggataaatagtgagacttaacttggat

SEQ ID NO: 66244 - DNA, 533 bp, Arabidopsis thaliana landsberg
  unsure (1)..(533): unsure at all n locations
gcaaatcctccgcgctgcaccttgcccatgtgcgcgctggcaccgtcatcttcgtgccgaaaaacgtcgtcattgagaagccgatcgaaatcttccactgggtcgtcggcgaccatgccgccatcttcccgcacaccctcatcgtcgccggcgacaacgcccaggtgagcgtggtggaccactaccgcagcctggagggcgaaggcggcctcagcatcgccattgccgacctcgtcggcggcacgaacagcagcatcacctacgccgcctgccaggagctggcggatgacgcccaggccctgcatctctccagcatcaccgctgggcgcgacgcccgcgtgaaaagcttccaggtgcagctcggcgcctccttcagtcgcagtgagaagtgtgagcgacctcgtcggccagggcgcgcgcagcgacatgctaagcgtctccatgcccattggcgaccagatcgtggaccagcgcacgctgcagaaccacaaggccccccacgccagcagcgacctnctctacaagaacgcgct

SEQ ID NO: 66245 - DNA, 937 bp, Arabidopsis thaliana landsberg
tagacatcgcatttaaatggaaacatttcactagcagaaagaattaaatcataaagctaactgtacaggtggaaacaaccttccagcgctggattcacgggaagcaaggacatgaacatgcagatcctccattaaccgtctattttttcccgcagtagaattcttgccaagccacccaccaaatctattgaaattacgctctccctgcattcagtaatcatgcatggttaatctgaaccaagatatttcaggcagctccagagcgacaaaaggagggctcataccataaccatctatatacgccattgtaatcatgcttaaaattacaacctaataaagaactgactccgacttgcagactcaaaatcttaaatgcagaaatcatgttgattacggtcatgcatcatcagaaaaaggaggcacattgaatgatagcaaaagattccaggttacatccatagggtgtaatgcgctttactgaaagactattacctgctcgagtacctcccttgatccatgcaacaatgaagctctattcaaacaaaacaagtacacgtcagttctcaaatattagaaagcatatcatttttctccctgaaattctataccggagatccgaaatccatacaaagaaaaacaacacatatgaatatacacggcagcatatggtttattaaactcgatctccatcacagaggaacttagtgtatagaaaaaatagaaacaaaatgaaaacactagatgattaacatggcatattcatcggtaacacaaacttcttgtagagataataaaatagtacttctggtaaagaaggatcaattttattctcaagaactggaagcaacttacgggagaatagaagatgcaacacagcaagattgagagagctgccattgtctgtatcttcgaatctgcacgttgataatatctacat

SEQ ID NO: 66246 - DNA, 572 bp, Arabidopsis thaliana landsberg
gccagttcgccacctttcacgaattccatcacaatgtaaatggcgtcctcagtcatgtacgtatcatgctacttctcgcacccatcatggttcagtcgcttgagcatctcaatctccttcaactgatcccgccatctttcaggttcaaattggaaattctttctctctacaattttaacagcgacttcctctccagtgagcttgtttactcctcttcgcactgttgcaaaagagccactgcccaaaacatccatcacctcatacgtgttattaatctcgcctttgcatggaagaggcttctgcagcgaggatcgaaacacaaactcgtagcaatgggatggtttctggtgtcttcctccctggtgtatttggagccttgggcgtggctgaagttggaccagcaggtcgaagcaagcacagagagtcaccgttatttaggcgctttcgggtgttcttctgtacgcgctcgccgttcacgtatgttccagacaatgaggtgtcttctacccagacgtaattgctctcatcgcgaaacagaacacagtgcttagacgatacatgctggtcgtcta

SEQ ID NO: 66247 - DNA, 502 bp, Arabidopsis thaliana landsberg
ctaattatcttatcccatgagattacccatactaacataagtccaaggaaaaaaatattattctctcgatttgttttaacaatggtcgccaaaagtaagttatagattggttaaattttaactgaaagcagctcatattgcatgattgttttaactttcaaaattatagttgtaatttaaaaaaaaaatatatagaaaaaaaaaaagtaaggccccaaagaattgaaaccaaaaggaatggtcgatggttgagtcacgtaaattgtcgtatactcttttaacaaaacaacaacaacaacattgtcaaatctctttgcaataattgttcatatccaaattttaattacttatttcatatatttatttcaggcttttaaaaagatactcgatcaaacccaaattttatcttagtttgaagtggtaactgatatatatgaatagttgtacattaaaaaatcgagacagaaccaaaacaatttaaatgtctaaagaaaaatcacta

SEQ ID NO: 66248 - DNA, 1762 bp, Arabidopsis thaliana landsberg
gaattttgttttataccagaaattctttttaatcagcagagagcttatggggaagacagcaaaaagaaaagttttgaaatgtcgcatttaatgaatctgggaggtggctttatatatgaggttagagagagagagagagagtggtgtgagtgtgtgagtcttatatgcgtgtgcacgtcacgtgactatattgctttcgcagcaagttggcgtatattgacagatttgccctcaaactgtatctaaactgtaaacgttcgcggaaattggtgtacgaaatcatctacaatgaaagattgaaagcagacgtagtgatattacggattgatgccacgtgtgtcattttgaaaatttaacggtgataagacctgaaggttaatgtaattggccgtagcgaataaatttcgtgttacacgtgcggagaaggcatcattaagctactgctactagagtggggaccgactacacacgtgaggaattgttttttttttttgtcacagtgattattcttacatatgattattttcggataatgatatgtgatttatgatgttttattcacatcaaattgtttatgatgtaaggattaatgtctctaatgtatcgaccaattttatactccaatgataactgaatctgtttttctttattgagctgaagcttttttaaaatcaaaaagcttaatttacgtaataacatgatataattgatatttttttataaagtatttaaaccaatcaaaacaaataataagcttgaggacttatgaccatgattatttgcccaatacatttaagttatatttttttgttgagtcaacaatatttttaataatttaaaaatatttttttcttaattatcaaaaacagtcaacaatacatttaagttatatttttttgttgagtcaaatatgtataatgtaagatgttaaaaagataattaagaaaaaagtaaaaaactgtaaacgggcctaaatgggccaatctaagctgaatttttttggggatccgactatgagatggatcaaaataaacgggtctggataccttcataacgggtcgggtctgatgaggaaagagagtgattttttcgatcgccgagagatgaaaggtcagtgctttgtcgtcttctaccgtctccggaccaaagagctcaagtcacgcagctaacaaagtacagatttttcccttgtttcgattgcaaaagcgcataagcttcgtacttgccaaatctgaagtcaaaccaaatacactggtcaaacaaaaagtcgacgagccccagattccgatagcaaaaccagtcggacccaggatttcgatgagccacactggttagcttccgacccaattcacgtcctaggtcaccgagaacgtggtatgtgttttctaaggctttcgaaagggtttagggttatagtttagctttagctaagggattgggttttgttgtgcgtacttattgttcgatgaaacttctgaaagagttttggtcaattgataatgaacaaagtagaaaactttatctccttaaaagtagtgacatgggagctaattctcctgtttgtgtttcgcagaaactgtgtgagcatttgcagtttctctcttgtggttgagctaaataaaaatcattgtacattttcaagagctaattatttctgatcattgttatgtgatactttcttttgcagacttctttgcatgttttggttttgttgagtcggatgagttttatttttggcttctttctcgaccagtagcagaaa

SEQ ID NO: 66249 - DNA, 543 bp, Arabidopsis thaliana landsberg
  unsure (1)..(543): unsure at all n locations
cccctgtctcgctcgtttccgatttcaccatattcgtcgatgccggggctcggttctcaggaatacatatggaatgcctgcgcttctcgcggaggcttcattttttacaaatccttcggaagagcagcgattgaaacaacccaaacataatcagaatgaggccattgcttataccgaggccattatcgcgttttttgcgaagcctgtcgcgcccattgtcgctaaaaactcgaaagtgccggtgatccccgcattcaaagtttttcaagaggccgaacgcatgactcccattgcaaaacgttggcgccaggacttcgacgagggaaaagtatttatgacgaaacgcgatacggcattgctgcgcgaatcatacgagcttttcacccgttcagcccgttcctttcccgactcctggctggccggacaatgccatcaaaaccgcgccgtacttttgcgcatattaggaaagggtgtagaagccgngcaggaagatcaacgttcccgggaatactacgtgcctgtttcggctatcactactgtccg

SEQ ID NO: 66250 - DNA, 376 bp, Arabidopsis thaliana landsberg
  unsure (1)..(376): unsure at all n locations
nnnnnnnnnnnnnnnnnnnnnnnnnnnnnnnnnnnnnnnnnnnnnnnnnnnnnnnnnnnnnnnnnnnnnnnnnnnnnnnnnnnnnnnnnnnnnnnnnnnnnnnnnnnnnnnnnnnnnnnnnnnnnnnnnnnnnnnnnnnnnnnnnnnnnnnnnnnnnnnnnnnnnnnnnnnnnnnnnnnnnnnnnnnnnnnnnnnnnnnnnnnnnnnnnnnnnnnnnnnnnnnnnnnnnnnnnnnnnnnnnnnnnnnnnnnnnnnnnnnnnnnnctggctcaatgactcgatgggataagtcgcatggctgcggttagcgggaccaagggacttatagggggttatccagaaggtcacacatgccagggatgaccccacagagaac

SEQ ID NO: 66251 - DNA, 508 bp, Arabidopsis thaliana landsberg
aaggctccacaataagcttttctcccgcttacttccaatctcatatactttagccgcatgttgcgaggagaattgatcattggcaatttcattcagacataggttgttgtctatatcagaaacaggtgaagaactgtcctctctaactatatctgtgaaatgggctgtctccgactgggtcacctgtctactcagcatggcttgacaaagaaaactttctcgtttctccaacgactcaataagacgagcttcccgtctgcccctatcgtccaaaactgacaacagcgcccgcaaagcctacaccaagcgaaagaggaaataatcaggcacatgatcatataactttcaatacaagtttccatttaaccagcagagtgattaagatttcaggaagagtacaatgacattacctccttgttgttgataacttcccaatgaccatcttcagaagattcaaagaacacacacctatgaccagggtcatttgcattgcatgtgcctaagaaaa

SEQ ID NO: 66252 - DNA, 669 bp, Arabidopsis thaliana landsberg
aaaatgagacatttacatttgtctaaatcggaacaaaagaaatactccaaaataaaatcaaacatttacatttgtctaaattggagtattaagtttatacgtatatttgaaatggagaaaaatgtaaacgtaaagaacggtactatcttccaattgaaacttaactaacccaacataaaatttgaagcaaatttctcactttgaatttgcagtcaattttcaaaagtgactgtccatgcaataatgacatttgacaacttctttaattttcttctaaattacatttaagtattgaacgcagaatgctctcataataccgaaccaattacaatattgcttgaggaatacatttgtattagagtagaagcaagtgaaaacccattgttgatgacactttactcaaccatcttaaatagtcaaatattcccacaacacaaccgacgtcgtacgtacacatctctctatatattaaccaaacaaaagaattaagaagaatctcataactagaaaaacaatgaagctctctcaagtcttctacattatcttcttattcttccttgtctcacaagtaaagtcaacgtccgatatgatcgaccaaacctgcaaatcttgcgcagccaaatccacgatcttcgattacaacttctgtgtctcctctctcaacaactc

SEQ ID NO: 66253 - DNA, 1393 bp, Arabidopsis thaliana landsberg
ctttcggttcttcggttatatatagaatttaatatccatttgattattttttaatttttgtttccgttcgattctgttattttgtttcgattttagttcggtacattcgattaggtttatttgcgcaggcttactaatactgattcaagaaaaaattaattatttacaatattttaatatacaactcttagggctttgaaagtgtatccaagtggcgatggcgaaggacagggtaactcgttgtcgttatatgttgttgcggttgatgttaagccgtatgacaagatttacctaaaagctaagctacggattataaaccagagagattctaaacacatggagaagaaaggtaaattatatcgaaccataatagtgtggctaatgttacttactctattaatttttttcttttagagtttaattaacactaacttaatgacagttgaaagctggtcggatcaagcaaacagttggggattccagaagtttgtaccatttgctgatcttaaggatacttctaaaggtcttcttgtgaatgatacattgaagatggagattgaatttgaagatttctctaacacaaaatactttccaagttaagttttgcataatgcaaaaccagagagcttggaaccaattgtgttctgttttttaagtgtttttgtgctaataattggaggattggtcttcctaaggtttaggagcctatctcccacttttcccaattccctagtttgtagaaatcgttgattccaagctagcttttcttgtacttgtttcctatttaaataaatgaaaattaagaataaaagcagtcttaatttaccattgaaaaactcttgttcttacttcattctagctgcgactaagactaacactaaccgtggaataacacttctaaaatcaaccgaataagtttgcgcgtatgatagtaatttgaaataataacaagcttttgcgcaccaacaataaacatcgatcatgttcttaagtttcacgagtgcttctttgttatttgctctctttcatctgtttgttactctattatttctctggttatgtagtgtatataatacatatagatctaccaagcaattcataatgtataatatatctgccatgtatactctatgtaaattaagctatgtaaccaatccatactcttctttcattgtatttttaacaatcatcaataagcaaatcaaattaccaatatctaatacaactcgttccttttaggaaataaataagaagccaagaaaatactctctactagttgatgaaggcttggaagggagatgacaaaacgtacgtagcaaatcaaagaggaaaatccaaccctatccacacagtttttggctctttgcttgcatcacaagtcacaaagacacat

SEQ ID NO: 66254 - DNA, 512 bp, Arabidopsis thaliana landsberg
ttaaggcgtgttaaagttggttcaccagctttgtaacatacataacacatccatcgctatcaaaggaagatttgatcggacgaggaagctgagaaaaaaacaaaaacgacaagagattcattcaaacttgcacgccaacgccggattattcccggtgtatacgtattttatacggttctatttaggaagaagaagaagaagaagaagaagaagaggaaattttaaggaaagagtttttgtttgaattggaatggagggtgttttcttaaaaatgtcggaggttggagtatctccgatgataccggagggaccttcttgtttgatatgagccatcggaggatgtgatggggtgatatgaacggctgattccctgccgagtcgggttacacctcgcagtctccgtccgattgagtctatccggatcgctggtaagagagaggaaaagggaactgtaagagacgacgacgccgtttcgttggagagaagggaccggaaccgcaacgaaaacgggg

SEQ ID NO: 66255 - DNA, 440 bp, Arabidopsis thaliana landsberg
  unsure (1)..(440): unsure at all n locations
nnnnnnnnnnnnnnnnnnnnnnnnnnnnnnnnnnnnnnnnnnnnnnnnnnnnnnnnnnnnnnnnnnnnnnnnnnnnnnnnnnnnnnnnnnnnnnnnnnnnnnnnnnnnnnnnnnnnnnnnnnnnnnnnnnnnnnnnnnnnnnnnnnnnnnnnnnnnnnnnnnnnnnnnnnnnnnnnnnnnnnnnnnnnnnnnnnnnnnnnnnnnnnnnnnnnnnnnnnnnnnnnnnnnnnnnnnnnnnnnnnnnnnnnnnnnnnnnnnnnnnnnnnnnnnttatgctctttggtcactgactgtaccgatggtgttagacacaaactagaggttactatcatgtgtgttcaagggaaaataatgtgcacctttctttttctatactttttggagctaacttatgaagaaaacgggtattacctttccaacttttaattgctaacaataat

SEQ ID NO: 66256 - DNA, 371 bp, Arabidopsis thaliana landsberg
gtatactgcagaaccactatttttttagctcattttattttgtcattctttaacatacagaagggggccgggatcatataaaaatcggggggcttataatccttacaacaaggccaccctatgcaactgtcggacattacgaaccgttgcaggcgtggatggctaacataagtgacacctaacatattataagacctacgctcttggagatccggactttggcaaacccatacacctggtggactcttaggactacctctgcgagtccatacttttctgcagacttcttccgtgtcgatcaacaccatagtctattatcgccatatgaaccacgctggctaacaggcccccgggtgccatatcatccgcac

SEQ ID NO: 66257 - DNA, 512 bp, Arabidopsis thaliana landsberg
cggttatgatgatgatggaggaggagaagtggtgacattattcgtcacttaacgtcaaccttcggttaatatattattattataatatatgtataatacaaattatggatccaacactaaaagtttgtttatatacaaaaacaaattgtatccatatcgaaatattatgataataaaaaataaaatagtaattattaacgttttttatatcgattttgggaacagtatgaaagcaaaacatagcaaaattttattgtattacgactgattagtgatttattgcatacaaactcaattaccaaccgcatattacttgcgtttttaattgtgtctatgagatgctagaccgcgtatatattgtcatgttgtagaataaaatatatacatgattgcgtactcctttcctttttttttatcaaccaagaagtatttgtatattcagaatcgaaacatgggagagaggaacatggtccgcgtcatggatattctgatactaaccctacattattaat

SEQ ID NO: 66258 - DNA, 304 bp, Arabidopsis thaliana landsberg
actctcaacactctggatcgataaagattggcggttttcggacactggcatgcgattttcagtttagaggaagcacctgataataagacaaaccataattagacctttgctaatttggtaaaaatgggaccgcacaaacaagactgccatgctccataaattgacaccaagagctgattatctttcatttatttcaccaagaccagctaaatagagaaaagaacaaaaacactaacctcaagaggatcaggagagaaatagagataccgaacatttctaacgctatttataagctgccccacat

SEQ ID NO: 66259 - DNA, 567 bp, Arabidopsis thaliana landsberg
  unsure (1)..(567): unsure at all n locations
tttgcacaaatttatagttaaaacttaaaaacgttccatctttgaaagaaaatagaggtactacaaataacagtaatataggtagaagatccatgataatggatttttgattttttttggtttgttaaaaggtattcattaatcatggcaaaaattcgcaacatgtttgcttgcatacgctagaaaagaaagaacatgatgagttacaatttttttaatcttctccctagctatcccaaatatccgaaaataaagaagaagataatattcaggattgagtttctctttttataaacaatagaaaacatcttcttctttgcttgatccttatcccaaaaaatgattggccacaaaattttgaaatattttcttatacattttccattccaccattaaatgtctcgtctttctctttttccctctttcataagtgatggatttgaaccaaccgacttanaatgggccggtcttaaagccgcaccacactaatgggcctttacctatttacaatttttctgtctattgacagtatataattggcgggatcaatacacgtgcttaatacta

SEQ ID NO: 66260 - DNA, 507 bp, Arabidopsis thaliana landsberg
  unsure (1)..(507): unsure at all n locations
cgttgattgcataattttttaccattatgttccatgaagtcaaattggtagtttaggtcacatcaaagactctccgagaatactcaactctcgtcacattcaccatacatatccatcaatggattaagctatggaacatcaagctttttctttctatttcagaatctgagcatgaatgtttttcccgtggagaagagcagcgacacgtgaacaagctggtaatattgccgtctacggcgaccaacttaacccgatcatctttttctgcgtcttcctgaacagcataaacatctcatgaacccgaactttcttactgagtaccgacattaaagaattccaagaacacaacatttttgtcagacattccattggacaccttacctgnnnnnnnnnnnnnnnnnnnnnnnnnnnnnnnnnnnnnnnnnnnnnnnnnnnnnnnnnnnnnnnnnnnnnnnnnnnnnnnnnnnnnnnnnnnnnnnnnnnnnnnnnnnnnnnccgaagatcttt

SEQ ID NO: 66261 - DNA, 499 bp, Arabidopsis thaliana landsberg
cggtatccccgagccggacgcctggtcgcacatcgccggctatgcaccttacaacgatggatccgtgcgcttctgtttgtacacaccacccagtggacggccggcaagaactttagcggatcgggtgcgttcggtccctggatggccacgcggggcgaggtgccggatggtgcgcgcctggacctggtgacccgcctgaacggccgtgaactgcagcgcggccataccgaccagctgatcttcccgatcccgcggctgatcgcgtacatctcgacgttcacgccgctcgcgcccggggacgtgatcgtgaccggcacgccctcgggcgtgggctttaagcggacgccgcccgtgttcatgcgacccggcgatacggtggaagtggaggtgagcggtgtcggtcgcctggtgaacccggtcgccgcggaagcgtagagcgccctagcgccccggctcggcgagacggcccgcgtcggccgtactgtcgcccacttttggt

SEQ ID NO: 66262 - DNA, 599 bp, Arabidopsis thaliana landsberg
gaccacataaccacataaattgactctaaataaccgggtgaataaaccggttgggtttagaaactgaatcgaccgaaccaatttgaacaaatattccattgccgcttaaatggcgttagtatatacactcattaattgtgaaaagctgagagtaactatttgaatttttgaataaaaataacaaatatgaagaaaattatgtcaaaagataaatatctaccctatactattggctaatgcatgatccatggtgcaagaagctttatccacaaaacatgcaaatctcgtggaagtaaactatttatcaaatcactaatcagcgagtagactttttctatatacattgtcaattccttcaatagtgaaaataaatcttgtcgtttttcagacgaaaaatcttatcttttcgtacgattttatgcaataaaagattcttatattttttccccttatttattctctcagattacggatatttgtataaaacgatgagttacagatagagacaaaaattgtgatgtttcttcatcctttgttttccacagctaaaggtaattagtttgacgagctggcaaaacatatcaaatgacttctttatt

SEQ ID NO: 66263 - DNA, 581 bp, Arabidopsis thaliana landsberg
  unsure (1)..(581): unsure at all n locations
tctttggtgctcccgtagattatacccccaccgctgcaggttgtttttcatttttatattcatcattgngtacccgggatacggcacgaccggaaggatcgttcaggttttggaaagaggcatcccatgccaatgcctcgggggtgctgcatgcaactgagggaacagaaggcacacaacgagcagcagaatcggaagggaacaggtcttcgaatatagaccggtaataatattcttctttggacatcggtggatggatggggaaacgggcagcggcaccggccatatcttcgtcactcactttttcggatgctgcttgttttaaagtatcgatccagctatagcccactccatcggaaaattgttctttttgcctccatgcaatnnnnnnnnnnnnnnnnnnnnnnnnnnnnnnnnnnnnnnnncattttttcatcttgccatcccgggccattttatctccagggtttaaacgcatggcaacatcgataaattctttatccataaagggcactctaccttcactccccaggatgccagagacttgttggtcccgagacagtcatataaatgcagcttac

SEQ ID NO: 66264 - DNA, 765 bp, Arabidopsis thaliana landsberg
cacaatttctgtttcagattctgcactaacaaattttgaattctacggtggtcaaatatgaataccaattcaaacaatatggaaaaaacaaggttattattgaaattttaaaaagtatttctacaacacatatgttacatatttgcaccctaaaaacttaatgttctagtatttttttcccccgttttaaagctatactaacattgtcaaagcccaagtcatactcgttatgtatataaatattacaaggaaaaaaaaaccagaagatagctagtgaccgatttgtttgtcaagaaatattggttgtatagtaaatttgcgacgttatgtaatgagagtgtgaaggttttcaggatcattacaaccaaaatggttgtcggatcatgtgcatcgaaaacggctgtgacaattttgcgatatataacgagagtgtgaggttgttaggatcattacaatcttgtcactcatcacaaatgagtggcaaataagatagttgtcaagccttcagatgttagaattgatttagtgttatttgatatcaaatctttcgaatattgctaattcgttgctaatacatgcatgacgatataaaatgattctgaggtacattcgcaaggaacattagattaaaagcttttgttgtttgccaattatttgggtaccattatccttaaggaactaaaaaagatagcaagacttcctttgaggttaatgtgagatggttttataggcatggagatatatatttctttagagatatacata

SEQ ID NO: 66265 - DNA, 288 bp, Arabidopsis thaliana landsberg
  unsure (1)..(288): unsure at all n locations
caaacacatacgnnnnnnnnnnnnnnnnnnnnnnnnnnnnnntattattaatttttgaataacaaccccgttcaaagtaacctgacgacggtgagcggtacatttacggattccggcggaagttcggcggattacagcaatgatcagcgttattttacattgatccagcctgcaaatgcgagttcggttaccctgaatttctacagtttttccctggaggcgaactgggattatctgtacatctatgacggtgcaacaaccggtgcgccgctgatcggaacgtatacc

SEQ ID NO: 66266 - DNA, 378 bp, Arabidopsis thaliana landsberg
gcggaaatccgcagccccaagagcgcctatataaggggatgcaggtaaaaagctcgtatctgaaccttgacatgggtcggccggaccacatccggcgtgcatcggacggctggccactcatgccagacatacgctccagaccttaattggccaacgtccagcctgccgacctgtaacatccaagacatgccatggatacaagcacgcctacgcatacgatccactaccatgcgatcacataatatgactggcacactattgcaccggccatggcgatcggactaatgatgcacacgctcactatggggcatccaaatcccatcgaaccaggctaaagccgtatgctgatgacagagcaacaattgcacaggcactacc

SEQ ID NO: 66267 - DNA, 547 bp, Arabidopsis thaliana landsberg
  unsure (1)..(547): unsure at all n locations
gatcttcaaatgactacctagcaatctccgaaatataacttctcagcggacgttgccgagtggggcaactggaccaaattgcggcaaatttctctagtcttcgataagcaacggaaagtgagacattctggagaacctcctattggcagtccatctcggaatggtagaaaaggtacgatgaggtttaggtgagagaaaataccttcttcgagccctgagtagaaatattatcataccccttctagctctgagtagagatatcaacatgccccttccagccctgagtacaaatatcaccagcactgagtttcccaaatcatctccgcgacctccttcagctgctgctctgagatttccagatctctctcccgtgggcaggatggcggaagacggaacagactcgcaaatgaaatgnnnnnnnnnnnnnnnnnnnngcatgtctggtttcctcgcttcatgttggtaatctagatgacctgtgagcgatggatgcggtncgtcttgatctcccacttctcagtcctgattccggctgcgactgatggat

SEQ ID NO: 66268 - DNA, 538 bp, Arabidopsis thaliana landsberg
cgaccatccatcatatgcggctgcggcttgcttttatgactgtttttccgataccatctccgataaacattatcattgtcttcttcttaggtaattcgacgttctcaaaatattccccaccttttatatagataataaatctacccaaaaaaaaaatattatgtgcatattagatttataaataatggtactggacatatacggaatatcgcgaaagtattgagaattcttctgcagaattactaataaaatcacatgcatacggaatagaatgacgaaattaataatccaacaaagtgaataaacaatatatgatcggtcaaaattgtgatattcaacataactatatgatcttaatttaatgtagtcaagtatcaacaaaaaatatataaaagtaaataaatgaacaaaattgtgatattcaacataactatatgatcttaatttaatgtagtcaagtatcaacaaaaaatatataaaagtaaattaaatgaacaaaattgtgctattcaacataactatatgatcctaatttaat

SEQ ID NO: 66269 - DNA, 285 bp, Arabidopsis thaliana landsberg
gggccctggccgctgcggacgttcgtccctaggggcgtggtgccgccggtgccacgcttgccgcaggcgggagtagccgcaccatccggaccgagagaaccggctacgcgccgggcaccggccgagacacctggccgtggcaaacggcctggcgactcccgccgccagcgtgaccgccccggaccgtcggtccggggcgttccgcacgacggcggcggagcagccggccgacgatccgctcccgggcgacgaacgggtgcgcccacaaccgggcgtcgtccgacc

SEQ ID NO: 66270 - DNA, 621 bp, Arabidopsis thaliana landsberg
  unsure (1)..(621): unsure at all n locations
cagctcgccgcgctgccgggggtgcgcacgcacgacctggcggcgttcgcggacgagtccgccgatccgcccgagcttgccgagcccgtgacatggaacgacccgcacctgatcctttacacctccggcaccaccggtccgtcgaagggtgcggtttgcccgcaggcccaaggccacgctgtcggccatcagatggcctcgctcaacggctaccgcccggaggatgtgctctacacctgcctgccgctcttccacgccaacgcgctctggtataccacctacgccgcgctgtgggccgaggcatcggtgtcgctctacccgcacttctccgtgagccagttctggtcccagatccgtgagtcacgcgcgaccgtgttcaactgcctcggcgcgatggccaacatcatctggcagcagccaccgtcctcactggaccgcgagcattcggcgcggatctgcatgatggtgccgaacccgcgtgagctgagcacgggctttctggaacgctacggcacccagtcacgtccgtgtacgcgatgacggagagctgtgcggntactggcgttcggccgaacgatcccgccgagaaggcacccttcgccgggcgtgtgcgtgcggaca

SEQ ID NO: 66271 - DNA, 1613 bp, Arabidopsis thaliana landsberg
ttctatgaacacattttgaataaaggtaactatttttgttcgtttactgattatttcccctatcgtatgctatcttattctaactcccattgcaattgtataatgttactgcagcatgttccttctcctttgatctggcctttgaatgtcttctcactctacagttagtggtgacctctgtacaaaaatatcttggtaaggtatctgaagaagctaacagaaagagaaacccaggtcattttcatggtcttgtacccaatctacatgccaaactgggaacttctgctgagaaacttctcaggcataaatgggtcgatgaaagtactgataataagggcttaaagaacaaagtatgtccatttgtgtcaaatttgcggatagtacaatttacagtagtgctcaatcttctgaatgtgtatagctttgggtctgtgcagggtgaaatggttcagaccatattgcgaatatacctggaagccagtggatccacatctgatttgcttgatgagcttgcttgtaccattttacctcaggtacatggaaaaatatttctctgggttctactttcatagattttgatatcttatgataacacaaaacgtccacttgggttatggttcatggaaactaaacccatcttctcatgttgcgttgattaagtgttacatcctgaaatggaaaatctgcaaatagttaaatacctataacttatttcatatggagaagtatattatataatttaactcatttcacgtctctgaaatttgtttgcattaggcctctctatccaagtcaacaggagaagatgatgatgcccgtgatcatgaattcccaaccctatgcgcagctacttttagaggatggtacaagacattggtaaggcaaattcttagctatctcatatttatttcagtgagtaattgcgtcagagactaatagcctaattttcgctggtgctacatgcagcttgaagagaatcttgcaattctcaacaaactggtaagtaatccatcttagtttgtccgattctcttcgcttattattacaatcttctttgctatacaattacagttctcacctttgtgttctatcatctgtatcctaatcaggtgaagacggttagctcagagaaacgacaaaactgtcaaccgaaaactactgaggcacacttgaaaaacattcagaaaactgtaaatgtggtagtatctttagtcaacttgtgccgatctcatgaaaaggtaaccaattttgttgctacgtatcatgagtataacacattgcgcattaaacctgtcagatatattgtaatattgatggtattataatgacttaaacaggtcacaattcatggcatggctatcaagtatggtgggaagtatgtggactcatttcttaaaggtataaatttttccaacttcttatcagacaagagttcgatatatacctgattagctggcttattaatttgaaaacttgatattggaaaacaaaaaacatgtgcagtttttgatttcttggaagcacattttcaagatcataaagaactagtcatacagttggtaagttgtattgtactacgccgtttcttttctatatctctctcccacagtcca

SEQ ID NO: 66272 - DNA, 498 bp, Arabidopsis thaliana landsberg
ataatcaacattttaaaatatataattccgaatggaataacaacaattcatcctatatgtgaatgataatgcatgcataaatcattaattatatgtatatatactaatgatgagatcataatttccatagtttagagagaagatgaggctggatagcatgtgctaagagcttttcattaaccatctaaacacttaaatctaattagtttatccacattttgtttttttgtaattaaatttcacatttttttttattttaagaagaagttcagatttcaataatatgacgtctttcaattagagccgaatcaaaccgaaccggattaattgttattattctcaagcagcaacgataaaaaagatatctaaaaggcccaaatatagaaattgataaaaggcccaaatagaattcgtgcgactgtggaatttagggttatgcatccaagttggtttttaggtattaagtgagcgaagcgtctaaactaggggtttgggtag

SEQ ID NO: 66273 - DNA, 561 bp, Arabidopsis thaliana landsberg
gggattgccctggtaaagcgattcaaacaccgtctgcgacgtgtcgcgaacgaaattcccgtcgacctcgccggcgacgcgcacgtcggacacttccttgagcgcgtcctccaggcccttgcggcgatcgatcgccactgacgtgccggcggtgccgttgacgacgccgatcaccttcttgccgtccggcccgggcttgatggcatcgaacagcgccttagccatctggtagccggcgtcctcgtcgctcggtccgatgaaggcgatatagttcgggaaccggtccgactgcggctggaagctcgggtagctgtcggtcaggaccactggaatgccggcgtccttggcgagcgacaggcctcttggcgcggtcgcccagtagggcgtgaagatgatgccgtcgacatgctgagcgaccaggtcctcgagcgacttgaccatctggtccggcttggtgtcggcattgagcacgaccaggtggacgcccaattcgtcggcgcccttcttcatgaaggtgacgtatattgtccagaactgcgcatcgagcgtgggaaccaccac

SEQ ID NO: 66274 - DNA, 1480 bp, Arabidopsis thaliana landsberg
acggctagcttcgcagcggcagaaagtccctcagagaaattaaactggtctagtctcaccccaaagcttctcatctttgatacaagttttagcacctcttctccatgaccgtggtgagcatttgccgcaagcatagcattccacgtgatgatattcctattatctaatccgttaaataggtcctgactcgagcttaaatcaccacatttggcgtacatagtgataagcgaatttttcacgtgttcatctgattcaaacccagcagaaactatataggcgtgtaatggtttcccccgttcaagtaaatcacccggcaataagcaagcactaagaacacttaccgctgtgatataatttgaagaaacaccttccactcgcatagtttgaaaagccgccagggccttgtcgggatcttcgtcctcagcatagccaccaataagagcattccaagctactacatctcgtctaggcatctgtaatagtacccgtctcgattcgctcatctcacctatctttccgtacatggaaaccaatgcattaccaataatctgattgtaaaataaaccgctgaccactacaagtccatgaaggatcctacccttctcaaaaaaatcaggagtaaagcaggcagccaatgcgcttgtaaaagtcacatagttcactgattttccggaacttatcattgaacaaagaagtcctaaagcatctaagctcctcccatcgttgacaaaagaagccatcaaggagttccatgagatcaaatctttagtgggcatttgtttgaacactaaatttgcctctactgatcttccagcgcctgcatacattctcaaaagagtattgcacacacaaacaaccgaatcaaaccccattttaaccactaaaccatgaattcctctaccccatttttggtgatctacatgacccaaaactgataacagagtagacacagtggtggagttcacttcatcatgaaaacgacgcatcaaactgaaaatcctaaatgattcctcgatatgaccattttgtgcatatgccgcagcaatcgaattccatgaaattgtgtcacgttcagacatttgatcaaaaatataatttgcatagtctacatttcccatactacctaacatggatatgagcgaattctccactgccagcttactctccagtcccgatttgacaacctgtccgataatttgacgacccaaagattcatctttaagcaatccgcaggaactgattaccaaagacatggaattttcgttacacccaactccttctcctctcatacctttatagatatcaattacttcctctggctcacccttatccgagtaaccaaccatcagtgaagtccaagacaccacgtttcggtcaggcatctcctcaaaaaccttccttgaacacgaaaccaatccattaaccccatagagatgcaagatagcagtactaacgtaaacatcagacaacaaaccagact

SEQ ID NO: 66275 - DNA, 545 bp, Arabidopsis thaliana landsberg
aaagccaaagaaccgaagaaaaaagaagctgttgtgctagaggagattactccgttgaggattcttactccattgaaacctggagctgacgtttatggagatctgttgttactatacacaaatgtgctgttgaactatccagaatctgagctagtgagatctgcaactcaagcaatcttagactctaaacacttcatcaaagagtggcctatatgggacaacaatgacacagtcttgcaatttctttgccgtatcaatccaagtttggttgatgtgagatccgaacagaccacagagctgcctccaggcgaattagtcacagtgccattacaagctacagtctatgatctaaagcaagccattgaagagaccttcagagatacttactgcatcttgtcaaattttgtggtgactgagattgatgaggttgaagaagatatgagtttgatcggttcttgttctgctttaacagtgagaggtcatgggatagaattggaattcaaaactaagggtcaaggtggatgtgatacatgggtggtgaaatg

SEQ ID NO: 66276 - DNA, 545 bp, Arabidopsis thaliana landsberg
ggacccgaccaaaaactgaacgggtacgcacgtcgaaattaatttcagccccatattgagaaatttaagagcactgcacaaccaatcactcccatcattttcccgccaaaaccatagttcacgaattgcataaactgaacaaattttgatataatgttttatccccaaaacgtaaaattatggaataccattttctcaccaaaaacataaatataaaaataataattaattttaggtttatttggatttacttatatctttttctgaagttttggttagaaataatctaacttttatttgttagatgtaaaccaaaaaattttgtaatttatttcatattatggaccaaataaactttgtaactttacgtgtaattataggtttatgatagactaaacttagatcttaaaatgttttacatgtctatgaaaaatccacaaccttgaaatatgcttaaattcaacttgttttacataatggatcaagtttactgtttgatttttgttgaaaattctactttatattgtagaccaagtccgggtgtc

SEQ ID NO: 66277 - DNA, 583 bp, Arabidopsis thaliana landsberg
tccttaaaatttaccgctgtctctcttaatctccacttgtgtttcattcctttacttgttactaccatggtcgttaatgtgaaaccgtctcttatcttaaaatgtgagccacaatcttttctcttcattcaatttttttcttagtgaaacatcgcttcaatatactcattgtctccttggcatgttgtatcaaataatcttgagattctgactgttttattctttgtagcagtctcatggtttttaataacgagatattacaatgccaagtcaaaaaaactctcaaccctaaatatcccacatacatgaggaatgtggccgtgtggaagtgtgtataagtaatgagaatgaacaggagaaagtgtaagaaataacttttaagaccttttcgtatttgaccagaagtcccaattggcagacgtaaccatggaatgtgggataaagacagatacgaaaggggtgtcagaactgtacgatcctctgcacagagatttaaccgaacgcactacaaactctctttctcttcgtcatattttctttgtaatcggtcaatcactgtgaaatacacattaatattatatat

SEQ ID NO: 66278 - DNA, 778 bp, Arabidopsis thaliana landsberg
cgcgcaatagcgcctgtgatattagcgtgcactctacatcttctttttctcctcgtcctttccttttcttttttaattatactaatgttaggtcaaaaagcgtctcacgttttaatgatgttaatctacatagtatctatctagcaaagttattaaaaaagactctgatttttttaacaattcttgtctcgtcaatcgttgtttcataagatgttccgtatgtagggttttcacttaaaagatggatgaaaatgttctagcaatgtaaaatggatgattttaatgaaaacgttatagcaagcatttgaagtcaagtaacaattttttttggttagatgttcaagttaattgcgttttattttaaactctcttttttattttccgtggttgttttgactgtgcaatattaggattggagtccatgttttgtgatatttttttgaatttgatagcttgattaattggttactctgagatattgatgcatggttatatactttgttttctagagtgaaggagaagaagaaggctcaaaagcgaattcggcaaccaagattcgcattcatgaccaagagtgatgtggataatcttgaagatggatatcgatggcgtaaatatggacaaaaagccgtcaagaatagcccattcccaaggtcgtatataagtcatcagtttctttgatcattctcttagttaacggatatgcaacctatatttcttattgttgttgtgatatataggagctactatagatgcgcacacagcacatgcacggtga

SEQ ID NO: 66279 - DNA, 1127 bp, Arabidopsis thaliana landsberg
aaattcacttgaaaggtttcaacaaatctagaaattatattagcataagaaaacccaaagtaaattaagatatggtcatttaggttgatataaatgtttgtaatggctgactattttttttggaaaaaaataatgtcgtaaaaaaaacatttaattcgggagttacacttctaagtaaaataacatgttatctagaataacacattatgcttttttataacaaaagatatttaggaaaataacacccacttttttgttttcctaaaaaatataatacctttaatagttatatacctaattttatcgtcatttactgctacacatcaaaaaggtataaatatgattggcccaaatttattaggaagggcagtaaactccataggacaacacaataattattataccaaagaagctgcaccaacggacaagttccagagacatatagttgtatatactcataacgtcctcgatcgatattatttaatgtcggtggatagtaagaaagtaatgtaaaacgacaaaccaaatttaaaaagagattatgacggaaataaccttgcagatggacatgaagtcgtggtccgtcatgctatcgccgagccccaaatcaggtaaatcagacgcaaggctaccaaactctctcaaaacgacgtcacgtttgtgctgaccgacgagaatacctgggtttctggtgaacccggttgcccgacccgatttggagacctctagctctgttccaagaactttatcaactcctaggaatgttttcacgaatggctcgaccataattcgaggactcgcagttactatgtaccgtttcccgaacgtgttgaagatacgccaggtatcgggcctcacgtcctccgcgtagaacctcgggaggacggaacggaccactagctcaacgtctccgatcttgagacccgcgaacgtgatgaagacaaagacgttgatggctaaagtctcggagatggtcaagtacgtaagataaacgaatggtacggacacaagtaggatcaacgctcggagcaagctccctgcctcgagggctacgaggaaatagtaagggaaggcgctacgagagattagtagtgttccgtctagatcaacggcgacggtatggttgg

SEQ ID NO: 66280 - DNA, 1747 bp, Arabidopsis thaliana landsberg
ggttgcaaattactcaaaagatcagaaaagcaaaaaagaaagacaatgcaaatcatttttggtttctataatgtttattttcttttattatttctttcggtacgaaatgagtgaagatggcacaaaaggaacatgagaagaatatgaagcaatggattttgagaaagagaaaaaaatgcattggaagtaaaatgatatagaaagaaaaaaacaaaacagaaatgaaatggaattatagaaatgtcttaatgtgtactttggggtgaatgatgtatccgacttattactgactcatcagattcatgaactaatggttcggttaccttcggagatacatccccaacaactacacttccatctccatcaccatcatcagcttcagcttcctcaccatcattagctcccttcttctcttctgcttcttccatgttctcatcttcagataaatctttccgctcatcaacatccatagcctcgagagtcggtggtgctactgtcaaggtaactgcatcaccttctggaacaccatcatgctcaggagctgtctccattgtttggtctacaccagctccatcatctagctttgcctcttgctcatcaccttcaatgtggtctaaagccacagcttcctcagaaccttcaatgtgatctgacgacacagcatttagagcctcaggtgaattgtctggattgggagacgaagatccttcatctcgtgtttctgtctccattttggcaccagcatttgacgacactttttgcagttccttttgggatgtgtctgaatctgatacatccgcaattttcatatctgttgcctcaattgaactatttccattccttgcatcattcagatcatcattgttttcaactttaaccaagttggaaggaggcacttgaggagcctcgtgatttttgacatttggaagaccctttatttcaaatctttgctccttgtagaaatccatagcaatctgcaagtgggaagctcaggttattgtattgacataagtctcgaattgccaggagctactaccagaatcttattttccttgtcttagtgcagtacctgaaacactgaactgttttgagatggaaacaatgaaagagccttcaaggaattactgttgcttttggtcactctctttccaccttcctgtaattaaaagaatatagagagatatgagaaaagggtctcaaagttgcacacaaatagaatgattgatttctatgtctgaggatagagaattttaccttgagatttacaaacacagcagtcccgtcatccattgctagatgctcttcgcctatcaataaactaatgcatttacgcagctcggcatcagcaagtcctgccgatacatcaagctttgagagataatgccggcagtaacgttcagtgttatcaattgtttctgaaacaggatcgtcagctgcaacttcctccatcgttttaggagaacttgcatgcagttcttttgctggagatgttagattcgacccagcttcaacgctttttgccctgttattatcagagtggcttgtttggccgccaagagactcatcatcagcaacctgagctgagttatcatctttaacagacattgatgagacttccatgctcgcatctccatttcgacttttccattcatctgcaccagattcccagccccggccattcatccgcctgttttggtcccattcagatcccccatacatgtttgattcatccctaacactattactc

SEQ ID NO: 66281 - DNA, 379 bp, Arabidopsis thaliana landsberg
acaaatcaatgtcaagctttatcttacacttaaaaactaaatgttatttgaatcatcgagggatggtgtgcgagattaaaggattgccttgctaactttgcctctttacgttactttggttaaacccaattgttaaaagggagaaatcgaacattggttatttgacttttgagtatattagtatcaaaatgtataggtaataatgaaaaaatgaggaagtgcagtgcaacaaagtccattgacattgtttagttaacctgatccatatagaattaaagagtgataacataagaaaaaagaagaagaagatgaaagagtgataactttttcttttgatcagcttccaggaaagagtgataacatatatgggtgaactctc

SEQ ID NO: 66282 - DNA, 1599 bp, Arabidopsis thaliana landsberg
ttgactctcgaagtgccattgtaggcagtagttatactttaattttctggattaagtttgcagtaagtggggcagcaccactctcatgtacatgtactaccaattaattctgacagaaatctactaggttaaattttttttgttgattatacattttaggaagaagagttaacacgcaatgggttgagtcacatattcatgatattcagtctcaccatgttgtccgaatgcaacttaagtatggagatgtaaaagacaagtcgagtgttacaagaaactacagcatacacagaactaaaagaccagaacagctaagcaggtaaaggttttcacggtgaataatatttaaaagctgaagagatacctttacagtttcatcacttgagtatgcatctgccacatcgcacagctttccactaatataggaggcagaatatttcccatcagctgtgccatattctcccaaaacccaagaaatgacctgaagtttaaacccaatagtaagaaacaaaaattcgttgcggaaaaaaatggtatgtggagagatcagagaacaaaatcaacctgaagaaacagggatggaagttttggttcgctaataagctgcaagtacgattccacctgcatcaagaaaaacacactcataagccaataacatcacactatctaagccaacaaaacaagaccaggaagtaagaaaggtgactgaagttactcaatactaactttaagattgcaatttcagatattaactcaattatctgctaaaaatgagttcatatatcaccaaaacaaaagctaccgatttctttgcacattaatgcagaaccaacagaaactggaatgaacaacatacagctgataatctgagcttgctgtctgcatcatcatcgtcctctccaaatccttcagcaatcaaacgcatcagattatgtgccactttaatatttaccagatctcctgcatgctcgaagactttattcatgatctgcagtacagaaacagttaaacttctgtcagaaacaaagagtatataagtttattgtcaggccacagttacaagggaggttggcttgctacctggatgaaccattgattgcttggagcaaattgttcggccaactcaacacaacgagatgctatctcagttttgtaatgattgtcgttgatactaatcatgtaatcaatcattcggtcgacaatcacttctacattagacgacttggtcattttgtacaacaattcaaaagtcttcctctttagtgtatcatctggatcctgttgaacagtagcaacgaaacgaacatcaggcaagaaaacaaacaattagctcacatgacaaaaaataaaaaaaaattctcttgcttcagctcacctccaaacaatctatcacagcaagttggtgctgctcagcaatgtctgggcttatttttatcaatcgaccaagaccatcaatacccatgtacttcagattgtgactatcactctgcaaatagtttgcccgggatttaaataacaatcgtaaggtcaacaagagtatatgcatacataccaaaaagacaacaaaccttcaaaaacttggagatagcatcagcagca

SEQ ID NO: 66283 - DNA, 607 bp, Arabidopsis thaliana landsberg
  unsure (1)..(607): unsure at all n locations
ttcattgttcaagacgcacacgttcggtctcaattgttcttcgagtatactatgcatagnngctttatttaggcatcaaagnnctactgattgtgcaagatttaaaggagtgtcaagaagcctagtttggtataaaggtttcctactttattcaatagtaggccatgccttatatatacatgagatgagattaaacctaagcacttacatataaattacacaattgtagttagactatataatatttgcacatatgacttacacaattgtagttagactatataatatttgcacatatgacttacacaattgtacttagactatagtataatatttgcacatattgtgtattatgaatcattaatgatttataaattgtaatgcttaggaagtagattaatgtgaaattaaggtccatcttattactataaagtttttcaatattttcttttaaaaaaacgaaagcaaatatagtagacaaaatgattttacagaagtagagaaacccggaaaggaagagtgactgagaagtaatgagacatactataatttatgaccttccactagaacaaataaaattaactcaatgatcctaacttttcttttc

SEQ ID NO: 66284 - DNA, 167 bp, Arabidopsis thaliana landsberg
gacctatattatgaagtaaacaatattatatttacatttattatcattacatttaccaattatcaaagacatggaagtactagtgtggtttattgcacaacagtgcatgctaactataataagcgatatcatgatccaactgaagagaagtaactattaatgaataa

SEQ ID NO: 66285 - DNA, 534 bp, Arabidopsis thaliana landsberg
cgtctctattatcacctaatttcttacctatcacagttaatctccctttagaaaaaaaaaaaatttgttctttatattgaaaaaagtataaaaccaaatctaaacacaaaacctacctagtgagagttctaacatccacgattatcgagttaatactagttgtcaagtgtaatatatggacattggcatcgagtgtcaaactacgaaggattcgattcgatatagaaggtattcccttactatacagtattaatggattggcgacattcgacttcgaagattgggattgttgaagtgactcttcatcctctatgctatgattgggcttcattgttacaatttgctacaaagggcaaacttagatctcagttatttaaataaatacaacaagcaaatggcttgttctacgtgttactatatatttttggttgcaacggatataactaacgtgggttattgtcaaaataaaaacttgtatggcaaaaaatgtgaatttaagtattttatggttcgggcttttgaaaagagaacttt

SEQ ID NO: 66286 - DNA, 507 bp, Arabidopsis thaliana landsberg
aagcctttttgggatattgtagtacccttttgtcgctgtttcttttttgttttacatgcatctctggacaatgtagatattgagagtaaatcagaagtcaacgttcgcgtattaatttttaacatttctatttcagtgaacatactctttctaaagcttactcttattaccaagtagcaacacaacttggtcaaagactcaaaagtacatgaaatcatcatacaatccaacacttgagaacatgtggcacatacacagaaactaatatgggacgttattgggcacgtttcttatgacattactcttcactccgatcttggtacgcattgtctcgcctctcttgctcatcttcttgcgcactttcatcctcaaagtctcctctttcgacggtactgtcttcagacccaggctctcgtacctgagaatcaccatctgttggaataacctagtttaccttgccgattatctgattggatagactccgatgatagacggtatgagaaaaca

SEQ ID NO: 66287 - DNA, 386 bp, Arabidopsis thaliana landsberg
gtgttactggggtctgctgttgctgctgcgcggtcgcggcgagatgcgccggctggccttcgccggactgatcggcacgctggcgctgaacacgttgttcaccctgaccctgtggcaccgctacgacttgcgtccgacggcgcaattgctgggcgccgctggcgcgaaacaccacgccatcggctacgtgggcagttacgacggcgaattccatttcgcgggccggctcacccaaccgatcgccgagctgtacgacaccaaggccatcctggccttcagccaggtccatccggacggcctgatcgtgacgcatccgggcaagctgacgccggatatccttcgctacgccctgctggcgcagcccttccgttcgtcgtgggtggtgg

SEQ ID NO: 66288 - DNA, 449 bp, Arabidopsis thaliana landsberg
tgggcccccacattccatttatttacataaatactaaatgataataacaattattttactttttgatatcaacacatttttcttttattcatggggtcctagcccctgaccatgcaataaaactattattacattgccacccataggtggatctgggaccacaacgcaatttgatacctactttagattctgctgtcctaaacttggcaaaaagtcaacttttattttcaaaactagatatgcggggggctgatgcctgacccttctgaccaattagtatttcaaggacttacaataattaccaaatactttcttcattcacacagttataggtgcattatatgtgaatagaaatttcaaaatttacttcttgatacaacttaagttactacgtgtgatgtacacacaaaagacactatattattatccttatatgtaaccgggacatt

SEQ ID NO: 66289 - DNA, 1756 bp, Arabidopsis thaliana landsberg
gcattaaatctgaaaaggccggcctttgagtttttatggagttcattttgtgctagctacatttttcagtacttgaaatcccatccgtttatgcaatctcctagccaaaacagatcattgagttccaaacagttacaaagtcttttttttcccctttgtttgatgctttgttgcttgtttaggaagaaagtgaatatgtggcctaaccggggtattggttagtgattaaaggcctttgttgaataccaatgttgacgaatgcaaagttgaaaaaggagttcaatctttttgttacacccccattgactttatcattttcttttaatcattcaaatcatggtttctttgaaattggaggatatgttaaatcaaccatgtactaaatgactagagaaaagtgaaaaactgagaaggtgagtgagtgatctttcgtttccctctgaaaaaattaaatttctgtttcctcgagaaataaaaacagataaaaaagggtaaaaagaagagatgctttaacacacataagtcaaaaacatcttaagtcaaatctagaagatctaacggttgagattctatctcatcatcttccttcttatcgattaatatataagtataaaataataaaaccctaaaagaaaacaaaaaaaaatgcaaaaagaaaaaatgaaaaaaaatccctaattctctctctctagaaattcttatttttgtgcgtatctctctaaaaaggaatggatcctaacgaaagccaccatcaccaccaacaacaacagctccatcacctccaccaacagcaacagcaacagcagcagcagcaacgactcacttctccttacttccaccaccaactacagcaccatcaccaccttccaaccaccgtagcaaccaccgcttctaccggaaacgccgttccatcttccaacaatgggcttttccctccgcagcctcagccacagcaccagcctaatgatgggtcatcttctctcgcggtgtaccctcattcagttccgtcctcggctgtgacggcgccgatggagccggtaaagaggaagaggggtcgaccaagaaagtatgtgacgccggaacaagccctagcggctaagaaattggcgtcttctgcgagtagttcgtctgctaaacagaggcgagagcttgctgctgttaccggtggtacggtatcgactaattccgggtcatccaagaaatctcagcttggttctgtcggtgggtttaatcttttcttcttttgaatcttatcgttggtcaatttgatatctaaagtttccaactttaaggtcaatgattaatctcccaattcttaaattttgattctttagctgttaattcgttggtgtgatttgagacgtaagtgccttgaattagcattatgtataatttacagcagtagatttacatcttgagtttcttaattacactgaagattgtgtagttagattcttgtttgtatagtttatcaatttgtttcttttttagatcccattgagtatctttcaagtgatcctttagttatattctggaatttgtgttatactctgagctttactacaagttttttgttggtgcagggaaaactggacaatgttttactccgcatattgttaatatagctcctggcgaggtatgtcatgttcttgtacactcaagatccttacttgtaatagagatttgttggtgtaggcacaatatctatcattctttcaattctaagtcattctatttctctttttgtttcggtgat

SEQ ID NO: 66290 - DNA, 558 bp, Arabidopsis thaliana landsberg
agtacttgcttgtattacacacttacactgtcttaaagagatggagagagaagcaatgttgtgtgatttagtcaaacattgaaatgatattgtagagaccgatgaatttacaatagttttatttatttatcttcacttcataaactaatatgttaaatctatcattagatctatgttacttttggcatttttcttcctctttaatttagttttagaccagtgtggtgaaccaatattattataactcttgattagtatggcgagtgtaaccactaagttagcttatcttttgtgtaacttttaacattgaacaatggcattgtcatccaatggagaagtatgtgaaataactggttgcaagcatacaattatatgttatataatatgatatgacaagtgataaaggaaacaaagaagaagacataggtcacatctcacgttcaacacctctccaacattgacaccaattttcttatgtcattggagataaaattaaattggataattcatataattataagagtaaattagtgagagaggcatgtgatgcaagctaag

SEQ ID NO: 66291 - DNA, 676 bp, Arabidopsis thaliana landsberg
atggcggattcagctttcaggaaaattcagatccaaagagatgacactgtaagagcttctcttttttgtctctccctgagttttttttctacttagtgccatttttatggttgtgtttggtgtatcataagcttcgactgtatccgtagtgcctgattttgaagtaaaaaaaattttggttatcctttccgttgaatgaaaatcatcatttcttttgatatcccccaaatctcggaatctgttgtgtatgatgtatggattatatttgatttatcatttcaatggcgtttctgcttcaggattgtgtagtgttgttctgtggtagagaaactgggaatgagagtaagagatgttattattgcttagctacttctgaagatctccgtataatcatagtccttatcaggtttggttatagaactggttgatttaagaaggaagattgtgagtttaggtttcagttcacaaatgatcagtatagtgataaacagtttaggtattgttttgggcaaagttttcggcgatggtatgctttgcttgtaactctctccttggatagactggtttctcttgaacattggagtttcttgattattaagattgtgaaaaatgcatttgatttacctatttttttggggatgatccttctattattttgattttcactcttaagaaa

SEQ ID NO: 66292 - DNA, 2208 bp, Arabidopsis thaliana landsberg
ttgtaccacattacttgtattgtggattttttactttgcctttagggaatatttgggggtgggggggaacatatatctttgggactggcgcaaaagcatcttggtggcgaaggtcaaagcgagttctaattgctctgagataacttctgtgacattttcatctaatggaaaattcattgttacttccgggaataagcacttgaagttctggactgtcggttcttttcagaggacacgttcaagtaaagtaggatctttagcatttcatggaaatcaaactgatgatggttttcaaaaaggaaactcgtttgtgtcagttatatcagccaacagagtgaactctagtggaagtgacgaacaaattgacgaagttatctcaatatacgctctaacagaagcaggtattcgctccacacagttacaactgttaatatgagcttttgtacactcgctctgatgaaaattaggaaatttattctgaggtgtaggtgttctaatgctcatgagttatgggatgttaatcaagaagtcggtggatctgaaggtacaataacttcatttcaatctttttctttgctaaactaagaaccataactggatcaccccatcattgagacatgcataacaatcattttcccatagtccagaagcattgtattttccttgtgagcgtaggcaataagttttgttaacttgtatgcgttgactttaggtccacagacatcaataatttttcatgttagcttgtggaacattcagatacaaagcttccacagccgagcttatttttcatctaacaagagcttcttcgaatggcttgcaatgaaatgtcaggttcaaaaatgttttgctctatctgcatccacgtcgattgatagcctgcgcttgcagcaagggaatggtccagctatttacgcctgaaactttagattatgctggcacaatccagttttcagatgctaaaagcagcaacactgaaaatctgtctcaatcaccagaacccaaaaatatagaatcttcgcctggtatcttcccggacgcagttgcttgtcagttttctaccacagataagctcggtgagtgtagaagaaccttaaaatagcagtacattgcttagctatcttccttttgacaaaaggtggtattttggcttcacagttgtcatctatgggaatcgtagtctctatgtttgggatgtggatgatgtgaacaaggtaactgtaaacgtacttcagtattttccacataaaattagttgattctgaattctttctctgaagtgttctgttgaagcttagagcatcaactgcatatggtgaaacttttcttccttattccagcctactaggtgctccatgatgatatcacactctgccggaatttgggatatcaaaaacctctcttgtggaaatatgcacagtccaacagctgcatgtgtagccaggggatgcagtgaaggggtttccttcactacatgttctgaagatggaaccatcaggttgtgggatcttgctttccaagtgaatccgttagaagccaatgcaagcagcaatccctcagaatcttcaacacaggggattatgcatttaggtaattataaaatgttgtagtatttttctattctagatacttatgttcattgtttgttttcaactcgtccactcaatattttaaaaatgcagctagcgctggcatttttgaacgtgatctcgttgagacatgtggtagcaaatttgggtttcgggcactggctgtaagtgaagatggaaagtacttagcagctggtgactgtggagggaaccttcatatatatgatctgcaagaatcagaatatacatgctttatggtaatactagccaccagtgttttaaattggctctatgtcttcactgggtggtgtccagacatccaattcataagcctcttattgataaccatcttgcaggatgctcatgaagcagaaattcagtcattgagctttagctttcctgtactgacaaacgttgattctgaaaatgcctcaagcttgcttgcttctggtggaaagggccgcgcaattcacatttatgatgtcaaaaggtgtaaaaacaaaacctctgttatggtcttttgatttccttggcaaggccatacaaacttatattttctcattgtcaggaactttgatcccgttgggagtgtttgtggttcagctgctgtaacttctgt

SEQ ID NO: 66293 - DNA, 215 bp, Arabidopsis thaliana landsberg
aagcaatcgcaaatttatttttttaactaccattattttttgtcccgaacgatcaagggggagtattgcgggtggtgttctatgtccacacaatctttccacctctgcactctaagtgttcccccatttacgctggcgccctatgtttctctttccgtcatcgtatgctataacatcgcgtttctgtccctctatttcgtaataaactaacaaca

SEQ ID NO: 66294 - DNA, 1525 bp, Arabidopsis thaliana landsberg
taaatcataatgattctataaagatcatgtagcgagtctccacttggttggaatgagtctaactagtgctacaattctaagggcaccctcaccctcagttacctttggagcaaacttttatgtctaaactctaaagtgggtcacattagtaagtaaactggattgcccttgggataactggtttaccagctgtaccgcaggtcaatacgtcgaaaatgttttagttcttcttgtgcacaaagagtgaagaaatacttattcaaccatcaattcatgaaaatgataaaaagaatattttttaacttgtttttccagtaggaggttcgtttattttatgttcaataagtaatgaaactcatcataattttatatataccaaataattactgaaccggtgacaagctatcctagacgggattttgttccaggttggatcaggcaggtcgggttttaatactggttccacctataggccttgtgggagtttggtttgtggtaaagtataagctaggtcagatcacttacacaggcataggttttgggaaaaacaaaatctttaacaaaagtaacaggaaaagaaacgcacctttgcagatgtggcagcttgcagcttcactgtcatcaaagaaaaacagataccataaaatatagttaaagatcattactctgatatgttatataggtcaaatgtcatgctattagaagctaagcagagtccaactgccatcaaggttactcaatataggattgatgttctgatcaagacaaggacttttgaaggtaagaagggttgtgataggtacatacctcaaaggcacaactttcttacattgctcacacaaggaggattcagatctttctgccctttcaaataggtatgagaatccttttccctctgaggaccttttccgtaattttcctatctcatagtgtctgaaagagcctcctggcttgctagttttccgtacagcttttttctcttcaaatcctttcacaagatgtaaaggcacatgtgattcattcagccagaacctttttcttccactcgaggattcttcaaccatgcaaccattcttcgacacaacatccggaatatttctcctcttaccaaagtcaaggagatatttcacagtctcttcctccgtgcacttcctacggacaattgcttcttatgatagcctgacacactgtctggattctttgtctaatgtaggaagaagatgactgttttcaatatcatcccactttatgtaagattggagtgtcctaatctgtgatcacagaattgttagctgataatcatccaacactgagaagactatagaagacagtgttacaagacaacatattcagtgtacaaaaactgcaaaagtcagtaaaaatccaagtaacagtatatgaaatggatggcacactaaaaaatttaacgaaactgacaccatcaatattcatgcgtacccgaaatgaaaacaaaaattcgtgacacgacaagtattacccatatacccttcgaaacttcaacatt

SEQ ID NO: 66295 - DNA, 1771 bp, Arabidopsis thaliana landsberg
  unsure (1)..(1771): unsure at all n locations
ctttttgacttgcttctccaaagacacatctttcccttcttcctctgttttaggcaacacaatctctttgttttgatcagattagncgatcttttctttagcatccacaaactctggaacctttttgtcatctgcgacctcaacttccactcgttgatcagtctttacctctgcttcacctgtaaccttaacgttcgatgtttcaggagtcttggcttcaaagacttttggaactttaatctctaaatcctctgttgcttcaacttctgaaacctttagaagttctgactctgcgactttaacttcatcagtcttcacttcaacaacttctgggatattcttgtcctccaagacttcaggaacatctgattcttttgtaaccttaatttcagacaattcaggagcagaaacttctggaactttcgactcttctgcaaccttaacaacttcagatgtcttcttagcttccaattcctctggaaacttaacttcccaactctctgaaaagttatcttcagcttcattagctttaggagtttcaggagtcttaacatcagaatcttttggaatcttaacttcgaggtcatttcgagtctgaacgtcaaagatatcttctggatctttggcattagaagccactaaagcagtagtatcaaacattgaaacctttgaagaaggaccggttttgttattggtgtctggttttgtcggagttagatcggttacttctttttccactactgtcttgtcctgtaatcaaaagtcatccacaaattgatttttaaaaaatgtgaataaaaccagaaaaaatcggcataaattattgtccctttaggttccacttcaacatataaaatgtaaaacatatgcattaattattacaaagtttttacttttttaaaaagataaaagatacttaaaacttagaaggcaagataagcttttttttgtcttttgatttatccttaaaaaatgacttatggttccgattgtaataagaaatcaaataaacaatttgtcttaaagctatcaattgctgattatataaccacttacatatatatacaaacatttaaatatatgtggttatgaaaattatactactctttacgtaatttcgttaaataattaaataacaacgattcaaacaaaacttaatattcatatttttatataatttaaagtattttctaatatactatggactgtgttttaatataaactacgtaaaatgaaataaacgattatttgaaagaaaatgtacctcatgaaacaagtgactaagagatgggcgcttgggttgatcttcaatgtcatcttcaatcaaaatctcttttcccttctcgctccgtcgtgccgcagccgcagcttcctccgcagcgttaggagaaatgatgttctcgttcttctgcgccggatctttgtcaagatcagtcggaaccgtcgtctctcgctccaccggaacaagatcctcgtcagaatctttgagaacctttggcttgatggcacagtttcccatctcgtacgttaacacagattatgagaaaaaatattttctctctcttaatttgccttttatcttccgatagattagagaaagaaatgctgaaaacgaaggtaagggatggtcaaagaagagttatgtccgattaattctctgcggccatgaaggaatatagacagacaaagattttatatgggtttttgtggttaacctaaaaaaagacgtaatttgatttgctttatagtaaggaaactatagatataatta

SEQ ID NO: 66296 - DNA, 553 bp, Arabidopsis thaliana landsberg
aaatccggcagcgggttaggcctggcccagacacatattatcattcttataccacggaggaaccattggggtggaaagcgggccgggtaaaggaacaacattcatcattattttaaatttctcgaagaacaatacctgaaaggaaatagttcggaaaaataaaacaggctttcggttcaccacgttccttgattattgatcattccgcgatcaatgtcgttcagttagtgacccgtcatcgcgaggacgaaggacgaagcccgtccgaaccggttcatccgggcgggcgatctcaacttgagcacattataatgagattacttctccgccagccggcggatcgtaatgacgaactctgaaagccttcactaaacgacattgattccgcgatgtggaaaatattacacaatctttctgtgaacgaaagaaaaagaaccgtaccgtccttactccctaaggagttcagcttatgatacctattgtttaatattttggataaattaatgatttctaaaacactgctttcatctttgaaagaacagatgaatgaaaa

SEQ ID NO: 66297 - DNA, 616 bp, Arabidopsis thaliana landsberg
cataataatacggtgattccaataatacgactaacatgatatctatattataatgtatatatatatatggatcattgcaaagaagacatacacaacatgccatattttctccattaacaactgaacatacatcaaataaacttggctcattgttaaaatagtactttttctagctagtattctatgttatttaaattcgtaattcacaacaaaaacgaaatattaataacatgaaagcaatttgaataattaactgtgaactatatatatattatgcatttaaaaaaaaaaaaattataacaacccaccagcggtgagtgctcgggaagtttgtgtacaacaacggaaaaggaacaaaatgaccagaagagattactaagatggatcaacaggatagtcggttaaaatctcccgattggtgtgttatgcataaatctaactacaaagaaggagtgaaattaagactcaaaaaaataaaaatgtctctgaataagcgtcatggtgctttccattcttccattcttcaacacggacacaatttgtccctctgctcaatataaaaacactcacttcaaccaaaaaaaatgcttacttcacaaaagaattaattttaacc

SEQ ID NO: 66298 - DNA, 574 bp, Arabidopsis thaliana landsberg
  unsure (1)..(574): unsure at all n locations
gccgttccgaagttcggcttggtgtggaagccgattggcgacctcacggttcgaggcacctacggtttgttctttcgcgcgccctcgctgggggaactgaacgacaggttcctgatcaccccggtgttcctgacgcgtggcgctgacaccgtgctcagcctgctgctgttcgggggcaaccccgagctcaaacccgagaccgccaagacttggacggcgggctttgactggacgccacaggccctgcccggcttgaaggtgtcggcgtcaaccttcgaaacgcgcttcaaggaccgtatcggccaaccggccaatgataatcttggcannnnnnnnnnnnnnnnnnnnnnnnncgcctttcgccggttcgtcgatccggcgggcaacgccagcgatctggcgctcgtgcaagggctgatcgacgacccagcctcgcgcgccaagggcctctttccggccgtcgcctacggcgcgatcgccgacgcgcgctatgtcaacaccgccgccctcacggtgcggggtgtcgacctgtccgcgcgctacggcctgagcgttcacggcgatcctcttgatc

SEQ ID NO: 66299 - DNA, 513 bp, Arabidopsis thaliana landsberg
ggaagatcaagagagcatgaaaagcgaagttgaggtcgatggccttggtttgattgatgtcgctgttgaagacgatagccttctcttctccgagttttccggtgaattacaatatctctgcttattctccttcaattttggatttatgggttctgggtatttttgttaatttctctgaatctacttgattagtagaggattttgattttgcttcatttgattgatacttgaacttagatccattgtaattgagtttaaagttggaatttgtttgccttttgtattacatttcagagacagataaggatgataaatgtttgaaggaggataaagatctaaacttcatgagggatacacagtattgtgatgatgagatacttgcttcttctgttgaagagaaggaagaggtgcttcaacctcacgagtcgcctgagcctgaaaaagttatgaagaaaggaaagtattatttgcgtaaaagtcttgcttgggacactgagttcttcactagctctg

SEQ ID NO: 66300 - DNA, 380 bp, Arabidopsis thaliana landsberg
cagatgcgttgtgtccgataatagcatgccctcattgtaactatacgctggcatcatataatacataagcttaacggtaatgcctgtgatacaggagcacagttggcatattaactttgcaaggcaaaactcacccaaataaaaaacatatagggataggttcttaactcataagtgttacatatacatagtaagaactgacccttgagtgaatcgggtgagtcgcaggcagtggcgggcccatgacgcaaatcgaggcatataaggaattatacccaagaatgatatacatatatatagcctatatagctacattaatcgcttacataacgaggatcaatctaacataaccttcgacacatatgatatccaccttcatg

SEQ ID NO: 66301 - DNA, 759 bp, Arabidopsis thaliana landsberg
tgaattgattattacttttgtaaggctgtaagttcgtcgcactcatttcctttaccttctttggctgaattgggattctctctttttgtgctttgtgtgttttgttattgaatttctttcccaaacctaagatttgttccagagtgtaatcacatttgcctatgcttctttgttttgtctatgaaaatatttcaatgtcaaaagcctatacaatttctatgatccaaaaaacttgataaccggtacaaatagatcctacatctctgcggttttaagctctccctgcaatctttcttcttcttcttcttctgcttcttcctcttctgcgatatctgcccagcttttctttgattcactcttcggaccatctgctgtatctttgacgaattcatggagatattgaatcatgttctggtccagtttctttcgcttcatgggttcttcttctcctctctctaagatcttcatctgttcagagccaaaaggttgtggttttccaaatagtagctttcgagcagcacctctcgtctcttcttcaaacaatctgcatctgcgtggttgtgtatatagacctgcagagttcggtctcacagatgctggagaagaagaaacatctgagtagttcttgtttgcggttccaggagctatattttccttcatcctattcacaaatgaacatcccgcgtagaacttctccgaaagatcagcttctggctttttcgattctatttctgctaacatttcgacgggtcggtcata

SEQ ID NO: 66302 - DNA, 520 bp, Arabidopsis thaliana landsberg
  unsure (1)..(520): unsure at all n locations
tctagtcttttgattaatatttgcgttttttactttctccacgcggtttatgtgaataatgggaaaagggaaaaacacattccaaagtagaaaatgatatgattatttttgttttgtttcgaaaattttgaaatgaaagggtgtgtaactctcgtttcatcctcgtagtaatgatgaaaccaaattcaaataataaaatcattgaaactcttctttgttgtcaacataataattagttttctataaaaccaaatttgtcgtcatcatctctccttctactttccaaacccattaatatttatagttaagattcaggtcagaagttggggacaatcaaaacctcttctcatctttcttttgtcaacaaagaaacatttccattgagtctctctcaatgttcttcttcttcttctaagattaattcaaagtgtttaatacttttgaaattttaagtttctttttcgtcagtttcaaatgggtgacatncatcgtcacaaggataggcaaatatggtcaccct

SEQ ID NO: 66303 - DNA, 635 bp, Arabidopsis thaliana landsberg
  unsure (1)..(635): unsure at all n locations
attcctcctaccggcaccatagagcactataaccgttcttgttccgatttacgacccactcccatcgagaaatagacaggttaggagccacccatatcaaacccctttgtatgcatatagacaactgtggtaagatacaatgatccacaatattttaaggggaacgactatcatgtcaatattatgatctccttgcgcttgccaaagtgaaagcatccgatcagaattctcgcctgaagatctgcaagcctaaacattgcctatgaacccagccgccttttgcaggaattggacaaggcattacaatctcggaccaagctatatgaggtcttcantttttttgtaaacatatgaccgctctggtctcagtaatacgaagggnnnnnnnnnnnggccacaatatnccannncnnngnagggcgcatttcattgcgaattcaagtactcactgnnggnnnagacaagaactaaactctacccnngcatnnangntttcagtttaaaaattgattaccatgctcttctttgggatgctaagagagacaacaaccttgtacctaattatttaaatgaccaaaaatcattaaactaggatgacatcaaaatgattgcgnccccttcccccgtcccccttt

SEQ ID NO: 66304 - DNA, 496 bp, Arabidopsis thaliana landsberg
aaaacccccataaacaacttacaaccaaaagaaaacaaaaatttttgtttttttccaccatcacaaggtacaaggtcaaatgctatatattgctcactctaatcaaatgatcatgccgggtcaaaaaaataataatcaaattcatagatcgctatgaaaagaaattttttcgaattattagggatgaaaaagataattgtttttgacatcacacatctcgacaaaactaaataaacctaagatcagagttaaaacattgcaaacattaaccagcctcacaaatactgatgaaactaataaacctcaaacccactttagttgatttcttatggccaaatgagatatgctaaaccaaatcgcaaagagaaaaatttgcatacacgactacaatttaggaggtgacatgataggaagccaaaacgagaagcccattcaatagactaagcatgcattcttttcttataggttgagtcaaagtgacccaaactagttacct

SEQ ID NO: 66305 - DNA, 789 bp, Arabidopsis thaliana landsberg
ctcgttcaacctggcgccgggcgtgagcctcagccaggcggtgggcgagatcgacggtgcgatgcagaagctgaatccgcccgcctcgatcaccggcagcgtgcagggcacggcgcaggcgttcgagcagtccatgcagggcatgggcctgctgctggtgctggcgctgttcgtgatctacctggtgctgggcatcctgtacgagagcttcatccacccgctgaccatcctgtccggcctgccggcggccggcgtgggcgcgttgctcacgctgatgatcttccacgcgccgctggacctgttctcgttcgtcggcatcgtgatgctgatcggcatcgtgaagaagaacgcgatcatgctgatcgacttcgcgctggagcggcagcgggtggaaggcatgtcgccggccgaggccattgtcgaagcctgccacgtgcgcttccgcccgatcatgatgaccaccatggcggcctttgccggcactttgccgatcgcgctgggcatcggtgcgggcgcctcgtcgcggcggccgctgggcctggcggtggtgggtggcctggtggtgtcgcatgtgctcacgctgtacctgacgccggtgatctacctgtacatggaccggctgcagcagcggtttgggcgccgtgggcgcgctattgccacgacggtggagtaagtcgcctctgcgggaggtgtcctctctgtttgcgtgcggagttgtgggggggctttggggtggccgcatactggctcgcctgcggcgggcttttcagcgcctgccggcgcccgagt

SEQ ID NO: 66306 - DNA, 494 bp, Arabidopsis thaliana landsberg
tacatccttgcttatgtattgcataatggagaccgcaaaaaaaaaaaaaaaaaaaaaaaaaaaaaaaaaaaaaaaaaaaacctaattttgccaaatgggggaccattttccagaggtctggccgccacttgaaaggggcaaaacccaggcgggttttgtggttttaaggctcaaggttgaaggggaatgcgccaattttagggccgtcggttaaaaagggcccccaaaattttggtgcccaaagggggtccgactaagccttcccagcacagctttcaggtaaagaccccttgcctcagggtcagccatagggcctggtgggcccagcccccccagggtcccctttttcccatttttcaactccccgtggtttcaaagattgcctcccagtcccttgggagttgggaaatctttggaagggttgaaccggttcccccccccccccccaatattccccggcccattcaggtctttaaaaatttttaaaaggcccg

SEQ ID NO: 66307 - DNA, 461 bp, Arabidopsis thaliana landsberg
tctctctctttattctcatgcttcttgcttaagaatatggaagatcgagtttttggagccaaaacttgaacctttgactgattgatctctttggttgtacatgcagaaaattgacaggatgtatgcagctttcactggacaacctctggagaaagtgcagcaatacactgaaagagatcgtttcttatcagcatctgaggtaatttgcctctggtatctgaaacattaacgcgaattccttttcaacgagacatggctcactgatagttaggaattaagaggtctcgccatatctcgtggactttgtctttcttatgttcctcatgatcattctgtaacgatgttgaattctgcatatgatattttcttggttattttttatgcaggcgcttgagttcgggctcattgatggtctattggaaacagaatactgaagcagcatacaggacaatgcacaacaa

SEQ ID NO: 66308 - DNA, 219 bp, Arabidopsis thaliana landsberg
gatgggttaaatttgtaacctgcccattgtggaccggagaacatatggttgggggctgtctgcattgacttgcacctggtgccatctttgtcaaaaagactcttatagttctcgtccataatgtgatatggtaatgagtatatccagggatggaataagacctatggttatggagatagatgaacctgggcgactggaagtgatggatcgatagatcta

SEQ ID NO: 66309 - DNA, 2389 bp, Arabidopsis thaliana landsberg
tacgaagctatatgggatcctggtttactagcagaatgtttgctgaatttgttgagccagttcttctgcacttagttggcactcaattccaatctatcaaaagaaaaaaagatagagaagtatacattgataattgttctttaacaaaaaaaaaaaagatgatatgaaaaaaaaatataatttatacaaaaataagtgttttcaattaatttcattctgagtagctctatatttctcgaggcactaaactcccaacgaaaaagaaacaaatttaactattattaaaaaaaaaaaagatctgttctcgtctcaacataatcacctattctaaggaacttaattaccaaatatctatacttgcgagacatagttaatagtatccctacttgatctctgatcttgtttttttcgataatcaaatcatcaatactaaaacatccattgtagaaattcttcattgaacaaatttaagtacttatcaaaaatagaaactatttcttgacacttataaacttcagcagcttgatctatttgaataatttccaaatatatagaataattcctttcgaatttaaaattgaagattttgggggctcttcaatgttcacgtataatttatataatatttaaacacgtgttctttcacaccgtttttttttagaaagtcaaatgtgtaaattagagaagagttttagtaaaagtagtataaaacaaagaacagtttagttttgtatgtttgtgaggaatctgacatacacataccctacgttttatataatgagatatatatctatctatatatatataagggagattagaatcatacattaaatttcatatatatcgaaagtgtgtatgagtttatgtgaatctcaatgaattattacttattacactaccctacccatttcttcccccaccatatatcctatgtaagaaaataaatgtatgaattacacttatgaatagagacaaaaaaaacaagtcagtgaaaattaattaggatgattattcgtacgtaccttgatggtgaaagaattaagcatggtttcgtcgacggtgttaatattaacctgaagaatctcaagagccaaatcttcaagagcagcaattatcttcataacttgtcccgggatcttatgcgacaccgttttgagcagcacgttagctcctgaaaacttcacttccacatcagccaaagccgattttgagttagcaacaagctcattgatcacactactctcatggttactactaactgaaggagatgaagaagatgaagcaggagagtatggaggtggatctcctaagctgctgcaactggccaatgagctgtaagagcgaagcggaggctgtgggatgagtggtagttgcggtggaatggcccggtatgggcttgttggctgaggtgttcgaggacttatgggagggagaagtaggtggtggtgaatctggtggtggttgatgcgcgggctaagaggcggttttcttgggcttagaacaggcggtgaaggacgagggctcgggacaactctcgggcttaggacttcggcgtaggttttacgttgtttcttggcttccaaagattggagaacttgttgtaactcgcttatgtactccacaactcctcctatgatcgatgcttggtccccctttttttaataggttggtttaagaggaaataaagaaaatataagtcaatatgaacattctatatatctcattgtgacatgaaatgaaagaaaagaaaaagagatgattagtgggaccaaaatgtcattataattgtcattattcctaaaaaaacatagatatgcatgatacttttgatgttactaagaaatgatatatgaatatgatagttaggtataccaaaaagattagttgaacgaatagtattaattagtcgggcactaccagaaactcacatactgactagtaaaatctatggatgtattgaatatacccgtttgacgtagaaacaaggcataagagaacgcaaaacggttaagtgctcgttcatttgctttctccggttacgttccacggttacatgagacatcttttgttgcccatcttgcttattatcttcttctgcttctccgtctccgtcttcttcttcttcgtcctcttctttcctggtttctagtctttgctttttcctcttaggagatgagttttcataatcttgatccttaactaactccttggaacttgtggttccatctttaggtgtagatgcagctgtcggagatatctctccggcaccttcaagactctctaagatggcaaatagatcatctccggctagtgaagtgtcgacaaattcacactcttcaagaaaatccggtattatctcctgcatcgtgattagagatatatccttctc

SEQ ID NO: 66310 - DNA, 603 bp, Arabidopsis thaliana landsberg
  unsure (1)..(603): unsure at all n locations
gaatcagacattgacgaggagctttggtcgtaatccgaggaagagattaaaatcggaaagtgcgaaaatgccggtcatggattaattgaggatgttcgtggcgcaggaaccagttgtggctgcttcttgcttaatcggcggtgttggtatgaaccctaatctcaatcttaattcctcaccgatcgatcgcattctctttcttagaaaaggattagctttgggatttatctagtttctggaatacctcgttttttctatatttctcggtagcacttgtcaaattaaacaatataaagtacatcgctgattcaaatctctctactcataatctacactgttttgagaaggcagacaacctagataatttgcatggcttcgtannncnacatagagtatacctatggccttgacgacgactaggccgaacnnccnncgngnccnnnnnaacctataggtattggtcgatggcagaagnccttctgncatctaatacaagaactanctctaccctttatcgaattctttcagtttagaaataacctaaaagtttcttctttgggacgcattattaatattttgttatctacctaattatttaaatga

SEQ ID NO: 66311 - DNA, 643 bp, Arabidopsis thaliana landsberg
gcgaaggcgtacgtcctgggccgcagcgtgctgcgcacctcgaccgcgggtacggcggccgccgccctgctcctcggccgtaccggcctctggtcgtagccccggggcaccctggtgcgcccgggggcgcacggggcgtgcggcccgccacggggtggccgtatgcgccttacccccgcgtcggggacggtggcaggctgccgcgcatgagggcattgaggcgcacgagggccgggcgggtgacggccgcagccggtctcgtcgtgctcgcggtcggtgccgccgcggcctgcgaagccggcgccctgagcggggtgtccgtcggatacaccaccgacctgacggccacccacgagctggaacggcggcacgtggacgtcagctggctgagctgcaccgccgacgtcaacggcgacgggacgaggacgtccggcaggtcccccacgccgagccgcgaaaccgtcgcctccgtcgactgccggggcaagaccgacaagggcaaggacatcaccgtcaagggccgcgtcacccgtgccgtgaacggcgcgtgcgtacggggctccctgcgggccaccgtcggcggcagacaggtctttcgcgtcaagggcctcggcgacttggggacacgcgccacccccgttcc

SEQ ID NO: 66312 - DNA, 594 bp, Arabidopsis thaliana landsberg
  unsure (1)..(594): unsure at all n locations
tcaacctgcgcccttagtaccttacctgcccgagccattcatcgtggcatccaacctgcggcgcgacctgttcgattttcccgttaatgaagaatattatcccacaggttttggaaaatccatcgtggcggctatcgaaaccgcttgcgaggcaaagggcgtgcctgtgttttgatggaaagagttcatcaacagagattacttactttagttaccttaacaggtagctatgtttgatatctgctgcgtaggacatattacatcagacaggatcgttactcccggctccgaagtgcatatgccgggcgggactgcgtactatttttcacatgccgtgcgcaatatgggcctgnnnnnnnnnnnnnnnnnnnnnnnnnnnnatgcagacaaatcgtatgtgcagggtctgcagcaactggatatagaagtggtttcgctgcccagcaggcataccgtctgcttcgagaatatctattccctggaccaggaccatcgcgtgcagaaagtatcgcgccgggcagatccctttctgccggaatatttttcggagatacatgcttttgttttcatcttggcacattattggctgatgat

SEQ ID NO: 66313 - DNA, 954 bp, Arabidopsis thaliana landsberg
cactttattgtattatatcatgatttacacacaggatttaagtttttagcatatgatattttcagtagcagggcttttgggtatataagctattaaatattttttccattaaatatactttcagtttttagaaaatttataattggtaaaaatttatttacaaagaccgggagtcaggaaaaaagaattgttattatttcaagtgtaatttccttaaacgttgacattttttttgattatatactatacattgatcaaaatacacacgtgcgaaagtttaatctaatcattaataaatttgatcttttttattttaccgttacgtttgaaattataatataacgatgattattattttctatatatcaaaccaaaaatagctatttatacaatccaaatctttttctttttttaatcacacaaatcattaacatttgatgaagttgtttctttttcaatctccatcaagatcattaaaaatatcattttacaataaaaaaaattaggggttaaaacataaataaaacagaaagtatagggggcaaataacacaaaaacaccaccacgtccgccaccaaaagttttaactttcacacgaagctagccatgtcactctctgctcttcttgaccattgactttttttagagatacagagatatgtcatactatttaatttcctcattttgcaaaatggtaagaacgaaaaagaataccgtcattgagggtaaaaccgtaaatattaggatacaaacgagggcaatttaggtataaaagaggatgataaatccgtggtaataggtcaccaccaccaagctcttcttatgttcatcccaaaaaagctttaataaaaaaataatcgtttctccatgcaacaagaagacgacgacggaagaggtagacctagcatcgccgacgatttactttttgaattttcttagtctaggatttgtccg

SEQ ID NO: 66314 - DNA, 529 bp, Arabidopsis thaliana landsberg
  unsure (1)..(529): unsure at all n locations
cattaagactcttgttatcaaaagaaaatatattttaatctttatgttncataaagactacaggggaaattggatagaattcataagctctaatcagaaaccacttcacttggcagcagcgtgcttggccttgttgtgagactcaagtgcattccctgagttgaaagtcctgccaaagagatataagccaacaagcgaaatgttataacaaacagaaatattgagcagtgaagacaagagtctgagaaagagagagagtctcacttcttgcatgaaccacatgagacttgactggccgactttgggctctggtttgcagcctttccacctttcttcttctcatctgtgccaaagaagacaatgcaggttcaaatgagtacttgtattctcaaattcaatgaataatgtaagagaatggttagtatctgtacctggtttctgaggagtaactgctactttcgccttctttgctgacacaggtgctctaggggtagtctcattagctctcttctagcttgatgcaggcttc

SEQ ID NO: 66315 - DNA, 341 bp, Arabidopsis thaliana landsberg
cagtgttgctgatcattggaagttactactttttttgacttatagtgcaaacagatcccttcgaagttcgggcgtatactaaccaggatccgaaagatctagccaaaagaggcaagaagcactcagttatggatcggcagcaaaccaatacacacagtggcgcaggaattgcacgcattagccaactgaatggagaactgtatgatgcctgcctggatgagcacggaagtgcttatcgctaccgaggctctcagcctgaacacccacatgcgaacatgtctgttgcggcctcaggaccgacaggcacctgatatatctacgctctgacctaccaaaaccat

SEQ ID NO: 66316 - DNA, 494 bp, Arabidopsis thaliana landsberg
gttcagacaccggtttaaatcacggcaaattcgcgcaatgtccaggtcgccgtcagcgccatacaccgcaattttatgcggcacaccgcgcgcttcaaaaaaaccggtttgcaactgcccggcttcaaaggggtggtcaatcaaagcgtcgtagttgtccgccttgaatgcaatttcgccgccagcctttagcaaaccaatgcttgctggttcgtcgtctgcgcgctgcaaaccgcaagccacctgccagtccgccgaagcgaatgaagggttgtctgtggcacgcccgtgcctgcgtttcacctgcaactcgattggctgttgttccatgccttccggcaccagaaacaggctggtgccgttgaagaaggcgtggctttcgtccaaatgcgcaccgcgaacagacagatcccaggcatacacccgccagtggcactccatctggatgggcgcattggtcgcattggtcaatgcgtcggtttctccaacacaat

SEQ ID NO: 66317 - DNA, 506 bp, Arabidopsis thaliana landsberg
  unsure (1)..(506): unsure at all n locations
agaattattaagtttttgaaggttattgacgcacatttcccatttttttttctatcaaaaagctaacctcataggtactctaatacgatatttagacatctatatctaaaatatcttatagcatatggtggataataagcaatacctaatcaataaacggcgtgaaaagattatatgaggagaacatgagaccaaggcttgacgccgctaaacattcaaagcattcatctaatggagtgcagcaactatagtgtctcaaagaaggatcgaccctcacaaatatgtaaagaaatgactctggaaacatctttggagatatttgcaggaaaccactcgaatctcccccctagaaaattctttgnnnnnncaatatatgctaattnantcccgggttactatactaattgtattgaaaactagccngnnnnnncattcaagttgcgaagagntaattgaacgttcggcgtattgggctgaacaccattcgcttttatctgtgtttatta

SEQ ID NO: 66318 - DNA, 1213 bp, Arabidopsis thaliana landsberg
attccaaattaaactagagaaaaaaacgaaatcgagacagtatctcaaaggaatcgacatgaacgtatgtgattcatgtgaagtaaaccataaacaaatcccaaattgtcgactattatttattctgatagtataaaaactctagatcagatcacacagtgaagtttagtactagtatacgtgtatctaatgtatacacatctgtattattgttattgaaaaattgaaagaagaagacagagaaagaaagatagaataagccaagaattaattttaccgacaagttgatgaaatattttaatgggtgtgagagaagaaagaatctggccattaaccttatagaaagaaaaaaaaagagttgattaataaattgtttgtcgtacagatttttggggttttttattttctggaaaataattagcaccgcctgttaaagcaagtggtctcgttcatagaacaagacagagagagagatatgcttcttcctctttcccgttgtctcttcatgccgtaatcactaacggacttttgtaatcagggagggaactaattaagcactaaaaacagtgttaatcaccgatgtgacgttgttttgttcaaggcccatgggcttttttatatattgatcacacggatctggttcagcttaaatcaaaccgggtttaggctggttatcgaccaattagttttgtggaagcgatggtttagctttggttgcgaattggagatggtttaaagagtttgttaggatctaaccgactctgttttgagcttttagattctctgtttcaacattgcgagtgtggaagcaatttatttgatttgatcatcagagtttgtttgcgatcaccattgttaattcggagaacgagttcacgaacgcatgattgtcaacacatatagatgcatatcgatagatagatacagattcaaagaagagagttatatacatggcatgtttgttgattactctatccagaagaagattcacagcatagagtcggtcatggctggaagtcgccggaaaaagttgacgggagcggagggaatgcggtgtcggagctttggatgtcgcatgaagtagtagccggataagagagcgacaagtttaaaaggggtaatgtagagagccatggcaataatgaaacagaacgtcacgaatattgcggtggcgcgtggatcacgccagctcagcaacgcttgcactcgctct

SEQ ID NO: 66319 - DNA, 338 bp, Arabidopsis thaliana landsberg
agaccgaactgttgaagaatgaagatcgtgtgcataattttgagttttagtaagctcttaaggagggtcggtccaggagatgatgtaccagactcttgagaaacaacttttacttacttcgtctgatgatgatgatcttgaatgtaatagcggctggagacctgcgttagatagcatacccgaatctgaaagtctcagaagaacataacagatagctcatatatactcaaaaaacagtttgagctttgttcaaggaaaaacttgtttttaggttttgtttgtaaataaagctttaagctgttataggaaaagactgtgtgatattgatgataacacta

SEQ ID NO: 66320 - DNA, 567 bp, Arabidopsis thaliana landsberg
  unsure (1)..(567): unsure at all n locations
gtctctttgttttatttatacataagatagtccaattatatccttacttaccttgttgtgttccatccgttatcagactcatctttggnnnnnnnnnnnnnnnnnacgggtataaaagagtcacccttgatcttacttggcactgactcggtgaacactttgaaatcaaaattcttattcgcttttttcgatttcatgaagtttcttgaagtatgatgagagatgatctgaccaaaatagtaaaccaaacaaaaaaaaaacaatcaagattcatttttcttcttcgaggaaaatgaaagatttgctagaagattttgtatttattatcacctccccggtgttataaacaacggttttgcagtcagggagaatactgatggagcggtgcgggataagatattccttgcctctgaatttgattttttctgcagcttctgtgttattggtagccaaaaatgctgcacaaactttagttccaggctgctcggagtatcgaatctgcgatacaaaaatacataaaatcaagaactgttttttctatgacattttctaaagttaaacttttga

SEQ ID NO: 66321 - DNA, 669 bp, Arabidopsis thaliana landsberg
agaagaaatgggcaaagctgacacgatacaaaagaagaagcaaatcattattaagagaaggaagataacttcttgtaatcttctccatggaaatttatcaggtaagtaaatttaattttaccggtgcaaagaacgatgatccaaacggtaaaaagctcccagaagggaaatccacggcgaagcctcttcatctgatcaaccttgcagccagaacaatcctcatggaagttcttctctagcaaacactcggcatactcttccgccattttccacacacctctctaatcaaatcaaaattttgggggcgatatgatgtgtgttttaatgagggcaatgaaagaagaatgagaagatgcgatatatggttttcacgtactctcttccaaaaaagacgggaaaacaattgaattatttaactgctgcgagacagagaagaaggaaaaaaacaactttgtcttttgccctcacaagtcgcttatgacatgtcacctcttactaatcacatttgcatttattgtttttctattcagtcgtcagtcatcacatttcaaccgtattgtaataacttatgttataaaaatgttgtttttcttgcagagttttttgagaatgcaacttgaaaatttattagttttcttctctttggtttgcctgctaaggtcatggtta

SEQ ID NO: 66322 - DNA, 1382 bp, Arabidopsis thaliana landsberg
gtttaatcattagcatatataactgttcaaccgactaatcgagatattcgatagtatttgcaagtttctgatttatcaataagtaatttaacgcaatttgttattggtaaaaatgtcaaatgattttagatttggacagccatgtggtgttatggggtttacgggcacttaatctgtctttaaaaaaaaaaatcgacgatcaatcttatttataataacaaagaccattttaaataagaaaagacaaaaatcgaaaccaaaaactaatcgacaacaagcttaacctctaattattaaggattacatttcaggaggtaagatattacataatccatagataccttaagcctagagctaagggctcaataatgtgaagtccatatgatttatatctgacctaacttaaactccaagccacagaatttgaagaaacaaagaatcttaagagcttaattatatcaagttgatatttttctaaggccttcgagctctgttcaagactttagatcaataaaattcaacattgaaatagtatatatatacattcctttttcatcctttgctctacagaacaaacgcaagtttccataaatacttagaataacaagatgatgtaaaattgtatgaaccctattaagtgcgtaccatattaccatgtgttcaacttttatagcagatcatagctcaagccaccaatggctgcgtccatcagcaagtttctttaacaccaaaagagcaaaatattgtattcaattcattgatatatatcaggcttagttaaaacattagtggaaattagttacctcttttgtaaacacaagctttctatcagtttcaggcatctccatgtttagagaaaccgactttaatgaattttcctgaactgtgtgtttttaaagctctagataacctctttgaagagaataagatcgtcgcggggatgagcttcttctactcgaacttcgatttcatctcccacttgttttccttctgacacccacgccgttgcttgaaaacccacctggaaacattttacaagtgattgaacatgatctaaaccgcttattatgagaaaagattcatgtggaattaaacacttacctcaaccaacaaaagggatgcgatccggtctttgacaaatctcaagaccaatgcggtgtactttttacccttttcctgtcttctgagaaactctattacccaatagcggagaccggtgtttgagagttttctcaccactttgctctgcatgtttacggatgctgctataccttctaactcaccagcagagaatggaaaattgtcacctcctcgaagaaaagctttaatctgtaattcaaacaacacgccttgccaacttaatgatatggtgaaatgtcaaa

SEQ ID NO: 66323 - DNA, 574 bp, Arabidopsis thaliana landsberg
  unsure (1)..(574): unsure at all n locations
taannnnnnnnnnnnnnnnnnnnnnnnnnnnnnnnnnnnnnnnnnnnnnnnnnnnnnnnnnnnnnnnnnnnnnnnnnnnnnnnnnnnnnnnnnnnnnnnnnnnnnnnnnnnnnnnnnnnnnnnnnnnnnnnnnnnnnnnnnnnnnnnnnnnnnnnnnnnnnnnnnnnnnnnnnnnnnnnnnnnnnnnnnnnnnnnnnnnnnnnnnnnnnnnnnnnnnnnnnnnnnnnnnnnnnnnnnnnnnnnnnnnnnnnnnnnnnnnnnnnnnnnnnnnnnnnnnnnnnnnnnnnnnnnnnnnnnnnnnnnnnnnnnnnnnnnnnnnnnnnnnnnnnnnnnnnnnnnnnnnnnnnnnnnnnnnnnnnnnnnnnnnnnnnnnnnnnnnnnnnnnnnnnnnnnnnnnnnnnnnnnnnnnnnnnnnnnnnnnnnnnnnnnnnnnnnnnnnnnnnnnnnnnnnnnnnnnnnnnnnnnnnnnnnnnnnnnnnnnnnnnnnntcttggggtctagaggatccaactacaggagaccagggactgagagctttccccctttttccgccccactctttcaatgctggttt

SEQ ID NO: 66324 - DNA, 514 bp, Arabidopsis thaliana landsberg
cgcaacggaaaccaatagtgttggtgctgaggtcttcttccagttatacgacgcgcaccgggactgagccagggggccgtgtcgttccagctgccgcctttatataccctggatttatccgagatcagcgtggtgatgccgtagttgtacaatacattgctggaagagtcgccatccaggtagttggtagcgtatgagcgctggtagttcctcctgctgcgcagggtagaatcgtcttccggtatcattttaatgcggcctttgtcatcacgcaggttgccctgtccgccgctcatatccactttctggaaaacgttaccacggtaagggttaaagtcgtcatcgccggcattgatgatgggacgatatacatcattcacccactcgcttacgttaccgctcatattgtacagcccataaccattgggcataaaggaagttacttcagcaggtatggcagcattatcgttcagtccgcccgcaacacccatattatcacccgcaccgcgtttga

SEQ ID NO: 66325 - DNA, 2043 bp, Arabidopsis thaliana landsberg
aatcttcactttactctctccccttttcttcaaaagttagggtttttacacaaaaacatcaaatctcgtcacttttccttcacagagaggagaagctagaggaatccgataatccaaaatacagagatcgtgctaaagaaagaagagagaatcaaaatcctgattatgatccatcagagcttagttctttccatgccgttgctcctcccggagctgtcgatatccggtaacacttgtctttcctcgattacttcattatctttataaattctaattgggtttctctaaatttctgtctttttttttgtttgtagtgctgctgatgcacttaagatatctattgagaacagcaagtaccttggaggtttgtgttaggtttacaaatttgattttgatttgtttttttttcgaggtgtttatgttgttgtttatgatatggtttaggtgatgttgaacatacccatttggttaagggtttggattatgctttgttgaataaagtacgaagcgaaatcgttaagaaacctgatggtgaagatgatgatggtggcaaaactaggtaggtttttggttacacttattcttggtttattgactcatttagcttgtttgattcaattgctaattttactatattaacagtgcgcctaaggaagatcagcgagttactttccgtaccatagctgcaaaggtatgcaattttgttctgaactttgcagatgaggagcaagtttcggggtgtagttaacgcttgatgtttttttgtttctcttgtctttgatctgtttcagtcagtttaccagtggattgttaagcctcagactatcatcaagtctaatgagatgtttcttcccggtagaatgacatttgtctatgatatggtattgctttaactctttttcaggaagatttaatcttattacatgttcttatgtcgttgtttgtcttagaaagtagtcatacatgtgtattctgcttcaacgattcttcttcgagtattagttaatatttagttaaatcttcgcttctagtttaaatacatgtctcaggaaaattttaagaaggtagcttaagctgttttgcattaccttgttagcgatatattcacgatttaatctatttgttagaaaccttatacgcagaattggttgtaaaggttttttagttcgattaacgtgtctgctcttcttgaagaagcatattctttttctcttgcagatagagacaccatacgacaagaaaagtcagttgaatatactattgatatttggtagtgttacgtatgaagtttcctttgagatacttagtctcagctaagctgctaggctaagcttatagtatgggtttagtctgccctttgaaagcctccctgttgatgtatattaattttattcccttttgtttttaattctatttgttgcttttcaggaaggtggctatacccatgacataccgaccacgttatataggagtaaagctgactgcccggtgcccgaggtatgtatacttagagtccttgttgtaatagtcttcttgatcctggaaaaatctttagactgtaagcagtgatgtgacatgatcgttttgattctaatgaaaataagcccactctgcctgtctctgcaacctattttcttttacagtgttgatgtattcaatacagctaatatcgattatataagtcattagttttggtagaagcatagattttctttaagtaattataaaatctttttaaactaaattcaactttctttctactaatctggaaccaaaattaacgttgcttaatatgtttgtttactgaacataatataaatttataattgaaatcactgctgcaatttttgcgagaattgtttcatttaacaggcactgtttctctgtcctatctccccaacaggaatttgtcacagtcaatgttgatggttctgtgctagatcgaattgctaaaatcatgtcatatcttcgccttgggtcgtcggggaaagttctcaagaagaaaaagaaagaaaaagatgggaaaggtattttgcatctact

SEQ ID NO: 66326 - DNA, 493 bp, Arabidopsis thaliana landsberg
  unsure (1)..(493): unsure at all n locations
atagcaaggatttagttgatgaaccgaaagtaaaacatttcgaagaagagatggaccatagtggtttggagagcttggtaatggaaacatctgagaagcttcaaaaacagacatcagttgcgaaaggttgatcttaatttttctctcctctcttcatatttgaaaataaacctaatgcaatcctgtctctctgttcattatcaggtgttgaaaatttgagtgaagcaagagaagtggaagtgttgtctatgaatggaactcaaactgttgtgagcaaattgaattcgacagtgtctggtaatgaagaaaggctctgtgtgattgatgagattgngcnnnnnnnnnnncnnnnctnaaatggcaggaggacacataattgcctacaaaaattgtgggattttaaaaacttttttaagatcattggttgaggagaacttcactccctaattttacagagaatggctccttcttctccttnggncnnnacccgagc

SEQ ID NO: 66327 - DNA, 2162 bp, Arabidopsis thaliana landsberg
aaacaaattctctaccgtttatattacttgttatgatccttttctcactgtggaggtttacttttttactggggttctctgattcactcattgattttaacagatccgtaagtcgttgttcggccaagttactgcctgatgaaagaaaggaaaagaggaaagagatgattcaaaccggtttgcgtttggttatttacctattttgggagagatttctctttgttgtgattctttgtattttgcaaaatcttacttttgtgccaaacccatcgaacgcttctttttttcgaattcctttttttcattcctcctcgaatgtgtgttatcatggctatacaaataaataaaatgaaagacttcttttctttttcttcactttatctattcaatgtctatgctttatactagtgttttttcgtcatcatagataaacacttaattcataaaaagacccttgaatttttattataaggttagcaatttatccaacacgatcctgaagatcgtccatcctagtatttttttcgtctaaacacctttaattgcggagttttgataagtttatgcacttttaggtgaaccaaattctgttcaacagaaaaaaaactcgaataagatatttttttggtttgggctaaaattgttatagacttggcccttgggttttatcccaaatacattttaggtatcacaaacaagaaaaacatagaagtaaaaaactagaggtttttgcgcttttgatctttgtcattttttctacaagttttttcttcagactaatctcttcacgattgtctgaagacaagagtctacaagaccggagattcaccgttcgaatataatttccgtacctttcaaggttagatgttcttgcgcttaatttgacttgtgttctttttgtgaattttggatgcgctcacaaggtgtttgttcatttgtctagacgaagtaaaattgatttagttattcttctcattcatcttctatagtatttgtacttgaaccaatcattattcatctttggtgcaatctgaatccgacccatttgagctgttttgtctccttgttcaaattttgtgtgaatgtgtgtaaagaacgcaaaatctaatagaagcttctctttagggttttgggttgttaggacatgcgtttcatctcaaattttgattttgtttgttttaatgaactcaagggttagtttgatgcttatcaaattgagggtttttgttttggatgcagagactgatttgacatatgaatgacgtcgaggcacttaggcaagaaggtgctctttttatactctttacctttttttttagtgaatttcgtcgaatgtttctgaagaatttcagcgaaaagtttgtagctttagcttccatttcgttactattttctggtatttttcccaagatatgcatagctttaatgcaaattcttggtgtatttatgtttgctggtttgattagaagttatatggatgatggatgattataaaatgttgtattcttagttctcatgctgtttatttattggggtttaggcctttagcttggatttaaaagtttatctgacattttatagtgaagcaaatttgcatatgtatgaatgtgactagacatacgagtatgcgtttatcattgtctaagctattggtattttaaattcttgatgtgaaatattactatttcggctgtctttcgaattgttgattctaaaaatcgttagacgctactcggccggtgaagtagcgcttagcgcctagacggtcgaaacggggattaatcggggcctaggcgttaaagtaaactataatgaatttatattgttttataacaaattttatgaaatttattatattataagtgaagttgtgatgtgaagttatgttggtcctgtggctttctgctcaaattttattgctacagcccttggttcgatacttttcacgctaaaaaaatcgaatttcccccacttaaatgataggggcaaaattgtaatttaaaaatgttggggtcatcttcttcctcaaaaccctattcgcttgtttgatcgttttttcgcttatactcaatattttcgtttatatccgcttgtgtgatcgttttcttacgtaatcaaaccaaaataacacagatctaccactaaaatacatattcatgatc

SEQ ID NO: 66328 - DNA, 2800 bp, Arabidopsis thaliana landsberg
attgaggtgatgatttttaaattacatgttatgttttcttaaacatgttatgaatgagtaaaataaggtgctactttccaaaagaacatattattttagaaaatagtactagtactcattgttattgtactaaaagtctaaaatcatttacctaatctaatagtactactaaatatttgtggtaatttaatacacattcatttttgaaatgtatccttatttttttattgggacatgccaaaacgttttactatttagtcgattatcaagattatgaatatatttttttaaaataacatatcaaatacagtatacctttaaactactattaccagattttgtatttgaattagaatcaattttgttgttttggtaaattgctggttgaatatgctgtaaatattataacatttaagtgaccaacaaaatagaaaaatagtagtaacatttaatttgtaagattttacttcaaatgccattaatatacttcctatcttccattttctaagttatgttttgctaaaaacgcatatttaagaatttttgtttcaaaatgataatttaatcaactcaacaaatcatagaatactgcatatacaaatgatcaaaaaaattaaatacataaatgttttgcaaaacatctgatatgagtgacataaaaagtattgactttatttatgttattagaaataacctactaagtaacatgataaaaataccccaaaaacattcttttgtggacgcggcgtaacaaaaatttattttgagggatctgtaatgaaattttatcaaatataaacataaaattaaaatatacttttgagggatcggcaaagaattataagaaaatatgaactgaataaaattataagatagtaagaaatctttgtttgttttttttacacgagagaaatattttatttttaagtaatattttaaataaataacaaattataagaaaattgtttgtattactgacatttctatgctataactcgaattaaaatttccataaattgaaaaaaatatattaatgttttaaaattgtaacgtctacatagacagttggagttgtgttcgttaacacgtttcccaaagttattcgtgtattttgctaactcatttccaaacgtttacgttcaccaaccaagctattcatgccaattttttaatctagttactattcaaacaaaatgccaaaaaacaccaaactaatggccaatattttttatcgatattaattacatttataatatttataatgttcaatcatacttttagtgtaaagtagattcgaaccttaacctaaaacataataaaccttcaaaacctaaagaatcgaacaatttagtttgaaccatgcatcaaaacctttttttgtttttacttgtaattgcaaaataattatcggtgtatcataacaaaactatttggtaaacttgttttgatttctgcttaaggtaccttcacgaagaagaaaaaacaaagaaaaaaaacatgtgcttcatagaattaaacacgtgagtttaaaagacggtgttgaagttagcaagtggtcatgtgttcagagtatataaccgcaaatgggacattggtttatgcaatttgcatgtcgacacgcgtctctcatgcactgaactagctgtttccagttgacgttattagtcgttacttcgagagtcagaaaaaaaactttaatagcttcgacaaagccaaaataaaatgttttggttacccatttccacttgtagagagacttttaactgatatcttacaagtcgcttcgttcttgtccaatcgacatatttgcaattcgtatctattttagttaaaaagtagacgcctttttttgtaagattttaaaacattttttttctagaaaaaaaaaatcgtagtaaaaattaaggaataaagctaaattttaccatagtagtattatacttttaaaatttaaacccttttccaaataaaaacatatgttttcataactcataagataatttagaaatcagaaaaatcaataactaaaataaaaatgttactgccttacagtcttagacatttcctacatgaccaactttttgaaagaacatcataaattctaatattgcaatgatttacatcagcgaactttttttatgaaagaaaaacagattgaagattagaatatgaaatgacaaatttagtttaacaaatagggattgttgatttggttaataaaaacccaaacataccttttttctaaatgtataaaatagtggtggttctaaaacatacaatctcaagattctctgataaatcatacttaaacttcgaatgattgtggcggttaagacttacaaatctgtttgagatttagaccttttttgtttatcgttcaaaaactataatatctattagtgtaaattgaaaaaaatagaacaatatgcgacgaacaaactatatatcaacgtaaagataaatttggtatgcataggtttactgcatactccaaaaataaaatggtttaatatgttagatgtttagtccattttgcacacagcatatattcaaagcctaaagttacacatagagaaagcgaaatcatgcaagatactctagatatttgcttttgttagcttcatcccttttatgattttaaataaaattaaaattaaaaacaatcggcagtttgagttttgaggtcaaagtgatcgaagcgtggagggtcttaattaatttgggcccttaaagaattagaggcccataagccacagagttattatccacttttccttttccaccgagagagaaacgagag

SEQ ID NO: 66329 - DNA, 192 bp, Arabidopsis thaliana landsberg
  unsure (1)..(192): unsure at all n locations
caaggggnncacaccgaggaaaggcgggcggcttcactttacataaacttatctaaccatgcatgatggggatcttcaaaatgaatatcatcttaaagccaattaaagaatgaaagtgtgtgagattaacgctccatatggcgtagaaagacttcgcccatcagggaggatccattcttttcaaaaaaggga

SEQ ID NO: 66330 - DNA, 283 bp, Arabidopsis thaliana landsberg
  unsure (1)..(283): unsure at all n locations
ttgtcttatgctgtttatgaggaggacgggcatacaaaaatattttcgcatatgggtgatccacagccaaagctgtgtgtttggggagcgtacccataggatatatctcgcgaaagtgagaaccctcctgaaccttagactacgncgaccgtttctccgganggatccccaggataacccaacgtccacgcaggaaccctcgcgtgaccccttggcctcacgcgaatccatgtgacctgataccaagcaggaaccttaacgaacggacttctcttggagaaat

SEQ ID NO: 66331 - DNA, 121 bp, Arabidopsis thaliana landsberg
tgaaggaacaagcatgaacaaaactgtaatgaggagaaggcatgaagaaacaaaatttttgaaaaaaagtagaaaagaacaaagaagggaatacagaagaaaaagaacgggggaaaatgaa

SEQ ID NO: 66332 - DNA, 281 bp, Arabidopsis thaliana landsberg
agacacatgttataactaggatccggatcaagcatacatgaaccctgcaacaaccatataaatcaaaccataaattaaaagtccatgaaaaaatgaaacaacaactctatcacatcatacagcaaaccacaaaactaaaacacaagcaagtaagctaaatgcaaaaatccaccgcaagctagaagacataaccaagaataaacgcatcatatccatgaacaccagacaggagagaagctttctaagaaccaccaactgtatacataaaaaactaggaccca

SEQ ID NO: 66333 - DNA, 665 bp, Arabidopsis thaliana landsberg
atgctaagagactctagctggtagaaactttctgtaaggttttaatcataattaaaacattatattgttgatcattatctctaatggattctccgtttcacttttaaagtcaatcatactgtaattgcatcatgtttatgattgattttttaaattctaaaacgcaactgctgtaacaaaaaaaaacttcactaaatacatgatattgactctactttagggtagaaatatgtcaatataagatcgtgtaaattacacacactatcctgtcttgggagccacaggcatttcgtggacttggccctcttggcggatgacaaccctttctcttggctctttttgcatttactcaattgtatgtatttttatggattaattaatatcttacatatatgtcccatttcactgtcatattgtactggcatatctcacatttgggtttccatatccaaaacgaaatatccttctatgagttatgaataggtacgtcacatacaagaattacctattcgcctaactgattttgaaagtttcataaatgagccatttaaactgatgaaatgcttccttaaatgctcaagcgtaagaattgacaagataataaatttaccgccacacaaacaagaagacataattttctacattgtaagaaaagagaaaaaatg

SEQ ID NO: 66334 - DNA, 347 bp, Arabidopsis thaliana landsberg
  unsure (1)..(347): unsure at all n locations
aaagaaaaagaggggcaaacctgcaaagccaacagagngcactagtccttaaacngaccatngaaatgaacaatgaggatgggcaccaccaagcaaacagggagaacaccccacacaaccggggaaaaaacatctttatcaaatgaccaaccaattcaggagtagaaaactaagagaattataaaacaggtaagaacttaccggccccggcacaaggggcacaaactaaactgtttggtttagtgccctgaggattattgtttgcggcctaattgaaaccacagaatgagattttgcaataacgaaatgggccaatgaagtaagcaaatttttataggagaagagaa

SEQ ID NO: 66335 - DNA, 590 bp, Arabidopsis thaliana landsberg
ctggtgaacgtgaaggtgattcagtggttggttgggagctatacgacgatcttatcccctcacgtgtcattatgtatctcgtgctcaaagtctaactctgcagactctcttattagtatatagtacccatactttttttgtttaatcaccaaaccatgcattttaatttaccaagtaaatatgttatagtacccaaaattttcgcttttgttaatcgtgattattaatgaaatacagttagggatgctatggtagttgaacctataataagccatgggtttttgcctttttggatctgtccctctctagattttttttttcttatagattgatgtctaattaatacaatattagtgtactaaacggctataccattttaaatagtctagtctttaaattaaatgcatcaccaacggctatctgatgaagatggttatcaaaatactttacattgtatttttattttttttaattaagcactatacattggggaaatgagatttgactattaaacacacacaataatttgttagacttggtgtaagagcatcatcttcaatgggggagctcttaatgatatttttttggtt

SEQ ID NO: 66336 - DNA, 1446 bp, Arabidopsis thaliana landsberg
gcaaccgccctgaaacaagaaactcagatagatgctataatattgtattcgggtttcacaacaaacatgcttacagaatgatctccaaaaaacatacctgttaacagcatttgcggttttgccatcatctaacttcttacttgtattagtgtcctctttcttctttgcgttcgtttctgtctcctcccacactacctcagttactatatccagccaaaagagaattgtttaagtaagagacattgacatacgtttgtttatttttgttactatttagaacgatatggatgcttagcataccttctctcccacgatcatcaatccgtgacttcaacacctttttccttttcggcgaactaggaactgcagtagttcttctctttgagggattcacttcagcttcagaaccaatggcctggatcttctccgttgacaaagtcgtagaagcatcaacagaagcagtgttttgcctgtcttctttgctggcctctggttcctcagattttatctctggagaaacatctgcgtcaggcttctctggacctgaatcttccgaactgagttcgacatctggacgtgaattaacctttggactactaggagatgctaagctgattacatcttcatactcgtcatctgaaaaatcaaatatcacctttctttttctgttatctttaggcgctctcatgaaattggtgtctcgagtctcatcatcgctgcctcccttcttgtcagcatcatgagaaggtttttggggttctgcaccaattacataacattatatagaggaacaaaactagctcaaacaggcaccaagtaaacccaagccattgatagtaccaaaggtggatagattagaaaacatacccgaatgattagtaatatgatttttcacatctactgttggagaatcatcttctgttttcacaggcacacggccccacatatttttcaacaaaccaccagttccagtcacgctcttctcgccctgtccattctttttattagcgggcacatgaaaagctttttctttatccaaagaggatttcgcagactgatttttagctggagcagcaatagattcactcttagcctgatggccaacattagagcttgagtgctggaaattctttccctggtttgacggcactgtactcttttgaaaatttgaactacttttagattgtcctgtagttctcacactttcagttcgcggggcggtaacattttcagtggctccctctatattgcgcttcacacaagaattggagacgccacaaaacctggtataaaagtcacacctctctagttagaagggcaaggctggtcaacagtagtggacagctttcatacaataacagaaaagctgtccccgttgcctttcaaacaattatcagtgacaaagagctgcctgaagagttcttctgcttgtacaaactcagtctt

SEQ ID NO: 66337 - DNA, 531 bp, Arabidopsis thaliana landsberg
  unsure (1)..(531): unsure at all n locations
gattcaaaggtgggtggagaaaacggagtcaagttactttttctcatctnnaaaannnagnncatctactggtactgtgatagtacagnttaataatacaacttgtactagacaagtactaatatagccattaacaattttagtttgcccatgaagacggtcggtccagataccaaaaaaagcgatttgccaaaagttttttttttgaattagcatcccatgtaaagaatttcttcgactaattcttttgggacgagtgactttttgccaaaagaaaattaagaatccacattcgattaaaaattatgttagaattcatgaacgagtgattatgacaaagatacatgcaataattgtaacttaattttgtaatagaattccataaacattcacatgatatatcttaacccaagttatttcaggttagtaagttgtattgtggatcaaaagaggatttgactaaaatgtgcaaaatgagcattatcatgtaaagagacgggacagggtgagaaggggtggtggaggtagggc

SEQ ID NO: 66338 - DNA, 190 bp, Arabidopsis thaliana landsberg
  unsure (1)..(190): unsure at all n locations
acggcagggaaggagggggacactgngacggaagcggatcatatccatgaaggannnagaagnacgannangaggaaggggatctgaacgaacagaccggcgacccccggaatggagcagctcgaggcgcctgccgcgggaggcacgaacgcggcgaggcctaatatgcgccacggcacgcgtgactggc

SEQ ID NO: 66339 - DNA, 458 bp, Arabidopsis thaliana landsberg
  unsure (1)..(458): unsure at all n locations
ggtgatcctggccactaacctcagagccaacctggatgtttcctttttccggaggtttcagtccatgatctatggggccatacccggcgccgaacatcgcctgaagctgtggaaacagtccttttctgataaaacagtactggaagacaaggtagacctgcccgatatagccaccaaatacgaactcgcaggcggcgccatcatcaatgtaaccaggtattgctccatgatggccctgaaacgccattccaacgtgatcctgcagcgcgatannnnnnnnnnnnnnnnnnnnnnnnncggaaaagaaggcaaaacagcctgatgccggatgatcatggctttttcaccggatgatggcttttggggatacatcttagctgaaaaaatgtatttttcagcctcatatccaccaagaccaactgagctcatgaatctgcggaaatacgccccgttatata

SEQ ID NO: 66340 - DNA, 704 bp, Arabidopsis thaliana landsberg
  unsure (1)..(704): unsure at all n locations
cagctgggtcttctgcttcatttgtaaagaaggcacccactctattttttctgctgctgnnganngacgcagcttgtgtttgtggatagagctgaactattacctttcatggtgattttcttattgaatttttccagacattaaattttgttttactctgctgaatctttttcatcccaatctgtgcctctgtttaagatctgatttttgctactcttctcttaccttgtcctttaattaggtttaaaacccggttagacaggccagtccaatctagtactgtcgagtttggtctaattgatgttcttagtcgaattatcaaataagaaaacgcgaaggattttgacaataaaataaaacgtaaaaggaatgtttataactttatatagtgaagaaattacagatttgttgggcatacaaagtatttgtttatgtactcttttttatccccgtctacttaaattaaaccctgaactatatttacttggacctctctccgaacatttacattggtcgtagctcgttgatgagaccatcgaacaaaaagttgtccgaaaatgaagtacagaacccgatctcagatgatatctcatcatccaacaaaaattctgaatttggcacgaaatcaggccaagagtcgtttcccaaataacgagggccacatggtccaatgaatcctctctctcccggaaaacaagattttg

SEQ ID NO: 66341 - DNA, 542 bp, Arabidopsis thaliana landsberg
gaattcccgggcgaggtccgcttcgggatggacgagccagtgagtttccgcgtcttacagcaggtattgcagcgaccaggccagttggtcggccggaagcttggcagcgacttcgccgctttgctggccggcacggaacatcgcggccatgatgtcccacgtcagcctgctgccggtttccttgcgcgcgtcgtcggcggcgtacgccgcgatgctgttcaggtaacgcaggtagtgcggcaggtaaacgcgcctctcggcgtgccatgcggcggattcacgcaacaggaaccgcatccgcgacacgaagctgcgatgcgtgccgagccggtccgcgagcgcggccatgccctcggcgatttcgtcccggagccggtgcgcgaccagcgcttccttcaccgggaagtagctgtacagcgtggccttcgccacgtcggccctggccgcgatctgttccatcgtgacggcctcgtagccggacttctcgaacagttcgaaggcggtcgccgccatgtgggatgccatgtgctgccgctttcgct

SEQ ID NO: 66342 - DNA, 2550 bp, Arabidopsis thaliana landsberg
tatcagataaccgcaagaaccttgcatcactaaaggaggagattcctatggcgttcagggctgcagcaaacccagccagcttagtgttggactctttggaagggttttaccctatggaggcaccaactgctgatggaaaaaaagacgctaacctcttgggcatgcgcagaacctgtatcatgttgatggagtgccttagcatactgttatctggtctggaccgcaactcccttgctgttgttctctcacaaaatgttaagcatagagccaaaactattgcagaaggatggaatccattgctggaatctcttgacatggatgcttgcaatggtaattctttggaggctcatgcattcctgcaactgctggccacttttgctattgttgctgattttaaagaagatgaactcttaaagctgatccccatggtttcacgtcgccgtcaggcagctgagctctgccgttcacttggattagctgaaaaaatgcctggtttgttctcttaacttttagtatatggctgattatcttacaggttatgacatttcgataggaaagttgatgtttgatagtaactatttagtgagtgatagggtctctggtcaagggcctaaacatggtggatatctgtgtttttccttgtttagtttacacccagattctctaccttatccattgatcttatctttaatgtgcactgctccttttattccaggtgtgattgaagttctcgtgaacagtggaaaacagattgatgcggttaacttggcatttgcgtttgaactcacagaacagttctcacctgtctcattactgaaatcttacttgacagaggcaaggcgatcttccccccaaggcagacctggcaatgcatctcctgctgttcaggcaagtgttccctgacttgataacttgcagttatagattaccttgttggtgaaaatgaagggctatattaatgcattttgcctagaacgagtgatcttatcttttattgaactcgttaccttttctcgagcatctggctatttgaaaaagtaaatcttacctcgctggaacattcctgagctctgttcagttagctgtcatattttactccagacttctaacaccatttgaaactgaaaaccgatgctttcattatcaattactttaggcgtatatcatagtacttgctgatgcaggatcagtctcatattgttgtacattattatgtgtgtaccaatgcaggatgagttcaatgagcgggagcttataggcctcaaaaccgttataaagtgtatcgaagagcatagcctggaagagcagtacccagttgagccacttcacaaacggattctccagctcgagaaagccaaagcggacaaaaagagagcaacagaacccatgaaacctcagccaaaacgaccacgtggtgctcaaccccgagtcactgacaacaacaacaacatcaacaacaacaagacaggatacggtagagtcatccctgaaaggtatccgcagtatgtctatgacaacagaccgttccttagcggtccaatcatggcagcacaacctccaccacctcctcctcctcagacttacacgttcaatcctgctcctgcacatgggaacttctacgcgaactgctatcagtaccaggctcctcctcctcctccttactttcactagtgataaaaaaaggtgaatggtaaaatgtgactgtgactgtgactcccctttggtgttaacttgtggcagctcttttttaactcctctccttagttctctttccctttgatgttgttgttgtgtacggatggttttagtatttttaaggatcaaccctactcaaaacaaaaaacaaaaaaatactcagattttcttattaattattatatctttaatgttgtattttattatttttccttaacctacacaggaggtgtaaattacaatactaaccctaatttgaatttcgaaaatatcttattctctcagactcggtccttcgaaattcccaattctctctctgaaatctcccgccaacaatcgaaatgagaatcgccgagatcaccacgccggacctccggttacatcaccgggaaaccgattcacacactcaccatcctcttctctccgagatcgagctcttaatccaacaatctgaagccatttccaaagatcagccgctacctcaatctctccctatttctcttagacaattcctaactcggctgagtcaacttgctccttttcccgataactccttcaagcttaccatatggaaactcagctttcgcctctggaatgcttgtgttgatctcgctaacgccgcctctctccaatcctctttaacctccgccgagaacattgcgaatctcagacatgttgccgccgatatgctatttctcgctaaggacgttaccggtgttccatctccgacgattaagtcctctctattctactataagaccggtcttgtttatcacagtctcaagaaattcgatctcgcctccgattgcttcgagagagccaccgaaatcgtctcgaaaattgatatcgcgaaaa

SEQ ID NO: 66343 - DNA, 410 bp, Arabidopsis thaliana landsberg
  unsure (1)..(410): unsure at all n locations
attaacatccgtaaccctcagctgggtaagcagcaatgcaatttcaaatgccgctctgacatcatcgccgatnccagcataaactggccgatcagctgcacccgtgagctgcccattgttttacgcacccccacttctttcaaccgcctgaccgcctgggctgtggccaggttgataaagttcacacaggccgcaatcaccagcaatacgccgacgaggatcaatgcatataaaataggccgtggcgccggaccataaccaggcatatggaacatttcgtgtagcgggatcgtccgcattttgtaagtttccgcgtctttcgcatggtaacgcttctgagnnnnnnnnnnnnnnnnnnnnnnnnngcgggcaacttcggctgcttctttcaaggccacccagcacatggt

SEQ ID NO: 66344 - DNA, 601 bp, Arabidopsis thaliana landsberg
  unsure (1)..(601): unsure at all n locations
ggccactatgtttgctttataagacatgtacaaaaaaagtcatagaaggatgaaaaaatagaaatatatattgaacctatacttagcaatcaaattattaactattgcgtcgaagatgtgatgctttttcaaaaagaagaatttaataaaccgagtatgtgattagccgggagattgaatcaaaagaatatgaggccggatataccgatatgaccattagagacgggatatttacgaagatgtgacgataataagtacgaaaaatccgtaacgaaagctaaataaagtccaaaactaaccaaaaaaagaaaaagaatgtaaacgcattcgagtacaaaacatattgggcaggaagaaagcatccaaaaccagctgtttaggacgtgccctgtctcgtaggtaacatgagattcaaccaaagccttacaattgtttagcacatgttccaaacgcacaaaanttacatataagacagtactgccctttttattttattctagtttggttgctttcgcagggctgatctgataagctataaggtaagagattcaatgctaaagtttgagcttaaaaaaaaattcccttgatgaccctttttttt

SEQ ID NO: 66345 - DNA, 478 bp, Arabidopsis thaliana landsberg
  unsure (1)..(478): unsure at all n locations
ggttttatactcagagtagccttcatatattaanccccctttcctccttatnaaaaananannaaaaananataacattggtactttggtagaaaatttcgaaccaaaatggaataaatatttaattctataattgatatcattacaaaaatcagttataacaatagtagatattattatttttaagatatacatataaatattgatatatatatatatagatatatgtatacccgcaaatatgtttatctattctattacattttattttgcctaatttactcaaatacacattttaattttcatattattgatactctctttggatcactagccatagcattaccgtttgatgtattgacagttgatgcataggagaatatctcattttatatttgataatttttcactttttgaagacatagaaaaagaagattaaactatggccaaattttcccaaaaacaacattaaaagaaa

SEQ ID NO: 66346 - DNA, 322 bp, Arabidopsis thaliana landsberg
ttttcttagcggcaacagccactttatagggggtaatgacatattcagattaccatcatattaaacgattgaagcagataggtttgtatgcgcttgcttacattcctccattgatcacctgatattaccattaaagatcttgcaggcattttaaaacggatgagatcacccactttattgcatgagcttcttaggacatacttgttcctgaaacgatcaaacacatgaatcgagaaaaaacacttacttttacaccgtattacatgcaaggcggttcaagcaccagactcacggtttgatttaattagcggaagaacaaatc

SEQ ID NO: 66347 - DNA, 283 bp, Arabidopsis thaliana landsberg
  unsure (1)..(283): unsure at all n locations
ccgaatgtgcgtgggacgtanaggaggatggtgtaacaacntatccatactttcaccaggaccannangcaagcnanagtggcctgggagctctacctccattgacgcactccaaaattgcgggagggcgactttcgatcataactatatattattggaaaatctggtagaactataaaaagaaaatatatttgattaaaaaaattaattcaatggcggaagagctcaaaggagaaagaaactcttcggatgcgggtgggagctggttaagtgaaccccagcc

SEQ ID NO: 66348 - DNA, 594 bp, Arabidopsis thaliana landsberg
  unsure (1)..(594): unsure at all n locations
agacaangtacagtctgagataatgttttcccggcccgttataaactcatcgaataatgggccaactttctaagcctcaggctctggcccgtcaacgcggctagatccgttcattgaatcagaaacatatttatcctatcgggtttaaaatttcaattaaaatttcaaacataaatttctctcatattatcatatatggacgaaccagctttgtttttggcataatgtgaaatcaagagccaacttgttttagccattaaagtttcctcaaatacttctcaagttgccatgcacatcaatatttagtttttgaattattattttcttgtaattttacacattcctattcaaaaacaatacaattaaaataaaatcatttcgtttataacacaaaaaaaggaagaagaagatgtcattgtttttttctttattcacaaatcttaagaacagtccatattaatgcatactaaccacccatgcgatacattcatcgtatatgataaatccttccaattgcatttgcacacatacataaagtaggatatgtgtatatataaaacatatacaggcataacatataatagattttagaaa

SEQ ID NO: 66349 - DNA, 566 bp, Arabidopsis thaliana landsberg
aaataacacattatgtatagtactaaatcattttattagatttctattttctttcttatacttttgttatcttttttttcaatcttcttcatttctttgtagtaaaaatatttaaatcacccaattactaaacatatgtataaactataacttaattaaattttaaaaatcacataaattgaattttaggggattaggtatattaaatacaaatattagctacttaaaataatcaattgtggggtatacaaccatttcaatgctgaatgtggatgaatgccttgaggaaaaaaatctcctatcatatatatgattttcaatttagatattgtattaattttgtaaagattgcaattcaactaccaaacttagaaagctatctaattcatcctttatacacaagtacacaactatataaacaagagagaattttgctctaggaataaaatatataaaaataactcaatcgggtcaattaaaatgaataagatggaatatctttcaatcttcggttttgtttcagttatgtattcgatcattagggttgaagctagggtttatgaagt

SEQ ID NO: 66350 - DNA, 310 bp, Arabidopsis thaliana landsberg
  unsure (1)..(310): unsure at all n locations
tttggattgctacactcattttccttattgtttcnctctacactacatcattctcgctcaccgtttcactttaaaccttattctcctctctcaccctctctatctctatcttcatcatctcataatttccattaccttcactgtaaactacttcccatggttctattatctcaacaatgccatcaatttcactttcatctacccatttgctttcaccgttatctatatcatactccgcatactcctcatgagtctcacaagcctcataccaagaatactcatcacaagttgatgatttctcatgactctc

SEQ ID NO: 66351 - DNA, 279 bp, Arabidopsis thaliana landsberg
cagctaaacggggcgagtctaggacacactgcaacgctgtggcacctaatacacaaggggccaaccgccatggggggacggggggaaaccgtacaggagccgcagggtagcgcgctgaagaacccgcactgcaataacgacattgacgcccaagccgcgcagaagccgaggcacagcctgccgcccgggcgcaacaataccgacggagcccggggcaagggggaggggggcaaaagcaccacagcggtaaacacaggcccggcgcagacggcccaaggg

SEQ ID NO: 66352 - DNA, 1810 bp, Arabidopsis thaliana landsberg
ggtttttttctacaacaaatcacagttcctaatttgggagtacacatataaaatgctactatcgcaagttgtttgatatcttttcttacacttcattttgtccaaaatactctctacttaggctaagttcctccttggattatgttctaatttggttgttagaaaatgacttaatagtggatgtggaaaagtttaattaagtctcacctaaagttcatttggtgaaattcctaacaacaaatcttgaaggttcatatctttcacatttaagagcttactactcttatatctcactagccaggaaaaaaaatagtaatacacaggtgtcaaaattatattggtttacaagaaagagtttgaccttctaacagacctattcaatttctttgacaaagcctccaaaacttgccacgtggcatctccctctcttgaaggaacattaaacataagggcccgcctaacagacggatcctccaagtttctctgtatgactgacaaattagtagccgccacgtgttccaaaatatcccctagctttccaacgtctctctccgccaccgtgagcgaaatatccggccaacgtacggtggaagggaacggcaaacgaatcccgtcggctataatcaccggaacacagccaagagccaccgattcaacaagtcttgggctccacggtgcccacccgagaggacataaacagaaaacagaacgagctatttctgactggtaaccggcaaatctttgccgttggagataaaacctccggtcaccaccgtaactccgccatatattcgtccttacacgcctgataggttaaaaaaagtagttcaatatttaaagttttatgcattttatagaagaaaaaaaactaggtatagagattgctataagagttttgttacttgctatagaagcgtccactgatgtttttgggatgaagttccatcttgccacggaaaaaaacccaaatgtctcgttctttagttaccggaatattcttttgagtcttgtgtaaactttccggtgagatgtacggtggtatcaccacgttctctacctcttggcatggatggttaaaagtaacaccaaatgtttgcaaaattatagagtttctcaaaaaaattggtactccatcagcaatagctctatcctccttcacaaccaaaaagaaatataaattttgagtataaataaacatatatatttggcaaatcatttttaaactaaccatggtgtggaagcaagagccaaagtcgtgtgtggccgtgaagacatgatcagagccactggttcggttccaaaaagggtattgagtcgagacgagctttatcgcgtcattgatgagtgatcgtgcatggccaatcgctggaaagccattaatggtgctgaagttgcaagagacatagacagggacaaagaagaaatcggcttcatacggatcttccgtccttacatctccttcgaggctgagaaacgccttatggagagccacttccgcggcaaagaggtggctggtgcatctatcattggctaaccagtctttgttgaactttgaaggtaagtcatagacgtagattttcaaattgttgaatacgtctaaagaaaattaaaacagccaaaaatattgttatgaaaaaaaattctactagaaaacatgatggattcatgattcatctatatatatgtaatatgtacctgttttgatgttaggttgttgagaggtaaaccccagcccgtgatcatggattttagattcaaacatggaacgagaagcgaaaagcttaggtttagggttagtaagaagaggctt

SEQ ID NO: 66353 - DNA, 2532 bp, Arabidopsis thaliana landsberg
ctactatggactttccagtgtattacctctcagaccgtggcccgagcaatgcagcagagagatccttgtctatccccaagcttttgtgaaatttcccatcaaaatctccataaaactcaatctggtatgacaacgttcaagagcatcacattaagtcatttgttctagcatgtagtactagtcgatataaagaattatgaactttctaatgagggaagtccatttaatcatagaatcaaattcttttatcgtctattaatgtgaaggtaatcatagacaacgttcaagagcatcacatttaagtcatttcttctagcacgtaaacttatccgaacataaacatagaaatctattgtaatgctagtccatatcaagaattatgaactttctaataagggaagtccatttaatcatagaatcagatctgtttatcgtctattggtgtaatataaaatcttgagaccacagacaacgtgaataatagagtaatattgttctaactataagaggttgattactatcaggacgtcaacaagagttacatacttgaggagttaaaagattcctaaatgaaccatcttcaccactgaaaactcttagacaacgaaaccaggaaccgaataatatatgttatgttgcaaatcaagttttctgaagcaaagaaccaaatcagcatacactaaacatcggattaggttggtgtcaaagaacaaagataggaacaaaaaaaaaatcgatgaacttactgcatctttggcaccaagcttctctgcccaaccattgatagcaaagggatcattaacagagacacagatgacagaatcaatgcctttggctttaaacttatcaatgtggctcttgtagctaggcacatgctgctgtgaacaaactcccgtgtaagccccctgaacacagaaaacgaatattccggcacaacatcagaactcagaaacctgatcaagacataaaggaacatgaaaagatagagatttcttacaggaagaccaaagatgacgactttcttcccctgcaaccaatcaatatccacaaacgttttgtcagaaattgaaatccccctctgaattgaaattgtcagaaaagagagattcgaaccttgaagatatctgacaatggcgtggtggagaatttggaggaaacaccttcgtcccagctgcgagctttctggagagaaacgccaggcgccgccgaggttatgtcagtgccttccgcgagctttgagaaacccctcgatgaaactccgatccgggcactatttgccgccgatcttagtgccgataaatttcttagctttagaattgacatcgccatcgctgaaaataagattgagaccgtttcttggttccttcgattactgtatagtgtcgtttatggcacttctcaaagacctttctaaagacacttaaccgttgccgttttgtaacaaacaaatcagactgcacgttgtttaaaagcctcaagaacagcacacactcaaattttggttttgaagtttttacttctttcatatacatcatttacatttcatcttgtgaaaaacattcactttttgaccaagtaaaaaatacattcaaatgagttctttgatttctctataaaaaaaagaaaaaacagagcttgttcaaagaccggaaacatgaatcttgacgagtttctacaaaactatcagcaatgtcgatattctgaattggtatagtcgactagctggcgtggtaccggactgagaagaaggtttgagaatacccatcaatgtttaagcttctgccaaaagcacttcaagatacattgtcgggctgtctgaaattacaaaagagaagcaattttagaatagtgatgtcgcagtcaagcaagagcaaattctatatgatgacaacttgatggcattaggaacttaccatttggttttggttttgctccatttttcaatggctttataccaatcccattgaaagaagagagcgattaatcttataggccctgcggttataacttcaagaaaagcaagccaaaatgatctttgaggggacatgccggttgtcgcgagagacagtaagaatccctcaaagttgcatgagacggtgaagtttcctgcttttatgccatccatagccttttttgctacttcttctgtttccattgaaccagaggatgcagctattatggcagtgacttcaggtctgctcttctgttctgagagagcacccaaggaaaatcaatcaaactcataatatgaaccaaggaactcagaacatcagtccataatgtgtttacttcattagttatcaaaaaaaaaaaagtgcttacttcattctcagagaggcaaaaagaagtcttttatgaaattttcagatgctattggaagataactacatcccattattctcttctaaacagtattcatgtgaaccacagtacgcagagacttcaagctaaacactatcacagtactcagtacttaactcaccagtctatcagtttctcctaactggcactcttatagaacatgtgaacatg

SEQ ID NO: 66354 - DNA, 266 bp, Arabidopsis thaliana landsberg
  unsure (1)..(266): unsure at all n locations
cagacaagattctgatataggatataaggaataaggatcccanancgaaccgaagtaagnnaggagggtngagacaggcccgggggaacgggggggaaggccaactgggaccccgcacccctagcggtagaagtccatacagtagaggaagggcccgggactcacgacttcattagacgagaaaagggttggcacaaggggcgaagcgcccgacagaaacaagaaaagcaacccaagggcgtgcgaccaagaacacgcccagacac

SEQ ID NO: 66355 - DNA, 297 bp, Arabidopsis thaliana landsberg
  unsure (1)..(297): unsure at all n locations
atntaccctagtgtgataactgtcaaaaaatatactgcagagcgcaaggcgaaccattacaaaacagactccccctacccattcattatatagagaacatcaccaatattttcacatccgctatcaaacttatttnnnnnnnnnnnnnnnnnnnnnnnnnnnnnnnnnnnnnnnnnnnnnnnnnnnnnnnnnnnnnnnnnnnnnnnnnnnnnnnnnnnnnnnnnnnnnnnnnnnnnnnnnnnnnnnnnnnnnnnnnnnnnnnnnnnnnnnnnnnnnnnnnnnnnnnnnnnnnnnnna

SEQ ID NO: 66356 - DNA, 538 bp, Arabidopsis thaliana landsberg
gagcagcgccatcaccgcgcccaggtgcagtgccagcagttgcgtcatggcggcgtcgccacgcgcggccggcatgagcaggccgctggcgctgatgaacagcacccgcgcgatgaagctgccatccatcggccgctgcgccggatcgccctgctgcggattgcgccgcaggttcagccacaacaggccgagcggaccgatgatcaggccgacgccgccggcggtgccgagcagcaccggcaggctgaaaaacggatacggcgcttccagctgcagcaggtagtgatagagcgtggcgacgcacgtggcggcgaagcacagcaggaagccgtagaacgtgaactggtggaagcgccgccgccacagcgtgaagcggtcgtcctcgttgttgcagccgtggccgtggccgccgtccaggtacttcagcgtcagcacgtcgcgcgtggcttctgcagcggcgcccggtgcggttgccgtggctggctttagcggccccggcggcgacacgccgcgccagatgcggcgcgcaccgatgccg

SEQ ID NO: 66357 - DNA, 726 bp, Arabidopsis thaliana landsberg
ggagcaacgcatgattctggatcagtggatcactaggaactaaacaaaatcttgtcttttattttttgttcttcatgagttaaataatgatgtatgtatagtgagtgatctttggtatctctgatgaaaacaaaaattgattatcccttttcagaaatttaaaaacagaaaacatgtggccattacttctctgttaactcgaaaagatacaaaatttatcctttctctttgttctaagtacaagcaacaatggagtggccatggtcggccatcgctgcttcttcttcctcttcttctagttgcttctttgcttctcctaactcttgcttgtctattactagacgaacgaatttgagctgtgttaacacttcggttaaatccttgcgccacagcagattcgactcgaagcataatctcgttaaacgtcgaatcaatggagattccgttgttgggagaagcaccacaagcaataatagcactgaggagacagaatcatcgtcgtcttcttcgtctgtagattgcgttggaatgggatcagacgtggaatgcgtcaataacggggaagatgaggagaatcggagctctggaatcttgagcggcggtgaaggaacgtttcttgaatggacggattctgaattcactcttcttttttctgggggaaccgccgaattgtgggccgaattaaaaggaaagtgttggcccctattaacctggatccctttttct

SEQ ID NO: 66358 - DNA, 646 bp, Arabidopsis thaliana landsberg
atcctcattcactatcatacacacttaccgctacttatattgatgcgagtcaatatatacttttaattcacagatcctacgagcacaatggtattcgagaaccctcctgctctttatacatatacaaagttcgctgtgtagagatgagcaccctaattaggatcttaagaataacagcacacacggatccacggatataaagagtcccgagggcgtgtatacactatctatcccgaaggatacggattatatggggtgcactgataattggctaggcttggggagggaactacattgtgtagactgaccagtctgacctgtctttgctggccgagatgaaatatatagatcttacttaactcaatcttaccatgtattcacggactccagtgaagccttcttttgtacgaacctttgtagtattcacctgcatgagcagtgaacactggaccggtaaggtcatggtatatgctcatactgacagtccgtcatccatatgtgtagcagccactacaacttccacatatgcatgaataatctcttgtagcaagaacatgaaccgataaatggcatctagcaggcatagagggagcatacatagacaatgccgaaagccccatcacattgtagcatggaggacattaag

SEQ ID NO: 66359 - DNA, 456 bp, Arabidopsis thaliana landsberg
aatactgtctggaacaatgtgcggttgcggctggcgggttatatgacatggactgggtttaaaagagtggcaactaatggctgcacgttgggttacacgaatcacacttattaatcacacatttataagaaccaaataggtgacagatgttaagagaggagaaagtagacagaagggaacggctactaataagagcagagatgtgaagttagaagctaggacttagacttaatacaaaatgggaagctcagaaacaggccagatgagcctgaaatttatagatccattataagcccaaactagcatgactctattacattagttattaaccttcagggttgcctgtagtagaaccaaaaccgatatagaaattgaagcaaaacgtgattcgtgataatataacgttggtttgtccatctccaaacttaaataggctggtatagactggcaaaaaga

SEQ ID NO: 66360 - DNA, 502 bp, Arabidopsis thaliana landsberg
gggatacagactgaaaccagacaccagaaccgtataaactgaattaacatacaatgaacaaaatgaacctgaattttttataaaaaaaaccagcagtccccaacagcatgaaattaagtgactaaataaacaaaagatcaaagagagaaacatatatattataaaagaccaaatcaaaaaaggagaaatgaaccataatgcacaaacatacaaagcaaaaagacgacacaacaaccactaaataaaggaaaacaacgtctcacttcactcacgttcacttattatgctacaccaactcaaactgaacacattcaataacaaccatacaaaaaaattattcaacacacataatacagactaagcgataaaagaaaaaacaactactaactaagctcgtatttaaacagtactaacattaactaatacaacaaattcaactgaaaaaaactacaaaaaagaatgggagcttgagctaataaaagcaaaaaagaactacaataca

SEQ ID NO: 66361 - DNA, 1844 bp, Arabidopsis thaliana landsberg
gctctcagcgactttatgctcagaccccagggactgatccaactactggtcgaccattcctcgaacttcttgcataacaatccaccgttcatcgtactggtctagggacctcacaggactgaacaactgaatccttagtcccgtacgacagaaaatattacctctgtagatgcactagacctcgactcatcttgacttgaagcatgctcgacaaccttgaccttggtctcatctagtttctccatcagagtatgggcttcaatatctattctgatccagttacaaacgagaaccaaaacaaaagaagtaaaatcttaagacttgaccattcttaaaacgctaaacaaagcttcaacacaggaacatttatatatcttgtaaaaaggttctcatccaagtataccttgcaatatcagcactcaattttaaccctccaatagcaccttggacatattgaagcagttcttcgcgctttgcctagataatgacataataagccattacatggtgcaagccaagaacagagtttaggaaacagaacacttgttttgcttgcaacatccttaccagaacttcatccttgtattttgaaaataccgttgctaagtcctgcacattttgaatcactgcttcatgaacttccttctgtcctgacaaacagagcctgtatgtattaaccataaccagttgagttgaaatgttcttgtaaagtaactgaaacagagttttttcaatggaagtgaaagcatcacccaaacagttccaaaagcagctggacttcttcctcattaggtgcttccaaaatctgattcacaaaaaaaaacagttaaccattatcaccattgcaatactgacacaacagcagaagctatacaaagaatctgtctttacactaacttaccatagacaagaccatcccttcaagtgcctcactatgaagaaacacgtcacgaaaagtcattggctcaccgggaagaccaggatcaacgtaataaacctatacaatttctcaaattattagccaacatgattgaaccatcatgaccaaagacatgtggattggatttactcacggtactgaagtttttaggagaatcttcggattgagtatgatcatcggttttgtgattgttattgtcgaaacaagaataagacatcctctcaatctctctcaaagcaacaagccatctcctcaacaactgcactctctcgcttcctcttgaagaaaccgaaacctcttctaatctcttcaccgcgagactaaagctcttcacattcctcgatccctacattttaaacacacacatcggcgattagaatcgcaatcttagataagaagaggagagattataacgtacgatgcgatcctggatgagtttggcgccttcggaaacggcattgccggcggtaaggacgacggaatcagcgtaattgcgaacggtgcgggtgatattgttcttcccgccgacttcaactgctttgttcaccgccgatctcaaccacgacatcgccgagattctttcttcttctccaaaatttcacaaggtctctcgatgatcggattttgagttttgaattaggctaaaattagggtcttgttcaggtttcaaacgatattactggttggagaaaaataagatcgcatggagagagaccaaacaaaaacagagtgcaacaatgcgagagattggagaccaagtcagacgcagcgtgttcttttcaacattttcctacgtgtctttttttttgtttttttaggttttgcaatttggacttgtttaataattggattaccaaattattataatccagttagttattttgcatttatggacgccagttgt

SEQ ID NO: 66362 - DNA, 1362 bp, Arabidopsis thaliana landsberg
ccttctcctctacaaaatttctaaagtgactcatcagatgatcatgaaggccatgccctttcttttcgcgcttaacagaagtaaagataaattatcaagtttacagctgaaatgttaataagccgcccaacaacatttattcacctaagctagcacccacatacatttaaaaatatatatattgaccagattatgaaaaaactttgacaataacatagttatgaaatatacataaccttaagaagaagatgaccaggttatgaaatagcaaaatcgaataaaaacattgcagaactattgttcgcaaaactattttgcaatttcgccattccattggcttccgaagaagtatcaagctttaaaaagttacacgaccaacgcatatatataacaccattatttacagaaagttaccttcaaagtgaaaaaataaaattctagtactatcgacgatatatacacaaaacatatcatcgaaatcgatttaaggaaataaaacttccccgcattatcgaggagacaaaaacatatccgatcccatccgaagtctaagatatatcctttgtttcttattcttcatcctcatgactatatatagatcggtccatcttttccccaaaatatatcacattataaatatttcaacatataacgcaagcattagggttttcttcgatgctttgggcgtagtaatacgttgttaggtgaggattatatgctttatacgcctttacaagttccaacacatgatcaggtggcggcacaactggttgcggctgcgcttgtggttgatctttcttctctccttccttcttatcgccaccttctttcttctcttcttccttcttcggtgcttctccttcctttttcccttcttcttttggagcttctccttctttctttggcggctcgccaccaccttccttcttcggctcctccttcttctccttttccggctctttcgcaggtcccactagtacgatatccgtcatcggccaatactttcttagcttacttactacatttaccggatccacggttccaataaccgttaatatcttctccttcatgtccattgcaatggaatcgattcctaaaaaaaattaagatgcaacttgtaattcaccaataaggaaagtaaaacgctttgtttgaatcaaacaaaaaaaacaatctttgacttatttgcttgttgattttgttgacaccatatgatttatcaactgatgggcacgtatttcaaagaagcaatagtggcctagatttgattttattctaagaaataaaacaatgaatttcacaaataaacaataattgaaataatcaggacggcctttggtacggtcaaaggggatagtctaa

SEQ ID NO: 66363 - DNA, 153 bp, Arabidopsis thaliana landsberg
  unsure (1)..(153): unsure at all n locations
caggactggtaaagcaaaagcaaaacaanacaatgcctaaagacaaaaacgaaccgcacagaacgaaaaaagggcgcgcaaaccgaaaggaaccaagaaaaaaaaggatgagagggcaaaccaaggacaaacaaaaaacaagaaaagcaaagg

SEQ ID NO: 66364 - DNA, 736 bp, Arabidopsis thaliana landsberg
aaggttcactgtgtcccggcttcaaatttctttgagagatgattaattacgtcctgtcgtagtattcatatgtgtacacatagtatttatgccgtcttggatctcaatatgtgtcaactacaatcaattttttgtatatattaaaaaaaaaacattcaaataattccttgaatctatatattttactatcccatctatttttggatatatatatatatacatatatatatctaattgcaatgcatcgacgacaccggagtaatgcaaggttcaacttgttttgcaaagaccatgctaacacaacaacattccggaatcacagaaaaatccgagtaattttaaagtgaatttaattgacttagcaaaatacagtccatgaaatcaatactgtgccattattgcttaccaaaaataccataactttgtttttagtgagaattgaactcagggcagaaaagtacatattcttttcccaagacaatttggcaatgtttttcttcttaacctaaatagattcaattcaactaaacgaattactaaattattactctttgttttgccactctttttttaattcgtcttaccgtttatttttaggtttctctacctttttaagttgcaatcactaaattattttcactacactgttaaaggtttaaagcttaccaccaaatggtatttaatttcaccggaactgttaaaaactttagcttacttaaaaattggcctattcctt

SEQ ID NO: 66365 - DNA, 1876 bp, Arabidopsis thaliana landsberg
aaaaaaaattttcttcttgggaagagtatattatgaaaatattggattttacactcaaattcatattcttttattaccaattaaaactataaaaagacataagctaaaaaattaaagtagtaaaaaattgatagttttctttcctttcctttattatcaacaacattgaagttatcgtcgtgattacagaatccaaaattggaaagaaatggcaggatacatatttgatttttgttgtcgacaaaatttggactaagagacgaaacaaatcttgccagctacatgtagaacgcacctgttaatactgtaaacaatgtcggctaactattttgtgctaacgacaataaatatcaaagtagtacgtgtagcgtctagcttcttctatgagataaaacgacgatgggagtgtcattatttttcactcatttcttgtatttttctttggaaccaaaatgtctttttccatgatttaacgacatgtgcttcacgtttcttcatatgtctttttaccgacttcaacaaatggtgatggtatttatcgaaattcatcaatttcttcctaaattaaattggtaaaaataccaattgtcgaactcactcacgaagattggactgtaaacggtatagatgaccgtatttgcttcgtggtatggtcgtgcgttgtctcaaatcgcaaaagagccaaattatgtttaaaaaattcaatgccatattagaaaccttaatcttctctaatgaatttgtacgacgtaatatagaatgagaggttcaaattattaagaaggaagtttaaaagacttagaaccgtttgcaaagttttgggagagatgatcggtgacctatacaatgagataatagagattgagggattgaaaattgagggacgcaaccattacactgatacgttgagttgatatggtgataattgtttttatgttcaaaaacttacataagtagataatgtggagtctctttgatttcttaacctgaacgaaaaaccaaaaaggagaagagagtgatcacctaatttaacgtgtaaaacatgacattttccaagaagagggatcgatctaaaagtcaaaaaaaggatgagatagcgttttagtttatcatatgtggcatagttagattggcttgtaaaataatttctaatcctaaacatgatagatagcagccttagaagcaagtaacatcaaatttttatagtatatatatatggattctcgaaaccctaatcttcacatcactatcttcaaaaacaagtaacagaaaaatggcgcctccaaccgcagcaccagagccaaacactgtgccagagacttcaccgaccggccaccgtatgttttcccggatccgcctcgctacgccgaccgatgtccctttcattcacaagctaatccaccagatggcggtttttgagcgcctcacgcatctctttgtcgccaccgagtctggtcttgcctccacgctcttcaactcccgtccgttccaagccgtcaccgtcttcctcttggaaatctccccttccccatttcccaccactcatgacgcttcgtcccctgatttcaccccctttcttgagacgcataaggttgatctccctatcgaggatcgggacagagaaaagttcttgccggataagctcaacgacgtggtggtggctggattcgttctgttcttcccgaactacccaagttttctagcgaaacagggtttctacatcgaggatatcttcatgagagaaccttacagacgaaaaggcttcggaaaactgctactgaccgctgtggcaaagcaagcagtgaagttgggtgtcggaagagtggagtggattgtgatcgattggaatgtgaatgctatcaacttctatgagcag

SEQ ID NO: 66366 - DNA, 672 bp, Arabidopsis thaliana landsberg
atataaatcagaactttatgtataaatgcatataatatgcatgtgaccaatagtttattttaagctcgatataaaggaacgataaatctcatgaatatatatatgtaagaatatttcagcatagttaagtagcatatttcaacatacaagtaaaagtattatttaaaactgaaattgatcacatttataagtaagtttctttatagaatatagtttttgtttttaaatatataaattccaaagtatgtattggcttcaacttgaatttcctcagattactactagtacatatatattcgaaatatggcatcttctcatcaaaaatatgtaaacataataggtccacaagtccacaaaatttaagaaaaagtcaaataatattttatataggatataacaaatatgtaaatacagaattcgatcattacaaatgtcagaagactttataacaaatggaaataaaggcgattggcgttaaaataagagaagacaaaagtagaaacctcgtgaacttcgtaaaaacacttaacggcgtttaaccgaaccccacgtgactccgttaatgaatttcgttttatcggtggggaaatgagtgagacattctctccttctcaacttaagtctctttgtgacttcttggctctctcaccccttcttatctctctcattctc

SEQ ID NO: 66367 - DNA, 512 bp, Arabidopsis thaliana landsberg
cgcagcttgcgttgttagaggttattatttgcctataacattcatttttttctgctgaagaaggcatatctcacgagatggaggggtgaggtttctataccacctcccatctggctgcaaactgagatcatcacattcaagccataactgtagtcatatttcatagacagcacatgaatactggcccatatcaaatcctcacaaatgactctttcatagacacatcacatccttcctgacaccatatcgtaaccggaaaaaaaatacaattttaactcagagtctcctaagcttattaataccaagacgctatatcacttgtacaaaacaaaacaaaccccgcaccgcctcttcttccaatgttcctctgtaatgcccccgcttttcactctacagctctgtggtctttaggactgcttgtatcatgctattgtctccagcacaatcttctaatgtcaccaccaggtggcgctgcgaaacctaccaacagagtcagatgcatgccatgatgc

SEQ ID NO: 66368 - DNA, 154 bp, Arabidopsis thaliana landsberg
atacacaggccatacaacgaagacacggtccctaacaagagctcaacatgtaacacatttgcgctttcagatcagacccatgagcagcaaagaagctaatggggacggaagaaggaatagtggaaagaatcaaaaacggggagagagcaaacca

SEQ ID NO: 66369 - DNA, 173 bp, Arabidopsis thaliana landsberg
  unsure (1)..(173): unsure at all n locations
gggggacgaacaggggggactacacatgggannaccgactttttgtttcatgccggacaaagganggaagggggagagtggataaaggaanccgcaagggcgaaccaaaaaccagagacgagggaacaangccgcacgagggagcganagaagaggcggcgacaccaactacg

SEQ ID NO: 66370 - DNA, 135 bp, Arabidopsis thaliana landsberg
tgtctgtctcgattgctaatatattgtgcgcttctttatcgggctgttgcgctctgtgtgcccgcttcccaatactcttattctataaattaaaaattaatcatccgctctctcgtgtcactctgttcatcactt

SEQ ID NO: 66371 - DNA, 209 bp, Arabidopsis thaliana landsberg
  unsure (1)..(209): unsure at all n locations
ccaccaagacaccacacaaagataaggaagttataggcngcaaaaaacaaaggaaaaggggaacgcaaaagccggccaacgccaacanaacccacncanacagaacagaaagccnnaagaaccggacggaagccancaacagggcaacnaaccngangaagngaccgcccggacaaaaggaacacccagacaagagcgcaagaggaaag

SEQ ID NO: 66372 - DNA, 567 bp, Arabidopsis thaliana landsberg
tcagcagaaaggccagtatcacgccgataatcgccatggacttcaggttcatgccagtgtctattctcaattaggcccttgaaaacgggccgcccctctacggggttatcttacattaaactaccatataggacgcgcggtgcggtttcgctacacgccatttatcggtgtaaaaacgcaatcgctttttgcgcctattacagcgctttccgtcgtgatcaatcccagggcggcccgcagacgcgatccgaccaggcatcgggtcataatggccttatacgcattttgtcttaaggccgggtttgtcagcaagcatttattttgattatctttttgagcagccggcacaaaggccggctgagtgccgcgcaagtccacaggcaaggtgagaagccaggctctgtcagccttgctcaggtcaccgcgcaccctgccggaggccacaattttacctgcctgcgatgaccggacaaggaaacggtcgttccagaccacctcattcgttccattcaacgaacaggatgcgggccggatgcggccgatatcgcccgtttcgcggttgagggc

SEQ ID NO: 66373 - DNA, 512 bp, Arabidopsis thaliana landsberg
  unsure (1)..(512): unsure at all n locations
cggtgtgatctcaatgtgaggaaatctacatacgcggattatgattttatgaagcggtaaagcttaaaaggggggcctggtattcctgttgtagcgatatgttcatcaattttgctctggtactagtgcgaccgcgtaaatcttcnnnnnnnnnnnnnnnnnnnnnnnnnnnnnnnnnnnnnnnnnnnnnnnnattacttaatcgaaagagtaaagtgaaagattgtggtcgttataacaaggtcgatgatttaatattaacaatgtcacacaccaaagatatgagatatgaactaagctaagaatcgttcaccttttgttgatattctcaagactaaatatgaatgacagtacttaagataactgaaactaaactacgtgttgcgaacaaaaacaagatggttgaataaacacatgcaagttaaaatagttagtgagttaagaaattaaacaatctactattataaacctaaatctagaagaaaaagaaaaaaaaaggaacgcaactaacg

SEQ ID NO: 66374 - DNA, 1989 bp, Arabidopsis thaliana landsberg
gattggacccaacctttgaagtccgtcaaagaaaagatcgtatctcttcctgtctccttggccccgaaaggtttcaacttttctgctctttagaatccttaattctttccatctgttttagatccgatcgtccgatgattggcgcattcccagatccaatcgattcatttatttcttccccttgttatgtacatatacactttgctttccgtgatattgtctggatatattaatcaatttttcctcatgaagaactcaaatattgtgttatgttcataactcaaatcattgaacaattcaattcatttgtgtcccatttgcacctcttgaagcaattagtaaggaacgagcttttaaacatgggagactcttcgagttcaacctcttggagcagtaaaaaggatacggaagatgatcggatgattgcttttatgttatctgaagagtactctaaactagacggtgcggtcggcagacgcctctcaaatcttgctcccgtccctgtaagttttgtttgagtcccgaatgaaacctttgtacatgcttagttctctccctggatacctatatttgctcttgggttgcagcatgttccacgaataaattgttatattcccaacttaaatgatgccaccttggatcaccaacgccttcttcaaaggtatttctgatgctctcttccctttgctcaatatatatatctaggacgctcactattgttgtgaatatgttagtgtaatcattgtatagtgtttgttcctagaaagacaaactgagagtaataccgtatgaggctttctttcagatgttgattgttaattcttaagtttaattgtctatgtaggttaaatgtttacggtttgtgtgagttgaaggtctctggtgatggaaactgccaggtgaatggaggttacatttgaaacaatcttcttcatctcattctgttctctctctccccctctactcggtttttgatatcttattgtgaattgtgagtgtcttttcagttccgagccctttctgaccagttataccgatctccagagtaccacaagcaagtgaggagagaagttgttaaacaggtgaagtgtcttatgagttctgaccgatgaacaaaggcagccatctactatatgatcgtgttttatgttcattattaatccattgtagcagttggacttattcttatatctgtttgaaagttaggtgctcacatctctcttcgtatctcattttcctagttgttcttttttcttcttattgcagctcaaagagtgtcgttctatgtatgaaagttatgttccgatgaaatacaaacgatattacaagaagatgggaaagtatgttttgcaaacagattcttttctcattacgcatataagctacactttgtttgtttgagaatgttctgtttcatactcataattacttaaatgacagatttggagaatggggagaccatattaccctacaagctgcggcagatagggtaagtttccttaaataatgatctttgctttgttctcatatcacctgatggctattatagttctcaagaagacaaaattgtgattcttttccatttggatgtttacataacatagattaacacttcacatttcctgagaggccatgtaacttaaccacatacagactaggactagtgcttatgagaaatagccagtaattttcctttcttttctaacaaaatttcctttgcatctttctttgttcagtttgcagcaaagatatgctggctgacatcctttagagacacttgtttcattgaaattatacctcaataccaagcacctaagggtggtgagactacaaaaaaaaagtttcctttcactttcgcatatcgctttttgatatgaagtgacatctgacaaatacagttttacaagttgtgactctttatgtttgctattgtgcagcgctatggttaagtttctggtcagaggtgcattataactctgtatacgatat

SEQ ID NO: 66375 - DNA, 689 bp, Arabidopsis thaliana landsberg
gctctctctttcacttgttccatttttttttgattaaactcataatatttgttgctctttgtttgttacatgtaataatctattctaatatatctaagaaaaatacttagaaaaagaacattattatcacatatgcacagaaaccgccaaaattgggtcttttaaattagattaaagaaattgaacttgcaaaagaagaacaaacaaaatagaggggtctattccacaaataaaataaagttgtaaaaagacgacccaaacaaaacgactcaacttctctctttcttcttcttcttcaccaatcggatccacgaaaaattcgataaacctcgattgatcccaaattcccaatggaggtttctgttctcacctaatttagctccatatccctcgcagtccgattcaagtgagattcttctaagttttttggaagaataatggtgttgccgttgatgaaactgggcacactcgccgtcaaaaccataagtaaaccattggctagtcagctcaagcaccaagctaaggttcatcccaagtttcgtcaatctatcatcaacttcgctcaggtaaattgggatcctctctgattctaaactcgcttttgagattcgttgcgcttataatatgtcttgcgttttcgattctgctgagtttttggaaacttcggaatataggatttgttacagaaa

SEQ ID NO: 66376 - DNA, 932 bp, Arabidopsis thaliana landsberg
tgaagttaatagttgcgtttaaaaagaattattaatcatttgattttaatgttgattgaaaagaatgatttctattttttgatttttttagaaataacgtgctgagttgtgattaataaccaatattgtaacgattatgatgtggaaacaacttttgacttgtaggattttcactaccatattaatatgctctggaacgcctataaataccttcaacatacatattgtgtcatattcatcaagagcactgcaaaagcactctaaattggggtgaaaaagcattaccaaacaccaaataaatatgtctgatctgaataactcatcatcactcattctaataactttgattttggccacatcagttctagtctccgagagccgggtcgcaagaaaagacttgggtttggaccttggagggatcggtgctggtataggcataggcataggtatcggtggaggtggatccggatccggagctggtgccgggtctggatccgagaggaggatcaagctcttcttcctcatctagctctagttcttcttctagctccggtggtggtggaggtgatgcaggatccgaagctggatcatacgccggatcacatgccgggtctggttcgggaggacgttccgggtcaggccgtggaagaggaagtggaggaggagggggtcacggtggaggaggtggaggaggagggggtagaggtggaggaggtggatccggtaacggagaaggataaggtgaaggcggtggatatggtggaggatatggtggtggcgacgactgaatgaagaatattgctatcatgcaatattgtgttttatacgtagttatactatgttactagtatgaaaagaataaaatgcttgaaaagtaaactttctaaagtgtgtgagtcaggagatggaaaaggaggaatctaatgtgtttg

SEQ ID NO: 66377 - DNA, 1735 bp, Arabidopsis thaliana landsberg
ccgcaatcattacactttgcttaagattagtggtgatatgaatacccaaaagatgtcatagaaaaatgcacaacagagaagaatggtagcaacctaagtgtgagacacccattagaacacatacaaagggatcacaaaagaattttagttggaaaatacatacagaaaatttaccctgatattaggtagccgagctacttgcaagacattaatcatcatgcaaataccctgtcacatgacacgtcaaccttagaaagccaactaaggacaattttgaaccaaaagcatcctaagctaagtcctacagaagtcaaccgataaatgtcgaaaacaaaacagaaccttgagttggatttgagcaagaagtgaaagtaaatgttgagtgcgtcaagccagaagttgtgtttagacatacggaaaaaaatcaaagaagaaccaaaatgcatagggataatttggctttagacaactgtaaaattaccaggctaaaatggacttacaaaaatatcttgcccggcccatgcgtgcgaagttttgcgattcataaaccagaggatagcaaccacaaagcagaataacagaaccacgagtgagagaatcgaggtattcccaagcagaggtagttttaaattcttctggccacatttactgcatatcgtgcagaaatataaacatgaataaagagaaaacatcacatgatgcttttaactagctggaatagagctctttcacggttcaaaaacttaattgggtttctgagagtaccttgttatgagtgtaacgataatattatgcattccctgagatagaaaataaattaataattgtgatattgacataataatgcttagcttagcaggcctctgtttcatttcacataaagagttcatcatgttatgtatttttacaagggaaggaaacaatgctaaagaaagtttactatcaacctgttaccaaacattgatcatagttctagctattgaaccatgaaactaaggatatgctcaagattagctaacattacctgcataccaccaatgacgaaaaatatggtcaggatcaagataaaccacgatgacatgaagaagaagagcaaaacgaggaatgtggacgctgatatgacaaagataacagcacccatagcactaatatcaagagtttcctcttcagcaccacctttggtagcgtcaacattcgaagatttctgccaaaattttcagaaaatataaaaagaacaagaattagtgtataacttagacaagtgtatcaatagaagaggcagatatattagagacagaacgagctaattagattattttatcttcttgtcagttgtaagaaaattatatttggttgatttcttgtatgctcagatgttaaagtgaagtttattttcagtagaactcagttccaaaaacaaggtttcagtagaagccccaaaagcagagtataataaaccttgggtgataattcatcgtactgctcatcattcttcttcggactggtaacatgtgaccaaacagaagcaacaaaaactgttccaacagacattagccagaggaagaccactgcataatccacaattgggctctttggagcatacaataaaagctccactgcatcaaaaaaaaaaactcagaggaaacaacatagacatcaaaagaacggtaacaaaagaaacagatagaccataatagaaaattgggctctctggatcatatatgcgtcacagata

SEQ ID NO: 66378 - DNA, 227 bp, Arabidopsis thaliana landsberg
agaatataaaagaaaaagaaaaaataaaaaaaaaaaaaaaaaaaaaaaaaaaaaaaaaaaaaaataaaaaaagaaaaaatataaaaaaaaacaatcacaaggataaagaaattaaattatagaatagaatacaacaacattacttcaacaacatgacaccacccaagcacaaatataagtcagtacaggagtactatcttataaaacacaagacactcaaaaaaaag

SEQ ID NO: 66379 - DNA, 589 bp, Arabidopsis thaliana landsberg
tcttttagcggaggaagagacaaacgaaagagagctgcagaagcaaaagaggcccatttcgcttttcacatcccataattccaaagtattggccggtggaatctaaactttattttatgtttctcttcattttttatccatatcttttgcacgcctttaaatcttcaatttatataaatttacacgggaaaatcgtgttaacataaacgataaattctataaaaatactataaagtaggagaatgatacagagaaaagtaagagaaactcaacccaatagagtctacagtctagttcagtttaggtttgatttatttttttaactatgttttttttctgtttaaaatatatagaaatcaaattagtatctatttccaggttcctcgagattagaaggaacataaagcacattgatggcagaggatcggatttatagttttgaaccttctttcataccctccagatagcatggtctttcaacatattattatggagggggattgtaaagaactgcataatattttaatacaaagaagtgtcctcaagtattcttcatgttctatctaaattttctctttgatcgtataaa

SEQ ID NO: 66380 - DNA, 839 bp, Arabidopsis thaliana landsberg
acacgacgcttaccaaaaacacatctcacgttttgcgtcgattctagaaactttagaacgcaaacgctccccacaaacccacgtttgcgttttcactcactttcataacaaactaaagattctgaggaacaaatacgtattacaacatttttataatacacctaagaagaaccaacgatctttgtcttcgctaaaacaaaccaaatctaggaaacttgtttaataataacatgcttaaacttgtttaataataacatgcttaaacttgtttatttttaaacaagtgttcttgtaccaaatcccactcatatgtattcatgtgtctaccgtaagaccaacgatctttgtcttggttaaaacttaaaaacaaaccacatacacaccatgttttgtgagtttttctttgatagaagacactggcaagaatgagcatcttattattaaacaagtgttcttggctttgcatttgttgttattctattaaatttaacgtattgcagctagtatttagggggaaccttgcattcaccattatatagtgaattagtgattgtgtatgattttataatatgtatttcaccacaatgcaaacatcaaaccgaaggttttttccatatcactggatctccgaatcgaattggtaccatagcagatcaatagtataataacttcttaatgaaatatttatatatctacacattttttataagcatattttttgtttaataaataaataaatgatttttcttaaagaaatagatgcgaggaatttatattttctataaagcatttttcccaaaaatgggatgccatttttagagtttaattttaattttgga

SEQ ID NO: 66381 - DNA, 589 bp, Arabidopsis thaliana landsberg
catttaatccgccagagaagaagaagaagaagaaaatagattagggtttttcattccagaatagccctaatccaaattcgaaatctttcttctgattttgatctttccgatcatgtcatcggtctgtgttaacgaagcattaaccgatgacgagctgagatgggtattgtcgagactagacagtgataaagataaggaagtgtttggtttggtctgcaagaggtggctaaatctgcagagtaccgaccggaagaagctagcggcacgtgctggtccacatatgctccgccgtctcgcttctaggttcactcaaatcgtcgaattggatttgtctcagtcaatttctaggtccttttatccaggagttactgattctgacctcgctgttatctctgagggattcaagtttctcagagttcttaatcttcacaactgtaaaggtatctacttttttgggttaaacaacagaaagagttccctttgtgtttttttccaatctctcatgggtccatttctgatttgatgaacttgaatttgaaggattgtttctaagagagtcaggtgttaaatttgtctctggtgttttagt

SEQ ID NO: 66382 - DNA, 600 bp, Arabidopsis thaliana landsberg
ttcctctgtgaagatatatttctgtaaaaatgaaaatgtcacccaaaacatacctggggtaagagaaatgctactatctgggaaatccatcaatggaaactgggcctagagagacacctcagcagttaagaaaactgttgcctcttctagatgactgagattgtattcccagtagccacatggaagcttacaacatcaattccatgggatctgactcctttgggcatccaaggcatacagatggtccaaagacatacattcaggcagaacatccatatgcaaaaataagtaaataaacatatcaaccaatcaaccaattaatcaatcaaagctttaaaacaggaagctaaacaacatttcctttttaaaaaaaaattggaaatacttctttggttcttggttggcatagtttcccctcactccaaaacttcagcacacatttaaaattagttccatgtttacactgttaacaaagaaaacttctgattgtaaacaagtcaaaggtatatccacatcttttatttaccctattattgctctctggagtgttctcttaatttgagcaatgtttgcagggttgagaggtagtaagattttaaa

SEQ ID NO: 66383 - DNA, 1715 bp, Arabidopsis thaliana landsberg
tagagataacctgcattctcctcaaatttcactgtgtttacaaacctggagctctcaagagaccgtgagctgcagcagcttacattctgcatagctccttcatctccattagttacaaagacatctctcagattcgacattgatcttcttgagcatccagatggattctccttcttctgaatttggatcttgtctggatcacaagctacagttgacttctgtgccttgcagcagctaagagacttcttgagataaagccaaaccccacgcatgtttgttcaagatccgtctttggattcactgggagagatgtgaattataaagatattctatgaagatttggctttgattcggacacagctctgtttctgtttgttcctgcttcaccatatctacacaaactgtttccaaaatgagactgaagatttccataaacgtatgatatcatatcacaccatgaaagaacaaactaaaaaatcttttttagaaatagaaaattacaactaaaatttgacgtttatgttaaaaaaaactgatcaaatcttaaccctgtatgattcttttccaattacaacctggaaaattataataatttttagcataatatgattacagaaagaaaaaaagatatgggaataataattttcacctctcttcacgttccaaaacagagtataacgccacatgctgcctctattgagctttgacatttttaaagtaaaaaagtcaaacatgtgatcaacctcttaattcaatatgaaattatatctttgtagtagaattatttactactatatccagtttacaagaaaagcatccaaactaatgtcattatatagaaaaggaatgaaactttacttacttggaaagaccaaaaccgaatctgtattcttttgtcttgcagtgagaggcaagcttaggaaagtaatctgatgctgtttccttattcttttcctcttccttaaactttcatagaacaattgaaataaatacagtaatcaaataaaaatatatggtttttattatgaatcaaggaaaaatggaaagtgaacttgggttcttggtttctgttgtgatcatatgtgcagacattacagctacagtcctcgggatcgaagccgagattgctcaaagcaaggttctgttttatattaagagtgaaatgtagtttattttattttaactaccaataatcttttcttgtatttgatgtttatccttcaggcacctcatcatcatcatcaacaacattcaagacattcaggttctggatgtcgaagaagccccagcgatggagcatttgctgagggagtagctgcaatggtgcttctgtttattgtccatgtcctagctaatgtgcttggaggctgcacttacattcgctctaagcaagatttcaaaagagcaacggcgaacaagatactcgctgtggctttccttgttctctcctggtaatggaaaagataataggtttttggatttcattcaaaagacaaatttgaattatgtcagctgtttttgtttttgacatacctttgtttgtcttaggatcttttttgttgtcagctactcaacgctaatgataggaacattagccaactcgagaacgaatcgactctgcagcttgccacatcgtccgttttttcttattggaggcatattatgtcaaggacatggagtggtgacttcagcatattatgtttcagcaagtgctg

SEQ ID NO: 66384 - DNA, 500 bp, Arabidopsis thaliana landsberg
ccagaagaagatcccattttcttctacaactctctcactctatctaatactacagtaaagatatttaatcaaattcaacttacataaacaaacaaacataagaagtgatgcttatgctatctcgtaaaagaatgaatcgaaaaaagaagagagaaaactttgcctctgcagagaaacctatgagtcatacaacaaattaagaaacttcattctttacagagcatataacaaatgatgaaaaacgctaatgagaattgttgaacaaatactgtgaaaaacatcaaagaactctttactgctggttctcctttctccgacatttggctttcacgacacgtatctagctctgttacaacgtttcttccaaagaccggcttgttcagaatccacgcgtgtggtggttcctcccaacaaattatttattttttcctagctttttattataaaaccaaaaatcttatgccataaaagcactactgtcacgtttgcaattattcttt

SEQ ID NO: 66385 - DNA, 1836 bp, Arabidopsis thaliana landsberg
gtataaaggctctatgtgggaggggacttttggaagagggtcggtccctccaacttgaaatgtcagaaacggaatccttccctgatgcgtgcacacacacaattcttatctgtagtatgtgcaggaatgggctggttagggaagctgaagaaatttttacggagattgagaagagtggttgttctccttcggttgctacgttcaatgctttaattgatggactgtgcaagtccggtgagctcaaggaagccaggttattgttgcataaaatggaggtcgggagacctgcttccttgtttcttaggctttcgcacagtggaaaccggagttttgacaccatggttgaatccggttcgattctcaaggcatacagggatcttgcacattttgctgataccgggagttcgccagacattgtttcttacaatgttcttataaatgggttctgcagagcaggagacattgatggtgctctcaagcttctcaatgtgcttcaactaaagggattatcccctgatagcgtcacttacaacactctcatcaatggacttcatagagtcggcagagaagaagaagcttttaaactcttttacgctaaagatgattttagacacagtcccgcggtttacagatcgctcatgacatggtcatgtcggaaaagaaaagtcttggtggcttttaatctatggatgaaataccttaagaagatatcttgtctggatgatgaaacagctaatgagattgaacaatgtttcaaggaaggggaaaccgagagagctttaagacgacttattgaattagataccagaaaagacgagttaactttagggccttacacgatatggcttatcgggttatgccaatcagggagatttcacgaggccttgatggtgttttcggttttaagggagaagaagatccttgtaacacctccgagctgtgtcaaactgattcatggactctgcaaaagagaacaacttgatgctgcaatagaggtgttcttatacactctagataacaacttcaagctgatgcctagagtttgcaactacctcctaagctccctcctggaatcaacagaaaagatggagattgtttcgcaacttacaaacagaatggaacgtgcagggtacaatgttgactcgatgcttcgattcgagattttgaaatatcatagacatagaaagcaggtgctgatagatctttaggtaatgaaatgattattaaaggtttatctacatccggattcataggcattagttttgtggagaagagaaatatgagttttgattcgaatctctttaccttaacactacattagaatagaaaaatctctggaaccagaagctctttgaggaaaaggaaaaggaaaaatatgaggtttatacgtaaatgctttgtatgctttattgttcatgaagttttccttatctttattgtacactgatttgttttgtattatgatgttaaatttctttgaaataaagactaaacatgtctaaatctttctggtttccttccaagacctgttccaacatttttgaccctcccataaattatgtacacagcttgtttgtaagataagggagcttcctgaatccttttggttagacaaagagacatgaatcaatcataaatacctcttgattcttcgttgtggacttggcttatcagatattgttcgaatcacaagatttggccaaagtttcctgaagttgacatcaacaaaaagcatctgctgatttcaggctggaaagggccttttaaaaaaaatccccgggccatatgaccatatctgtctgacgtggcatcaccaagggctttcctaattcagta

SEQ ID NO: 66386 - DNA, 1737 bp, Arabidopsis thaliana landsberg
gtgtactgtgtagtgacctcagttttaatctcctaagtggtgagattccttcatcgtctgaaaatatgaagaaagccgatttcatgtaagtatgtatggtatttagttatatttttcccaatcgtgaaagtttttctgagtcttttctatcagttatttgacaggaaacaaattgacaggaggggttccaaactactttgtcgaaagaaataaaaatgtgtacgaatacatgcctctgttaacttttaaacgcaccaactttaatagatttaataaactgtatttgtttttcttgatgtgcagggatgtttcttttaataacttcaccgatgaaagttcaattcctagccatgactgtaaccgagttacttcgtaagtttattcaatgtactcttatatttcagaacactatgttcataccctggctgaaacaacaattttgtgcttctattttctagaaatttggtggaaagcttcgccttggggaacaaatcgtaagaaaccagctctctgtacaaaaacgactcatcatagaaaactgatttatgctcatgacttcgtagtggtcttttaaatcttgtcctttcagttatgattagtgaactgaaccgaaaacggtctgtattttccctctgtctttgatgttacagacacaagggttcaacctgttttcttcaacgcatgccttgtgttcatcctaagagatatcgtaagcaacaataaagcttgtcttgttttcatcatattctagtactagctattaaaacttaaataaatgtgaagcaaatccttgttcttgattaaaaaattgaaaccttcttgtagatttatataaattgtacataaattgcggaggaggtgaagtaaaagtggataaagaaataacatatcaggctgatgacgaacccaaaggtgcttctatgtacgtccttggcgctagcaagcgctgggcgttgatcagcaccgggaacttcatggacaatgatgacgatgctgatgattatactgtgcagaacacatccaggttatcagttaatgcttcctctcccagctttggactttataggacagctcgagtctctcctttatcgttgacttactacggaatctgtcttggaaatgggaactacactgtgaatctccactttgctgagatcatctttaccgatgacaatacattatacagtctcggcaaacgtttgtttgatatttatgttcaggtacgtctatgcagtcaatattcttttacttactctgtagaaaaatataaatcagaacataatatattcttgcatgtttatctgctcacaggatcagttggtgattaaaaactttaacattcaagaagctgctcgaggatcaggtaagccaatcattaaatcgttcctggtaaatgtaacggaccatactctgaagattggtttgcgatgggctggcaaagggacaacaggcattccgattagaggggtatatggtcctatgatttcagctatatctgtggaacccagtaagtttttgtttttactcaaaagtgtttgctcttttatataaatcatttgtaacctctttgtcagattgatgaccgtattttcttgtggcagatttcaaacctccggtatattatgacacaaaggctatcatactaaaagtgggggtacctgtcgctgcagcaacacttcttttgtttatcatagcgggtgtattctggaaaaaaaggcgtgacaaaaatgatattga

SEQ ID NO: 66387 - DNA, 1180 bp, Arabidopsis thaliana landsberg
tgacgaagtaaccattcaattgtttgaccatctgacttatgaccaagctctctcgtcagctgaaaaacacgagctgcacatataatcggcatacggattcttctccctcttccatcgactttgctatgtcgatctttcgccggaggtttcttcacaacgactgatggttgttgttcgattaaagctccgtttgatgagatcataacaccgtcgttgttgttgttgttaatagacatggttttcgatctgggtttagtgttttatttttctcacttggcttgtgattactctctctgtgagagaagagaagagaagaagctaatgattgagaaggagggagctggtggagacaggaaggagaagcacatgggtgtggtggggtccttttcacacagctcaccatctctggttttttttttcttttttgttttgcttttttgagaggacattagttttgtcccgacgcggtggagctcacgcgcgttattactccggtgaaggagaaggtcgcgtggggaccaaactccggcaggagaatttaacactaggtaggtgggtcactcctccggttgctgcagctgctacgtgcatttaaagagacatttatcctttgccacgtcattatatacattattactaacttactataagtttgaatttggaaaataacacgaagatactaatcttaatctgttataagtttttgttttgttttgttcattaaaaatacatgaaattaaatgtattgaagttggtctctctgtctaaaaaagtttttatttttaaaattctttgggaccaacctaatgtggttattagatttgggctaatgtgaacatttgttttgtgattacgtgaaaattaaatcctttttagctgtttccataaaacaatcgaaaatattgaaaaggggacaaatcagtgaggtaattgattggtaagtagactttgacatcaaaacttaattaagttataaaacaatcaaaaccttaatactagtgcttggtctttttatttatttgtttatagcatatttggcaataatatttgccaccagttactctgccgtaaatgccagtagcccagattacgtgttttacgtgaaatgggaaaaatcgaaaccctttttattcagaattcttttggcgacatcacaaaagaaagttccctttaattagtt

SEQ ID NO: 66388 - DNA, 272 bp, Arabidopsis thaliana landsberg
gtttccccacacgtctttattgcctttgtatagaaaatgatttcgagaaaatcactgggaagcttggtattgttggaggattaagccttctatgaatgatttagacgcctactgtctccgctctgtacgatgtcttatcccctgcctacgtcgctcgtgagctgatctccttgaggtccccactgtcacacatggtggatttgataccccaataactcatgtgggatcgcacctctcactaaaggcatttccttcaatagtgcttcttctca

SEQ ID NO: 66389 - DNA, 263 bp, Arabidopsis thaliana landsberg
ggaatcattgtgagaatagacattccatttgacaacattcgtttctccaacccaagccggtaacaatacccgggctcggtaagtcaagaagaacggtctggacgctcgtgtacctttatctctgacgttgctcttatacagatacgtccaggacacggacagacacacagctcctgacctcagacaggtctgtccatatccttgagcattctctcatctgtagccgatacttcagctccatgcaccgactatcttcctttact

SEQ ID NO: 66390 - DNA, 689 bp, Arabidopsis thaliana landsberg
  unsure (1)..(689): unsure at all n locations
agtgtaaagtcgtacaaaaaatcagtaaaataaattgagaataaaactgtttataacgtttttaataaagtttttgtaatcggtaaatattaaaactgtatgttttagaaaattttgttcagttttttaaaattgttaccaatcaaacccattatcttaattggtacattaaaaccaccatatgtttctttgaatttttcttgtagttaaaaacatctaattagtataggaatttatttagaagaagaataagtgagggtaattttgacttttaaaatttgtatacctaaagaatatacgaaggagaccagaagctgaaaatgggccgttgggtcaaacgtgtcggagaggaaacaaaaaagaaaataatcaacgaccactttttttattataaggtgaggtgagagaccctccctatctaaagtagtaacctatctcaataattcatccccaattattggattttatccctactacatttaatttatagttaggaaaaaacattatggtgacaattctttattttattccatgtacatttcatttataaacactagtagatgtgaattaaatgttgaaacaagttttatataacaaancagagattctggctaggaattgntactattttttttttggaccaaaatgaaaaatcttctttactatttttttttcgacaaaagggtacg

SEQ ID NO: 66391 - DNA, 613 bp, Arabidopsis thaliana landsberg
tatgttgaaccttataccccataaagtgcaaaaactaactacgattaagatatctggagatgatacccctgctatacaggcagtgttagacgctgacgtgtggagaaaacatctcttgtctgaacaagaaaaactgtccaaacagttgtcagctatggaggcggagcgctcagctatggctgacacctctgttgacgccgcaaggattgaccgcgagcgtgatgcattggaccaaacgcttggtgacgtacaagggaaacttgcagaaatggagtctgacaaggcggaacctcgtgctgccagtatcctggctggtttgggtttctcacccgagcgccagaagtttgctacaaagaccttctctggaggttggcgtatgcgtctggcactggccagagcccttttctgcgagccggatcttttactcctggacgaaccgtccaatatgttggacgtcccatctattactttcctctcgaattatctgcaaacctaccccagcacggttctggtagtttctcacgacagagccttcctaaacgaagttgccacagacattatccaccagcactcggagcgtcttgattactacaagggcttcaatttcgactcc

SEQ ID NO: 66392 - DNA, 2774 bp, Arabidopsis thaliana landsberg
gttgttacaatggtcctgtctcaatccggttgtacgacgatgagaaaaacatcatccccaaagtattgatagatatatatgacgctgcaggaatcagtatcactttcgtacccgaaggtgagtgaacaattcatttgacctaatccatctcttatcttatactaaatatatgtatatgtaatctaatctagtcctctgttgatatatatatagttgcagaggcttatggatatgcgagagctcataagatggtggtggacattcttttgtgggcagtggacagtcctatagaatccaatttgattgtactctcaaagaacttcaaagaagagttgactgtctgtgttattcaaggcttgcatgggagaggttacaatgttctcttagcagagcctttagaacatataccttttactgaaagctcagaatggctttgggatagcctttgtcgaagcctatcatcagatggaggcggaagctcacaacatgttgacaataaggctgatactgttgctcttgccgattctctgaggaagcaaactctgtagaggagactaatgtacttatgatgctttatgttatattgtgattctctttgatttgtacgttttaatgtgatcctgagattcacttttcagcaactagcaacgtatctttaactcagtaagtcaatagtaagatctttaactcgatagtcaatagtaatactaataagagagttgcatacagcaaagaaggtgtttgtgtatagataaatagaaaagttgaagacaatgcagtgtccatcataaagaatcactcaactttgatgttgttatcatctacaacagcatcacttggaagatcaatcccctttggaatctttcctggataatcagtcaccgaactgtccgatcccaacatactgtgaatacatgaatgaaaagcattagactatacatggttactacatcgtcaaagctcatggaaagaaaaatgaaatgaagaaacttcataccttctatcgacgatgaccattgaacgtagctcacaattagcaaagctgcaaatcaaatgaaaattatgaacctaatagattaaaaattcataactaagagtgtggaagcttactggccgcaaatttccttcttaacatctggatgacactcgttttgtagtgcattcaatgtgtgaaacaagaaaccactgtgtgtcacaatagctatctctttttctttccgtgtccatagcctacaaatccaaaaccagccatcatacaaagttctgttccatcaacattttcgataaatcaacaagactaatggagattacttaatttctacatggaacattaaaagggtcttcttcaatcagaggttgatcctatttgatgccaacttctacttatcaagctaacaatatcgaggaagctaagaggatgtttctctaagtttcaagttctgcacaatctattaaaaagaactaatttctagagtttagatataaaagagaaaataccagttcaggaacttttttcctctagctgcaagttcttcaatcgtttctctaacatcagccttccataacttgtcttcctcgctttctatctgaacgcaaatttaaatgtgaggagtcctttgaagcacatataagttgtttggcgtaactgtatgctgttaatagtcaactgggcaaccagaagattacaagtaataatcaatgccaggcacatctaagactctcaatattacttgccagtgaaaagtcaactgcagggaaaagaaactgatagtcgctgatacttctcctctgatcacatggatgcactccctgtgtccacaaaaatggaatacaaaagtgaaaacttgtcgcagctaagcataattatttcgtgactagatctaagcttttggataggacagcattgcgagtaggagtgaaaaatactgcaaagcttgtgtttgtttcatggtcactttaagttttgtgataattgtgaagatagataaacgcaattctgtccagttttagtttgtctctaggctatatgtattacactgaaaaggcataccaaatgctctctgcaggactcctctgtaataactggtgggcagtttaaactcgatatagctgcacggctgctatttcctgcatttgctaccattagaggtagtacatcactcatatccgtgtagccctctccaccaaaaacaccaacagcagtttgcaaggttctacgagcaaagcaaatccacaaaaatcaacactgtcaaaggtttatcaaagtggagtgcatgcatcaatgtgatcggtctcacacaatctattacactggtaacctataatctgtcacacaatataagaagttaaatattacactggtaaccaataaaaaaatcagttttcctaaccaagaagaccaattagactaagaaccagttatactaagatttcaatcacagatgtctagagtacctcatcagtggagacgaaatgaccagttcgatcttcttgtgaagtccactggaatgaacatgcttacgcaaactatctacctgtcaccaagagaatctatattaattttttttggataaagagatgcaagtgaagttatttttctctatagacctgtttccagccaagctgggtcaactcagcatcaaagtagtcatgagacatgtaagccttatagttcttctccccatccacattgtgaatcccctgagcatgtctcacatgaacaaaaagtagtcaatatcagccccaaattctgatacgcaaacattgagcatttt

SEQ ID NO: 66393 - DNA, 664 bp, Arabidopsis thaliana landsberg
caagcgctcccgcactaaatctgcgcacgcgggttgatggtgtcggagttcccgatcggggtgccggcacttgcggaaaattttccgcgccgcaatcgcatcatttcgggtctctcgctcggcacgctggtggtcgaggccgcacatggctccggttcgctgattaccgcgcgctatgcgctggagcagagccgcgaagtgtttgcgattccgggctcgattcacaacccgcaggcgcgtggctgccacgccctgattcgccagggtgcgaagctggtcgaaaccgtcaacgatattttcgaggagctgggcccgctgctcggctcgctgctgccacgcgccgcgccgccaccggaggctgcggccagcgcctcgtccgccgggcatgacgcggctgcgtccgcgatcctcgacgcgctgggcgacgagctgctcgatcttgatcaactgctggcacgcagcggacagggcatcaccgatctgcaggtgacgctgacacggctggaactcgatggtcaggtcgcaacggcgcccggcgggcgttatcaacgcttgcgcggtgcgccatgacggtgcctggcacttttcatgcgcgccaaagtcattacactgaaccgacagcacggagactcgcgatatgaaagaaacagacctggatgtgctg

SEQ ID NO: 66394 - DNA, 370 bp, Arabidopsis thaliana landsberg
  unsure (1)..(370): unsure at all n locations
gaagcccaagacgagcaagccncaaaacaaccacctcaaagcctctacacggccnagaagcacacggaaccagggaaaaggcaagacccaaaacacacgcagacgccagggnanaaagaaagaaacagagacccccggcggccaacggaacaaaacaccaaaaacgaaacggagccaggacaagagaaccacgngaagacgaaacacacgagagagcaccacaacaacacggagacagagaaaaaaaaaagcccaaaggagaaacaaaagaacaaaagcngcccaacccaaccgagagagccngcaaacgagcaaagagcagaaccaagccccacccgcagaagccaaaagcacgaaaagccaaaaacca

SEQ ID NO: 66395 - DNA, 1978 bp, Arabidopsis thaliana landsberg
  unsure (1)..(1978): unsure at all n locations
acatattcattatggggattgttgtgatgcatatctttttaagctttagatataatatcacagtccaatatagtcagaagattgtaactataatttgcttattttattatttagctggtagttttggaattcaaggttttgctgataattttagaaaataacatatagttatcgtgtttatcttttgaaaactgcccttactttttttttcaatcaaactttaatttagaaccgaatctttcactaatttcccgatttggaggaataaaatttacataaattaccctaaaatttatgtgttaaaatatgtccaaatactattataatactatttaaaacaaagcaaaaataaatattttaacttaaaaaaaaataatctatagacgaaccaatcaccaatcatattagtttcaggcttttgcgggtggtagagcaatcatatattgtcactacatattttgggtagatagaacatttttaaaaaataatatctatgctgttgtcatttgtcgttcacattcgtgtgtatatatatatatattccatatttattgttatattacaattttgggtttggattctttcccctttgaaagaacatgaacatacattcggaaaaaaggtattttgaaaacgagcatcaacatgatctatatagacttttaagtccatactatttcagttaacctttaccatctcctactcagattcttcttcaactatagaaaccattcacattagttttcgggtttgacgtagcttaaaggtatccaatttgtgaaagcctggaatatgctctgttccattacctccacatgccaaaaacagagctaacaacatacttagacgactttaaatcccttttcttcacgtctctacctgcaaatacacatcattatattgaaccaatctttctcaatcccaatcatatattcacagaaaacaaaaagcataactgaaacaaacttggccaccgtaaaaaaatatgtcgaaaaaggggtttaatcgcggttagtatttagaggttttggtcccgaacaaagacgttgaagttcagtgagagatggacaaggcagagtcaagaaaacataaggctatggaaacaagtgtaatgggaacaaatgaagaaaaaggccttgtgccactcattattctctatctccacaaaagaaaagaagagacaaacttgaaaaaaggaaatgggtgattcttattcttttagagaatctgataatgcaaaaaaatacttactaaaaagaagattctctttgagattaggacagaatatttgtctttccagagtttaacggttataacatgacgttgtaatatgccatctgagagatgataatacaaataaccagaaccacaccagagttaaacatagtttgaaaattaaatatcaggaaataaaaaagaaaagagaaaaaaggagggaccttttgtatgagattataaaatggcaaagctaagttgatatacaaaactaggcctctcttccaccctatagctgaaggagattcggtatgtaaaatgccgaaaaatcgaatttgttccttctctctattgctgtgtgtatagatgtttatgtaaattttgtcaaaggagttttcagtgcaacaatcagagagatggcaagaaatgattggataaacagttacctggaagctattcttgatgttggaactagcaagaaaaagaggtttgagagcaactccaagatcgtccagaagcttggagatatcaacagtaaggatcatcaggagaaggtgtttggagatatgaatgggaaggatcatcaagagaaggtgtttagtcccatcaaatactttgtggaagaggttgtcaacagtttcgatgagtctgacctgtataaaacatggattaaggttcgtttctcaatctgtatccttatatcanatggtataaatacaaaaagatagagagaaatgcctttacacgtaaatataaataccct

SEQ ID NO: 66396 - DNA, 2010 bp, Arabidopsis thaliana landsberg
agtgagtttgggaaaacaatatcactttatgtgctggaagctcttgtttgtattgatcacgagagatattttcttagtcagctccagagcagaggtttcatacgatcttgtcttggaagcattagtaatatctcctaccaggtaattttcctgtgaacttctgagcgtggtcattgctatgaatattgtagaagttttttagttgcgcactgctatgaaatttcttgttgcaacttgtttagctagtggtaattaattaatttgggcttgactgataaaccagcagaagtagattcaattgtatttgagtcaataataccctttcagtgcgtaggagttcacccatgcaaattcaagctcacagtatattatatatgcaagatcatcaaaataggatcgcaaacctgttgtaagagtggcataatgtggccaatttgctgttggtttgactttttgatccacgttaaaagactagacaccctatgtaactcgtgtgtgttttatgtcccatttacatagtaggtattggggatcacaatcttcatatgctgctagtttacatactttggagacctgatttatatgtgggttttcttatttcgaggacatgtcattcatgcatgtgtatttatcatattattgggctcaggatggaacacatttgctggagtcacaacagcgagcttgtacgttagaagcagaacttgcattgctacttagaattagtcacaagtacggaaagtctggaggccaggttctgttctccatgggtgcgctggaacatattgcttcatgtagagctatcagctttaaggtaatagattatctgtacttatcaagttttctatccgtgacctcaatattttctctgcttttaatccgaaaagtgccttccagggaaatatgagacgtgtggatatgaaacttcagagtgatgtaggatataatgtgcaaaagcaacgaacgataatcactgctgtcctaagactggtgtttgctctgacctcattggttgagacctctgaattttttgaggtcagccgcgtttctttagatgaccttttttatgatcctttgcattgctaattcaatagtctcttccatatgtattggcctggtttagtgaacatgagttgccatttaaacactatcctcgagatcgtttagggcctttctaagactttgcagtttttatattcttacttgtgatttatttgaggagttgtgtgagagtaatacagaccttctaaaattgaatgacagacaccaagttcattttgcgtgagatatgaaattagtattattgcgcttttctctttcactaaaactaatggttgtttgcgtcttgtagaaacttgaatgatgtcactatttttccattgctattgtttacacctttaatgcctaaacaagtagaagcttaatcaaacattctgcatttcaatattagattcttttcacctattctttaatctattcaactaattatgcaagtccgtgttgtcgattattctgggtaactggttttcttggtatgcgaactataatgagttatttcctctttctctacctgggcgtttgataggggaggaataaaattgttcgtgacgtcgttgagtttatcaaaggacatcaatctctgtttgaccaacttcttcgtgaagactttactcaagcagatgatttattgatggagcaaattattcttgcagtgggaatattgagcaaggtaattctttggcgagctataagttcataattttcttttgcttctcttttcgtgatggcatcttcaaaagggctcataaaatcccacaagctagttagatgcgttttctagaaagtgagattgcttgttctgtaagtctggccttttgaagagaacgatggatatggatttgttcaagggctttttgatatgatgagcaagcttttcatcgcctcccgattaaatcgatattatcgcacgtaggacaagtaggtcaggtcatatttgagtatcaatatata

SEQ ID NO: 66397 - DNA, 1700 bp, Arabidopsis thaliana landsberg
caatccaaccaatcggtccaaatttaggagccaaaaccctattaaagtattaattccgatgtgaatgtgcccgtcgaatatctcactcaccggattttctaataagtctaaaacatatttcaagtgagcaaataagagtgaacgaaatacttatttgatctacatagtttcgtggttggggcaattgatctcttgtttaggtctacaagacaactcttcctcaagtaggaacactgatgctcaagaaacgctttccaattataccggttaattcatctgtcgcaaagatatcattttcgagttcatcaccgtatttgctagtgaaagaaaaaaaatggttgaacaagaattcaatggagaaaattaggaagagaggtaatgttgatttgatgaggttaaattttttgcctaactaatgaactagaccaatccaatccacaatacctaaatttggtatatcatcatatttaaaatgcatgaatctacggctagaaaagccatcatctcaagaaagcatattgaaaataatattccactttgaaaattatgcaagaatttaactggtaaatagaaaatactacaagtctattcttctcataagatagtaatgtgttcaacttcgtaaaacaaactaaaacatttgtacacggttaataacctctggaacacatgtgtgcaaacgacacaagttacaaacacatcttgtttgcttagagacgtttgatataaaataaaaacatttgaggaactgaggtaacgagagattgaacacttcaccaaaattgtaaaaacccaaaaaaaaaaaaaaagtgaatcactcactcaacttgcatacttccatgaacttctggactgcgttatgatactgagttccctgaaaccacataacaaacattaaatatgtcggacactgactattagagacagaacagatcagagctatataggaagttatgaatcttgtggagatgatttctgctctaagacatgaacacatgaagatgttttaaagaaatcaagattcaattcaccaactaagacttcatacaaatattaattggatcactgatttgataaatatcgttaggcaactaaaatttgactgttcaatcagcaaaacaactaacatagatggaccagatgattttttgacacaaggtatactcgttcaagaactagaatgcacaacggcaaaagatggggtaggtgacttacctcccagtatagttgatggcagttcatgcactgccaaaactctaaatttttgttaaataagcagttgggtattctttggaaaccctttgctgcttcaatagcttcttcaatgcttagaggtttctgaataaatttcccattgcacttcgtacatctggacatcagctgatttccgctgatctttagctggaaagtctctatcacctgcgaagcttatttgtttcagtaattcacaaaaaatccgtaatcattctactgaatgtaagaaaagtggttgcacagtgagtggacgaggttattttggctcggtgaatccaagcatgccataattacaggtagtgtaggaaatgttccacccagaaagtaaggttaaaaataaatttgttaactagtgtcttgagagatcctattctttaaagcacaatttcagggtatgtgtcctttttgattaaaaatctagtaaccaaatcatgcccatcacagat

SEQ ID NO: 66398 - DNA, 577 bp, Arabidopsis thaliana landsberg
tgtgcccttaatggctgatttggctaattccattttctgaatctcgttccatgtatatattggggaggggtccgataatagatgagcgttcataatccttaatcaataataatatccaaggaaaaggttcgcagacatatattcataacatcaaagataacatgttctatacagtctccaccatatccttagacactggcaccaaccggtgctatgaaccggtgaatgcatgaaacatcactccaattcgtcttcactgtcaatcccaatacccagatcaaatatacaaatgacatcactgtatagtaccacttggcagagggaaacgacaactatcgaaaacgccacttcattcttgggccaatgactcgtacactttataaacgatcaagacaaatatgtcacaatcaagcacgaataaaagccatatttcctcataaaataactaacagccacatgttactcataaattaactaacctattcatgttatttctacgtggactcaaactaactctatccaagaacaagatgaacgatgatcatgaactcaagattcatgtttttaatacatgact

SEQ ID NO: 66399 - DNA, 405 bp, Arabidopsis thaliana landsberg
gagactcgccgtgccgttcatctcgaacgttcttgtgtttctgcggctgctgcagcgaaccgccgaggaggggcacgtatccatggaggcgattggcctgagcggcgcctcgggcgcgaccgcccccgcctcaagcacatcgggaggcgtgaccgcagacccggagtcgatcacgttcaccggcggctatcatgcgttggaccgcctggacgagcgcctgaaccgggacgtcgtcgacaccaagaacagactgcgcgcgtacggcccgacgatggggaacagcaccggttgcgagtaccctgacacgcctggcgccaggatcaccattcagctgacaaccaacagataccagtacgcgccggactacaccgctggcgggcccgggaggatcatcatgagctcgct

SEQ ID NO: 66400 - DNA, 687 bp, Arabidopsis thaliana landsberg
aattggctcaatcaaatcataaaattgatttctccactgaaatatttataaaacagaaattttacccaaatattccatgtgaaattattttcattaaatggaaaagagcacgatgtgactcaatgcggctttttagtgcatctacgggtccaaagccagctcatgttgggcccttttgtatgtaagtttgcatttttttcaatatagataaggaaataactacgctaaaaataatttttttttacaaaacaagatatggaaagagtgacattccttatataatatgtacgaaattgtttatatgtttttgaattgtgattgtcacgtacaaatgatggtcatataaaaataaattaaaaactaaatctctttaattaaagtaaattattgcattcgaaaacttcaaattcaagtctaaactggccaacctataccctaagcaaccactcctcgagtcaaatggaaaaaggttagattgaagctttttgacattcttgcgtaatgtttttccattttatcgaaaccttttgacattctttgcatagaaagctaggaactttctgagtttaaaatacttctcccagatcaatcttcttgtgggttccaagtcatcatctcttgaatttgcaacccatatagtcttaaatttatagtgcttttaaagttttaaataaattctagactatc

SEQ ID NO: 66401 - DNA, 338 bp, Arabidopsis thaliana landsberg
atgaagttgccaaatcgggtgattgtgaaagagtatatggagttcttggaggagggtatggatccttgggctatggatgaaagaggcagaacgccatacatgcttgcaaatgagaaggaagtgagaaacactttcagacggtttatggcgttaaaccttgaaaaatggaattggcatgatgctaaagtacccagcccgctcacaaaagagatggaggaatctcaagctgccaagcaggtacttgcattggtttgttatttgttgaatttagaagtttggttaaggattccgcatgaggcaaaatacgactagtgcagttagtcctttcattgcgcatt

SEQ ID NO: 66402 - DNA, 323 bp, Arabidopsis thaliana landsberg
acctttttctccaaccatcaccatcacaggatccaaaacagcagagtatgataaactgttcgaactcatcacccctgaaacagggtagtaaccttcctgtgggctattgaaatgaacccgttgtgataaccgaagatcagtacttgcataaggtgaattcggcatttcaagccgataaaccgcgcctattggtctttgggggacactgtttttaccttcatcctgaagagtacaacggcctctgccatacaaaggaaccaaagtagaatgagatactttagatttacaaacaggacattggctatgtctttgggattcatcac

SEQ ID NO: 66403 - DNA, 1865 bp, Arabidopsis thaliana landsberg
tcttttagggtattccaggttaagataatagagatatgctacatttaaaataaatgagaagactataatttatgtttttgaggactggggagctatgcaccaacaatgaccagttacgtaaatatggacttaattgaccctatctgcgagtcagtccagtgaaatcagaagaatgacagatgagggtattatgggaaatataaatatggcagtattttaaatattatatatgttttttttttttgtcacgatagtattactaaaatttatggtggtggttcgtatcattgagatatgaccttgtactcacttaaaaaaaaaaaaaaaaattacgaaaataaacatcttcaaattgttaatggcagaagacatttacgtgaaaaaaagacgcatcttagaaatttctatccttcaatcctactattaaccttttcaactaaatctttcataagaaaccatagtttaaaaaatcaccgattttttttttgcacgagcagctttatatatatataggaaaccaactaataaagaagattggtgggctaaaaagggtgacgaagaagaaagaagagtgacctctctctcgcatatttttctttccgatatatatatcttttataatatttgtgaattctgaataaactcttagtaagaaagaaaaggagagtccagaaaaagaaagcgagaaagagagagagaaaacgatacctaagctcaattatcttctctgcaacaaactccaaaggtattatcttcttatgctctctctttgcatacatacatatatatagatacctacatatatatatatctctatgtctttgttcatcatcagttatataggtgatgtagatagatggacaaaaaaacagcgtaagacctagtttctgacttacatatgttttaaattctttgtctgaatcattacaggatccgagagagagagctctggaacgatattaacatatatcatgaagaaaaagattgaagtattgatatgggaataactaaaacttctcctaatactacaattctcttgaagacttttcacaataattctatgtcccaagattatcatcatcatcatcatcataatcaacaccaaggaggtatcttcaacttctctaatggattcgaccgatcagattctcccaatttaacaactcagcagaagcaagagcatcaaagggtagagatggacgaggaatcttcagtcgccggaggtaggattccggtctacgaatcagccggtatgttatccgaaatgtttaatttccccggaagcagcggtggaggaagagatctcgacctcggccaatctttccggtcaaataggcagttgcttgaggagcaacatcagaatattccggctatgaatgctacggattcagccaccgccaccgcagccgccatgcagttattcttgatgaatccaccgccaccgcaacaaccaccgtctccgtcatccacaacttccccaaggagccaccacaattcttcaactcttcacatgttacttccaagtccatccaccaacacaactcaccatcagaactacactaatcatatgtctatgcatcagcttccacatcagcatcaccagcagatatcgacgtggcagtcttctcccgatcatcatcatcatcatcacaacagccaaacggagattgggaccgtccacgtggaaaacagcggaggacacggaggacaaggcttgtccttatctctctcatcgtctttagaggctgcagcaaaagcggaagagtatagaaacatttactacggagccaattcttctaacgcatcacctcatcatcaatacaatcaattcaagactcttcttgctaattcttctcaacatcacc

SEQ ID NO: 66404 - DNA, 579 bp, Arabidopsis thaliana landsberg
  unsure (1)..(579): unsure at all n locations
aagccctcgaggtcgtccctggcgatcgcccagacgacccccaccttgacaccatagagccgttgtctgatcagaagtcgacggacatacgactctgacgaatgaagctcggtggcggcctcggcgacagatagtagctccaatcgttcggccattgacaaatattatcacgaccacacaacaattttgacgacaactgatacaaaggtgaatgtattaggactgaggcgagagccgtcaaggcgtcgggttcgggtgactttgagagagccgccagccagctccgccggccgcttttcttcgccctccacgatcgggttcatcccaatcggaggacaccatggcacaccccaagccgaccgtttcatcgacgcgttcaacacgcaccggccaggccatgcggtggatcagaccgagggggcatcatctgagcaagcaggtgccccggcccgcggttccgccacgggcacagccagcgccacagggtccaacttgatcagcgcgcgccctggttccgccacccggttccncaacctgaccagaacgcccccggcgtattcacccgagcggagggcgatc

SEQ ID NO: 66405 - DNA, 306 bp, Arabidopsis thaliana landsberg
ttgatgacttgcactacggagggcggacatggagcggcgcctgataggagctaatactctgtgtcaggttcggacggctaacatgcggcaagacttaaatcataatgtgaatctgccttttgaagacaattcttaccaaggaataaccaatgcggtatgtggtatgaccaaactctctcatttatcaacaaactgagagaccgcatttactacaaattttattgtacaatggttgtcttaaagtggaaagagaaaagtgttcatttctatgtattttggaaacatcaactgtacttgccaaaaata

SEQ ID NO: 66406 - DNA, 1999 bp, Arabidopsis thaliana landsberg
caaagtgagaataatatttcctaaattagtgttttctagttggaggtaaagaccatcttaaagttgtaaaatccagccgacatcactagcaatatacctcgaaccaagcctaactctctctggaggcaattttagcaatatacacaacaaagatttcttttagacatccttgccactaatttagtctactcatactaaagttttagtgagtagacatctttgttaacaaaaatacattggcaaagggacaaagaaaatagaggcgaacgaaatgaagcgcagtcgttttgatgagtaggggactgtggggtcctccactctttatttttcctgaagaaataaaagagggttttttcgtagaggagaagttttttcgttgctatcgatttcatcttcaatggcagcgatacagattctagatcaggttgatgattcggccgattcactgattgaatcgatgcgtggagttcacaatacgatggctttacttcactcgacggttggtgagttattgaataccatctccgagagtctaaattccgtcgcggagatgaaatcagcacttgttcaagaacacacacctacagcaacgtcggaatctactaaagttacagtggatcatgacctccctgtagcaccaccacctcctacgaaacaatcgaccgcggcggaggataactcaatcgacacgcacccgcaccgtatgtctcgctacattcagctgatgaagcccaagatcgagatgccagtcttcgaaggtcccaatgttaactcatggctcaccagagcagaacgatacttcgagtttggaagtttcacaaacgcggagaagattcaattagtttacatgagtgtcgaaggccctgctttgtgttggtttaaccttgagaaccgtaacccttttgttgattggaatgatttcaaagctagggttttacagaggtttggtgatcctagatctgcaatggaacgtttgctcactctcaaacaggttgattctgttatatcatatcttggtgaatttgaggatctctcgacgcagtgtttggatgaccttgatactgtacttgaggttgtattcgtcaaagggcttaaggaggagattcaggaaatgcttcgtgtgtttcaaccaaagggtttgagtgatatcatcatgatggctcgtagattggagaatagtcctttttgccgtctgatcaaaaattcacaagtttgaagatttgtcttcccggagaaataccctttttggttcttgatgcttgtctttcaagattgtttctttgacctcccttgtctaaaacataaaactgttttagatttcttcatagaaaatgttttgacatctctttaacttgatacacaatgtgaggaatctcaaggttaggacttgctatcatatagtagtttggctaattgggtcgtgagattccatgaagttagcaaaagtttatagactttcttctaatattctctaagaaacaaactgcaaatgcccaatgacatggtctccatcttttacactccatccctttcttcttctccctgccacttattggatattagcatcaatggttaatcactaataatatgttttaataagtttgttttgtgcaacaaatacataagagatgctgaatagttacttggatggtttaaattcaggtttacctccaatggaatcaagttccttattgaattactaacacaaatacctttcctttaccctctttcttccatatactcatcttccccatctcctacatctatatctctgtctatatttgtatatatacacaaataaaacccaaattctcattagaccccacattctgaaacccaaaccccacacttttagagaaatgagtagtcatgatacataccaaaaactcattttgttttgcctatccatattctttcttcaaaacatattgaagaatgtggagggcttggcatgtaactggggtacacaagcgagccatacactaccaccaaacatagt

SEQ ID NO: 66407 - DNA, 553 bp, Arabidopsis thaliana landsberg
ccctatctccactcctcttgctctatcatacctgccaataattccaccgctcaacttttttcttatgtaaagtaaaatgtgcttatgatgaattaaacgcaaataggtgttaaacgtacccgggtggcttgccgtattctgtggtcagctcaccgaacctgtaatagcataacttgtacctatacacgcaaacacaattaagatgaattgcatcgttctcaaatttacctttataaaagtatatccttgagtgtgaacttacatgagacagttcagcatcttcggtgatgcacctttgtctacacggaattcaccattcacaaggtaatcaggttctttgatcactgggaatactccacctccaatcctcaccatccacaagaacctaacccacattattgttaaagagatcagtaaatacacacaccaactgaatcaagaaagttttcttacgactcactaagaactggaagaccaataaaggtatttaacgtgccagttaaacagaattatatcttcgtggtatatagagatgatgtagtaccactaaacc

SEQ ID NO: 66408 - DNA, 291 bp, Arabidopsis thaliana landsberg
tggcatacagatttagctggccacatttactttttcgtgacctggccgaaactcgaccagggactcggccacattctgcttctggcatcagccccaaaaacgcgaataaatttacgaacattgaccacgattcagatccctacaagttcactcacgacagggagaaacccgaaaacagggaacgactggctcgacttgaaaactcttgaacacataaaagttgttggcaacaaaaatggggagagacgatatgaagcatacctttacttcgaagcagtgcataacaaagaa

SEQ ID NO: 66409 - DNA, 2256 bp, Arabidopsis thaliana landsberg
ctaaccggtaataacttaatggcataaagaaaggcttacaacacagcaaaaatgttcatgttcctaatcttaccctcactataccaatacaatcctctccacgtatcatcatccttgaaaggaacaaacggagaaagagtagagtcactccacttctttgatgatctttcttttgcgcagaggtgctgtgaccactgttcctggagcactgtgagctttccttcgtgcttcttttcttctcttcgaatcgttcacagttcgaatgatacccatcgctttgtatattggttttggcaagtgcctgtgtctgtaattcacaataaccaaaacgttaccatgttagtatagttatcttttgacaatctccagagttaaagcatgggataaaaccacagttttcattggtcagttacctcacaatgcgcttaacctcagaaagatgcttgtaccggttcttcacagcctcgttgtactcatgcttcttttgttcccttggaagaatctgcagcacaacacaccaatcaacattgacaattcaccgttccaagttaaaacttcttaagaaagcatgtacgagtaatatctcataatcatatgcactattggatcaactgctaagcctgtggtaactcttttttggtctttattttgtataaattcacagaatcttacaactcccaattgctctgatgcctttgccttccatagcctgagattgggtgtcatcactacccgatattacatatgtagcatcacagctatatttgacacagaatactctacaagaaaaaagaaatgaaatttagaaattgcttagactaaatcaaattaccaaggtggtacactagaacatctgaacttgaagtatatatagactgttcagtagattgtacctctgcatcctctttgtatggtagatttccctgctgtgtcctccattgtatgggaagattctcacagatcgatcataagaacccgtaacaaactcacgaccagtcggtgaaaagtcaatatccatcctgaaaaatgatgaaattagataatcataatgcatttggatgatatcttgttaaatattatagctgatacttgagataaatcattcttcattcttacactgcagaaacatgatctttatgcacgcacttggcttcgtccaactttctaccatcaaagctatagcaacttccatcttcattagcctattcagtttccccatgggataaaattagcacataagcaaaagacaaacgctgatttagcatagcccatcacagaaaaattcactttatgattatcacttgcagctgtcaggttcataggctccatggggttccatgcaattaaatttgtttttgtctgccaaaagacaagcaattagcagtccccggttgcaattgtttagtttgaagggtattaatgtattaaatatgacgagaatatgtaaaaaagtttcaactataccatcatgataattttccttgccgcagaagacaagcggagatcatatatggttatgctccggtcactggaagaagagatatcctcttacagtgttagagaaagctctggaaggtgtagcacagacaattacatgacatatacaagtataaagtagaaagaatatacctagctgatgtagccaataaattaggctctccaggattaaaccgaacagatattacagagtcagttccccactggaaactctgaactggctgagacctaattacaaaaagtaaaaccataagccctgcttacgtaaaattaaaacaaacaccaaagatttcttttagcaggagcctgagtacctattatgattccatatatcaagttgagctccggccgtagcaaaaaggtcaccttcaaactgatgatcaacagccctagaaatgacaaaaagcttagtaacttaagttttttgtaccaacagaatcatgagaaatcgcataaagagtgtgtacgaagtctaccagaaagcattcttccagacataggttgcagatggctgaaaaaatagtttgttaaaagcttgtagttatataccagcaagagaaagctccagataatacaatattgaaagaactacctcaatgaaattctcagatgaaatgctagaatcttcaagtgaaggacgaggaacattccacaaacgaacactgcacaaatccattaaccttagtttaacagccaaaaatctgatcaccgactggaacaataaattgttattatatcttgcgtgcaatcagtaccgca

SEQ ID NO: 66410 - DNA, 593 bp, Arabidopsis thaliana landsberg
attcaaataaaccctttaaaaatccattaaatacattttaaataagtaaaatgctctcaacgaagagatatcatggtaaataacaacagtgagaggataaaatgttaaatcaatttatttacaacttcaaataggcggacatcaaacctacttagcacactttctattttcaaattggttatggtttgtctattagttgttgcatctatgttttttaattcttatatcggtgatcttgattttgttttggtgtatctaaaatctattttagttaaagtgcaagaaaataaaataaaaacttaaggtaagagatgaaagtaagctttaaataaaacagagcacttctatggtcgattatagagccaagttcgttcctccattttggcttaatgcaatattacaagtaaatcttataaaactttccataagtatcgtattacccatggatactatgatatataaactctcggaggtgtagtccagaagaaatgatccatatttgcatacagtaaacttgatggaaaaaatatgtggtactgttggaattgtagcttattgagtattcaaatttgagaaaaaaaggtaaaaaaaaa

SEQ ID NO: 66411 - DNA, 1077 bp, Arabidopsis thaliana landsberg
tattatattatgcttgataaatttaaactttatgaattaataagcccaatgatgaagcaagcacatgcctaaatctcactaactctcatatatgtcataaagaactttgaagtttttaaactaagtaattgtttatccaaaaccaagtagacataatgttatgtctaaactgaatgggttttcttaattgaagcatgcaaagcattaaacaattaactaaaggctcttagtcaatactaatctactccttttttcttctagaccactgcaataatatgcattcatatcaactcaactactctaaatatttcgttcggatctgatccgcacttattaaaacatgataggtacgggacatgtttgaatccaaaattatctaacaccaaagaaacgtttcaaatagcttttgcttataggtcgaagttattcattaaatgccaaatactataatgaataacacgtatttgtaaaagagagtgcataaaggtttacgatataaaaggaaaaaaaattagttcaagattccttaatgacattggatacaataaaatgaatggctatacctagtagtattaccaaattaggggtcaatatatacagacataaaacatttcacgtttgttcatccaaaacttctttcatcaaaacgaaagaaaaaaacaaacaacaatatcagaaatctataagaaaaatcaatttggttttgtggtctaaacgttaaacgtggagaaagaaaactaatcaaaagtcgaatatgcaaaacttgtaacttataagaacccatggacgttgtcacgttgatgtatggtttgataacttacatcatttacgcttacggcattattcacgagttattggatattatattcttattgttttgtggcaccgtcagacacgaacacagcaatatattatgtatttataaatcaattaatatgcatgtgttcagatccaggaccatttacataaccctatcatgcaattatatacatatatatataagcccctcatcaagtattcgttagcatcaatacatatcatatcaccttgttgcttttcaaaaaaaacaaaaaaaat

SEQ ID NO: 66412 - DNA, 824 bp, Arabidopsis thaliana landsberg
tgggtaaagaaatctaaacatgttagtgagttagacattttgtttttcagaactatctcaaattatgtcaagtaatgggtcaatggccatgctctttcagcatttaggatcaataacttcagtaatttatctattgaataaaagaaataaggtttatctagtcagataattagattttatttcttctttttcttgccaaaatcttctataagtattgttattattacatatgaattcatgcaagaaaaaaagagaggattttactaattaacaagtcaaattcagataagttaatagtcaacttatataaacaggagttgactttgactatcctaagcttaaggacatatttttttttgggtaatattaaaaataatcatattctacacaaaattaagaaaataactatatgctagttttctttgcaaactaactctttttatggtggtgtgggagtgaaataaatatcaaactatatccttctaagttatggtaattacaaaactatatttgtttgaaaaattattttgtcgaataaaacaatagcatgatattcaaaaaatatagtgtgttgcgaaaacatatgttggtatttaaaataatagctttttaaatgaaatgatatcacattgttatggaaatgtttaatatgaatagattttaatataattcttttattactaagaaataagaatcttttaaaaaaaaaattacgtgtgatcttaataaaaaaagacatgtagtactagaaaataatatatgaaagagagttattaaaataaatacaatatctttttaaggaatatatgtgtttttataaatac

SEQ ID NO: 66413 - DNA, 539 bp, Arabidopsis thaliana landsberg
gtcttgaacgatggaaaagagggtgaactgaccttgttccttctcatcctggatcttctgtgtatagttttggatcacttccaagttctcaagcagcgtcttgcgattgagtttctcgcagtcatcaaagactcccaccttgatcagtgattccaggaccttcttgttggccgttttatggttcactcgctcacaaaaatccacaaaactcttgaacggcccattctcctcacgctctttgatgatgtcaatcaccgccccttcacccacgtttttgatggcacccaatccaaagcggatcttgttgtccacaacgttgaaaggccagagcgactcgttgatgtccggaggaaggatttcaatgccaaagtccttggcgtccttgatgtagttggtgattttatcaatgttggaaagttccgaactgagcaaggccgcatagaaataggcgggataatagaatttcaaaaacgccgtttgataggcgatcaaggcataggccaccgcatgggacttgttgaatccgtattcagcaaact

SEQ ID NO: 66414 - DNA, 509 bp, Arabidopsis thaliana landsberg
gattctgtttagcttgtatgtttttgattctgtaatgctttgttgttctttatactatttttctatattcttactttctttgtgaatgttttgtagaatgttccttatgtctttgtgccttcaaagcaagccttgggaagagcctgtggtgtgactagacctgttatcgcttgttcagtcacatctaacgaagctagtcaattgaaatcacagattcaacatctcaaggtaacttagccctcacttgtgtactctctttataaccttgaaccatcattgattccacagaattggttaatcattaactctttttttacatttcttcaggatgctattgagaagcttctgatctaaggcattctctgaattgattgctcggtatgatgggtctccgcgaatgggaaggctttgactgaagttttgtttaggcaactaccaaatcaaaaaccgtgcattattctactatcttctcttcaaggttgtaacgtaattcacttttctgcaacttg

SEQ ID NO: 66415 - DNA, 1845 bp, Arabidopsis thaliana landsberg
gactcatttcctttcctttgaggtcaatatgagaaaacagaagtttctgcttgcattccaggtaactgatttagatcctattcaagcttagactggctctatcatgtttctataatatgcttcgtcaagtattctaagggctttaccaatcatttttcattctcttcaggctgtcaagcaattgcttaaattgggtgcagagaaccctgattcacatcgttccttggtatgaaatccgtgtaacttgtgatgttttaaggaagagtttaatcacgtaaagcagagaagggataataatttttcccttcaagtattatgtggctagacgtgttttctattttctggcttatacgtttgaacttggtggcaggttaaattctttctcatgacagaatcgataagtgctccaacgactgaagctgagaaacttcgttggagggtcctagaggctgagcgcccatcaatcaggtggctactcaaacttttatccaatcttactgttacttttgaatatcagttgtgatataaattgtccattcgcattctagtcaattgcagaataaatcactaatggaagcaaacaaagagtttcttggtagacacgaaggtgcgtatcaaatttattacatgtaccctcacagagacattacagtgtctaatgaaaaatggtaacgtttgcatgcaactccgcagattctttggtgcacagagctgcatatgcagaaatgctgtatattttagatccaagcaagaaaaccgaggcaatcaaaataattgaagactcaaccaataaagtagtgcaaacgtaatgctccctcaaacaaatacctgatggttccttgctccctctgttctctgttttttggtatgtttaacgtttggttgtctaaatgtagaaatgaagctctaggacaagcaagagaatggaaactaaaagactgtatagctgttcatacgctcctagacacagttcttctcgactcacaagctgcctccagtaagcattaaatatcttcactgtgctgtttccattaagtagtagttctcttcaccaatatgacttctctgcgtgtgcctttccatttattgtgttcggttggtctcagttagtaagtttctggaaaatgattaagctgtcttattggtacaatcgcaggatggaaatcacgctgcgccgagtattttccctgttcaactcactttgaaggcaagcattgctctttgatgcctgattcagtgtacaactcatcccgcaagagcaatgagaacggtgacacgccaaaccatccaatgggtcagactgaattgagcgacggacaactcgaagcattcaagagcctctcagtcgcaacctgaaaaccctcttagctatcaataagaagcaaatcaacccaggagataatttacagaagatggaagatctgttcctacagacccggatcaaacttgagatttaatgaatctttccccgaggtgtgtggatcagaaaatgttttggagttgtaacatgccaaatgtgtataattgtttttctatataaggctgggtttcaagtttgaagaacaatgccacaaaaaaagagaggggtcttgtctttttttttttcttgttttttttcgttttgttctctccacactttaaagaggatttctctgatgttgtacccttttatctccttcttttttcggtttctccacattatttattttctccattacaatgtttaagcttcttgacatctctggaaaattttgatttgacgagcctacctttgagtgagacgttacatctttttcttataaagtatatctcatatacataacaactttatttcgaaatttattg

SEQ ID NO: 66416 - DNA, 152 bp, Arabidopsis thaliana landsberg
  unsure (1)..(152): unsure at all n locations
agccatgntgaggatgaatccacacgaacaagaatagaaaaatcaaagatactaagcaaaggtttcttttcttccaccgcgaatctatcaacaagcgggcagtacctaagcacagacctgaaaggagccagcgaaacaccaccaaaaaggca

SEQ ID NO: 66417 - DNA, 446 bp, Arabidopsis thaliana landsberg
tgcctcgctgcaagcctttttaatatcaaaatcaatagatagaaaatgtatcagacactgtaaccaagctttacaaaaattcatggatgttaaaatattatactcgtaattcattttgcattacatagatatatacttgagtctcacggaactggaatagggtagaagtatgatttgctcaatttaagattcggaaaccaaaccgaaataaattagttgaagaaacacaaaaaccgaattaaatatgaaatattcctatcgaatctaaatcgcaatcatagtctgacaacagtaatcatagatctaaactctattattaaaatagatttttgttttaaataataaactctagaacaaaagaagtgaagaacaatggtctcaaactgatttttcttagtaaatttgatagatgaaattctaaaatcaatttcaaactatgaaataac

SEQ ID NO: 66418 - DNA, 1687 bp, Arabidopsis thaliana landsberg
aaaaaaaagaagcaaacgcaacattctacgtttgcgtgaaattttggatttcaagttagataacagacgaaaaaatagagattaaatctaatttttcaaaataatcaatttttgttttgcatatttttttcaacgttgtttttcaactttatacatatgcgcaatcaatgcattatctctgatataaaaaaagggaaagaaaaaaaaacagtgcatttttcacgccaatcatcaattcactattaataattacaatttcttttagttaaagaaaattaaaactaggtaaaaaagttaagtaaaaaaaaaaaaaaaaaactttcccactagcaaatatcaaattcaaagttgagatttcaaaagttttttatctgaaatttatacaataatgaacatcaaacttaactttagttaccaaaaccaaacaaaaattctacttattccttaaaatagaaaaatctgaaaaatagagagaaagctgaccttaacatctctgcaccagcacgaaccaaagcgttgtttttattcctcatcgccggtaagagattattgatcatgttattatctccggtgagcagaatctcatttccgacagagatatacttaatcttcgtctgaggatgaaacggcaaaatgttaaccgaaacccaccgacgagcttgtcttccgttagccaacgccggaatatcaccgttaggaacggtgacaacgacggagataccagttccagcgaaggcacgtaggatatcgggattcacatcgaagatcttgacgctatcaatcgaagtttgtgtcttgataaagttagccacctgagtcggtggtgggaggtttccgagagttccgtagttaacaccgatggcggagatcacggcggggatggtgaggaatacggcggcgcagaggaggaggagaagagagattgacggtggcgctttggccatctttttatatttcggaaatgagaaaaccaaacgattccaagtgaaacccgtgaatcgtttgagttgtgtttttattattacgacgaatagatttttttattcttatcgagaaagtatttataataaaaattaatagatatgaccgttttgtatagcgtatacgtgtgtatatttttagtgaggaacagctggattttgtggaaagcaaaataaaagaagaagtttgtgttgtctttgtttttcatgtgcgtcggcttaaatttaggccgttgtaaattattgaaaaagtggattttgttgtgaccgtggaaactttagttaattaatttggctaattatagagtctgcttttgtttggataatcaatttgtcatctttttctttaatggtttttggctggtaaatactcatactatccaagtttaatctaaaaatatacctctttcttgttaatcgtaattttacaatcctaattttatccagatacgggtgaactatatttgaaaaaaagtatctaacgtgaagttaacaaaacaaaagagacatcgagtgttgttttttcttggatacgtttattaaaagatgttcttaatgaggtcaaaagacactatctgagtttttactgctaaacttaaaactaaaaaaaaaatttattagtaatattgacgtatcaacgacttgtttatgtgtaaaacattaagctgaaaagaaatagaatagagtaccggcgccggtttggggat

SEQ ID NO: 66419 - DNA, 508 bp, Arabidopsis thaliana landsberg
  unsure (1)..(508): unsure at all n locations
gtggtgccggggaacttgcgggggaagtcgcgcatgtagtcgtgttttggcgccggcgaaggagtagagggtctggggggggtcgcccacgacgcagacctcgtcgcggccgccgagccagaggtcgagcagcgcggactggagcggcgagacgtcctggaactcgtcgacgacgaaccacttgtactgccggcggacctgggccgcgacccgctcgtcctcggcgagcagccccgccgtcagcagcaggacgtcctccatgtccatgcggccctcggcgcgcttgacgtcctcgtaggcgccgaagacccggccgacggtctccgcgtccaggccggtgacctcacgaccccgggcggtggcgatgcgcgngtagtcgtcggggccgacgttggagaccttggcccactcgacctcggaggccaggtcgcgcagctgcgcctggtcggcgcgcagccgctggcgccggcaggcgccggccatgaggcccagcttggactcggtcagc

SEQ ID NO: 66420 - DNA, 2673 bp, Arabidopsis thaliana landsberg
tcacagtttggtggtttcttacacttatatacggcataagctggttgcttatacactggaatgctggtggcattcaacaatcttacttctcctggtccaaaatacaactccgagtgccttcgaaggtcgagtccttggataccagcttgtaacaccgataagttgtctgaatcaggcgaaacaatcacgattgtgtcttctgagtattgagtctcgagaatagacatgagttgcgtcacacgcacaaatacatctgatacactctcgttgggggtaccgtcgcttataggaggaggttttgtcttcatcgatattgagtctaatgcatacacctgcacagaagttgaaactttcatacttcaacccgagtttttgtttgtatgttttaatgtgaaaaatgctaaaatcttacttctgatatagattcaagcttcttgccttcgtaagctcctaaaccacgagcatcaaggaagctatactccggaactatatagctgcgaaaaccaagtgaacataaaacattcagcgtaccatcacaaagattagattccacagctaaaacctcactaaagagtaagaagactaatggacgattttacctgcgactaattccattgatggcggcgatgatttcagcagcctgataagctctctgtgttatggaaggccagagccaacagtttcggtcacaagctcccattgcttttaactgtaacgcagctctcagagtctgcttcttacctttctctgataatccgctatctaccgatgttttggcaaccgggtttgtgttgattatccctaagctttcgtaatctgattccccagctctcacaaggtaataacttgatccaagaaaaaacaacaaccaaaaacacattgtgtattattagctccattttctaagataaccaggctaaataactccggaaacgaatcaagaacaagaatcaaaatgttaaaagtcagagattcactcttaacagttcaatgtgaagaatttggaatctcactaatctactaaagctttacaagatcctttaaacttagttccaatcaaaaggacgaagatacgtatacattgatgcacatctggttgtatgcacagaaactcaaaactagggttttgaaaaagtaaattaccgattagagagccggagaggcggcatttgaaagagaccgcgtgcgttagctggtgcggcgatggagacggagagtgatggtgtggcaatacatacggagagagttttgaaaaggtctcggcgggtaatatgcggcgaggaaagtaaattcagaggaatttggtaggtttccggcgacggaggaggatgtaagtgtgaggcggtggtgaccgccggtgatgatgataacataattcaatcgtcatctcaaacggtatctctggtcctccgtgttttaaggttacaaaaccacaattgtgaatcgcacattccggtttagattatgggttcgtttttaaaatcgaatcagctaaaccggtaactttctcggaaatattcttaaccggtcaggaccaaaaaaaaaacctaaaacaagagagaaactctgtttattactctgctcttaagaggacaaatttgtttctttccttacagtttccaaaaaagaaaatgttataaaagtaatctaataaacttcgattaaaactaaaattgtaacaacgtacatagattcaacttgcgaaagttacaatcatttccaacaaaaaaacctgaaaacccatttcttcatacacaagaaacttcataacttaagggttccacttgttcattttttttctacataggcttacacaaaatactagtaataagaacttcacctcacttctgattctatcttaacctatcgatgaagcaccgtagacgatgaaatagctgaaactatcaagcctggccaagttcgattccagcattcgaatagcgcttttctttatcttcatcgtcatcgttccagttagttgttttatagtaagttatgtataatataagctggattattcctgatagcgatccaagaccatttggaatctgttttcatgcatggaagataattagtcctttttgagatgtagggatttgagttccaaacaataaagatatatatgagggtttaccaaaatataagggtcaaatttaagacatgcataaatgacccaaacgacaccgttcatgaagttggctaatgataggaagaacggcatgtatttcacgctctttgtctttatcacaagtttctgttccacattataactaaactcattaaatggaaattcacgagataaagagaacaaaagaaaaaagttgatagtgtagtatccaatttttgcatttccgtgattagtttagaaagaagaggcatcataccatgacggtgagaggagcagcatacatgatgacgttgaaaacaatgcacaagatcccaataagcattgatctctgctttgttgtatgcaaaaaatacattgtgcagaagatcaccaccgccatgaatattacctcgataaccatagctattgtgatctttctctggacacatatatatatatatatatatatcataacttcacatatcaaaatctatatcgatctacattttgagtaacaaactaaaacaaacatcaacccctaattcactaattttcaattggtttaa

SEQ ID NO: 66421 - DNA, 368 bp, Arabidopsis thaliana landsberg
aattagccctcggcggagacagcgccactgcggaagctaaccggagatctacccgcacggctggcacgagtggctacatgaagactatagctctgtcagaaacacggtgctcaacgccatttttgaggatattagggttttccttaaaagtgagaagagagatataggtgagggttttactgtgataataagagaggtttgaggcctgaccatagtgatagtgcagaatatctgctggagctgaaaagccatttaatatggcccaattacttaatgggccataataagccctcatctgaattaaaagaactggccattttaagtttgaacagtgagagaggaatgtctatatccgtggacacgtgctt

SEQ ID NO: 66422 - DNA, 295 bp, Arabidopsis thaliana landsberg
  unsure (1)..(295): unsure at all n locations
cggaccagaggaaagaaaagcaaagtttaaaaactcgttnccnagggacanggcccgggaagatcggaggagncaacggggancgccccccaaacgccagaccngacangcacaaggccccacagcggcaannaagcccncaaccacccgggaaccagcgccccccacggccgagaccaagcacccgaaaccggaccaaacccggagnaccaacccgnagangaccgcagcaccgagaaacgaaggaacgcgcccaaagagccaaggaccncncaacaccgaaaangaggnaagc

SEQ ID NO: 66423 - DNA, 222 bp, Arabidopsis thaliana landsberg
gaattacccaaacaaattgctccaccaactaataacggtcatgcaccaccactcatagaatgaagaaagagcttctagactgccaacccttactatgactggacctgaatagtttccccgagttgagacaaattaaaccgcaagctgcactgcaggcggagccattacgtctataccttataaggacacacttgtgtccatactggtcacggaaccaaaaaa

SEQ ID NO: 66424 - DNA, 755 bp, Arabidopsis thaliana landsberg
attgggtggataatgtactagacaaaacttgtaattttttttttctttatctataataatataaaaattttttgtgtgttatattttcatacatctattttcctttcttcataattcgtttggcctatttttcaaatgtagtctattcaattttattaggttgcatgtgagttttggactcacttatgcatggtacaaaatccaagttcttaaaagactttgaggtataataaaaatctgtagtttgggagaaggaaacaaaaatataaaggtaaatttcttttgggggagagtactgatgtttgccctacagaccaaggcactgaaatcgagttggtattattaggatacttaacgtttggcacccatggccttggccttggccatgtgcattgttcgttctcttcttaaagggtactatggtcattcttaattgttatagcactaagtcaacacaccatattgggaaatacttaaagacccataatgtacttgttctagctccattaaaagagaaaaaacaaagttaatgaaaagttgaagtaaaagacatgaaaaccctttttggattggagaaaactaattctctaaacattgaaaagaataagaggaagaaccacgaaaggcttggtcttttttttttgattcctgaaactgtctttaataagagtgagaagtactggctcattggaagaactggtccccccccaaaacaaaacctgtcttccactgccccttctatcaataataccttt

SEQ ID NO: 66425 - DNA, 636 bp, Arabidopsis thaliana landsberg
  unsure (1)..(636): unsure at all n locations
atttagcantagcttcctctcttcgcttgatatcctgggtgaaaattacacaaaagaacatcaaacagtagaaaattaagaagcacattgacgatatatttgacaaagtcctataaatagtaaaaaccatttctttcttcctgagctcagcttcccagtcagcaagctttctctgtttctgtgaagagtcctgcatcaattaaacacacatgtaaagataaatccaagtgagaaaggttcatgagtttagaaaatattaatgtcattattacattcatattatccaatggaatatcaacagtggcatcaagnnnnnnnnnnnnnnnnnnnnnnntagatgcagcaggaacccttccaccacctttctgcaaaatttatcaaaagttactaaaattcaaaaaactatcaaacgtcaagcaccaataacacaaagaatcaatcaacaatgagtttgattctccaaaactaaacgaatgagtcacactccaaattggaagaaattactcacaaacactattcatttctagaaattttttaacctagtttccagatccacagatataagttcagtattcccgataaacatcgagagatccataatctcaacactattaatatcatnttcaaatagaaatg

SEQ ID NO: 66426 - DNA, 806 bp, Arabidopsis thaliana landsberg
tgaaaataaggctaaaaactaaaaactagggaaaaaaagaagaaagaaaaactactgtttgaagacaagaaaagcatctcaatgatttttacgagataggacctagaacttagaagtggactttgattgagactttaaatagggtgggcaattttgagtcccacattgtcgtttctcattcaccaacaatcaccattttttcctacaacaatagtattagaagtttagaaccgatatatttctattaaaacaataattttaccgacccaaccaaaatatcttgacatgatatacaccacttttattgccaaaaaataaaataaagaaaatattaataataacgggtaagtcttgttcgttaggttctaaattaagttaataaagcttttgcatgaatatttcttgcatcactagcaaccgatgatgcagaagaatgctacataacaactcacaacacacacatatatagagtaacattaatatgtgatatgatcatcatcacacgcattgcctgttcttgtacatgaagcaccactatgatcttacgccaaacctaactagtgtccatgcctccatgagtccatggtgtgaagtaagtaacgttctccgatggattgatgggttacatcataaaattttaggattttaccaaacaaaaaatattttaatgatagtattgaatccagggttcaaaaactagatatctaataaatctcgaaagtgtgacccttgtaatatttccgcaattgaacaaaaaaggtaaatatctcctcgtattttgatttgaagatcataataacgtactg

SEQ ID NO: 66427 - DNA, 125 bp, Arabidopsis thaliana landsberg
ctcacacactctacttccaacgagttgctctgctcatttcgttccgtcatttcaatcactctttaccacatgtctaaatgcaccacatgcaaaatgtatgttgatctgatatgataaatttatcg

SEQ ID NO: 66428 - DNA, 366 bp, Arabidopsis thaliana landsberg
cacatgacaactggtgaatgggaatggtaattagatgggactcctttctcaatttctatggatgatctttggcgcccgaactcatgagaacctcttttcagcttcacggggcacttacctctctatccccttaagattaagaaaccaataccgttattaccacccgattatgagcaaccctgccgacagaaagatcaatgccgttatgccttgttgttgtataccactggagatcgtcaagctttatcagaccgtgcgcatggacgcgagtccccaagcacacctatctacgataggagtctttatcaaccgaatgcatgtgtcaagatgattctcatttgacacccgatttcagagccacaggca

SEQ ID NO: 66429 - DNA, 476 bp, Arabidopsis thaliana landsberg
aggactctgataggccaagcaaatatatgattagatcatttgaagtccactaccacatgtggtaaagagtctgacaatatttgcacataatcagctacgtgaagtccactgccacatttgctttgtgcatgagtgcatcaatgatgtatcgaatcgatacgaaagccaaagccgcagcgattagaaaagctatcatttcattacaacgtttgacataccatggccatcggttcttataaatcaaaagtttttttaaaacaaaataaaatcttgtaaatgaaatatcatatgctaccaaatattaaataaaagcatttatgttatgttatttttagattttatactaatttatctctaatgaaaagaatagataattagatcaaaaacaaaatacgttcggctaaaacaaaaaaaaacaaatctaaactaaagttatagtctcgcttgtttacagcgtttccaggctgctgcaaatt

SEQ ID NO: 66430 - DNA, 538 bp, Arabidopsis thaliana landsberg
  unsure (1)..(538): unsure at all n locations
ccttctttaaatggtgactttctttcacttctttgtttttatccatttaaacctggctaccgntaacgtgggcctcaggggactcataagaaaaatcaagactttgatatgacccagaatgaaatccgtttggggacaaagataaagggggcacaggatccatcaggattgaacttgacagactttgatcttgcacagagccatttccctcaagtagcaagtcaccaggaccaaggactctattttcttggataatctctctaacaatctcccttatagtgtagaaagatccaccaacctccttgtgtgtgaggctaagtgaaggaaaactcccattggttagtttctgatgcctgaaaacaaacactaattacaaaagctgggattgaaaagggaaaattcaaaattccggctaaggaagagaattaggtgcatacttctttataaaagattcaaccagtgtctttctctcttctttaggaatccgattacgagtcctcttgcctacagaatcgtgaggcttagctagagcaaatat

SEQ ID NO: 66431 - DNA, 645 bp, Arabidopsis thaliana landsberg
  unsure (1)..(645): unsure at all n locations
ggttctcaattgtacagttcagttattatgggtggtctacaaaaattgtatttaagctcgttaccttaaaacacacttttcacttaactaaggtttgaaaattattgataaaaacaagcagaaaagactcgaactagaatctctcttatttacggagacaactgcaaacactccaaatgggctagagtctccgcttcaacgtttagctcatcaacctgaagatgacacgatcgagctcatcaaaaacacaacattacaaaggacagtaaacaaggggaaagagaacacagttttttccttgaccttgggattgatctcagctccttggtttttggtccgatggaacatggcattgatgagctctgttgctgccgtctggctttcttattccttcctcgacagtttactgtattggtattgggctcggtttgggttttatattgttgccttgttgggcttttgttttaattttggtgattatgtttccttaatgagaaagatggcaaaaaaaataaaaaccaaacggaaactgattttaatgtacaataaaccataatttctttaaatttacattttaactatacagataccaaacaatataatntttactatataatataaatcaaatgagtggtttaatacttt

SEQ ID NO: 66432 - DNA, 207 bp, Arabidopsis thaliana landsberg
  unsure (1)..(207): unsure at all n locations
gctcccgcgcggcgagacctcgggtgccatttagatggccggtgttggcatgactcgccgaccccaaggagcacgggccgggagggatccacgacccgaacgcaacggncgcgcgcaaaacgacgggcccgaagggccngacccccgacgacanggaacgcaagaagaagccggcacaagcccganacaccgacccgcgccccgaag

SEQ ID NO: 66433 - DNA, 602 bp, Arabidopsis thaliana landsberg
taattcaccaaaccaatattgatatgtgccaaagaaggagagtattcttcatttaaacgagcgtcaagtaggagaaagagtagcttctttatcttctactgcagaactcaacgcctttctagagctcaaagaactaacgaatgaattcaagaagaaaagactatgtcttcctctgcaactgatccctcgaaaataaagagagtgagcgtgactagcaagcgaaaagatctagaattcacgagaggcaaaggagaacgtatcttgttccttaactcgggttattgaatctctatgtgtagcatctttctggcttctatgtactcgatattgaaacccttaataatatactttgtgagctggtcagcaagctcaccaagacgtaccttagccattttggctttgggaacttgtaaatcttgagtcatctctattatgtctctctgtctcatctcttcattctatttacttatgcgacgaacaagctcaaacaaaattagagttaacacgtgagaagatgaactaaaggagggaaaaccgacgtacatgattcacaacgctactttgtattcggctgatagaaaagttttattgataatgatcga

SEQ ID NO: 66434 - DNA, 629 bp, Arabidopsis thaliana landsberg
cagctgcatcggatcttctaggccgcgcagggaagctggaagaagcatacaatttcatttcaaagatgtgtgttgtaccaactggtagtgtctggtctaccttattgtcttcttgcagcgttcacaagaatcttgagttggctgagaaggtagcggagaagatattcactgtcgattctgaaaacatgggagcttatgttctgatgtgcaatatgtatgcgcctaatggaagatggaaagaaatggcgaaactaagattgcgtatgaggaagaaaggattgcggaaaatgccagcttgtatttggatcgaaatgaaaaacaagactcatggatttgttccaagagatagatcgcatccgagtatggacaagatcaacgagtttcttaaagctgtaatggcacacatggagaaagaagggtatgttgcagacacaagcggcgtgcttcacgatgtataccaagagcataaaagagagcttttgttctgacacagtgagagactggctgctgcctttggtatgatcaacacagaacctggcacgaccattagagtcactaacaattatggatatgcacggattgtcatgtcgcaatcaagtttatctcgaagatcacggaaagagagatta

SEQ ID NO: 66435 - DNA, 466 bp, Arabidopsis thaliana landsberg
aaattacaaattaaaaattataaataagagaactaaaaaagctatttaaaaaaaaaaattttaatttagataaataaaacaaaactttatgtatcgtattaaaaaaataaaattgaaaaaacgttcacttactctaattttaagctactcactattaaacaaaaaggactactttatataaatgggaactaataataggtagctcaccatagcaacctttattcatcctcgatcaataaacaagcttttagaaattcagtttcagtttgctttaatcacaatttcaccttccattaatttcaatattttgccaagaaaggagccaacacacaaagctttgcccgtaggaatcagggtccggtcaacaaacagagagaattaaaactattttttgaagaaaaaaggcttaggacaacccaagaaagctcgcccgatacctggagaggggcatgattaatttcttaag

SEQ ID NO: 66436 - DNA, 327 bp, Arabidopsis thaliana landsberg
accgagtccaaagcgtgtcagaggccacctctgatttcaagcatataaacaatttttaaagtttttttttttctttttcgtgtggtaaagggtcacacaaaagtatttgattcactaatttattataaccaggattaggtttacctaacttttgtagtaattaattcattaccgttactgctacgttgttcaagaatcaaaggagtattcgataacttgtagaatatgatttggataattttactgttttcattagttagataccactaaattactattacggtcaaaacgcatgttaagactttgtttggtcaaataaaattcttt

SEQ ID NO: 66437 - DNA, 317 bp, Arabidopsis thaliana landsberg
gactatgtttctaattgaaaattaaatttttattaaaatatccataaaaatgaaatgataaaatttattaattttaaatgggctgaccttgtaataatatagggagcaggtcggagactcagagagtgaccttttcttgctcgtccatttattaataatttcattaaagagaaaatctgtagagttgacactttttaaagtctaattattagggatatatacgtaatttggtttgaaaataaatatcaaaatctagctaacttgatatcagtatgggtaaaagataggagtaccttttgttgttaatctaattgacg

SEQ ID NO: 66438 - DNA, 539 bp, Arabidopsis thaliana landsberg
aaaaaactgttatcgtgttgagaatctgttttttctcacaaattttctgccgttttaccagagtcatcagagttggtagggcttgctgggcggaatgacactcgtcgtggcttgacatagtaaaggtcagcctctctgaacgagtaatcgacgtttggatttgatggcgaagccatctgccacgctggtgacatctcttcgagttccagtcccacatcaccccctgagccgccctcgctggaactggaactctcacttatgctctcagctatgctctcaggggttagccttccgagagccttggactgatggttcctccccaagaggctcgaggatgacctctcgggcctcggggatcggaagtatgtacgtagcagctctggtgatactggctctgagccaaaagacgaaccgcgaggcgagcagactgacagcgcctttgagctcagagagctattcctatcgtgatcgacgactaggccccgtacggacagattggtgacagtccgggggcgccttgagagttgtcgaaggtaaat

SEQ ID NO: 66439 - DNA, 1087 bp, Arabidopsis thaliana landsberg
attgtatacaacatgattcgtctttctttatttcagacaatgtggacactactctaaatagaatgtcatttcccttacagttcgaattattgcttcttatatacgtcaccaattaattttaaatccagtttttctaaaacaaccctaatcgttcttgttttctatctagtcgttgaatagaattcaaacaatttacctaaatttagtaaatcttgcgtcttggatgttgaagagatgcatccgaatgcaattcagaactcttgacaacatcatatagaggccataattgtcaatttatattgccttaaaactatttcataacaaaatcacaagtaaatacttctttttggatgtgttcaatttgaaacaattgaaccatacaattctttcaaattaattgcatgtctaattttctagttttcctatcacacaagctaaaacaaagtcaacgattcctagacacgtgaaaagtggctgtcacataagtattaatcaatattcatgtatacacattatgagaccaaaaaaaagtcgtaattcaagtaaacactaccaatcttgtcataatcacaccatctctacgcattttagttccattcctactctcatcaacttgtataattaatggatcttgttttgtcatagtcttttcataatcaaagattcttgaagcctaattgtgtgtgtttggctgcaaagatggaaattctaaaaaccactccctgcaatttcttatgttttgtttttagctctatatttttccgttttgtatttagtatttagggtttaaggtttgttttttaaatgtttgatctatgagttatcaaatggttgtttgatcttatgaatataagttataagtagtaaagaaattttttagctgttttatctatgaatttaattcaatttatgtttagtacgtaatctataaatttgactcaatttatgtgccttacactagtctaaaaataaaagaattacccacaaataaaaaaaaattaagctaattagatcaaaattatgattaagtaagtgattagaaaagataacattataatctcaacatcaaggtgctgtggtgtagtgg

SEQ ID NO: 66440 - DNA, 608 bp, Arabidopsis thaliana landsberg
  unsure (1)..(608): unsure at all n locations
tacttttaggaccaccaaatctttttaatactaaaaattgttgctttgaaaatattaaatacaatttacacattaaaaaaaactaatatatatataattttaaaatgaacaataaatataaataactaaaatcgtgtttgtttgttcatacactattttcattgaacttctgatacgattaacagataactaaaaaaaaaattgaatgcatatgtttttaaattacatcttgaaaggatttataagctaaataactagatgactttgttacataatcgagctaatggtcgaccacaccatcatcatagtttacgcttaccatttcgtgtaatgagttaaatcgatttatgataattttatttataaaatttgattaaccgactgtgagtttattaatttctctatgatgccttgcatatctctataaagctttgtattatgttcggaattgcaacacattttattgatatgatattgatgataanttagcaattagggtattctaaaagcttctaaaacttaaaattgatgaccaaccaattttgtaaaaagcaataggaagttttgtaaatcttaaaatatattggatccatacttataacacaaac

SEQ ID NO: 66441 - DNA, 473 bp, Arabidopsis thaliana landsberg
  unsure (1)..(473): unsure at all n locations
aaagtgagctaccatgcccacctgagctggctgttggaaataacacccaactctaaagaatttaatggctttttcagctattcagagagatttttatgttgttgcaattttatttgtgcacaacagtgaagagattacgggtcagtttaatattttaacctaaacttattttgatttaatgcacctttgcatttgatcattctgagctgtagatttgttttttgtgactcaggaatttatgtttgtaggcgaataaacagaacttaaatggaaagccaagtgtgtgctgaacattcacagaggtgcttgtctagagtcccagcatcctggagactagcaggcagattgctgagagctccagtccaccttggcctacagactgagaacttgtgtctctacatacgatacaaacagaaaagcccataagaataatgatgcgaaaagnnnnnnnnnnnnnnnnnnnnnnntctttt

SEQ ID NO: 66442 - DNA, 514 bp, Arabidopsis thaliana landsberg
gaaagacacttgtcggggcattcaagaaaattggctcgcaaagaaatgaaggttgcccagctcgaaggtctagtatttttgctgtcagctgatcatcatggcgagcagagtcttgccagtgctatcataggcatggcgcatgataacttgggcagcaacattagtaacttacttctaccaaatggtcaatttggtagcacgaacttgggtaagtatagctaatagaccaactgttgtcatttatctatgcttgtactcattactaatgtacacaattgtagggtggaaaagattcagctagtgcaagatacattctcactaagctctgtccagtaacaaggatcttgtgtcccaaggatgatgatctccttcttgattacttgaatgaagacgggccaaggatagagccgactagtgaattctttgcgctccttaattagacgttttttttcctaaaactagttaacctaacatgttaacgttgggtatgtacatgcccatcattccactgtac

SEQ ID NO: 66443 - DNA, 134 bp, Arabidopsis thaliana landsberg
cagaacgcaaataaaacaaacgccccacaacacccaccaccagacaagccatgcaaagaaccagaaagacgcccagcaaaagcgaacgccagaagaaaacaaaacgccaaccacacaaagacggccgcaccacc

SEQ ID NO: 66444 - DNA, 508 bp, Arabidopsis thaliana landsberg
  unsure (1)..(508): unsure at all n locations
tcatatagctagtctattagaccaaccaaggtgtgtgttgttttcttgaaattgatggatcttttgttattactataaatggttgaaatagtttgatttcgaatacaaggtatgacgccgtttcatgaagtagtaagaagaggagaaactgatcttatgacagagttcctgttagcttggcctgggtgcattaaagatgcaaacgtgaacggtgaaaccgctctacacattgcggtttcaaacgatagatacgaagagcttgaagtactgttgggatgggtgcaaagacttcgacaaacagacgctgaatcgttagagatgcagtttttgaacaaacgtgatcaagacggtgacacagccttacacatagcagcatatcagaacagattcaaagcaggaaagatattggtgaaatgttctgcagtaaaccggaacattcataaccggacaggtttaaccgccctagatatcttacataaccagagagatcatcacgcanacagtaaca

SEQ ID NO: 66445 - DNA, 613 bp, Arabidopsis thaliana landsberg
  unsure (1)..(613): unsure at all n locations
atactccctcaatctcttcttcttcttcttcactctctctctctctctcgtcaccaccactaacacttttactgattcatcattctccactgagaaacatttctctcgttaattcaacacttcaagtctctcactctccgtttcttcgagtgttctttggttctcctttgcattttcttgcgtctttggactcattactgtttcttactcaatccgaagaatgggaactagatggaggagaatgaaactagctttgggtctaaatctctgcacgtacctcccaagaactctagaggaatcacccactcctttgaattctacagagagactatccgatgttgctctgctttctccacttaactggcctatgactccgacaccttcctctcacggtctgaaattgtccagaaacagctctaaatcttcaaaggtttgatctttacgagacccactctctcgattcttggttctattgcttggttttggtttagtgataatgagttgactttggatatgagtttggcttcttcctcttatctgtttcttcttctctcaacttttaaactactctagctacactgntggttnggtattgtttcgttgcaaaatgaat

SEQ ID NO: 66446 - DNA, 379 bp, Arabidopsis thaliana landsberg
  unsure (1)..(379): unsure at all n locations
gaacatctcatgaacgaggtacctaaaaatacatgttcctgcnattcattttngttttttgnncctaanatatatcacggagaaaatgttgaattctgaaaagttgacatttaacaagaaatgttggttaaagacttaaagccatgcttcgagatgcgacttcaattttttttcgtatcacatatttgtgttaatgacattttttgttatcactcgtttacaagttatctatatcaacaaaggcaacaaaaaaaccaaaatagaaaaaaaaaaaaaaaagtcaccttatatacatgaatggtggatttagatgaaaaaatggttgtgaaaggaagtcaagaatctaaactaatctaatggaaaattaaattaaaaggtt

SEQ ID NO: 66447 - DNA, 496 bp, Arabidopsis thaliana landsberg
aacggattttttttagaaagaaactgcaaacttgattaacgggttgcatttagcggacgaaggaattttttgagtgggaggaagaaaaaaaaattaacgttaaaggagacactggagttaaagttaaaggacatttgctctcatatttcacttttagtgttgcataaaatattttctctcctatctctctctttatcctaaagtaaaaaaatgcacctttggcccttgtcagtagtagcaaaatgtgtgtgactaaataaagttgtcatttggcgattaacgaccaagagaatctgataaggaaagtggcaagacagcatagagcgatttagagatccagttagtctcacgtgaaaaatgtggtggaattctaattaaatattttaaaaaattcatcgcggatgccagaaaaaattactttcgcttaaataaaatttcatgttttgcggttatttcaagtaaaaagagaattttcgagctaatacaatcgaaattt

SEQ ID NO: 66448 - DNA, 663 bp, Arabidopsis thaliana landsberg
  unsure (1)..(663): unsure at all n locations
cttgaaactttattcaatcgatattaagcatgaatcggaactcgattacgatgttaaagataaacatataaaggttttataagttttgtttattcactgttattcaacctgaaacagcttttaatctagatgctgaagttgcatatattacagataaacaaacacatatgtattacaatgttaccacttacaataaggccttcatggatacgtaaaggctttcttatcattcgcttgtacctcccttgagatttagccttgagaccatattctccgtcctctgcaacaaaatgatcccaaatcattcaaacattctgattatattaacaagcatcataaaatgaaagactaacctgttcggaatgcgaaagatactttccatcaagcgtcacaaccacgcgattgttaccatccactcctttgattttgtcgacagagcaatagaaatctatcgccgacatgctaaactaactaagacacacacactcacacacacacatagttacagactcagctttaaaggacataaaaaatatgcacataacaagaagtcaagaactaacaaagatcggtatactatacatacagtagatcactctggcccttactaaaccaccaccaagcgactactatatgcaacagncttattctttcccatacaga

SEQ ID NO: 66449 - DNA, 550 bp, Arabidopsis thaliana landsberg
  unsure (1)..(550): unsure at all n locations
taacacgtctaaacactctgacatctcaacgctaactgacaccaataccggaaatacgacgtccgacgttcatccataaggtacgccaccatccggtctcaacttttgtgtnnnnnnnnnnnnnnnnnnnnnnnnnnctttgtgtctgcaccttttttggacatctgcgccacctctactgggacttgttgactactgacactaattctagtcactccgtgtcaccactttcgttcttgtgcgcataagacttgcgcatttcacagcgcaaactcttgtttttgtgccaccgctctcagacacaaataacgtcatgtctgattcgagcagcacacctcaagcctccacctctaaaggacttaaacggcagaaacagtacgtttcgccgtccgactctgacacctctatggttcacgacactgccgccgaactcacagagcttcgggaggctgttagtgattttaatgatctcgccgtaagcaaaaagatagcgctggaggtccgtgaggctgctaataagctcacggacagactactcgccgcatatgtc

SEQ ID NO: 66450 - DNA, 214 bp, Arabidopsis thaliana landsberg
  unsure (1)..(214): unsure at all n locations
gccacgagtgaanagaaagccgganctacaccggancccacccgaaccgccccacctttccnccttaggagaagccaggcnccaaaccccggcacgaacaggaggagcacgccaagccaaagagccccggaagaaccacacaccagggaacaggcgccgaagagcacaccgaacgaccccacgcgggaagagagcccacacagacccaggcaca

SEQ ID NO: 66451 - DNA, 249 bp, Arabidopsis thaliana landsberg
caaagagcacaccaaggaacacaaagagaaagagaccccaagaggcaccgaagaaggtttgaataagaaaacaatcgcgaagaggaggaagggcagaaaaagcgaacgaagaggggaagacaagggtgaaagacacagaaggggaccaaaggaccgaacaaggcccaccggagagaaggcacaagaggagagccaacggacgagcggccgcaccgaccgaggccgaacgagagagaggcgccggaaagc

SEQ ID NO: 66452 - DNA, 451 bp, Arabidopsis thaliana landsberg
attgactaatctaattcccaaaagttttatatttgactgcatattgttttggaattttatagtatatttttttttttttcttgctaggtgctaccatcgaattcgaaaaaaaaaaaaaacgaaaaaaaaaactaaagtatcttatttttaaaaatatgttctcttgttgaaataaataggggaaatagcctcgccacgtttttacgcaaccttggctttgactttaaatttcatatcacaccatactcttatttctcttatggactgcaatattttagtttaaaatttaagtaaatgtataaatgagtgatggttaaagaaaaaaacagataaaggaacatgacttgtgttttaatgcaagaaaaagagaacctatagatatttctatagatctagttggcgaaacaccgtcataagggggtaaaacctacatgaagctgagagctattgt

SEQ ID NO: 66453 - DNA, 457 bp, Arabidopsis thaliana landsberg
  unsure (1)..(457): unsure at all n locations
cggcnnnnnnnnnnnnnnnnnnnnnnnnnnnnnnnnnnnnnnnnnnatatatttacaggggtttaactgctgctctccaaaaatcaaggggtcgtgagctgcttcaagtatgacnnnnnnnnnnnnnnnnnccaatccacataatgtgaatgcgaagcggtctgtatatcgccgaagatctattgagcctctaagaaattgctacctgtttgtcactgtactcgacatgagtatatataattctttgtctgcacacttattctcatatcatagcgcattctacagaccaaaatcgatgtacatatcaagtgcggcaacccatctactgcaaatgaacgcccttaccatatctctgagagttcgctcggaaggaaagcctcttggcatgacatctacatggagacacgaggctttcaaagttagagcgggtctaccccattggtcaagtcccggtatg

SEQ ID NO: 66454 - DNA, 239 bp, Arabidopsis thaliana landsberg
  unsure (1)..(239): unsure at all n locations
aatttttaacatttatttctaatacaacaatattanttgccgncctttcttttttaaaacactatattctattaactctttactgacaaccaatataaatttcaaataaacatattcaaaaattcaaaattcattccgacatttccacctattatcctacactctttaaaaattccaccttatcattacagacactttaatataatattttcttcccacaccaccacctaaccacacct

SEQ ID NO: 66455 - DNA, 251 bp, Arabidopsis thaliana landsberg
aataaaatacatagaatgttttttcttaccatgcactttagaataccggcattacccttactaatgtttatgaagggcataattaaaattaaccatatttcatatcaaaaattacatcaaattttcattaaaatataggttttcattaaacaaattaataataatcattacaagtaaaatagtaaacactacggccatgaatgtttgtagatgtttaaatgggttttggattgtgcttaactataaataat

SEQ ID NO: 66456 - DNA, 477 bp, Arabidopsis thaliana landsberg
agccagcaatatcattatacatattacaaactgaaacatataataacatggatatatttcctagtctgctattctccatcaaaagatgaagacatgcattaatatacacacatacatcaccttgatataggtatttgactctaattcattcacccatatgggttagaatcacaatctgtaaaattacaaaatacccctcagtccttcccgatcagacttttctacgcaagagaaattacgagacaaaagtttcgttatacatgtcatgtactatataaactgcaacatatatgatatatcatgattaattcttataaactttccatgcatatgaatatagataggtaaagttatgttgttacagaaatcagaaagcaccgctaagatcatccagcaatctcttattctctagcaaatagtgaccaaaatttagatatactaaccttattctatgtaaaaaatatatatattaaagct

SEQ ID NO: 66457 - DNA, 528 bp, Arabidopsis thaliana landsberg
  unsure (1)..(528): unsure at all n locations
aaatatatacaagtaaaagtaatttaaatttataattctctcaacaactcacaaagacatagttaaaccaaaaggttatatcgatgaaattagaaatttcaaaaataatggctagtacatattaagattttccaatcatagaatagaaagacaattaagctaccagcttactttccatggaaaagttaataatagcaaactcttcatatctttatggccattcacatttcactttaacgactagattaatgacttaacgtattcatattttcaaatattggcatatatattatgtgtattatctttaatctttctaatcccctacctaaaatttttgacggtctatttattttgtctaaacgtacatgtgcgggatgtgcattgcatcggttactagatgcaaatcgtacctgtcgacacatgttaattctaacctaatatatatcgagttatgcttcaaaataaataattttaaataaagcttgactaaaaatctatatncaatgataatttcgtattagacaattt

SEQ ID NO: 66458 - DNA, 553 bp, Arabidopsis thaliana landsberg
gatttgaccttcattactcgcagtttagtcttgagagtattgtaagagacgagaagttgatatcgctagggtctagaatttttttcttatgtggtcggaaagagaccggagggtttatcggctgtggtttatcgtcggaatcttgttctaaggaagcagagaaagtggctaaaactggttttcattggctcaaatttatgggcttctagaagtttttatcattttgaattattgctttttcaaattagttccattctttagaaaaaggatataaaaaacatctgtgtatattatttctatgtagaaatgaaaatcattaattagtggtgtataatgtattttaatcaattatataccaagatgattatatgaagttctaaagtttaccaatactattttgatgaaattcttattttattatatagttgaaaatctataaagcattattcgtggatgaatatagccatgaaatgggtattataaactgaatagaacattggatattatatattatctttctataatatcttttttggacctctaataatagaac

SEQ ID NO: 66459 - DNA, 290 bp, Arabidopsis thaliana landsberg
actcatagtcatctgcgctaggtatctctgaactcgagatttctagatttttaggctcgatcctgtcttaaatcaaagaaaacatatcatataaacatttaaaaaatctgtgaattaagaaagatgaatctttgtgaagaacttcttatacattttgctctagaagggaggctgctcccttgctttcaccccttgttgctcgtccgtctggcctttcctattgtacgaatccccctctgtctggcttcatctgctctttttctggactcttcctctccccatgtgccgct

SEQ ID NO: 66460 - DNA, 576 bp, Arabidopsis thaliana landsberg
aagttaaatacacgtaagatcaataggtttagattctttcttatcctttactaaaattatattattacaaggtaacaacaacaacaacaaagaagaagaagcgaagcatatacacttttgagtttaaagactttttaatcagcacttgtatttttgttcctttgcatcaatcatatcgctcaaacttggctgctcatgttccaaattcctgtttgaagaatcatctcatcaccacccttgcattcgccgaaaaaagaatgtcaatgattccaaagtaaaagatgatgattcttcacttttgacgttggaagagcattcatagatagaaagatagatgctttcaataatttcggtgcgtaatcataaagcataataatcttttaccttagttggagaagagagagtgaggaagaactttgtaagggttgagaattccctttgggtccagcaactttttaatggaagccattaatgcaacctgcataatattatattccggtaagaatagagtgacacgatagttctatcatagtttccatacgttgtttgttgttacttacaagttcggtgattgct

SEQ ID NO: 66461 - DNA, 548 bp, Arabidopsis thaliana landsberg
  unsure (1)..(548): unsure at all n locations
gagagaggttcatcgagcctcaattcgcaaannnnnnnnnnnnnnnnnnnnnnnctttatagattttagaaaaaacacccgtcatcaacctgctgggcaggcccgacgtggcaatcgacgacatcaggaaaatgagcgactcattcgccgaaacgttcgggcgatactccgaagaaattctagagcaggcagagataaatgtgaaatacgacagctatatcgaccgcgaacaaaagcttgcggagaagatcggatcacttgaagacttcaaaattttccccgacttctactacgacaaagtcaaagcgctatcgcacgaggctcgtgagaaactgaaaataatccgcccggctaccattgggcatatgtcgcgcataattggcgtctcacctgccgttgaatctgttctaccagtgttctcggcaagtaaatgctggatcaagtgaccgcctgccctgctgtggcgaaaaaaaattttcaaatattttgagacgttggcctacccgacacccgggggtccctcacattttctgtgggtctttgttttt

SEQ ID NO: 66462 - DNA, 477 bp, Arabidopsis thaliana landsberg
  unsure (1)..(477): unsure at all n locations
cggatggtactccacacggaaacggtcatgaaaagggagacgattacgacggcccttccggactttgtcatggccgggatcgaaaagccgcggcccatgtcccagaacaggtgacggatgccgttcagcatgtggtagaacagcgcccacgtccagccgagcagcaacaactgccccgggacgctgcccgcgacgtcgacgaagcgctgataagcgtcgggaccgctggcggcggcgatgatccaccatgcgacgacaaccagccccgcgctgagcgcaatgccggtggcgcgatgcatgatcgacagaacggagctgatctgcggacgataaacctgcagatggggggaaagcggggcgtggctattatnaggtgctgggagctgtcatttcgttaacctgtaaggatgaccgcatgttaaagcggtttacagggtgcgtcaatcataacggctggataagggttgggctatttgg

SEQ ID NO: 66463 - DNA, 411 bp, Arabidopsis thaliana landsberg
  unsure (1)..(411): unsure at all n locations
caaggaccaccaaacggnaaccaagacgaaagagacaaaccgaacaagctttgacgttttctaacaggacgaacaaccaaaccaaaaggggggttaaccgcgaaaaaccaaggcagagcagcaaacgaaagaatacgcggaggacttgagaccaccaaagacgatgagaatgagaacacccaaccatagatgcgatggagagaccgccacaacacagagccgaagccattcataaaccacaggccgaaacaggtgaaaacaaagggcataacaagaatgccacagagggcacaagcgaagaaaagaacaaaagagccggataagccagaaaaaagggagaacctatcggaaagcaagactacccaacagggggaggcacccgaaaaaccagcagggccaacagagccgaga

SEQ ID NO: 66464 - DNA, 461 bp, Arabidopsis thaliana landsberg
caaggagtgggcgccggccttttctggacttaaattagccctttcgatggatgcctcttccacaaccagaaacctagggaaatttgagttattttgaacatacattaattatagtatgcacgagaagctacatgaggatctctaagaatatataatttataacgctaagatataagagtaaaccacaaatgaaactcaaagaggtctctggtctggaaaatttatcccagattcaaatctataactaagggaaaatctatatatattgccgtcttgaattatcacagaggaggaatatgaaggatttattgcataaaactttataagatactaatctggtttgaactatttctaagaatatataatatataacgttaagatattagagtaaaccaccaaatgaaactcaaagaggcctctggttgggaaattatcccaaattcaatttatatgtaagggaa

SEQ ID NO: 66465 - DNA, 1380 bp, Arabidopsis thaliana landsberg
gcctaccaataaggagctctttagcctgtcttctaaattattcgagtttcaaggttcatcagacacaccaggggcacaagtgtgtggtgtaacgaatgcttcagtggagcctttgcttttatctccttcgattcaaatgatggatagagaaggatctgatcaacctcagagaaactcgtcacctaccttggagaagaatttgagcacactttcaaatgattctctgtttagtctcagcataggtgataacacgatagcaagagatgagttgtttagttaccgtgatttcaagtctggagagataacaaaatcgggagagctgttatcgttctgccctgctattcatggtccggctgattcttctgatttaggaaagagctttgatatggaggacaaagcgagtggagaatgtgaggataagtcctcaaactcaaatatatcgtggaggaacattggagattgcaataactcagacgaaacaccaagcagcacacagtcattttcatatccaatgtgagcttcgttactttataccatcatctcattgtagtagtcttcaaaaactttatttttgattaattgttgttttcatgaagaacgaaaaagaagaagaagaaaaagaaagcaacaaagaagaagatgacacagcagcagcaacagcagaagcagaagaagcgatgttcttggttgtgttgcaagaacactggaccttgtttctcctgctgcagattgccaagttgtggttacaacttcttttgctgcaaacggttaaaatgttgcccgtgcttctcctggtgcagatggccaagttgtgattacaattcttcttgtggctggctcttctgctgccattggagctgttggagttgctgttgctgttgttccaggtagatcgctacttccggattctcacattggtcttctttaatctgtgattgtttcaatcgaaaagcctaccggagttttctttgtgttgctacagttcttcaaagaaggtagtagatgataagatgactagagggaatgacgaacagagactgcaaaaatcagagtttaaaacatctcatcaatggttttgttgatttccttgttgctcttcttcttaactttagattagattcttacacaactctgttttattctttagctaaaggtaaaaaaaaatttagattttacaaatgtaaaaggtttcttgcctattgagagcaggtaccaaaaaaaaaaaaaaaaacatatagtttttctggtatcatcatcaaagtcaggtgaaagttgaaaatagtattagcattattaagggttaaaaaaaagattagggccttaaagtttacaatatttctaccaaaatcttttttggtggggtatgtaactttttaaaac

SEQ ID NO: 66466 - DNA, 507 bp, Arabidopsis thaliana landsberg
tatgtattccttacttttgtaagagtatctttttctttttaggaaattattaagagttttttttttcctcatacttcacagagtgtccattttggcatttttttttttttttcctatgagtagagtgctttgcttttacgttttagtataaataaagatagggttttgattatgagactcattcaagctatagagagcttcgagttttatacgttttgggtttatttgagtctagcaataaagagagcttttcggggggctctgtgggaccgtgattggaaactaccggcaaataagaacttgaggaatgactaccagtaggatggagtcacgtctgatcgcgatcgaaaaggaccacaaggccttgcatgaacaatatattgagtgtcatatgagaccaaaagagatcccggatgctcttttggagtttacaaggatgtttaccgcttaaaaagtgcctattgcaaaacaagaatccacaactgtccttgaggaggacattgaaat

SEQ ID NO: 66467 - DNA, 578 bp, Arabidopsis thaliana landsberg
aagatacatttgcggatgatctctctttgcgccatcggaacctttgccaccggcaattttacacccttttcaccacgggcgaccattaccccgtctgattcattgacgatattgcgcaaatcatccatagcagaaggcatttcaattttagccatcaccttgattttgctattttgttctttcacccttctttttaaatcaacgatatcctctgccttgcggacaaaagacagtgctacccaatcgagttgtttggcgataataaaatccagatcctcaatatcttttggagtcatagccggtaatgagatttctgtatctggcagatttacacctttattgggtaataaattgccaccataagtcactctaaccttcacatcccctgatttttggtccacctcagtgacgaccacctccagtttaccatcatcgattaaaattttctctcccacacttacatcgttatgcagattgggataagaaacatatattttctccttggttccaataaccttctctgttgaagtaaaggtcagtatatcccctgggtcaatcaccaaattattgttttcgat

SEQ ID NO: 66468 - DNA, 517 bp, Arabidopsis thaliana landsberg
cagcgcccctgggggatctaaggcatgccatgtgtccttgctaccaagcatggatagtcaaggagttggtggagttagagtgtgattgtgcctgtgtgacaagataagcatgatcgtgcccacatcccacaccatgtagggtgttaggctcgatcgtcctaggtgtgtcaatagtgcaccattgcgggtgcacacatggacaacgaccgtcacgtctagagacaacatcctccatccacgacgtacgggagacaacgaccacccacgatgtggagccgacgctgccaaaaagctatggatggacgattacaccttcaatagcaacaataggagacgtctggtgctaagccaactcacacatcatgtaacccctatctcttggactataaaaggaagaggggatccttctaagggataactgatcacacacgtccaaacgtacaaacgaacacttaccattttctacttacgagcaatacaactagtaaccaagaggacgtagggtattacgctcaac

SEQ ID NO: 66469 - DNA, 1430 bp, Arabidopsis thaliana landsberg
agtctattcgcgacaagttgtttactttgttttttaaagatttttggtagcttgtatcttttattggttacacctagcgagaattgtcctcctgttggagacaccatggccacacaggtaaatcctgttggacacagcatggttttactgtcattgctaatttgcttcctcatctatttttcttcatttttgctgtcttccttgtattggtcttcttcttcgttgtctcccatggttttacggctctactctttcctgttcttcccacctttgaaattttccagcagtaacaacttacactgcgaatgaactggaaaccaacagagacttggtccatcgattgtccacctaaaccatgattgttagatatgtaggcaaggtctgaaaatttggtgggaatcttcctgagtagtgtggccataaacgtaggagcaaagacatgaaaacgttactgttggttatagtatcatcacgtattgatatgtgtttagggaagttttgattattcatttttctgttcatcgatagtaggtccatcctccatgagccatgaaacttttgttgatgattatatactatattagaaaaaagtggcatatggagggtaaacaagaacttgaacctatcctcgctctctttagaatattttggggccttttatgttaagaaattcactaagaacccccaatttttagaataatgctgatttttaacgatttcaactagtatgcacaaaagaaaatcgataaaagttcaaagcagaaatttaaaaggcacaaaagaagaattactatatcacgttacaaaatttagacagactctaaaagcgaccttcatcgactcttttcaatcggccataacattgagggaggctctatttcaaatgaagcggctgagctatcagggtgtcatattttgcgaggactcgaatatcttatatggtcacttggagagggcaatagaacagcgccaaaaatcatatggaccgttggaaattcaaggatacattaaagatataatgatcatggcaaaggtttcttatagatttatgcgcgttaatgggaaggagaacacaatggcgtacatattagctaagaaggctagacaacaaaactggaaaatctggccaaagaaaattaaaaaagtcacaaaagaaattgacttgtcttgttaaaaaaattgtcaatttaatttcacgaacaaactaaactccacagctgccccaaaaagccgacctttagagatccctccactactttgtaacttcttcttccccaacttttcatgattcttctgcaattctaactttccaaacagtcatttgttctaaatctcttaaacacaaatctttgcttgattaaccaagttcggtgtccttagttgctgaaatgtagcctatacgtcttctagtataaacccacccaaaaaaa

SEQ ID NO: 66470 - DNA, 615 bp, Arabidopsis thaliana landsberg
  unsure (1)..(615): unsure at all n locations
ttagtaaattacatactatattatttctaattgacaaataaagaaagacatttcttagttacttaaaatctttctcatatcacacactatctgtatttggtatttttgtttcttgttatatatgttaaactttggtatttatgttttctaacaaccatagtttcttaatacagctgtagaaagcccttcaaatatcatatgctccatattttacatgaactagtggggtctagtccaaaccagtaatatcaaattatgttaggttcacaacgttttgagatgttttcaagaaagaaaaaatcaggatcatgtcctttttgaaccatatatatatgatctaccctaccaaaagtcacactagatatatcaaacattgtattgttgctttcatttggtgggtggttaaccgctaaggctaaatagtctgcaaaaagaatctagcttaataacataacttatattaaatcagtcttcttacagtatatacgaaaacttctaccaacaaatttctcggtcaaacaaaaaatgcacttatagtccaaaagaatagaatgtaccacataacattngtgaagaaataataaagaaaaaaacttacaagtgataaagatatat

SEQ ID NO: 66471 - DNA, 533 bp, Arabidopsis thaliana landsberg
  unsure (1)..(533): unsure at all n locations
cgctgaagccccttgatcgtctgttttgatgtttgcactgaccaggtttgtgtctattgcgccttctattcttgtgttcacaagggtcagggtgccttgtgtaaacaagtccagcacagcattgtaattcatgccggaatcgcgctcggtaagcaccatcgaaaagccctgcagcttgttgctgccataagtgatctgcggtgctttaaggtccatatcaagcccggcctcattcatgccggcagtgatccgtaccgtatccagttgcgtcagctgtggtgcaaaagcctgcaggaaaggacttttatagatctgcgcctccagggtcaggttgtatcgggtagggagcggggctttaccgctatccttnnnnnnnnnnnnnnnnnnnnnnnnnnnnnnnnnnnnnnctgctttttgctgcatcatatagggccggtctatatgctcctgtacggcatcaggtatgcgggccaagggtatcttgccggtgatggcggtctgcataaagtccaggttcgcgatgatgttctggc

SEQ ID NO: 66472 - DNA, 1656 bp, Arabidopsis thaliana landsberg
acctagatatatgttattaccacggtcacccatacaatatgatctgacccataaaaaaagttatcatcgtaactcaaaacatgtttgtacctaaataataatatgtcaaaaaacgttgttatgtcacgttttcttctcaacaaaaaagtgaaaacgttatgaatgcatgtgagtttataaatctgtcaataaacgtttcgtacgagaaaaatatatttcctaacgataaatgtatacataaatgatcatatatatatatatatatatatgctagcgggaaagataattaaacagaagaaaataaatgagcgttgaaatcactcaaagttgccatcaaattggctttgcgtgacaaattaggcgcttattgactttcttaaggtacattactctactttgttaactctatgatacattttcgtcgtttttttatatatcgatcgagtatgaagttttctctaaataattccttactcatatagtcatattacatatactttatatgttgtcagcactttccaattcaaaaattcatttccccataatgacaatgaatacaaaagttataatttatacaaaatataaaaatgcaaagaaaatgtcagtagttgccaaataaaacatcaaagttatttaataagtcataaatacattgattcacaacaagtaataaatacaaaactgaaaataaatttatttctttataaaactagtcatttaattttgtaaagacaacattttataaaagagaaaattgtaattggtcaacaaatgaacgaagatagtaatcaatgtccgtccggttttgaagaatcgtttacttttcaaatctgaaaaacgcctaaaagagagagagaaacaaagtaaatataggggcatcatcgtaataaaagaagaagaacgaggctaaaacagtaacgcaccttcgtctacttaaatacaagcgaaaacccaaatcggttttcactccccgtcctacaggtcgactcagtctccggctagttcgactcggtaaaatcacgattactttctccttccatttatcacgatcgtggatccagaaactctgaaagatggcgtctgagctgacaaaccggcgacacgagatagagcaaccagaagcggaatcttattatccaaagccgataaagccatggttcgtagcgattcgtccgatccgttacatgctcagagaacagagactcgtcttcgtcctcgtcggcattgccatcgccacattaggattcacaatcttctccaaatcatccaaccaccaaccaattccttacgacgtggatccgctttccggatacggaatgcgatcggagtcatcgtatctgccagcgacgattcataagaagccaagcatcgagtacatgagccggatcggatcggcaggcggcaaaatccctctaggcttgaaacggaaagtgctaagggttgttgtgacacgtggagcagggttcgtcgcgtcacacatagtgtaccgggtgatgcctctatgagacaacgttctcgtcgtcgacaatgtcttcaccggcatcaaagagaacgtgatgcaccatctcaacaaccctcatttcgagatgctccgtcacgatgtagtggagccgatccctctatacgttgaacagatctaccagatggcatgcccta

SEQ ID NO: 66473 - DNA, 797 bp, Arabidopsis thaliana landsberg
aaaacgctataattaaaatgttgtattgtaagattaaaatcaattggaattttaggtatgaattcttaccaaataaaaaataacgagaaaaaggtttaacattgtgcataaatattattacatgattttcaaagttactaaacacaaactaaggtagtctaggcatgcttgtatagggtgaagtcacataaatatttttgattaatattatgagtaaacatataaaaacatttggttggtatacttaaaagctcttcaaacatttggatcggaggaggtgctggggttctacggacgtttattagcggctgcacagaaagaccaacaccgatcggcggtgtcaacaacgacagttccagcaaaacctgtgcatttaaactgttttccatatggatagcacggtggttctttaactttttcatttgtgataggatttcttaacgggtcatctttgaaaggatttcttaaagaatctacaaaaacaaataaatgaacctttttcagactatggttatgattataatggtaatgatgctaaatgacgatctgaacgaaacctaaagtacttataacattaactcaccacattcatgaagacttgctagaaaaataagaacgatacaaaagatactaaaattagatgacgacattgtaattttcactctaagaagttttgttgttttatcatagaaaaacttatatatagacaagtctttgattactgctaaatttttgtgaggtgatccgacaaaactgtcattagatttgtttggctagatttatttcttttctattct

SEQ ID NO: 66474 - DNA, 413 bp, Arabidopsis thaliana landsberg
cttctaattttatcttaagtttttgttccattagaggtgcctgccgccagattccaacaaaaaaattggagacagaaatttttgcaagagattgacactgtcacactcacctgaaacataaagctgaaagtatcatatgcttattgggatccagttttaagaaaatcaggaataagcctaacctgtgatataacttggcgatcgcttataagccttttcatttgtctaagttgatcttctgcagcgttagaccgagcattttcaccttccagtttcttttgcagctctgcaattttagattcatatgtgtgagtggtttccgcaagttccctttgatattggtaattgcccttctcttgttcctattaacaccaaacataccatttaagttaaaaggtagaaaaaggaaatct

SEQ ID NO: 66475 - DNA, 215 bp, Arabidopsis thaliana landsberg
gtcgctccaggtccacatgaagctgagcaggatcagcgtcatcagggccggcctggcgatcggcaggtagatccgccacatcgacgtccaggagttggcgccgtcgacctgggccgactccccgatgctgctcgggatggcgcggaaggtctcgctctttcagaaggctcctttgatgacgcccataccgacagggtcgacggtgattccttcgt

SEQ ID NO: 66476 - DNA, 432 bp, Arabidopsis thaliana landsberg
cgactaacactttgtacttttttgtaatttactaattttcgttgatggaagatgtcaaattggtgacttataccgtaagctatataacccttaaaaagataagaatgtaaggtggattggcacccaatactattaattttaggtaagtaacaaatcatttttaaaacgaagcttccttgttggcttagggtatacgccaccaattcgatatttcatagacattgggcctttgccgaactggactctaaaagaagtaaatgagcttatactgggccggactcaagtacgaagcccaatactaaagctgctcatctaattatttgtgcatcacatttgctgcgacccacgacttcaatttcaagtcaagttagcgtaaatgcgtattgtggacattgttcactgttcatcctcatcaacgaaggattgccgtcc

SEQ ID NO: 66477 - DNA, 734 bp, Arabidopsis thaliana landsberg
cgaatctaaatgaagcgaagagggaacaccgaataggggtctcaactctttttgtgtgtctctttcttactggttgggctctctgtccaaagactccacctttctctgcaaaaatctctgccctcctactctaacatgactccccttctcctctgtcccttatctctctctattcactcaaacaacaacgaccctttttctatttttacctctcaccataataacttcccttatttaccactttaccaactacttcttcttcttcttcttcttcttcttctttcgacaagggattttagggtttaggattctccgcattgtacgccactctgttcaatacaccttggtattccccaatctttgacgttttgtattttcagtttgtcgtttccttatcttaaaccttatttaaatcgttcccaagttttttttgttttgtccatagcttatctgggtctctgttttttgagctctgtgattgttaaatttaataacttttctctcatatgtctctgtgttaccacattttcattgtttatcactaattgcttacattcattattaggtaagtgatgatgagtgttgaatcttgaagttttaggagatagagagaaaggtttaggattgttttgatctgttttggaaaatgggggagactagcaggcactctgttgatgttcccatcacaaaaacacttaatgctcttagaagggttcggtcactgagagatccat

SEQ ID NO: 66478 - DNA, 939 bp, Arabidopsis thaliana landsberg
  unsure (1)..(939): unsure at all n locations
agtctgatacagaaagtctctatcttttcagtatcttttgatgggagcggttccatttcgtaaggatgttccgagactaaaaaagttaggtgtcggtggggtaatcactcttaatgaaccttatgagactttggtaccatcttctttgtacagtgtaggttcaatgccaccaaacttgtgtttctaattttgttgtctacttgtagagtagtttgatgattgtaagttgtttttaggcttacgaaatggagcatctagtgataccaacacgggattacttgtttgctccttcaattgtcgatataaccttagctgtaaacttcattcacagtgagtgatggtgtgcttgctttttaccttcatttgcatttactctttctgttacttattatgcagtccttttatgttacagagaatgctttacttggtaaaacaacatatgtccattgcaaagctggtcgaggaaggagtactactgttgttctctgttatctggtaagttcattgatcaaatcatatcggttaaattacatttgcagttggtcctttgttgaacttccttctcactaacgttttctctctctttgtttttcagattgaacataagagtatgactgtggctgcagctttcgaacacgtgcgctcgataagaccccgggttttgttgcatccttcgcagaggaaggtaagtcttgatcggtttatcgatatgcttcaccaaagagacaatcgtataacgaagatgaaaacatgatctttttgtgtgtttgattctttaatacagagtctagtttgtttctgaatgctttgtgatttcatttatatgtatttaggttggtgaggaaattagcagattacaatctcctttgagcgaatcaacattcatcgncacctgtggtgattattgtaagtaaaatgcagagactagtcagtcatagc

SEQ ID NO: 66479 - DNA, 2428 bp, Arabidopsis thaliana landsberg
  unsure (1)..(2428): unsure at all n locations
ttattctctaccaacatccagatgtttacaaatgggatgagtgaaagccattcatcaactttttacctaaccgatgtatcaccagaagcattgaaggctatgatgaatttcatgtatagtggagagttgaacatggaagacactgtgaattttggcaccgagttgattcatcttctctttctagctgaccggtttggagnnnnnnnnnnnnnnnnnnnnnnntgcaaaatgctcttggagtgcctctcagaggtaatttttttcttttcacaatcctctagagtaaatgatacgtctcgctgtcattatcatgtttcacttcttttccagtacatctgttacaatatggtttctgtatgatagagagcttaatgagccgtgaagtgggttgcggtttcaagccttctgaaactaaaagagaaaagaaacgaaataccacattcaaactacagagtaaaaaaaatattaatattgtgtcatgtatatattacatgcagggatggcgttccgttttggaagaaggtcatacaacaagaataattcttttatgcgagtttattgggcgtgggagcagacaaacttgagtcttttctcaagctaacctctgaactttgttgcaggattctgtatgctcagttctccaagtggtttcgtctatctcatcatgtaaactcattgaggagatgtgcaagaggaagttctccatgcacttcgactattgtaccactgcaagtttggactttgtcttgttagatcagaccaccttcagtgatattcttgaggtgtgttttctctttcgctaacgtactatttcttataagaacatctgaacccgcttggagacttgcccaaataaactgctacaaagtgttgctcatgcactgaccagtgattagttatcgtggaaatatatatgaacaatggaattgtaacggatatcaccaagagtgatgaatgacgtctcctttcgttatggcatgtattaaatcctggaattgcagtctgcagatctgacggtgacatctgaagaaaagattctgaatgctgttctcatgtggtgcatgaaggctgaggagtcgcacagttggggagtaatagatgagatgatgaactatgctgaccccaaaagtttgttcaaagaaaggcttcagtcacttgatgacctgttacctcatgtacgcttctctttgttgccatatgagttacttaaaagggtaagtggatcctgaccctgtatatgctgaatgaactttgtcattttctgttaaattaatttcgctgatgccatctatgcttggatgatgacgcagttagaaaacagcaacctaagcaaagaaatcccagtattcaatcgtctggtaagttcttaacatcttctatcgatttggggattatttaatttgtcatttcaagactgattttctctccaagccctcacttattttgtcttgtgtacagttgaaggaggctgctagcttcctaacatccggattgatatccccaggaaatgaaccgatgtatgaattacatagtcatgtatcttaggattgtaaacatctccaggtttatatttccagacttctcaattattaaagcttttcacctctagttccaggttccaacatcggagatcgagtttcaaggagcttcagtacatacgtgatggggacagcaatggggtgctgcactttgtgggtacatcttatggtagtcatcagtgggtcaaccccgttctcgcaaaggttaacctcactttttatcttactttctttattcatattgttggaaatccaattaccatgacaacttgacaaggaattctgctggagaaaaatatttccttatttgagttcttcatgttttacagaaaatcaacattacatcgagtagccccacctccagattcactgatccaaaggctttggcttcaaaagcctatgcggtatggtccacccaagtttgctcggattatatgactagaatttggcttgaactacaaaattgacgaagaataagattaattgaagtgaaccttctttcctcttggatacagagtatttaatcatattatttcatttttttggcaccagggtacttcctttgcagggcctaggatggaagacggccatatatcatcctggtggatggtggacttaggcgaagaacatcaggtctcctccataacttctctgtctacatactatgttctcataaagacacaaacggtctaaaagctccatatataacccatacccgcagaaataagagaaaatgtatttgagtaaaacaacaatgagtttaagttctgaaataatataacacggtgaggatttttggttgcagcttatgtgcaactattacaccttcagacaagacggatcaagagcattcacangattctggaagtttcaggtatcttatttttgct

SEQ ID NO: 66480 - DNA, 345 bp, Arabidopsis thaliana landsberg
tcacatacagtcgtgtcacggtcacactccgtgtctagatcagccgtacacccatcgcaggtaatggtttttataacggtgcggcggacggcttcaacatcatgccgccgctctacccgcaactgcttgacgcgtgcatgtcccatgccgttctaatcctgacagacctacgaacaaattactactggtacaccggctccacactgcgcgagcactacaggctgccgtgcccggaaagcctctacggcgccgacctcgccctcttccgcgggcgaggctctccatgctttacttcaactacccgtaggaattgtcggcccaaatactgtaatctataatttattt

SEQ ID NO: 66481 - DNA, 275 bp, Arabidopsis thaliana landsberg
gattccatcacgaaactaccattccctgtataaatattaaatatttcttaagagaaaagatgagatgatatgattttaaatttttaatatgtaaacgaaatgttatataagtaacaaaactgccgtgagacgagagtggaatccatgaaccaagagaggaatgttaggcccacggataatagccgtcgagactttaaatgtttataatattttaacaaatagaaaaataagtaccacatttggcaagaaagaaatgtaaggcgacatggcgaaat

SEQ ID NO: 66482 - DNA, 588 bp, Arabidopsis thaliana landsberg
attcatgactacagactacattacctgcaaaatatgcatctggtctgagttttgaatgctcaacacagccttgcaacggtatacatccatctccgattttttatcccacagaatttcctccagccataaacgaacctgtcaaaccgagaacaagttggtgtatcacgaacaacaatatttcttaactacttgtccaagaatgttcaatacatttttgctaccttatcgaggtttataggttgcggttcgctgatgcatagagtccttactccactatcgtgaagatctgtcgtcgttaatgatttatttgcttccagcagggattccagacgactaacatgctaatttcaacagtgaacaaggaagataagttcagtttttacagtcaaaagcataattagtaatcaagacgagaagagaagtttcagagacttaacagttgaatcatatgcctggcagttaatatattggacaaatcaactttggcacctaacagatcggatgacattggcgagcgagttgatggaatgaatctccttttctaattcatcagactccctttgagaaataaggtcaccttggtcatta

SEQ ID NO: 66483 - DNA, 534 bp, Arabidopsis thaliana landsberg
  unsure (1)..(534): unsure at all n locations
ggatccatttagtatattcgttgagtaaccaaacaacaacaatttttttttttttttttttttaaacatttattgttgtttgaaattttacggaatattgtttatacacctaaatattcatacggaattttacgcaaataaaagcattaatattgctggctacttgtaagtatccttgacgagaaaggttagacatatgtactatatggtaaccttgcatccactgtaaaaacttattgtagtcactttcatttttgggttttagactttagacacacaagtagtatcgctactgaataatgataatgaatttattggttaggccgcgtaatatggcccatataaattaattggactaagaaaaacctaaaagtaaatggcagccgccggaggtaaccttaattctctgagatgagtggcttttgtgtatttatnnnnnnnnnnnnnnnnnnnnnnnnnnnnnnttcttctctattaatgtctgaatatataattcgtgatcttagggttaggtccgtgactatctttgtttga

SEQ ID NO: 66484 - DNA, 465 bp, Arabidopsis thaliana landsberg
ctggcggcaagcctatccggacacggtggaacaataggaaggaccggcccctgctctggcgataaaagactaccgtactcgtacaccgggccgtcaaaacacggggcttcagtcgccgaacacctgctccagcgaatcagcaccgaggatgcggccagcccaggttgcaatctcctcgctggtggcctgctccaggcgctggctcacctcacccggcaaagggccgaagcgatgcgcgagctgaagaatcagcagttccgtccggccttgctgcattccttgctgtaccccttcttcccgggccagacgttcaaaactggtgacgtattgcatgtgtttttctccttcgacggtggcgagacgctgccgcaggctctgctccagatggggcggcaacgccatcagccagtcgatgatgcgtaatagttgaataaacgggggttctcccaccctggccatgagcag

SEQ ID NO: 66485 - DNA, 750 bp, Arabidopsis thaliana landsberg
aatcacacaatacgttcggtctctgcctgaaagaaagggagtgtttaattgatccttattctatatgtatatgaatttccgtctactaataaatttaaatgtctactacgtacatgaatacaaaataaattcaaatttgtttgaacatacattccaaactagagggaaccagtccacatagggtgcgtggaaactcgattttctttccacatcttctaattactgtcaacggatttgtgctctttgtcgtcgaacagccacaaagaggaattgacttcatcattcaaaaaggttgttgaaaggagaaattgtagaatatttacttaagtttcagattgagtttacggatgatttagttaccattatttcaatacgtcgacaactattgacgtcaaggtaataccaagtgtagctgatccatgcatgtggatgatgtctcggaggaccaagtttcggtccggaaccaagtagtctttacattgcctaacttcctacgaaaatgagggaagatgagatgtcgtaattttgctgttaggaaatgtagttgttgcattagttcagaatttatgcatgcttcttcatttcatccaataaatttcggaagtgatatatctggagtatgaaattagcttacacattattatattttatatttagctaaggggtggatttgaattaattttgtgaacctatttttgtcataagtataatagtgatatttttcaaaaacgtgatattttttcttggtcg

SEQ ID NO: 66486 - DNA, 479 bp, Arabidopsis thaliana landsberg
agtgcacaacaacatgattttccgtcttattaaaggcaagttggtgtgctttacttgttttttctggattttttcactctctatcatattggataaccataatgtcgtgagctattaatgtgaactaatacttatttgtcttggttttgacaggtggaacaactttaaagagagtcgatgtaaaattagagtcgcgaacttcagtttggttcctacatgttgaagctgaaaccaattgaactcgttgtatgtggacaaaaccttctgcaacctaaatgccggtattaatgtcaaccctttttttgagctatgcttcagacatctctcgcatttctagttctgtcttatttctcatatgaggaagctgatattgcaagaactttcaaaatgttgcatttcgattactacccatcatttgttggtttgatttttatcacttgtgattactaaactggtccatatacgaaagaaaaacatgc

SEQ ID NO: 66487 - DNA, 2351 bp, Arabidopsis thaliana landsberg
aactgataattgaatactcttattattcactatctgttcttacaatattataatttcttgaaaagatttcttatactaattccaacaaagatacaaaactgtcattcgaattttgaattgtcttctatcttacttttagtttgtaactaaaaaatagaacattagaaaaggagtaaccagataatgaatgacaagttgaggagtagtcgtatgatgagtcctccatagtaaaggaggaactgtgggttctgcaagaggagcaaagggttaggttccttttgggaattttaagggtgcaaagagtcaatacttctcaaactcaagcaccttgagctcctagaggatttgatatcccacttatgaacttccagcctcaagggtccttccaaaactggttctgcagcgctatcaaaatcctaggtatgacatccattccattgtacatcccatgtcgttcatttcttgcattttcccgatgggatgtgaaagggtatcctatcgcttgacttgcttatttatttatgatgttttttgtggctatgcatctcggcgtagtcacacctagtggagtttaaatcctgcactgtttatatttattttcatagaaaagcctaaaaacaaaaggttgcatgatttttcttttcacagttttacttccacatattgcattctagccttctaggagtgttcttatgagttgcatttacactttgcatgttttaggaggagatgatctactctaagagaacaatgttcactttaggtgaatctaacaaagcttagctgtgcgaatgctacctggagtgataggaaaagtctctaatccattaagtcacgtggctcaaggactcacagaactaggaggtttctagggatatacttcttagcggttttagtgttttgtcattcatgtctcagcgtaggatttgatttggttaggaacttaggagttgtcctagcatacgcaacattttaatctacataacaggttcttgatctaatcgatcattagcactcagaaccactcttgttatgatttgcaggttgacagagccagctagatcttcaacagcactagtcatgagactcatgactcatataacaagcttcccaattaccggaggtttcccttttgtcaagatccaaagcagaagattcgtttctcctctcatgtgttttgaaacttgcttcttcctttgtcaaaacgattagaacgcttgtgtatataatttcatctgaatactaattttcatgaatattttttcaaatacaaagactattatcatttaaccgaattctgtagtgtgtagataaatgtatctaaaaatctactcctcttaaaaaagttacctatgaaaagaaaaatcgtgtatgaaagattttgctataattgttaatcctctgtcgttgataaacccttttaaaaaaaatatttcctgaaaaagtcaacaaagacagagagatatatatctttcgacgaaattgaaaatttcaggtatccttgatctccgatcgaaagggcactaatttcttactggcgtgtctcaagtctcgacgacccatttctccatcttccttgacctcatctgggttggtttttattggtgaatgaggaatccacatagcaatggaaaccttcggaagcttgaagctgatggaggaggagaagccacggaggagaacggtttcgtaaacggcgtaatcttgggccttgacggtggcgccacctcaacggtatgcgtttgcgttccatttttttcgtttggtgaacgtttcccggatcctcttccgatcctcggtcgtgccgtcgccggttgcaccaatcgcaacagcgttggaggttccgtctcatattctctattcaattttgaattttgaattcagctttttgggttggagaacttttctggagtttgttgaattgcgataattttagctccgggcaatagatatcaatgaatgtttggctttgataatcattaataggagtgtgtctgatctaatttaatcaagttctgttgcaatgtggtacttgctcttagctgattctggaattgaaaatggatttgttcttagctgaatataataaccattgtgtgtgtgttttggttctagatgtgtggaattaatctattttgtgtgtgcggtattggttttgcctgcagcaaatatttggatatagctgtggcaccgcttggatatttcttccatattaaagtcacctttcaatgtgcatcgtgtatgcagaccgtgcagcaagggattcgctacagcaagtgttttgttaggcatttgcacagtgcgtcttggataacgcagaggaaggcggcgtacgcttaggcgtttcaggt

SEQ ID NO: 66488 - DNA, 1212 bp, Arabidopsis thaliana landsberg
aaaggtccccactgcttacaaggtactcacacattcctcatatcagaaatattatatatgatatgttaggcaaatgtgaatgtgtttataatgatatttttgttacagggtcacatgggccaaatgtttgcttttcatgcttctataatggcaaatacactgagctcaccgctaattgtatttacgagaaccggatccatggcagtgcttctaagccattaccgcccatctgcaacaattttcgccttcacaaaccagtaagtgtttgttcatctgtcaatcaggaaatgtcctatgtatgcaacttttaatcgatgaaatgggttttgatcgatcttttggtttatttcctttaggagaagaataatgcaaaggcttgctctttatcaaggtgtcatgcctatatatatggagttctcggatgatgcagaagatacatatgcccggtctctcaaactcttacaggtacgttaaccatgtaccttctcatctatcaaacattacattttctgcagttttgcttacacttaactttgtactcaggacgagaatatgctcaaggaaggacaacatgtaactcttgtccaaagtggctcgcaacccatttggcgtgaagaatcaacacatctcatacaagtccgtaagataaagataggtggatgatgtttttacttcttgagctacacaacatcttgcttttactcagctttctttctcttacacagttcgatccatatttttttgaatcactcacagtgaatcaaacaaccatataaaattttaagttattgaagctttttttctggttatagtttagtacctaaatgtttgatatgtcatggaggatttctgtctatctcatctgattacttattggtaagagtaacccatataacacattacagttaagtctttagagcttaggagtttaaagaagaagtcttttcgacgaaaaagactgatccgatttagccttttatttatgaatcagtttgctgttacatcaccggaaaactgaaaaccaaacacacatttgttagactttagaatccttctctcgttcctcttcactctcggtgtcatagtcatcatcactcatgtcttgcatctcatcttttccttctagttgtataggtttgtaccattttgcacatgcaatgtataccaccaggtcaatgctcgtcaacgcagacagaaggaaatagaatctgt

SEQ ID NO: 66489 - DNA, 602 bp, Arabidopsis thaliana landsberg
tgcaatacactcacaaaaaaaatcataaacctttcgcatacctgtagactttgtctattgagtttcttaacggctacggtaagtggagaagaatgagaatctcctacggtgggattgttaatggtggctttatagacactaccaaagccaccttctccgatctttagcttcctgctaaactcacaagtggcgtcactcagttccttgaaagaaaaaaccctcaggttttgattttgattttgttctctgtctgtgtacaagtctttgatactcgttggagatggaagagatcttggtgttgggagattgaacgacaaagttgtctttctcgtcgttaattctggagctgacttttgcaagaactctcttcctcttatgttttttttctctttctccatatttcctctggattttggtttcttggacatgaacaagaacagacaattcatgttctctcctctctttttttttttcttttctttgctctttagttagtgatctgggtgtatctattctaatttcgttttttacttatacacaaaactggcagaagaatttctaaggtgaaattacgaaaagtcaggtgctatgaatgaaaaatg

SEQ ID NO: 66490 - DNA, 568 bp, Arabidopsis thaliana landsberg
ggccgatgaagcacctcgcacgttgctcgcgcagcttcgcccggtttggcgttttacagtatactgcggcgctggtgaggggccaccggggggtgtacaaagaatgcgtcaagttcatacgagatccgacggcggaggagtgggaagattttctgaggacgggaaagaaggcctcccaatactcggaccgctccgcagaccgggagccgaaacccttgggctttgtccttcaaagcgaagtctcctgcgcgtggtagtggcggggcaggcaagactactacccctcagaaggctggacataaacgagctcgcaggtcgacagctttggcactacccagttgggtgcctgagaagcctctcacgagcaccatcttcgaaaccattcgcagggccgggcccgaaggggtgtcgaaccccgaactgagcgccgcaacaatcggctacggactccgccgctacacgtacaccagaatggcgaacctggtcaagacggcccagccctcgcaccttcggaagtttcagctgaagaggcagcttgtccggcgcgggaagacatcgtcgtggatgt

SEQ ID NO: 66491 - DNA, 600 bp, Arabidopsis thaliana landsberg
  unsure (1)..(600): unsure at all n locations
tttttcatcgaacggcgacctacatgctttgtctaatagtctttaccagttgagctattgaaattggtttcgtatgttttctcttagacgaaatatctctttttgtgtttttttatttatttatcaaatgaaagtgacaaacattatttgcttaaagcttttgttagaaaattaatctcatgtaactcagatataggattttttcatggtttatcttttacttcttacaaaactgtagatccatggatgcaaaaaaaaaaaatgatccatgagactatgtgagtgaaaaggatttaacctatgtaattaaattgaagattttatatattatgtattttctacttaagtaatagattttcgagggacagttatatcaggccattcatacaaagccattagagtattcaaacattaactatatacacagaatataattatagttgatatgaaactaagttgaagtcaaccttgcgaattctaaactgaaagaatattacttttttgtttggttcaaataaaagaaaataccggttgcactatantaaatattgataaataattgattggtcaaattacgtgtagttgcacattgttgaagct

SEQ ID NO: 66492 - DNA, 509 bp, Arabidopsis thaliana landsberg
cacaaacaacgtcattacgaccatacacacaattttgtaattgtaagatgccaccctcttcatcgtatagaattgattttttataactatctaagtaaatgtaattaggtgtttatatattaaactgttcacagagcgagcgtgtttaccttgcattcactgatctttatgtacatatgtggtatgatatcatcttataaatatttaaaatatttcacattaaatatttccatatatataatttaaatgtaattttttaacaaaagtaagtttaaacatttgtagtttttttatttgactataaaaaaataccaaacaaaatatatttggtctgatattctaccttcctaaattaaataatatatattttaacgatttcgggggtgattgacagaagcttttaagactttagaaagatttaaaaaatcttcaaagtgtttttttgccaatcaagatttttttgcctttaaaatctttaaaagctttcacagccggacttttttttttca

SEQ ID NO: 66493 - DNA, 2044 bp, Arabidopsis thaliana landsberg
aatgcacatctgcgtaaggttagcatgtcaagatctcttacacgccgtgataccaaatttatatcgacttgcaaatatgggagattaaagctctctttactcaattttactcaatcttacaaacatttgtgtggtactttccggaagttttccgacatgtaatattgaaattagatcgtgtagagagttatcaaataacaaaaaaactcgagaaactttgtagttttgttatgtatcagactagaaattaactctaactgaatggagagattaacattgaagaggaagaaacaaaactgtacgtgatcagctttacattgtgcttgtctatctttacattgtgattattgtaatatcgccctaatattttcgcatatagttgtccatttaacctattagagtgaaacatctatatattaatacttgtcaatttaataatcattgtaaattaataaacttttccggttcaaagttggacgaatataatatataacgtaattggataaaaatgttatttgtttttctttgaatttgttttaatttttgtgaaaaagtcattttcaatatttttactacatctaaaaattaacacttatataaatcaataaaatattttattccccatgttattaatttataattttattttactgtattagctcttacatgcaacatcatagacttcagttttatttctaacaagattatttaatcttaaacatctatccaatgtctaatttttgtgaaacaatataatatcttatcaactttagttttcaatcttatctttttatctaatatactttgagttggcaaacaaatcctatgcaaagaagagacgaaattattgaaaatgttaattttcttacttaaccatactaaatatctttattctatcatttactatattcgctatattaacatatctatgttttttgtaaagacaaaatgttaaccaataaattttacatttttaataattttgtttcttctctgtatatatattttttcctgactcaaaattaaatgagataaaaagataattgaatctcttatatatgattttagggtaaacattgccatatcttattcttttatattatctttttttaataacaaatacacatgtaaactggaaagtatacatttcttatctatatgaatgaagtataaatttatttaacacatacaaatttaataaatcataaaaaaataccacgtggaactgtaatgtataatgtaatgtgacacaatatacagtcaaaacattccaacttatacagatttatatagattcaagcggatatgcaaaaagaagtagaaaaagaatgaatcctacatttatttcataatttattagtagtatatatgtacataaaatcatcttattccatcttaaaaggatcctttcataatattattcctaagtattttccatatgggtgatagtaaagattgcgtttcccatatttgttaaataaatacatatattcttatcttgtaactctataaataagaagcctaaacgctttattttccttcaaccaaaaaagggttaccaaaccaaagaagagagaatggcgtctagggttcttctgattttgtgtgtgccttctctcttcttcttcctcgccgcttccacgaaggaatatcccggccaaccaaaaatctttgacgtcagaaactatggtgctcgcgcagatagccaaagagataacgcttttgcgtttacaaaggcgtggaacgaagcttgccaatggagttacggaagatcaacggtctatattccttccggaatattctatctccgtcaagtaacattctctggtccttgcaaaagctctataactttttttatcagaggaactttattgtctcctcgtaatccttacgccatcaaccaagaagaatggatacttttcaagtacgtcgataatctcactgttactggcggtggttcacacatcggtcaagggtgaaagtcagaaccttctctcgagatagggtcaaggtcactccttgtcggacacatacaatggagcac

SEQ ID NO: 66494 - DNA, 1749 bp, Arabidopsis thaliana landsberg
atcgaatatttcccaactacatatatttttacatccgatccatacacacacatatataccatttttcttttttgatcaaacacatatataccaattttctatctcttttttaacaccataatctcgaaaactataataaaacacaaaacaaagaggaagctacttcccgaccaccttggtccttgcctcgagacaaagtagcttcacttcctactttaatcaaaacacatttcagacaaactttacatataaacacatcatagatctcgctgtctttgattcacttatataagaaactttactatgtttaatctaatagtagctagggatctactctggtttccaacttaaaaaatcatcagtttcaatttagtcatttagactcctcaaaaatccctaaatttctgtgtttcagcttctaaaatataagtgtttaatttagcaaaatagttttaggcgaaaagcgataacacatgtgtcgccatttggaaactgagatatagatagatctattggttcaattggttgtacattcaagtcattttaaaaatcatgttgattgtattcttctataagaactatctaattaatattaatccgatttctatgttagtttatataattcatagtgtaaattttaaattttcaaagggtttgtatctttaaattctaaaatagaaaacataagttatgaataagtttaaaatattcctaaatactaatttgagaaataataaaaagatgatgttctaaaattgctttagcaaaatttctggattcctttgatgattgagtacgtgtataatacacatatcaatacaatgtgtagactttttggaacgaattgttaaatttaataatatttttaattctagttcacgtgtacacccgtatgattcctccggccaacccgacagctccattgaagaacacagcggaaattaatttctttatcaaaaaaactttactaaaatcatattccggtctaaattctaagcttatatctacccgattttcccggaaacgtaacactcggaaatttccatatgacaccacacgatctctctagtcttccgataaaaacaaaaagaaaattgttgcaagaggaaaaaaaatatatatcctaagagaaaaatattgacctataaataactccattaacacaatcatctcaaaaaaaaaaaaaaaaaagaaagcaaaagaaaacagagagtttctaatcacccaaaaccctaaaatggatgcgaaacatatagttctatgcttcttgctaacgtacgtcttctccatggcggcagcctcatcggaagctgagcctccggcaacaaggaaactcggcaggcacgaatggccaggagaggaggcagaagcaccggaggtttcacatttggaagagactgtacggcgaggccaccaccattccacggtggaaagatcggttgccggaggtggagttattctcggaggcttagctacaacgtttcttgtggtagtgttttgctatataagggctacgaggaaacacaaacccaattatgatgaaaaggagactgagacccctaaagtgttagtttaattttgacttttcgttaatctttgtaaatattttctttgtattttggtttttgtgatataaaatgattctattttattttttgtcttcttcgtatttagttatataatttgagcttcattctcattctctgtttattttccaagttttaaatttatcttacaaaataataaaag

SEQ ID NO: 66495 - DNA, 567 bp, Arabidopsis thaliana landsberg
ggctctcagacatggctcttaggttcgaaatcgaactttgtccgatcaccccaggtcttctgctccacattgttcgcatcgctctcgccgtccggtacggacatatcgggaatgttcggcacttggagcatgagctcctgccacgtctgcatgatctcacggaacgcttcctcctccttctggatctcttccttgagtgccttcatctcggagatgcgctgagcgcgatgcgcttcatcctgcgaggatgagatctctgctgatgcagcgctctgagcaggcttcttcgcctcaagggaggtgagggcagcgcgacgcgcatcatcagatgcgatgagtgcatcaagatcgatcttgatgcgcttcttcagtgcgccagccttcacaagatcaaggtcctcccggatgaattttatatcgagcatacctggatatcagtgttacactttataccatatgggccatcctatcaccaagatgcgtacgcatgatgtatcgccctttcttattgagatccccaacccgccgaagaggtctgggtcctggaacactccgctatctgatgca

SEQ ID NO: 66496 - DNA, 395 bp, Arabidopsis thaliana landsberg
atcacatgaccaacttacttttttattacacgcctgagcggttccagacacaagaagatatgatgggggatatgcataggaccgccggacccctcaaccgagcggacgatgataatgtcgagaggactgcagggaagttcaaagaaaaccagactgcgcggttgttaaccgcacctcaatccatattagggtatacggagagtcaaaatctcctgatggaaggacaagaccaatcgccgacggaagaatgacaggcccggaggacaacgtgatctgcggttgaagaaacctaggcgtgcgcatcagggtatgccccacactctgactggaaaatgtcaattaccacaagaactctgcagaatatatagcgatgtatacaggatggcacactgagc

SEQ ID NO: 66497 - DNA, 585 bp, Arabidopsis thaliana landsberg
  unsure (1)..(585): unsure at all n locations
tctacattcagagattttgggttgctagccagtagtttgcggcttgcttcgcttattgtaaaacgtccacgacccggggtatcaatcaaacccgcctttgacatgtaaaatttggcccaatgcactctgttatgcaaaagccgctgccgaccgctggnnnnnnnnnnnnnnnnnnnnnnnnnnnnnnnccccagttgatttgcaatcttgtttgcgacctctggcacacgggtttcccttgctgccgcaagttgcaagactggcaacatgagtgcttgataatcgggaattggcactttccctccttaattctgaagagcccatcaagaatgaacataaacggcttgcggtaaaaattgcaccaaatatccgcaatatcattgaaaactgtcacgcgcgccgtagcgattccgggtccagggtcgttacgaccctggtggccctaaaaattttgaggccatttttgcctcaacccttgcgcctccgttcatatctcccatatcggctacagctttcacgttctctctccacgagagggcttgaaaaaatcccttaattcatcttaacggngatggacatgggcag

SEQ ID NO: 66498 - DNA, 629 bp, Arabidopsis thaliana landsberg
ggcaacaggtcatctgcttgcgccatgtaaccgactcttgttttgtcagtcgtgacggggacttcgtcgtaccgggggacttcgtgctcggcactttccaagcccgcgaccactttgagtactgtcgactttccgcacccgcttggtcctatgatggtcaagaattcgcctcgccgtacgtccaaagtcacatcttgcaaggcgagaacgtcacgggactctgagccaaataccttccatacgttctcaagatttacaacctgctgatcaatttccatttcgaatcgtccgcctcgcctctgcccggtaaagcacctactttgagtggctcttcatgtagtcgaatgcctcctgcccaatatcgaagttcgcaatctgatccggcgtgatttcgaagctcttgttgtaaatttctccccatactcggattgtgctctcaagctctcccttatccaataccgggttctcagggactgccgacgacataaatttgattccggaactgatcagatcaactgactgctccttgtaacggtgtcatgaagcatggatgcagccttgttccgatcgtcgtgaatcaagcgttagccatcctcagtgccgcgaggaatcgaacgaacgcattatgc

SEQ ID NO: 66499 - DNA, 1300 bp, Arabidopsis thaliana landsberg
aaaataaccaatataattctaaaatagataaattaaatacgtaaaatataaatcttcattttttttgggtgagaaaaaatagaaatctttcactgaaactcttgtaaatagacactgatcacgccatttgttgcggccaccaaaactttcatttccttttaattagaggctaggtggcagtatttagaaagaaaaaaaaaacctcatatgttatgtataaattggtacaaatttttttaaattgtttatattcagatacagtagtaatcaacttttaaatcagtggatatgggaatgcaactatcaactttttgatgcggctgtttattaattgcgtccaagtccaatatagaaagagcaaagtgtgctctacaaatttataatttcttaacttctaaatctgttatttatagtttaacttacatccaaagaattccacacaccattcaaagaatgaatattttcattaagatagaaattgcttacccactggttttacatgtccaaaatgctagaaactgtaaacagtaagttatatagtacatatgttggataaacactaaattatctatgcaaagcttactatatatcattggagagtaatttaggacaaaagtaattgaagttggatcttaatgcagtccctgcttctaaagaaatagaaactgttgactttgggtcttttcattttcataaagtgttgatcatttaagagacacgaactcgacatgagtgattgggaggtataatcacatgtgttttgatgtcataaatcaagattatatatagatgaaacgtttatggtggggcggatttgattgataatccattaatccctcataatattggggtataatcaaaacgtataatcataattactttggttaccattttctattttcatatcaacatcttactcatgtttgtcctccactttcctccactcaactcaagttccctttgagttacgttcgtacatctgttttttttttcttactttggttaattaacgttacaaacccatatagcagtaaaactttgcggtaaatattaaaattatatacatattattttatattgccatcttttttagacagtaaagttagtaagacgtttaaactcatgaactgaattgatctaatatttatttttatttttatttttttgagcaaaagttggggtaaagttatttggtcttaattcttcattaaaaatcttaccagaatcaaagtatacttctgaactacctgattgctgggaagaaaactacttgacttacgaaatctatttgctgaatgat

SEQ ID NO: 66500 - DNA, 454 bp, Arabidopsis thaliana landsberg
  unsure (1)..(454): unsure at all n locations
ttcaggctggtgcaatggctgcagaatgacggttacttgaagatatatggttgggtttccactcacatgaggcttcacatgacgaagagaatgacagggacacatgtaaggaacctgtctccatcacggaaactggtgtnnnnnnnnnnnnnnnnnnnnngcaaagacaacgtacctgctcccatgcctatactcgctgtccatgtttcagacctcaatggggaacagacgtcaacgattggagtgatggatctcatgacaccagatgtaccattataaagcgctacctccgtgatcagggggcgttttgtgccaatgatgtacgagcctttggcggtgtcactaacatgtacactacttagcgatccactagtttcactaccagccatagcctataataatgcacactgcgggagtgtgcttactgcacgttacagaaccctgcatgtcttac

SEQ ID NO: 66501 - DNA, 156 bp, Arabidopsis thaliana landsberg
gggggtgattatgcactagaaccggacaactgagtgagatgcctcttagagcttgctgaaccacgctgatggaacaggcggactctaccactgatgtgataacgggacacgcgggccccctgatgcaggcccgctaagccaaacgagggtgggggg

SEQ ID NO: 66502 - DNA, 269 bp, Arabidopsis thaliana landsberg
ctgtataggtccaaaaatcctgtcacaaaatagatccatactgtttccggattattggtcttgttttggaaaggatatgtaccactgagctaatagcccgttgtgcgggcctgctgatgggggcgcgttaatcgcaaccaaaatctagagaaaccccattactgtctttgcgttttacacctacctgacaacacactagaaggacaggggggtgtgaaaagagatttctcttcctagaaaaaaaactaggattcataagctcatgggta

SEQ ID NO: 66503 - DNA, 563 bp, Arabidopsis thaliana landsberg
ctgtttattatgactagttcacgtacgaaaacaacaaatttaattttatataaattttatatttgcttatagcggggggggcatatgatggatcatatgtattaataaagtacttcttcgaaaatataaataggtatataaattatctatttcttaaataatgatccatctccttcgatggggatacctcataattgcttacttattgctaatacattttcttttgtcttgatgaactttcaaaacagggattcatgtttaatgatcataatcgttatatctacaatttgatcgacgcagccatgttacattatcttaggaggttaaagatatttatatctacaacgtcctcttctttattgaacttataacctatgttgtactcacttatttatctctcaaaaacgtatgccatgtctttatcattatatgcatttttaatagagtgccgtttatatacatgaaaaatgatcataatcgttacccaccgtctaggcgaagctatgttttggttttttgcgtttctttttttcacttactcatcgttcccaaatatattttat

SEQ ID NO: 66504 - DNA, 363 bp, Arabidopsis thaliana landsberg
tctacttctgggttacagtcacagatgggacgggtaaaggcaaaggcgagaagggttcacgtttcaagtagtctccatatatgaagaggctttggtgattatctactactacagtacctctatactgtatatatatcaagacttcaaagagatcaaattacctgtataaacttcaccaagtaagcatcttccttgtacatcacttattcagatgataataggaaacaataagatcgtgttatctacttggttaatgctagagatatatagtactcaattcctgattctatcccagactacatctgatcatgcttaaaaaaacggcgtcggtgagcaataggactcaagacatgaatggggcct

SEQ ID NO: 66505 - DNA, 494 bp, Arabidopsis thaliana landsberg
cggactcggccaaccgcagcaggccggaggccccgatcgggttggaggacttcacacttttcggagcagttgaccggcatcttggggccggggtcggtctcgcccgcctcggtcagcttccagccctcgcccgcgtcggcgaagccgaggttctccagccacatcggctcgaaccaggagaacgggacgtacatctcggccatgtcgatctcatcgaccggccgggtgatgcccgcgtcgtgccacagggccttcgcgcaggccgcgccggcggccgagttcacgtggtccttaccggagaacatggtcggctcggtccgcatctgcgtcgccttgatccacgcggccttcccggcggccttcgccgcgtcctcgccgccgatgacgaccgcgcacgccccgtccgaggacgggcaggtctcgtcgaagcgcaccggatcccacaggacgggggaggccagcaccttctccatcgtggcgtccttctgctgcag

SEQ ID NO: 66506 - DNA, 590 bp, Arabidopsis thaliana landsberg
gcaccgctgatcttgacggcgagattgcggagatgctccgggtcgccaagtggtggtccgtggcttgaacatcccaaccactggaggagagacatgcccgcaacacctgacccgttcccgcggccgagctggcggttgccggtgctgggtgatctactccgggtcgacatggcacgtcctgcccagggcattgccgatgacatcgtcgcgttcgacgggctgatggagcagcgcatcttcgacatctcggtcgtttgcgtttcgcgcactgacctcgtcgatgagatcaacgacgaggcccactgggagaagcacgtcggacactcgctgcgcaagcttcgcccagtgagcggcgatgggttgttcaccgcctacaaccacgagccgaattggagcaaggcccacaacatcctggtgccgctgttcaccaaggaggcgatgcagtcttaccaccgctcgatgctcgacaccgtgggcgagttggtcgacgcatgggggcagcgcagcggtgagtggatcgaagtcccttcgaccaccaaccggctcactaccgagatcgttgcgcgtgccgggttcgggcactcgttcag

SEQ ID NO: 66507 - DNA, 567 bp, Arabidopsis thaliana landsberg
  unsure (1)..(567): unsure at all n locations
atatttaatttgtatgttattcaacaataatagatctagttgactggcattttgtttatatgctatatgtcctttcaaagtaatcagattcagctgcacaaaatcgggagaattctcattattgtagatacggtccattacttaatagaattctacgtaaccaagtcgttacgtatcaatttattattacggaagcatgtggaaagataatgtatagaaaatagtttatgtgtaagtccaaaaaaatgtggataatataatattatgcaatcgatgttggactactacaaatgatgaagaccgtcgatttatatactaatttaatataaaaatgttaaacttgttgattaacaaaaagataaatgacaatttgtgcaaagtattggaagttgcaagtaaactctctgaagagtgcagatgatcaaaacaaaacaaaacaattaggtttagacaaaannnnnaaaannaaaaaaaaaaaaaaattaggttgatttgctacttgggaaattcttttattcttcaaaacaatattatcctggctcaaaatcttaaagtttacttttatgc

SEQ ID NO: 66508 - DNA, 589 bp, Arabidopsis thaliana landsberg
  unsure (1)..(589): unsure at all n locations
agcccttaaagcccagcctgttcatgcccgtattgaatttaatatgcaccgggaacctgttgatgctttgctgcgagagatatgcatccaacgcatgcaggatgccaaaggaatatatttcaggctcgagatcgtaattcaccagcgcttcaaaacctgcttcatccgcattcatgaccatgatggggagactgatgcctgctttcctcaattcaacaccctcatctgcatatgccacggccaggtaatccactttgtggaactgaagcaggcgcgctacttcatcgcttccgctgccataactgaaggcctttaccatggccatgagcctggtggatggatgcaggtgctgctgatacactttcaggttatgcaccatggcagagagattgatctccattacagtctggtgcactttctgttcgagccatgcggatatccgttccaactcaaatacccgcgcgcctttcagcaatatatattcannnnnnnnnnnnnnnnnnnnnnnncggtgaaaaaaatcttccacagatgcaaagaacagatcgtcttttgctnnnnnnnnnnnnnnnnnnnnnnnatgatcgcg

SEQ ID NO: 66509 - DNA, 479 bp, Arabidopsis thaliana landsberg
gaacctggacagccgcaaggctggccccgaacgaaagtgaggggtgatgttatttgagccgaaccatcccgcccggcgcggatgggtgcgacaaagacaaaggttttgcgtgcggagaggtgtccgagtggttgaaggagcacgcctggaaagtgtgtatacggcttatacccgtatcgcgggttcgaatcccgccctctccgccagttattgaaagacgcgacggcctggatgctggcgcagtttgaaaaataaggcgcgacggccccggctggcgcgcagggcgcaggaaaagcccaacgtccatggtggccccgtcggtccccccgcgacgatagtccgcaaactccgccaggtccggaaggaagcaacggtagtggatgattcgggtgccggggtgtggctggcggggccgccgccatttaaagccagcgttttccgaagactggaacacacctcgctgcggatgactggtggga

SEQ ID NO: 66510 - DNA, 487 bp, Arabidopsis thaliana landsberg
ggcttcgcgcgccactcggccagggttttcagggtgacgccgtgatttgtggcgcctcctctatcggcggctgttctggacgaagccgccctcaatgtcgctgctcagcaccagcgccacgcagcgggcgaaccgctcgtccgggctcaccgccgcttgtccagggtcaggatcagggcggtcagcgccaggggcagcgcgatccccaccaggagcaggacgatgatcccggcgtgcagggcgtcttcggcgggggtcacggctgatcccccggcggcttcttgtcccgcaccacggcggccccgccgatcaccagcgccgaggcgatggcgccgacgatggtcccgaggagctgcaggttcccgtccggcacggtggccatgaccagagcgaacgcgagcccgcccaggatggcgagcgcgagcgccgccaggatcgtctggtggagttgaggcatggcggtctcaggggttggggcgacggcggc

SEQ ID NO: 66511 - DNA, 545 bp, Arabidopsis thaliana landsberg
cactctttcttacattttcccacacctagtaaattgtatacttatagtttaactcagtcaatgattcgaggtaaatgagattatacagtagagtaccaaattattcgtctgttccagatgaagttaacttaagtatgtttgcaatttacttttgttacaaatgtggtttgttagtgtaagtgatttagtgtcaaataggttttcccatctcaatgattctctttttacagcttttgttagactaataaaatgctattcaaaccaattttattcaatatcgtaagcatgaaatagcctgtaataatcttacatctttcacatccaactctgtaatagactagctttatagttctttcaatttaacaatgatgttcattcttgttttttttttttttcatttggcattaacaatgatgttcatttatcattatcaagatattcacacacaccacacgaattccaccagcttcatattcaaaaacaagggttccaaaagataattatgcgtgttatcgatacactattaaatcaagaaaaccgagaag

SEQ ID NO: 66512 - DNA, 554 bp, Arabidopsis thaliana landsberg
ttccggatgattttgatagttgtgagtctttctatctacctcactttgaggttatgcatttagggtttcgcagtacacggggtggtgtggttctagagatgcttatctcgtgctctcctgttcttcaagtcttgagcatttatgatgttggagttgactttttggaagtgcgatcttaaaccttaagggagcttgaattctaaggacatttatctttaagggagaaaatgatgatgtcttcttgggtgatgatggagaatctggacttgtgattgacactcctagcttagagtttctgcgtatcagagattttccattggaagacttcatagtggaaagtgttatttcttctatcaagatgtgtatcgatgtacggttttatggggagatgacttttcaaacacgcaaactttgcacaagttttttgctgagttctcggaggtcacagatcttagcatctctggccatactctaaatgcatgtatttgttcttaccaagtgttggtttttgacagggaacctatgcttacacaaaactgctacaactggctgaa

SEQ ID NO: 66513 - DNA, 2640 bp, Arabidopsis thaliana landsberg
aacttcctttctttccactttgaaggctacttctttctacaatacccttctttccgtgtttacatttattatcatcaaactctaattgcattgcagcattacttggatccttagctgcagcctcctttttagctaaagatttctccacaaccaggctttgagctccatcagaactgacatctccacaattttcatctactgctacattctccttcacttctgcagagtgaatccatatatctttcttcacagtattgtttgctttggcgccatcttcttttttagaaactttcgcctttttgacactaggtgtttgaagcctattttcttctacagtggcctgctttctgcgtttacctttctttgtatcaacctctaattgcgctgcagcatagcttggatctttagtggcagcttcctttcttgttaatgtttcccccgcaacaaggctttggtctccaccagaactgaccttcccattttcatgttccaatgctaagttctccttcccatccgcagagttatcccctccatctttcatcagagtaccatttgctttgatatcattttcttttctagatattttggtcttcttgactctggattttcctactttggctgtaaaagaacttcctttcttccctctttgaaggctatttttacctacaccaccctcccttttgcgtttacttgtattcttatcaacctcggattgtaatgcaccatcacttggatcttcagttggaacatcattaagctcccgttctagcaccgtaatttccacctctgcattttctgcttctggggtcttagcctgcagcttatcttggttcaccatcagatccaacacaagatggtctttctcttctggggctaaagatttattatctacagagtcaattccctggagggcttcagtctctgtgtcaatatgttttaccatgtcttgtacaacctcagtatttaggacagggcttgatatctctttttgattgctattacctgttactggcgctgaaacttttcctttgtttagacaaacattgcgctcgtccgttggggaaggttcgctcaagtatattgatcccttttggttaatggggttcttcttcctgcctctggtgcctaggctcttttttggagctgttttcttcgtggtcagctctgtttcttgcttgtctttcattccgattaaacccgatccaggagaggtgctagatctcctcatcacagggtcagttacagatctttcaggtacttcatccaatgcacccttcatagtagaattttctggagttctgatatcagcttccatgggaacaacacctgaattgaacaacctagctgctgaatcactcagatccaactcatgtgcagcttccctgaggtttggcacaacactaaggttttgcttaggtgagcctgatctttgttcctgcaataagacattttctgtcattctctcagtcaatgatttctccggtatttcatcccacgcacaatttgaaatgatattctccgcagttgaaagagcatcgaccatgggtaccacattagagctcaacagtttagtgtttaactcactcgtgggtgatttatggccagcttcctcactttcagttgggtcactaatgctcatcacaggcctaaggttgtcgttaggcgaacttggtcttagttcctgcaataacaaactagacggtggtggaatacttgcctcactgttgtggtgtactctcagtgaatctttcctactgacagatccatctgtaaattttgcctgaggcatcatcggagggaactcctcgccatgcaacatatcaatcttgccaagatctcgaaagagtgacgttctttccatggaagaaccagattttgatgcagaggtattaaaggcagacgaagcttttaggcccttgtcatccattctcaaggaacggttttggccacttgactcttttcccaaagtatcagtctctggcgatctctgaagtgttttccttgaataagtggctagagaagaatgccttctgatactcctgttaatagacgtcgagccatcagtctccattttgctcatcccttgctcaggagtcttgtttgcaaccctaatgggggacacgtaattatgctgctgagcaacacctagatcagtagagaccattgcttcaaaaggtctgtccgtccttttaggagttaaccaattatctttggacgtattacataatgatgacccttcctcaagagggaaatcttttcctcccggcttagagatttcaactgcaggcacggcaccaaccctaagaccaagaggactggtatttgcaggcttgacagaggcatcttctgcttcgtcctcagaatccctagctgaagcctccattatgtccaactcatagccactgagaaaagagaaaatgactagcttgtagtgaaagtgtaatatgccgaacagtaacattattaatcaggctgaaatgagcacgaaatctagaaaccaatttctttagcaagacataaattcatctctcaataagagactataccaattctaaagaatagcaattccaggcgtccactaatacaagagatggagttgcacttttaccttatctcgtaatcaacctcaggtaggagctt

SEQ ID NO: 66514 - DNA, 434 bp, Arabidopsis thaliana landsberg
aacaccttccagatgggaaacagtaaggcttggttaaatgtcgttctttctttttcgttgctctatcatcctttactgggagcgggtaccataaaaagtgagaaagtatagtcctttattccaaaaggtaaagagaaagaattatccttctttacttgaatttggcataggcatcaacatcctatgctagttgctggtgtatattagggttctcagtatcttcactatcttactcccacttggctgaatacgttaacttatgattcccgttaaccgaaaatgacaattaatgctgatttgcatgttggtttttggagtttcttaagtttgtgtggacaaagttgttctatgttatcagtttaattgtttaaattacacatcatgttattctgataatccttcctaaggaatgagttggcatatgtgggaattga

SEQ ID NO: 66515 - DNA, 2649 bp, Arabidopsis thaliana landsberg
tgcatggctcgagcgtcacaaactttgtcaaggtaactgggggtatgttcgctttagtgtatctaaaaaaatcagatacaaggtagagaaacaactaggatcatacatttgtatgacaccttggggttcgttgtagagtgcttctgttatccatctattcaatgcaagattcaaagaacatgttggagatgcatctgctgcttcagttgctctgtctcgatgtggtgaggaacttggttttggttttgttgaaaatgtaactaagaaggctaacatggaaaagcgcctggtaagaatgatacactactcggtaccatctggttttgatgtctcagtggtcaagatatctaattatgcagtgttccatgtagggtaattttgaagctgctgttaccacgtatagagaagctctgaataaaacgctcattggaaaagaaaatttggaaaccaccgcactgctgtatgttcaattttctcgcctcaagtacgtggtaagtaatgtgtcttgactcaaaaaggttttcatttcagttctgttaataacatgtcaagatttagagctatgggaactgttttttgggtcactaccttaccttcaatgtatcacaattttggaattctttcattatcttatggttttcttccttttcgtagattacaaatagtgctgatgatgcagctcagattctgttagaaggcaatgagaatgttcctcactgcaaattacttcttgaggtgtgttaattggctggcattttgaatctctttaaacttctaatcataatttctcacatggaaatcatatttctccactgaatttctgttaacgtctgttaccttttttttaaccttcaatcactgttaatctttgcgctaacaggaacttatgagactcttgatgatgcatggagggtctcgacaagtggatttgttagatcctatcatagataaggaattatctcatcaggcagattcctccgatggtctaagcgcagaggacaaagaagaaatatcaaatttatacatggaggtgaggtttttcttacagataggagattctgtggtcttttttgcttgtctatttcatttcccccccatagtaattgctcttggatttgagcagtttattgatctctctggaaccatccatgatgtgaggaaggctttgggtcgacacataaaattattcccacattctgctagagccaagttacgtgggtcccgtccttcaggaaatttatttagagagttgattcagagaagagagaagactcgagagcgcttgaatcaggacctattaacaaacaaaggcattagcagtatagtcgattcaccaccaaaagaaaagaaagagtcatctctagactcttatggtacccaatctaaagatgctgtccgggctgactatgtaaacactgagcctaatcagggctgtctgacttctggacatctagttgaaggaaacgataatgttattgagaaggagactttgtgtgagtcacagagcgatctgtccatgggattaaaagccaatgaaggtggtaaacgctctcatgaagttagcctaccgatccaagcctcaccagaacatggttttgtcactaaacaagctcacttctcgttcaattcagtagatactgtgaagtcagatgctatagtgatccaacctagtggctcacagagtccccaaagttaccaaagtcaagagtctctcaggcaaactggtcggaacaggtaccacagaagagatttaaaccagatgcacagagattcaaaacctcgttctcaagagagacctcctcagatgccatattctccagtcggaactggtcgtgaaattcttggtcagcacatggctgttactcatcaagacaatcgagtagcgctacaaagctcaacctctcagaatccgcaaaaccaatttcagaactctgcacttcagatgcatcctgtggttcaaacatccaatgcttatcctcaatctcagatacatggtcagcacatgattgtatcccctccagagtcacagaatccgcagaaccaatgtcaaaactctacatctcaggttcaaacatcctttgcttatcctcaaactcagattcctcagaatccagtgcaaagtaactaccaacaagaaggtcagatgcagagtcatgaagcttataaccagatgtggcaacagtattattatagctattattactatcagcaacagcaacagcttatgtctgaacagcctcaaccaaatcagaaccctcagccacaactagatcagaatcttgtgcaacttctctccaaacagtaccagtctcaagccaaaactcagtatctacaaccacaacaggtggaacaggtcaatacacagcaacagagtcaagaaccacaaaatcagcagcaaattcagttccagcaacaacaacaacaacaagagtggttccaacagcaacagcaatggcaacaacagcagtatcttctctatattcagcaacagcagttgcaaggagaagcaaaaggcgatgaacaaagactctctatgccggagggttccacaacaaacagtgatattcaaaaaggtttgcttaaaaattcaaacatgattgcttcaaattgtttattttatatcaactttaagctgttactaagaataga

SEQ ID NO: 66516 - DNA, 291 bp, Arabidopsis thaliana landsberg
ccgccggttcgggtaccgtagatctcttaaccgcacaacttgttcacgagacttacctcagccgttgttaagcagtgtgaatgaatcttgtttgatcattgcgtttgcgaatatttcacattgttatttaaacgaaataaattattgatatggacctatggttttgttgttgtatagatggagttttattgccaaattttggattggttgaattctgatcgcatgtgaagcatgttgactttatgctgaattccgaacaggttttgctgatcgccggacacgggtcacagc

SEQ ID NO: 66517 - DNA, 379 bp, Arabidopsis thaliana landsberg
gacgggtactgaaaatggggcgaacttaccttttcacaaatcgtcttaagacgaatgccaactaggacctagggcggatggtactggctgatggctggattcgctggccatggacatggattacttgtcttgactctatccacacaaaggactactctagaagcgaaacctacggaggttaccgttctatcactacttaatgcttgttgccatgtgtgggagagtgattaaggcctgaaactgttatacgagatgaaagacgtacatggagtctaccccatggcagaccattataccatgattattgacgtgttgggctccactaggcttctgaaagaagcaagagctttgatagactcatggccttaagaacctgact

SEQ ID NO: 66518 - DNA, 192 bp, Arabidopsis thaliana landsberg
acagcgtggggaagacaaaacctacctcgagtaatctgaaattagggcgagaagccatgtgaccaaccacacaaccgctaagtcctcctatctattacattagtaccttaaaggggaactgaggatcatctgcacctcttgatctccatccctggatgaatagccctattggtccccatggagatgattctt

SEQ ID NO: 66519 - DNA, 585 bp, Arabidopsis thaliana landsberg
  unsure (1)..(585): unsure at all n locations
cctcctaaaaaatatttatgtctccgccattgggtggagaagagtttcagagttactgtgtgacgatagaataataatagggaagcgaggagagttaacaataaatatttcttagattgatttccccaaatggataaagcagcgttacagaatgtatgcaaggaaaatccaaaaatcttaataatggcaatgtgnnnnnnnnnnnnnnnnnnnnttctctcaagcatttaaataaaatagtgcaagaaagaatcatcaagagttaactatttccaaagacgtaaaaaagttttgattttcattttgccagtaagtagcaaagtatcgtttttttcacatatttgtttagcaaaccatagtccaagacccaagaatgaaatgtcttggttgagaaaatcagcagattaataggcttgttcttagacgcataatctagcaaatgctttacgcaattaagcagatatatagatttttatcgaagctttccccagaacataatctctcaaatacaaaatcatatataaccgctggtttaacctacatttttattagttactgaaaattctatacagtggttacaaatac

SEQ ID NO: 66520 - DNA, 290 bp, Arabidopsis thaliana landsberg
  unsure (1)..(290): unsure at all n locations
aagcagaaccattttctatacggccacncgcnagaggcangaacccgcagggcgggaagcgaaggaaaagcnaacagaanccgccaaaacccaaccccaggaccagcacgaaacccaaccaaancaagaacaagangaaaaagcgncggagaaacaacancngaaggaaaccgagaaagacggagcaagggcccaagccgaaggcggaccaaaggccagcccccaaagacaacaaacggcaaaggaaagaacccaaaaccaaggcacagagaaagagccaagacaccaag

SEQ ID NO: 66521 - DNA, 621 bp, Arabidopsis thaliana landsberg
gtcgaatgatgtgaggagttatgagagaaacatggttgtgaagtatcttccatgacgatcagaagtttctgtaattcacaaatgatttgaagcgaagtgtcttaccttgatggctttgtgtgtacacatataagtatttataaatgtgtggacggcattattatgtcaacgttatgaagcgtgtaagtcattttgggttttatgatcttcttttgcggcttacttggtttttgacttttaagtgaaatgaatgggaacgagatgggatgattcatggaattttaatgtcaacgagggtgtgctaactatttatattttcttgtttattaaaatgttaggtgaaaggtaatgagtacattcttggattaacgtaatttttgttaaaaaattatataaatgacatggcaacggtgtcattagtaacatggcattcatgtcatcattatcattaaatatgtggtatctaacgtcagtggaatatataattttgcatataatttgataaattaggtatgtaatttacttttatttaaaagatattttaacgccttagaaattattagatataagtttgaacatttgaacttttggttgggtggtaataaaataaagttgtggcct

SEQ ID NO: 66522 - DNA, 527 bp, Arabidopsis thaliana landsberg
cgcgcgtgcgatgccggcttccttcgccagttgctcgacactgacctgggtgaagctttcgccggcgtcgatcagtcgctgcagcgccgcctcaagtttgtcttccacggcgttgcgcttgtcgctgccgcggataccggtacgtcgagtgatggaagccatgatgcagtatcgcaaatattcgatggcccatcttcaactagtcattttgaattgacaatatgtctattttgttgccagcatcctgtgtcgcatgcgcgagccacgggtcgacaggacgggatgatgacgatcactgcagaatatttgtctttgcaacgccgttggcagctgacgcgcgcgctggagttgccctgccttcccgctcgctctgccgccgcgatgatcgacgcctccggcacacgagtgcgcgcaaaggcgtggtgcatgaccgagatgctctggacatgaatgagccggctgagaaccattaccgctcggtgtttcgtcccggcttggtcgagggtcggacgcttctgatcactggc

SEQ ID NO: 66523 - DNA, 641 bp, Arabidopsis thaliana landsberg
ctcgtttaatttatataaacgtttctcataagaaattttgagtttcaaaaccgtttagatatctctagctgttcaatcttttttgtcaatccagatgtttcgtctctcgcttgctgtcaagtaaaagtagtatagtcggttaaatatttggaacacacaaaaaaaatatttataaaaaatatcatacgtttacaatatgtaaaacccgaaatatgaatgagaatttacctgagaattatcatttctcttatgattattcccaatttcttttattcgtctctgatagcgttcaattgttgctgctatactgaaatgaatcaaatgaaaataaaagaaacgaaaatgtggagtcgaaaccaatagaagctatatatgcatatatgtgtgaaaagtatatatttatgtgactaaataaataaattctatttatttattgacatttagaatatatatcatcatgatttatgaccgttaaatattgaaactgaactgtgaacgaagagaatcacagagaatcatgcagatatggcttagttgcattgttcccaaaagttaggatatgatctcatgtttcgaggaccatatataatatatacatgtttattttctaaacaaaataataggttatatgaaaacaaaag

SEQ ID NO: 66524 - DNA, 357 bp, Arabidopsis thaliana landsberg
catactgattgattttttgtcagtcatgcttttgggcggtggtcattccctcaaccttttctaccacctgacaaagcttgcaccaacgattcatctttggatctaaaggatcccaactcaataggtatataacacctatcctgaatcacaaaaaactaataaactaccaatcctatatgtcgtctcgataatcaagatcagttttgcgaagatttgggtgagggttaactccagataaatggagcgaggctcgggactggaaaacttataaaaagtacggccgaaaataaagacccttaagccaccatgtatgctacatacctgcagttggtgaccgatggaacaactagaaccgcc

SEQ ID NO: 66525 - DNA, 2983 bp, Arabidopsis thaliana landsberg
gaatccataaattcatacccccgaactatttttcttctgataaattcgtaaccaacagactaatcggagaaattaacggagagattgaagaccaaccaaatagatacatcatcaccagatcgaaggatacatcgaagcatagagatacgaagataggaagagataacatacgaagggatctgctggtgcatatagaggacgaatccgactatgtcattgatgatatggaagacgccggagccgcctaatgaagaagcggtggtcgcgatgtctacgtcgtagttctcctctgtagttccttccccttccgccatttccatcgtgaatcgaaaattggaaaccttgtgactgtatgtatgtgttgctgaagaaatttgaaaaaaagtcagtaggcgggtgagagaagacgaagaagagaaaaacagatccttccagagaaaaaaatcacccaacaaaagtggaaactagaaacgatgcaaatgacaaattaacccgatagaaactgagaataacaaatcaacccctatactttattaatttcaatagctaagctttgatttattaccaaagtaccctgaagttggaccaataagcggtggcgagtggttgggccgtatagaggggactaaaatgccttccttcacgttatttgagaatcataattggatccagcttcggcccaattttctactttataacattttccacaatttgatattatatcatcgcgcgtataatcgtgctatttttatcaaataacttagtaacgaatagtttgacaaaaaaaatatagttcatgaccatattgtatgttatttttcattacacgtgtacttccactaattaaaaacaaaaaataaagttacctaatgataaaacataagattatttggtataaaaccctctcattttttttatgtttcatatctctcggattccgttcaaattagtttcattccattaaggaaacataactaaaactgttacaacatcttgttgtatgcgatgagctgatgaccaatttcatcatatattagtcgaaacattataacgtagtaaactataatgaatgcacatatttaaccatacaaaattattgtagcggctttgtttttgttgccaaaattgatatggtggttgccaatataaactagtgattgttcggtttaagagatcaggttaccaaaaaagaaggtcatcaaaactcaaaatagaaactgcgcaaacaaaaatacgtttgattattaaaaagaatgattgagatatcacagaaatgggtgccgcatgagatagtggccaataataagcatcaagtggcacatagaaccatggaaatagagttctctctcgatattcgtttgcagagaaacaaaggacactttaatatatttacacacttttggggctttagattggacattactcataggttgtctaattctcattggtggacatttatatactttgcaaaatttatatgttgggatgttcattatgtacggacactgagactaatttcttcgtccatgtcggggaatatatgcagaatacatacacctccaaacagtttctgtgagtttataacatttaacaccagagttttggatcttgactcatagtctcgttataaccggtcaagtaactaactcctaatgaaccaaaaaaaaaaccgtaatgaaaaggcatccgattctcgaaagataatatatgtattggatgaattccaaattactctaaaatttacgaaagagacgaatatgctagaaacatttgaaatggccaaccataattagactcgaaaccaagggaactagaaccatgctttttatttttaaaggtagacattcaaccactaaaccaccatgaattaatttagatttttctttttcttttttttagaattatccaatattatatgagactataatgaaaatgctcatgttttatgtttcatttaccaattattctatatccaaaaacttgaaacaaacgattgatgcaggcaaaacaacatgcatatcgattctcagttgatggatgcacgcttaaaattacttcaaattttatatgatatatacctaccggttctatgtgtttattgtgtataagcaaaatctaatattatatcgaccaatgagacaacaagtaaacaataacgttcgaaatattaaaaatttataataaaaaaaagaaagtaaaatgattaatgaggtcatgcactttggtatgataacgcaaaaagaaagttaggagaaaaaaagtaagagagtctcttcacaattcgtacaaggaaaatccagaaacagaatctaaatgaaagagcaaaaggcaaaattataaaaaaaaaatggtgggagttaaaaggagaagtgagcagattttgcatgtgatggtcatgtgggcgtgtgggaacaatctttcctaatgttcatgtggccgttgtacgtaccacatattcatttttcgcacgtaattttttttaaaaaaacatttacgtaagtcatttcaactatatttaataatttatagtgtgttagaaattactggtatagaattaaatcatactgaacagaaatttttatttggtatttagtgtaagttcattataagattttaaaaatgtaatttaaaatataaatcatcatctggtgacctaaataaatactccaagatatcattatctttgatataatatatgaatattagttcatttcgaatcatttaattcttatgcaactgctactattgatgctcctaattaaatattaattcctgctactactactgatgttgtctacgtacaggtcttcctaattacattgataataattggtctgtccaagtattttgtaagacctcatttttaagtttgtatatcgatacacagagaacatgagtgcaatgaaatgaaccgctcagaaattttctaactagaaaataaaacctgtcaaacaatgataataatcagtcggaaatctatact

SEQ ID NO: 66526 - DNA, 522 bp, Arabidopsis thaliana landsberg
atattcttttagtgccgctttatgtacagtaatctaatatcaaattcaaatggttcttttaccttctgttgctggcttgggtgctgtaatttagtctccgagcagctcctcttcctcctcctccatgccatcctctgtcatcattgtcgtcatcatcatcatcttcgttgtaggccactgtttttttagcagatcttgaagttttccttggcgttgggcgttttctcttgacgtttgttgaatagatggtgaagtcaaccgtatcttctctcattgcgttcttaaactcctgcaaaaaaacaaaatacgtgaagaaactgatgaattctttgcccagggatttaaattttactagtgaacaaaattaaaaggctttggggctttaacctgatatctctgaactaagtcttgatatgttgaaggtaagtcagtgcgagtttcgctgaggtcaaaggcaacgctctgtctggagagaggatctcctggcttcaatggttccgttggagaataggcctgagatat

SEQ ID NO: 66527 - DNA, 558 bp, Arabidopsis thaliana landsberg
ccctgcaccggaatgttccacttgcacttccatgtcgcttttaacattttccaacacttcgttcaggtttaccggtgtatagccctgcgagctgtcgagctcacgggagaagatcagcaggtcgttgatcaacttctgcatgcgctccgatgctttcacgatcttgctcatgtacagcatcacgtcttcgccaaaattttgttttgcttttagcagcttatcgctgaagacaaggatctttctcaatggctcttgcaggtcgtgcgatgccacgtaagcaaagcgatccagttcttccaccgtagctttcagattttcgttgttctcaagcaactgctggttcagcaagtgcactttttcttcagatatgcgtcgttcttctatttccttggccaggtcaaggtttaccagggtaagctttcgctcctgttccatcaactggtggtttttctgatagagctcggcggacacacccacttttatgcgcaggagttcaggattaatcggtttataaatgtaatcgacggcgccaacgcggtaaccttcataaatattctt

SEQ ID NO: 66528 - DNA, 510 bp, Arabidopsis thaliana landsberg
cttcttgttcttcttcttctaataattagtcttcaccgattaaagctttgtactaccctgtttctttctttttgttttttgggttttttctgaacaaaactttcttgttctatatttcttgtgaagaactatgttgatttttaataaactaggaattgatccccctaagaaccgattggaaaaacctttatgtatttatttatcaaagtatttgagatcaataaaatacaattatatgcattgatattctataattatattatttgttaatgtattttatttatctcaaaaagcttatataaaaccattttctgaatgtcaattctaattcctaatcgtatataaataatgattcttatcccatgtaatgatactttaatttacgttataaatgattacttcaacctaacgaaacacaatggtgaattatttttaatcaaaacctgagactatccaacaatgaactcaattctttcaaatttcatttatttacgagaaaggtgtaaattg

SEQ ID NO: 66529 - DNA, 346 bp, Arabidopsis thaliana landsberg
aagaacggaggctccgtgggcagaggatcgtaccaaaaaatctcgtttgtaaaccgatgtccaatatataaatcttggcagtgtaaaccggctaaactgttcatccaagggcattatctttataggcgagcgcactttatgcctgccaagcaggacgataggatggcatgaaacatatctctggaggagcggacatgtattcctactactattgccaccatctctcataaaagtaatcctgggggtgccattctctctccataattttcgttatcacgcatggggccctaaaagaagggaatgagacaataagccggagactcaccagggcgtgggaacacatcag

SEQ ID NO: 66530 - DNA, 1259 bp, Arabidopsis thaliana landsberg
taggcgtgatttccaattcacaactgttattagcatcatccaaaatttaataccgatcacaaaccgaaaaaacaaaaatgtatgcatagatatacattgcgcttaaaccatatactggggaactaaatggtcaacgttaacgcaacatggcatacaaatcttatttttgagataagatgaaatagtaataaaataaaataaaccatacccgaaccacatggtcgaagctaaacacaacctggcaaatactttcattattagaggtttttgtttccccactttgagatgcaccaccggttaaataggtgaatctttaatttcttcgacatgaactcacacatgcctgtgaattgaagaatttggtcatagttggcaataccaatgacattttatttatattttggttaaaaatacaaatgacatctaaagtcatattctaaaatctcgcttttaacgaagcatataaatatatctggatattactttgttcggtccactaattaagcaaaatattttaatctaatagactataaaaatagtaggcatgaataacatgttttatgatatatatatatatatatatatatatgattttgtgtttttttggatttgtggttttaggactttaggattttaagatgtttttttcttttaatatctagatattttttaatttgttactgaaattttttcttggttttattataatatgttttttagatttttattacttataaatttttcttttatttttatctagatatcaatataaccaattaaccaataaattttatgggtgtggatttgagtatataaattcaacttatatttttatttgggttgggtcaaactcgtctatgggaatggtaaatccatgtgggtttggataaggttactcattttgacatctctggttaaaatagttacctctagttttgtttcagtcccacatctcaatttgttttaacacagtcatttcgtcgaacacctcatatgcgttgttgttgtatactaaattactaatactttaaacaaagactaacaaaaatggcttaattcgataatcaaaaccactatttggatcaaacgttgactaatctcacttaaatcactcttctgttttcctctaatgacggatgaagaacagagttagttttcaaggtttatccacagatccactgaaatcaacaatggtgaataaagctccgaagaagaaacatgtatcacctgaatctcttcttctctctattctcaatgat

SEQ ID NO: 66531 - DNA, 555 bp, Arabidopsis thaliana landsberg
  unsure (1)..(555): unsure at all n locations
ggcgcagctcccgtaccgagcgccgcacgttctcacgggtgatttcctccagtgtcgcgggggctttgtcgtgcccgtgcgcgcacaggactgccgggatgatgggctccagcatgcggctgatcgtgctggagaaacgcgccttctcgcgcaccatgtcggtcgccgccctgaccgcgccgcaagcctcgtggcccatcacgacgatgagcgggaccttaagcacgctgacggcgaattccaggctgcccatggtggccgtgccaagcgtgttgcccgcgttgcgcacgatgaacagctcgcccaggccgcgcccgaacaacagctccggcggcacgcgtgagtccgagcagctgacataggcggcgaaaggcgcttgaccggccgccagctgcaaccggctgtggcggtcgatgggcgcggtgaacgggcggtcgttgagaaaatcctggntgccttcgatcaggcgctgcagggcctggctgggtgtaagcatgtcgttcctctggaatggcggtcttgtcgaatagtcaatactgatagcggatcggataa

SEQ ID NO: 66532 - DNA, 1203 bp, Arabidopsis thaliana landsberg
agtttaaacggctcttaggatcgatatattcgaatggcggaccggggatcagcaatgacttcttacctcataaagtcatgcttactagtcctattaagctcatcaatggttttgtcgctgatccctctaacaacactggacagagcgagatgctacagcttgaaaacggtggttacatggatgaatctaaactcgaaaccagttctggtcattgccctgaatcagctcaccaatatgagaatggaaatggtcgatgtttctctaaggaatctgaatcttgtagcagttcacaagctagctcagaaggtggaaccttagaaatggagtcagagctcacagtttcatctcatagggaagaggaaaaagccgagatagaagtaaaagaaacatcaaagccaaatattttgcttgtggaagataataagatcaacatcatggttgcaaagtcgatgatgaagcagttaggccataccatggatattgctaataatggagttgaagccataaccgcgattaatagctctagctacgatctggtactcatggtatgtaaattttcttagctctaaggacttgtccttttcaaattcacttatatttgaaaaaggcttataattcatattgggttcacaggatgtgtgcatgccggtgctcgatggtttaaaagctacaagactgatccgttcgtatgaagaaactgggaactggaatgctgcaatagaagccggagtagatatatcgacatcggagaatgaacaagtttgtatgcgtcccacaaaccggctgcctataatcgcggtcagtacttctttttcgaatactaaacacagagatctaatgcataacttgagaaaactgatagtcagaatgcgttgtggaatgtgcagatgacggcaaatactttagcagagagttcagaagaatgttatgcaaatggtatggactcgtttatttcgaaacctgtaacgttgcaaaaactgagagagtgtttacaacagtatttgcactgagatttcagattttttgtgttttgtagattaagaaatggttgtgttgtatataaattgtgtaggaaaaaagttttggagagctactaagtagcttcctctctttagagatgtatagttcaataaataaataaaagcttctcttctttatttatttgtgggacatttctggcgagagatacaagaaacatttttg

SEQ ID NO: 66533 - DNA, 2039 bp, Arabidopsis thaliana landsberg
aattttttttttgagctatatatgcaatctccaaaattaaatttacagattttatgctattgtttttgatgttaatttggtataatatatttcccttaaaatagaccattacctcaacaaatatttattgtaactaatcctatatatatatatatatgcaatataatataatatcatattatttaatgtttatatataataaattaaaattccattgattttatgtttacatatttttataaaatttaatatagttaaacttaaattagtttatctatattcgtaactaataaaccaatgtcaatatttatatcagcaatgaagaattaatttattatttatttttgtaaccaaaaaaaaaaaacaataaataaggatcatgacctatcaagatgtggaaaatctttcaactgttacatatatgaatatatgatagacaaaccataaacatgtcaacatcaaataattaacgtcattagctgtttactatattaatcacacaattataaataaaggtaactaactaaagtatctaaaatggaaagaacattttgttgaccacataataaaaacaaaacaaaaaaatagagacaaaggggttttacgtcatttcaattcctgacgaaaaaaatctttaacacagaggggtaacactgtcatttggatatcggctcccactataaaaagcctatttgcttcgtgttttttggtcaccaaacccttcatcttcttcgtttcagctttcttttctctcatgtttctcgtcttcttctaaacttttgtgaccacccaaaaaaaaaacgtaacggaacaaaaaaaaaaatgctccgatcacggaattgtaagatctccgccgcgaacgaagccgttatttctaatcgtctttcaatttctaatctcaaagttttattcgtttttgaatcctcgccattgaataatttgattaatcgtttttccgataagcttcgtcgttgaacttatctccgatctctgcaaattttctctcaaatctctccgatcttcctaattgattagaaacttctccatcgtttgctcaattatttcggattttttctctgtttctttccaacaaaatcttcaatggataagaagaagaattcgtttccagataatcttcctgaaggtattgttgttttcttcctgaattttgtaagattatgcattcctatttcaaaatcgtgtgatagatttaagaattacttatcgtttgaaatcagatcttggtgaattgaacaatgttgcatggtagaggaatctgattctaattttttatgagatcttgatatttgtatagcggaagaattatggattctaatatgttttgaatctttgaatcaggcacaatctctgagcttatgcagaagcagaacaatgtgcagccttctgttattgtgattggtagtggtatatcaggtcttgctgctgctaggaatctctctgaagcatctttcaaggtaatgatacgtttaacttatttttgtgacatataactttgaggtgtgtttctctatatgatcatgatttatattgttggatgctgtttgtttgtgtaggtgactgttcttgaatcacgcgataggattggtggtcgtatccatacggattattcctttggttgtcctgttgatatgggagcttcatggtgagttttatcacctttgtttgttggtttcgtttatacttctttcaaatgttattatagtttggatgattagagaagtaggcaacagcggtagtctttgtttattggagattcctaagaagaatgaagatgagatgcaaatttcttaacttattgaaatgtggtgtgtgttacatggagtctctgatgagaatcccttagctcccattatacgccgtttaggactgactttataccgaactagcggggatgactccatcttggatgatcatgatctggagaggcaaccctctcttgcctttactgttctataattttgatcagaatgctatgggtctctgtgctataagagtgactgcgatggtgcggaagaagt

SEQ ID NO: 66534 - DNA, 454 bp, Arabidopsis thaliana landsberg
cagccaaactgggccgtcacagtctctggcccacctacgacctgccagcaccgggggcattttggtttaaaccccttctatgcccctgctgacggttacacgggtccttttctaaccccacccggggctattcctggcgatcagggacctcctcacatgtctgtttataaccactttgcacctgttggacagtatggagggttgtgtttgatgggaacaactcacataccatctggaaagcaaccagatcggaaacacaacccagacaactatttttctccggttggaggagatggagatgttaacaatcctaatgtggcttgcatgcaatgtgacatagtacctgcactatgtaagcaccttagtatgccaatgagcgatccatctcgtttccaggtgtaggatcccatcattatgattaccaataatgctaactagccgaagaagccatcga

SEQ ID NO: 66535 - DNA, 616 bp, Arabidopsis thaliana landsberg
attttatatacacatttacatgtataccagtgtgtgttttcgattttagatgaaaaagtatatggctgaagtgcacttgagagacaaagaaactgtgtgtcttgtcgatgattttatgtttttttcagaagtcatgcattaattgatccttttgttttcttcttccctcctggtccatttattctctattaactattttttgtttgctcattctttgaaaacgaacttaaacaatattttatttacattttacgttagaatagtcatgtgatttatctcttaaaattcacaagtagacaaaaaaaattagttacttcgtttcatataaggtcaatagaagtaaggtcaatagaagtaatacatacttaagttgtctgtttagtgtttgtatagttaaaaaggagtaaatttattacctacatacgactatttttttcaaactttttaatatcaaaacaagggacgaatattaatatagttcgtatgaatcctttatcgatgaatgtgacttaattatagaagataataatagttccaatttattaatattgtagctaatattctcaaataaaaataattgttgtagagacaaaaagagatcgtgtattttttaact

SEQ ID NO: 66536 - DNA, 353 bp, Arabidopsis thaliana landsberg
  unsure (1)..(353): unsure at all n locations
cttttttatccatnnntagctangatacctctgcttttaaagttgcactaatcnaataaggacacttttataccaacctggcttcaatatacccagtatcatggatagtacccgctttgnnnnnnnnnnnnnnnnnnnnnnnnnnnnnnnnnnnnnnnnnnnnnnnnnnnnnnnnnnnnnnnnnnnnnnnnnnnnnnnnnnnnnnnnnnnnnnnnnnnnnnnnnnnnnnnnnnnnnnnnnnnnnnnnnnnnnnnnnnnnnnnnnnnnnnnnnnnnnnnnnnnnnnnnnnnnnnnnnnnnnnnnnnnnnnnnnnnnnnnnnnnnnnnnnnnnnnnnnnnnnnnnnnnnnnnnnn

SEQ ID NO: 66537 - DNA, 710 bp, Arabidopsis thaliana landsberg
  unsure (1)..(710): unsure at all n locations
aatcctatagnctacttgattaaattaggttgttatttacatttggatttaaatttgtaacgaagttaactaaattaaagggggggaaatataagtaatattcatttatctttttcaggtgtaacgtgaatttgtaaattggaaaacacaaattataggggggcaagagggattttttaggaagggggggcattttaattccttaatactgttcaaagattttgaaaaattagtggtggcaactgcccccttctcatgtaaggtggatctacccctctctagcgtcattcggagtttcgagagcgtggatgatgggtatgtgtcctacaaatttaaatcatgcttacaaaaatctaaactaaaacagttttctagtactcaattaactattactattgtagatattaaaattgttgtttcatactctcatcttaatagctgctttttcaagtttttattatgatgtttaaaatatctatttgctattgccggcttttgaagttctaatcatgatcaaaagaaattaataattattattatggctttgtactttctaattgtaatcaagttaatgtttcaaactttctttctagggaaaaaaatagttaatctcttttatggtatcttaaataaaaataacacactattttaaattattatcggggtaagcatcttattttcaattgttgatacattcattggcttgacta

SEQ ID NO: 66538 - DNA, 470 bp, Arabidopsis thaliana landsberg
ggagttcgtcgttccagagccggtggataaattccgtcgtccgttcccctacgtagggttcggccgcggcctccccggcgcccggcgagtgctgcaagactccgtcagcgtcgaacaatatgtgccggatcggtgagttttccacgctgtcaggttatgcggtgtgttgagccaggcttattgggttctgtcagcggtgcgcgctgacgactctggtcggcgagccggacgtgacgatgtagacgatcgccgtggcgtcgcctgggttgtgcagccggtgcggggtctgggcgtcgaagtgcacagcgtcgccggcgtcgaggtcgaaggtctccagcccgatctccacccgcagtcgcccggcaccggccaacagccattcctcgccgccgtggcgtgcggcccggctggtcttcgcgccgccgggcagttccagccggatcgcctccatcatgttgaggccggcgatt

SEQ ID NO: 66539 - DNA, 213 bp, Arabidopsis thaliana landsberg
  unsure (1)..(213): unsure at all n locations
aacgagggccaacgggacagcccacaacacggnnccagcgacccacaacancaagggacccacngcggaggagacaagcggagagaccaaanggcacaagacgcagcaagaaacgggaacgacaacacacgggacccaacngaggcgacaaccccgacagagaaccccgcgagcagcaacaggaacaagaacgccgagccngagaggaagaag

SEQ ID NO: 66540 - DNA, 631 bp, Arabidopsis thaliana landsberg
caatccctagatccacaggtctaggtcaatccatgtagacacaatacgattatttgatgggtctatatatagtccatacgtactagcgtgattaaataggatcaacattggacccattcactatccagctgggtgcctaccccaatatcactacatcattatatatatgaaattaatttacatcaatagaagtatgaaaggcgttagttagctacttattacatatgttctcagcctatgcaaatgatttagcgaaaaataaattgtaaattaagttctttagaaataaatttagatgataaaaagagagagacacaactttgatagttatgatttaagatgagaattggacccatctcatttggtttacaaaaaaaaaaggacaaatctaataaaagaaaaagttattagataaagatttaaaggacaagtatgatgagtgagagagaacacctgtgtgcatgtctctcccaaggggaaaaaggagagtcctttctcttcttaccatgttgattatcatctcttcattgtccactttgtacgcaagctaaacccccttgtaatttgcttgcttttttcattgtcaacaatatttaaggattatgccaatttggatatggaagtaataaca

SEQ ID NO: 66541 - DNA, 585 bp, Arabidopsis thaliana landsberg
gagatctcgaaaaagagactatacatatatcaaatcaaagcagaagaaggattatactctatatctttgtgtgattgacttagagacctttaccttcgtcttcgtttaagattcggttacggaagtcactaaccatgcgaggcagtccctccctcagagatatctttggttcccagttcaactgttcctttgctttgcttatgtctggtttcctcttgtgaggatcgtctgctgtgtttggtttgaactctatggtcgcgcttgggtcgatcacctccttaaccacctgcacacaaagttcccatttcatacacggaattggcgtttctttatgagacatcttaaacgttgatgcagatttctaaggatgtatataacaaccatatcaaactgaatttcttcaaactaaaaccgacccaaactttctttagatgaaaagataaaaacaattcgaagtttggacagactcttcacaaaagctaaaccaaaccgagaactgaatgaccaggccttaactttaccatttgggtttcatatctcttttgcaggaagtaaaacgaagatggttaaagtaaagcaaacctc

SEQ ID NO: 66542 - DNA, 371 bp, Arabidopsis thaliana landsberg
attgttaatgcgcgcgccggagattagtatgcatggcccacctaagggcctgaagttcaacttttcaaccatctgtccaaggacacaaactctattaatggtagttaccaaatgacttgtttgcagcgtaggtctggcagttccgttgcggatagctgggaggggattgactacccttgggaccgcaacactaacaaaaggcttcaaactggattgaaataactagaggtccagtgatcgcaacttataacgaggggcacgattaacctgcttcttatgttttgccaaactataagcatccctgacgaattgctgagctgcacattcgctccaacggaggatcactggaagaagcttctagttacaccatt

SEQ ID NO: 66543 - DNA, 509 bp, Arabidopsis thaliana landsberg
aacgagtcgttgggaatgacgagcttttggggattctgcggcttttctagcattttgccgtcgagctcggataggtccggaaatcggatgagtggcgggtactcttcgaaatactcgcaaagtgtcaaatcaagttttgagacttttatgcttacatctgctccagatattttttctataacaaaaccgtgaacaccgccaactctcaggacataaactgcccatttcgagattgtcgcagtactaatagcaaatttaacttcagtatcactgagcttatttgggctggcactgatatccaccatcgacagaaaattcgactgtgatcccgagtataggatgactttttcatccgatttacgtaacaattcaacaggccagtcaatgcttaaaatcaaactgttcggtattttttctgcctcttctggaatgagtacattatcaattatcttggaaggatcgatgctcttgtctatgagcttctcaccaactttttcacaccatttgac

SEQ ID NO: 66544 - DNA, 568 bp, Arabidopsis thaliana landsberg
  unsure (1)..(568): unsure at all n locations
agcaaccttcatcgctttagctttttcctgagtgcttgagttacaaccagcaaaattaaaaacttnnnnnnnnnnnnnnnnnnnnnnnnnnnnnnnnnnnnnnnnnnnnnnnngaagaaaaggcaccttgcatagattgaccaatcaaagtcagcttgaagaatgtaaataaactgcaactttatctttttgcttcaaagattcctaatgcaaacacatattacctctttaacacgaacaacatgatctcccttgcaccttagcaaggtgacttggtatgtctcgccagcaattccagtttttggggaatacttgccttcaacaggtataatacaaggtttgaagtaagagagaaacttctcagtctcttgaccttgaacttcacggtattgcaccgttcaacatccaagtgcggcatctaactctaatgctttgtctgatgccaaaattgaatccaccttcatgtaaaatgggaataacgatctcaaaacaccagattttcataaccatcagataaaatgtacattagggatcatacaaacctcatttgcatcaattcctagccaat

SEQ ID NO: 66545 - DNA, 591 bp, Arabidopsis thaliana landsberg
  unsure (1)..(591): unsure at all n locations
tccgacagaatccgtaatggaatcggtcattttgtccagcgtagcaacggtgtcatcattatttgtaaaattcaatcctgcagcgggcgtccagttaaaggcatcggcatacgggctgttgacgacggcattcaattgcaggggctggccggctgccacggccgtatcattgccggcaaaaacatgaataggaggagtgactgctatatgaaaggtatccgtcagggcattaggacaacctgcattcctgaccgtgagcacataatcagtagtatctttaggtttagccgtagcttcaatttgtacaggcaccgaattgattatgccggtccccggatttaccaggttatctacaggcgtccatacataatttgtccccacgtcgatattggcagtcaacctgacagagtcgccattgcagatagaggaagtaacagggctgatggcagcgcggngggcaggcgtattgataaaagtagtgacggctacggtgctggtatctatggggcaaaccccgtttttaacaagcagcctgtaataggtcgttttattgatggtgcttacatcgtangatgaatctttgtttaccgg

SEQ ID NO: 66546 - DNA, 1674 bp, Arabidopsis thaliana landsberg
  unsure (1)..(1674): unsure at all n locations
tttgaaaaagttacatagtaaattcgaaatgccaagaagagagaacagaaaaagaaagccaaccttgctcgtctgttgttggtggtctcagccaattgatgtgtcctgcatgcaaagtttaaccgatgaagacaagctactatatgcatacagtttcatgatatgatatataagaatttgacactgtggaataagtgaataagctgaagaggttgttaccacttaccatggtgatgaggattggctgataccgagcccattgcaagtgagtatcattcccttaaatctggcgagatattcctgcgttgaagaatgagttgggatatctcaaatagtcagtcacaacctagatcccatgttgttgttcaaatgtaaagcaacttggtttgtaaatctcaaaagaagtgttacatacccgtaaagtgtatttgtggatctcatatataccagtgaaatcatactcaaaacgtttagcagggtccatcagcactgccaaaaagaaagaagaagctaaatcacataacgaaaacaattgattcgagccattgcttgagggagaaagagagacagagagcattgatctaacatatttgcaagtgtcgatggaaaacataagagatcctcataatcaaacagaacttcgtattaaaagtcattcagtaaaggatctagagatgagaaataagtaaacagagaggcaaagatgaagagggaacctaaaattatcagaggattgaaaccatatagaggtgtatcaatacttaagcagagctaatgaactataaggctgaaggaactaaatggaaaagtagaaggctttaagtgactcattgttaaacttagtttcttttcttcatgaattattatttctcgacaaatgaagaaaatcaaatatcatgtcagtaacatggtattgatgttccgataaaaacagacaatgcaaaagaaagacttaccattataagcttcattaatctcttgaaatttttctgtagctgcactatcgcctttgtgcttatcaggatgccacttctgtagatggaaaccacaaattaaattctcagtaacaagatttaatccaaagcaacaccagatttttaatggagaagggtcttttgagttcaaataccaatgcaagcttccgataattgagtctgatcaattcctcagttgcgtcgtaatcaacttctagaatcttatagtaatccttcaaacaaacaaacaaaaacttacaaatcaaaaatcaaatgggcatttgtgaaaatgtaaagagaacatgcaaacataatcattttccagaatttttcaagtaaccctttcttctactagagaatccataagagtaatactatacgaaactgtatcaaatcaccatattccagtcaaacaaaaaccaggcattatctaataaaccaaaattcaatggagctcacgcatttttccaggcaaaattgaaacgaaagaccggtgattttagttaccttagggggagacttatcattgtcttccatctgaaacagacacaaacagaggaagaatctcctcacacatcatctgatagagaccaaacagaaacccaaaaccctaaattgaaaggagctgattctttttccgttcagcaacgaaatcaaaatccaaacttttagagaaaaaatgaaaactntgaatcgaatc

SEQ ID NO: 66547 - DNA, 581 bp, Arabidopsis thaliana landsberg
tctgcagttagcgttttcaatcaagacggacaatctgttaatgggctaagaaaagcccatttgtctaaattcttttattaaaacgacgacaaaagattttatcgtttgtgtttattatatcttcgtgaagatgtgccgcacggaaaagaaataaaccctaatagcctatgaatgatgcgagagagtatgaaagggaaagattgatcgtgaaagggaagatgaaaggagagaagaagaacccggagatggaggccgaaacgtcgctgactcgctgagaagaagagatcatcaccaccgtgaaggtgaagtattgagagagggagatctggtttacgacactaaggagaggtagagatgacgaagaagaaaacgcagccaagataaagtgaacaggagagaggtcatcggaacctcaccgaagtaccaccacagccaccggaggtcatcccttgcggagcaaccgaagctcagaacagatcgtcaaaggaagacaggaggaatgcgggctattttgaatgtgtgtttggggagagcgatttctcgttaaaatagtggaacttaaatctagagtgaggcttttc

SEQ ID NO: 66548 - DNA, 544 bp, Arabidopsis thaliana landsberg
cgatccggctcgcagcctcccgacgcgtcccggcagcgtccacggtaacgagcgagggctcgcccagcgcaatgcgttgcgcgatcagcaggcgatcggcggtgacgtcgtcgccgacgtgaaagcatccttcggggcgggcacgggcaaagtgtgccgcctggccacgggtgacctcgtggtcggtcccgacaagcgccaagagcggagcgggcagcaccggcttgaggcgcggcggaacgccggcccgccttgcgagggcagccgcgagcccgccggttcctatccagagagttttgcctcccgcccccagcgcggactcgacgatgcgatccagatccgcgtcgtctcgcgcgtcgtagaccgtgaccgggtgcgccggcgcatcaccaggagcgggcaacgcccgttcgccgccacgcccccagacccgcgacgagatccggacctgccatctccgggctggaccggtcgagccgccactgcctgccggcaagcgtcacgcgcttttgaaacggaaaggcaggcgccacgatcaggcgat

SEQ ID NO: 66549 - DNA, 1447 bp, Arabidopsis thaliana landsberg
actaacgccagacacttgagaatgaaaaatccaagaggttgacaactgttaatttgactttattactctagtttcatgctttttcaaaaattataaccatatataaaatcaaagtacgtagaacaacaaactaacctaaaagaaatttcctcaccagtataaatatagggttcctacaaaattttgcagctattaatgattttgtttaatctttatgtcttttcagatatgtagacagttaatccaatgcgaccatgaccccgttcatatccttatccatttagcattttttttccttcaacttctatgtttgttaatttgttttatatacaaaacttcacagaaccccacaaacagcaaactaaaccaataaactaatcccatttgtggtttaccgattcaaatcaaccatattctttaattcaactgataatatcataatgttcccaagttcattatagtggtgatcgtatttcaactcttaatccaaacatattcaaagggaatgtcaactctcaatgatctatatataaaaacggtagatatgttaatagattttctatctttgttaacttttgagagccatttttgtgtgtttttatagatcaaagagatgggtttcaataatccttcattaaacacaatcatcctttggttcgcctccgtaacgtctctcgtgactatttcagtcatcttcgcccttctcatcatatgtttactcaaacgccgtaggtttgatgtatcaccggaaaccgagaacgagaaccaaggaagaagagagccacggtgccaagggcttagcgcttccgtgattgctgcctttcccaccttttcttacaaaccggataataatgatcctgagagcaacaatcaggagatcgagtgtccggtttgcttaggattaatccccaagaatgttgtaattaaggttttaccaaattgtatgcacatgtttgatgaggaatgtatcggtaagtggcttgaatcacacgcaacttgtcctgtgtgtcgtagattggctgagccaatgactagcaatggagataaagtcttagaaagaatagtatagtgattttttatatatgtcaaattatatgatttttttctttaattttgctaattattgtaatattttttcttattgatgtgaaatgtacaaaggatataacttttgtttttttaaggatatataacttaaaatgcagttatgtcattttacttgaattgagatgctggttatgaaaagagaaagtcgactttttatttttagatcgagaagttatgcatggttcactgcatccttccgtttctagtccaactttcttagacggaagactagaacacactagttgtcttcgcaagtatatggtcatattgagttttgaatatcaatcaagtttgttattaaacaatgtttggcgttaattcctaatgcagtgttcatcat

SEQ ID NO: 66550 - DNA, 1233 bp, Arabidopsis thaliana landsberg
ccacatctttccataaagcctagctggaaatgatttcatagctaaattttgttctgctttattggatttaagtattgaaaagacaaggtagattcgaagcattttgcccctaccgtgttgccgggagatgttgcatataggcgtcctgatttttcgatctttgcaacttcgttatccacagtggtgtagtcaacagaaacattcatggtcgggcctccttcaatagtgagctataagaagaaaacaaaaatatgctgatcagagaagaacaatcgttatgtgaactagagagtgatgcgagattaaaagagaaagatatttatttctatcataccacataggaagcaccaggaacaagaaatattccttgtgggtgaagtcttggtggggaataaacttcgactttaatagtttggcttagcactttacctcctgattgttgtcttgcgctgacctattaaaatcaaatttgcttcagatctacctaaatgtcctagctctagagcaaaataataacagcaacgaaaaagtcaagaagtaaactcacatatagggttgtgattcccagtcgtctagcagcaattttaaaagaggaagttgccacgtgttcaccaacagaaagtgaatcctcatcaacagtgacatgcttcacgagatcatcctcaatatgcaccataatgtccataagtgagtactgcattgatcgaaagttcagaaatcaagaacttgtatgatcagctaataagaaaattagtaattaagatactttgtggtacattctattgatcatttttatattaaaaaatccgatatattacattggtgtaggctgtaacttgatagacaacgaataatttcaaaacatgttagaccaagaaaaacaagaacatgtatctacaagaaatccgtcttaaacctgggaagaatcaaaggtcattccatcgtcaatgccagtcaagagatcaatggagtgtgtacttccttcctgccacattcaaattaggcatgagaataccacactagagaccacagaaggaaatgtggaaccaaaaacacacggggagggaactatacaatactaaagaaagggataagcctgctagacataccattatacttatctcatccccagatgcaatctttatccagtccacatctgcaacttttatctgcataataagaattgcatgaaagattagattagattagaatcaagagtgacaacccacacac

SEQ ID NO: 66551 - DNA, 589 bp, Arabidopsis thaliana landsberg
ccgcttgggcgtccaaaccaacataagattgaaagctagttggcgatccaaccagtgaaccaatttgctatggtcactaaactcccagctaatacctttatatccattggaaatatctgccaagaaagtaattaacataaataataataattaacaaatgatcatcggtatgactataatccaaaaacatctgtaaaatagtatgtttgctcatatgtgtatacctcagacattataatccatggtaacgctcccattccaattgcgaacatcatcgtaaacgactgtttgaatgataaattgttatagctagtcaaaattttgaaaatttaacaataatcaatatatatatatatatatatatatatatatattgtgagttttgactttcatattatttttgatcaagtatgattgcctaaaaaaaatggctgtctaatttggtttagtgtacttgagatattaaagaaaaacagaataacacatttgaagtttgtgtaaatatatagtttgatagagtttttagattataaattagagtgaaattcaaatagtgaaaaacttaccaatattccaatgaaacagaaaa

SEQ ID NO: 66552 - DNA, 1733 bp, Arabidopsis thaliana landsberg
  unsure (1)..(1733): unsure at all n locations
ccctatgagcgataagtttatgagttttatctaacatagtgattgtttaacgtatcaatggcaccccatactggttgcatatgttcgtggtgttgttgacggtaggcgttctatgttggagtggcttaaagatgttgacattgtctatctgcctacgaactggggcaaaaaacaataggttgccttagccattgatattcccaaaggtcatattgacatccttgacccattccaagacttgacttcgtctagaaaagttgtctcctacatgacgcatattgctcaaatgttgcctgctttacttcgctctgtttgtgtcgatgttccctctggctggcttgctagtggcttttcgttcttaagaattcctagcctggctcagaatctacgcggtggtgattgtggcctcctggctatcaaatttattgaactccaatctcatcagctttcgacaccgctgtgcaaactcaccgttccacaggttaacaatcttagacttcaatatgccattgtcctttattcaacttatgtatctcccatataagagattatttgtttgacattcttaaacatttgcgcatgcacctcacttacattatgttttcacgaacttgttcattacaatttacttatgtagttataactttaccttgcgtgtgtccctatattctctataatgatgtttaagcaaaacccctcttcttattcaacctttattcctcgacatttatttttcatatttgctcatccacttttgcatttactttgattacaaccaatcaaccccccccccccccttttcattgttttgcctatttaagtttcaagggcttcaacaaattgttattctttactaatggaaactcttgacatcaacactgctcttgatatagtctcacgtgttggtgagaattcctttcaatatctcggtggtatgcttatggcttccaagttctatcactctcttgcatcccacccttcctaagatatgttggtctgcagcccttcattacaaatgtcgagcttataatcgatggttctctgtaccggtcttttttcctgaaatgtttacaagctaacaatccaactgctgtttaccttgaaagcattagactggccgtaaaaattggtcgtgcagaagacggtctccatctattatcctccattggacactatccccctcaagcttcttttgtccgagccttgctacaggtttgtcttggtttttacccggacgcactacacaccattgacagctttgtgacttttactggttcattttgtgaatcagatgctattcgcagcactgttttctggcacattcttcaaattaggccggtgaaaattcggcctcatagtgacacttaggagatatgatgacattcctgcatgtcttggtactgggtgtggcattgatagccattgctgcctgtgtttcctttattggtttaacgttatgttcatgttgctctgttagttgtttggttaacgaccttacgcacttgttaaccatgtttaaatccttgcttcaactgttgtgacatttactccagcttcttattgtcttggcacctcacatctgattttaattggcttcactgactatcatcaacattttgtgatgttacactgacctttcacttaaatttatacgcaaccagacaatacacaatgacataacncacttgctcgccctatttcacctgcatcctttaatgctactgtgtttactt

SEQ ID NO: 66553 - DNA, 1117 bp, Arabidopsis thaliana landsberg
aatccgctcttctctcatctgtgtacaatatttgaatatttcatagcatcagatcagtccagagctgctacactgtttttcttttctatctttttttggaaatttacttttatgttctatacttgaatgctatctctttgccaaaaaaaaaaaaaaagaatgctatctaacttttctttttaataaaattttaaaatacatggcgctgtctcagtatatgtttttcggaaactatttattaatattcttcgtaaatttagtcaggtcacatgtttgaaaagggaaataatatccgataacactgcaaagaatacaatattttctgctaaaacataccgtgtactgtgtctatttcagacgtcatacaattttgaggaaaagaaaatgaggccaaatctgtcaacaagacatgctaagatctctactaattcattcaggtggtactaaaatccaacttgttcaccccatttgcttcaaatcacggaatcagcaagaagttccggtacactgacaagttcttcccatggcagcaattgtgataaaggcgaattttgtagagcaaccaactcttccctattgtacttcaccctctgatctgtacccacatatcacacatttaaactttgagcccttcttcttccttatcaagaattgttataataaagcacgttagtgagaaaagggcgtacctaaaaaactcctgggaacagcaacagaactctccggcctctggttgttcctccttgctacctttccaaaactctgtggagtagatgaccgaggaagaagttgattctggtcgagagaagaagagtcagcatgctcatgcctcaccttgatgtgagggtaccttttgcagagaccagcaatatcatctttggttaaaagccaacaaccttggaggtcgagtgttcttagcctgttaggtggtctaaacttctcaagaccattgctggtcaaaactccatctcggactccgagactgactaggtttggaagagaggacagatggtggagtgtggaatctgtgagggatgtgcttgttagggacaaatgtgttaatccagtaaggctacttagaccggaaagagctttgtcacccaggtacggatgttct

SEQ ID NO: 66554 - DNA, 1121 bp, Arabidopsis thaliana landsberg
  unsure (1)..(1121): unsure at all n locations
tagagattgtagtgctgctagtgacttctctttttcttcttgtggagatattagatagtataatcctgaaaaaaatagagtcgtagggttatgatagggttaataatcactcgttagatcttagaaggctcatacatacctaggnnnnnnnnnnnnnnnnngtcaagggctttaatgcaaggcatcgtggtgctgataagcaagatggaaagatcgtcgacaaatgtctgggacatagataatgtctcaagttgtggcacatgtccagcaagattcccgaccccagaaggagtgatttgtgtatccgagacattaagattctttagattctcaccaacacatgctacaaacccaacagaatcatccccgaaagctgtggagctcagatcaagatgttctaggttaaacatagtttctaagaagctgaagtttttgagggaagtcttggaaacgtctaagtaggttatacagcttttgttggtaaaggacaaggactctgtctcggcactgaaattagctcccgataaaactagctttttcaaggaagctaatgagctatgagtttttggttcggagacaatggtgcacgtgttcatgtgtaagcattcaaggtgcggaatgtttggagtctgtgtgatgcttgtccacgagaggtttaggaagctcaagttagaaaatttgagaatactgacagctccttggttggttacgttgcttccccagatgtcaaggtactctagctttgtcagtgcctgagcagcaataaagaaaatgggggtcagaaaaactaaaaaaagattgatcgtctacatattaaatgttattacaaataggcatgtttttcagtgacaaaaataaaataaaaataggcatgtttttaataagtgaattcggacatacaaacatcttcacgcaagaaactatattgaacatacacttgaacttcatttgtatggattaatgggtttaataaccaggaaatgatatttgaattttagaatcctgaagactaaatagtttctgtgcacattatactctatactcaacatagtagtagtacctagaactttacaattttagcagagctctctaacaatttaactagatagatagatgataac

SEQ ID NO: 66555 - DNA, 575 bp, Arabidopsis thaliana landsberg
cagatcaactctgacccactcgcgttcgagaaacgtatgataacgactaatttaaaatgcatacattttattatctttatattcacatccatacatatataaatctctcatccccactagtgttctccattagtaataaacggtcaaagaatgggactttcattgagagtgagacgtcgtggaggaagtgttagcaagaaagagatcattccggtgacaagttgctcggaggaagtggagataaccataccatcgcagtttcaatgtccgatatcttacgagctaatgaaggatccggtgattattgcctcggggatcacttacgaccgcgaaaacatcgagaagtggttcgagtccgggtaccaaacttgtcccgttacaaacacggttttgacaagtttggaacagattccgaaccatacgattcgaaggatgattcaaggttggtgcgggtcgtcactaggcggggggattgaacgaatcccgacgccacgtgtaccggttacgagtcatcaagtctccgagatttgtgagaggttattcgcttgtacgcggcgtggagactacgccgcgtg

SEQ ID NO: 66556 - DNA, 560 bp, Arabidopsis thaliana landsberg
tctgagctatctgaaccaagaaaggtttagttagattaagccatcgcacaatttctcatggacggtatatgcaacaggaatatacaactaactagaagacaagttaacaatgtgcataccttttgcactagatcgctgatcactagtcccctatagaaagataatatcaaaatcaataaaaacatcccactaacacaggatctgctttacttggacttaaaaaaagtgaagtacctcgccatatattttccgagcagcctccaactgagacatttccacatccaaagcgctaaccaattccagaacctctggggtactaacaaagcgtacaaacctataaaccagcaggcacaagagaaattagagtatttaccaggacctatgcttcacaagactcaaaaaccccttgttcaagatagagtataacctttcgagggtccctttcgtaaaccaggttccagcatttttgttgctttcaacttctagcctgatagactgaacttcccgggaaacctgttcttctgcaactttcaaatgagcaacaaatggtttcaccagtc

SEQ ID NO: 66557 - DNA, 572 bp, Arabidopsis thaliana landsberg
agtgatatttgattgagactactaatacacaacaataatattttataactttgcttagcttattacttcttaaaaaaaagaaagcaaactctaaactcgattacctaccctagtcacacaattaacttgataatctcaaaatttccaaggcttgttacacatagaaaaatacatgggatttttttaatatctctaactaagctctagatatcgggtacagaaatgacgagagatcacataaacattgaaaaaaaaacttaaatgtacctggaaattgttagggtaaagaaccaaattcaaaacccaaaatctttatcaagatagtagaaaacaaaacagaacacaagccccaaagtgaaactcttctcttccctaggataaaccgataaacccaaaaaccctccaaattgtaacgcttggatgtagttcacaaacaagcttcaaaccttatttatatataagaaaaaaaaatagtccaaaaccataaggaaaaaataataataatggaaattctaattggactaggattaagacttctgtaaacaaaatcaacggtgggagtttttctaact

SEQ ID NO: 66558 - DNA, 669 bp, Arabidopsis thaliana landsberg
cacggaacagctcagtcacagaacgagatcgaccagtgaacacacatctgttcctgattctcgcaaaggcactgtttctcggcaatttcgagagcttataacgattcttgtctcgcatttcgctgggaagatctggatctttgcaaaacgctttgtatagctttcttctcagttcaaatctagccgcgagcaatctacgtctgtgatctgcactgtttcgcttcacgccttgctctgtaccactatgctttggtcccgatttcataagcgttgtcgtgaaatgtctagcttgaatttgaccgagattgttcgcatgcttgaccaccgatcgggataacatccccgacgtagaatacgacgattgagtgagagaacgttggcaataggaagttaccttgagcaggactcttcggagactcgccattgattccgagaaacgccgccgcggaaatggttttagggctctctgtgagaagaaagcaaatttcagattcacaatcacttctactcgagacaatgattgggcctgattccaattctaatcggcccactaagagctcgtctactttaataagacttttattcttcttaaacctatagtgcccgtgtgccaatatcattctgattcatgggtaatattagcaactaactatagaattgaaaagaatc

SEQ ID NO: 66559 - DNA, 366 bp, Arabidopsis thaliana landsberg
accttgggaataaatttgttcatctgtacaaaaggaaccaaccctacaaataccgaagacttctgaactcaagaaacttcagatgctcgggattaatctgaaaagtatccctccaacacagtgtataaaaaggattcgaccttgtcacttgctgatgagagcacctattcaggataaataccactaccagttatggctaaaagaatccagactggaacaaactactctggggggccacaatcaaacaaagaaacgtacgagagtacaagcacttgaagccatagaacatttggcgtaacatagattattaatgtataggaggtaagagcattccaagggccgttacaaatctggtgaagctgttgc

SEQ ID NO: 66560 - DNA, 740 bp, Arabidopsis thaliana landsberg
agatgcggcgaacgttgttgttccaaaggcatagtccactaacgcccaatgtgctagtaaagggtaaatgtgaaacaacgacaatcgttcctcttacagaatcgtgtcaataacaacaaatctttgacaaatatctttgctgttttaacaggatgtgtgccaatcaatttttgacccgtgattctgatttattgattacttgcgttcatggaatccttcgagacgtgtttggactttggagtactcttaatgggaagaatttaatgcttgtttgcttagtttgttgtatgtaccatgggaaaatactctgatgaaaaaaatatttaatttgcaggtctactctacaaatctagttgatgaccgatatctgaaatattatgtgctgacacaattacaaaaaggagttactatgtaagttagctagcactctatcacttaaaccattcacaaagaactttgttcgatccttgatatatctttgtctatgatatgcttcagaataacgttaggttatgagctaaatgatcacttgccgatctttttagtataattatggaaaacagctatccatcttttttttacggtcttgcctatcttaaggtaattttttaccaatataggaatttcaactcttcatttcttaagagttcattatttactgcatattggtggctgaatgcatagtaatatttgatttcagaatgaggcttctagatctaggtcaccaaacagaagagact

SEQ ID NO: 66561 - DNA, 1752 bp, Arabidopsis thaliana landsberg
gaaaatttctgcaggtaccgacaattatccacctgagcagcttgtggatatagttgcaaggattttcttcatggtacctccatggacacgtgtatatagagttcagcgtgatattcctatgcctctggttacgtcaggggtagaaaaaggaaatcttcgtgaactggctctagccagaatggatgacttgggccttaaatgccgtgatgtccgtactcgtgaagctggaattcaggtcgcgatgtcaattgttgtttcttcctttgttttgttgttgtaaatactgaatttcctaacaaaagctagcttgtatggtctgagtacaggacattcatcataaaattaagccagaacaagtagagcttgtgcgtcgtgattacactgccaatgaaggttgggagacgttcctttcttatgaagatacacgccaggtacaagcttcatatctctaatcctcgcctctcacagcatagtccctaagactttattgaatgaattattatttggtttactaagatcacatacgtcttgtcactcattagatacattatgtcatgtttatcaaatatagatgttggtattctatttaaaaggaaaactgtcaagtttaggtaagacgctgagagcgttatcttttaacatatcagcatctgttcttggtcttttccgaatttctaagcctattggactaacagagtaagcatgtgcctttgtgtatcgttggatacagtgagtttgtaattttgatcaaatctccagtaagatctagtgtcatatatcatgtgatcagttttaaatccataatttcatttgcatgcactaaggcaagagtttcatgagaaacttgaaaagcttatcttctcaacccttaaacctgattggttactttggaatctgttaaggctctgaaattttcttaaacatttatctttgtggatgcaggacattcttgttggattgctacgtttgcgaaaatgcgggaagaatgtaacgtgtccagaactcatgggaaagtgttctgttgtccgtgagcttcatgtatacggaacagctgtaccagttcatggtcgagatgctgataagttgcaacatcaggtaccacccgagattcaacttgaaattgacacttaaattaaggacttgtgattctgattatcttattatttcctgtatcgaatttgcagggctatggtacacttctgatggaagaagcagagaggattgctagaagagaacatcgatctaacaaaatcggtgtgatttctggtgtaggaaccagacattactacagaaagttgggttatgaattggaaggtccttacatggtgaagcatcttctttgaaattatgtttacttaaaaaccaaattcgtaaaatctttatgttgaactagtgagattaatcccttgtggtatcattttgctctttaaattttcatagtcaaaaagttgagaaaacggctaattccttcacgaactatggcgattttgtaagattaatctgtaatgcgtacacatgttgctaagttttacagaattttgcatccaaaaacgcctgaactaaaatcatcattcatcacttccacttgtaagcaaaagatgttcacatcatctaaaataaaccttcgaaaactacaaattaaccgaagattgacttggctcttcgttgtagtctagatccatgaactcaaatccttcatctgatgtgttccgattcttcggtcttatatactccaccccaacattaccacac

SEQ ID NO: 66562 - DNA, 595 bp, Arabidopsis thaliana landsberg
ataatgacttcatcaatgataatatataacacaaactaggaagactaaaaaaaaatggaagattaatgttttggtcactacttagtagttcttaacttgttaattgctaagatttttaatatctacaatgtatatatagattttcaaatgtcaatagtcacctaaacaaatccaaaatacttcttagaactataaattcatatgatgagaatcataatctttttgttcagaactagggtgatatgatttgtcggaatttaatactcaccatgtctcattttgttagatattttgggtgttttgtttatttaaatttattagatgttttgcaagtttgtatacaagatataaatgaatttaatttattatattttacagtattttctatgattggttgagttgttttaaattaaaacatgtgggtctccttcttaccaattaccaccattataaaaacatctgttgaatttaccaattaagaaaaagacaactttcggtgactttggctctctgaggttaatgggatcacgatatcacatcatggtacatctatatgtgctcccatgaataaccccgacgacttttatcattcgat

SEQ ID NO: 66563 - DNA, 1663 bp, Arabidopsis thaliana landsberg
gaccgctcctagatactcactagcaagacttagtttgagtaccaaacttccttggtatccttggtatgtcaagaaacaggtatgtgtaaagaaaacccgaatcttgtttggttatctctggtttgacaaagaaatcgatttgaaccgaaattgtggatttaggttggaggatggacggaagtgtatgaaggactaacgttcgtgacggttagaggagcaggtcacgaggtgccattgttcaagccacgtgctgcttttgagctttttaagtatttcttgaggggcaagccacttccaaaggcttaaaaaaattgaagtcaagagagagattgtaacatttgaaatcatgcccgagaaaaatgaaaatgtaaagtttgggttatgagatggtatttaattaaatctagtctattaatgacaccaagtatttaattatttagcatatggttgttttttacgtttactttctcctaaaggcattcataaatttgtttcccatgttcacatgataatatgcagtaaccgataatacaggtaactaccgaaacttcgtgacccttgttggttaagtggaaatggatcattcacgccgacaaaaaccatgagtgtttccgcggcaatgttccagttaccaccttcacggtgctctccacccttggtaaaccctgaaactgttcccaaacgttcgtgataaatactccaaaaatgggtggtcgggtttctgattgcgatggcatgggttgaaaaaccttacggtggagatggattgtgtagctttagtgggaaaaacaagacgattcttaaacgtgcaatggagggttgctgacagggttgcaccattctcttggactgttagtgccattctttcaagaatgcaaggaacgaagcaaaagagagaaaaaccgataaagacagaaaatattgggacttctggtgttattatggttaatattgtttatttattgatttacaattaactaagctcatttgctctctattgatacacaagtcaaacttgggatcaaatttgtcttgattcttaaagaaaaacgacaaaagatcaattagaattagttgtcgagtcatcccgtcttaatcttgtaaatatccctataaatgaatgattttttttggtacatagacaataactcaaaatacatatggataataactcaaataaaagaatgggaaggccacatgttgtggtcataccttaccctgcacaaggtcatgttcttcctctaataagtttctcacgttaccttacgaaacaaggaatccaaattacattcataaacaccgagtttaaccatacccgcatcatcaatgccttacccagttcacctcatgaagattatgttggggatgggatcaatcttgtttcaatccctgacggtttagaagattcaccagaagagaggaacattccagggaagttgtcggagtctgttttgcgttttatgcctaaaaaagtagaggaattgatcgagaggatgatggcagaaactagcggtggtacgatcattagctgcgttgtggcggatcagagcttgggatgggcaatcgaagttgcagctaagtttgggatcagacgcgccgagttttgtcctgctgcagctgcgtctatggttcttggatttagtattcggaaacttgtcgatga

SEQ ID NO: 66564 - DNA, 622 bp, Arabidopsis thaliana landsberg
tgtcagggtcaaggcctggctcttcctggtgatcaggaagctcacgaagctcacgcatcttttcagtctcaatgtgtctgcagggcaggattctgtcataacctgtcagaaatggccttatttcttgcctcatcccttggccctgaatgggtcatgggtttggcttgcactttggactcccttggaagtccagaagagaaaaacaacaccaggcaaatgcctggaaaaggtcatccattcaactgtaagccaaaggctgagcaaacccacaaacaaatccttacaggctttgggagccagggcaagaagacctaatagaaccactttcagtaatcttcatagtatggctctaggccagagccatgcctgccgccaaggaacctgagccattctttcatccttccaaagtcttcccatttaggaggatagtgtgccatgttgtctaaaatctctccctccttcccccttttacttccctaccatctctatcctccccattttacttggtgttggtatcctgaagactcccctgcttatttttggaactttgctacatcagaagccaaagaaagttgcttatatggatggatagaatatatgcatctagtcatttgtcaactga

SEQ ID NO: 66565 - DNA, 524 bp, Arabidopsis thaliana landsberg
  unsure (1)..(524): unsure at all n locations
atgctcgagccttgtgctctaaagtaacctcattttttttttacatttacaatttcatgtaaaatattgattatagttttatgttacatggttgtgtaaactcctcttctctaaaaataatgtatgtcttcatctccgctatcatcaacaagcttcgtcggattccttcaatagcttcggtctccttcatcttaaagcaacacaactctcatcgtgagactagtataagcacaaacctcgatcactttatggcatatggaagcaaaggaatgttcgtctccaaacctaaaatcgcggcctctggcttcgctcattgaagaaatcactcgtatcatctgagtacgtgtaggacccctcttcgagctcaatctcttcacaccaatagagaaacgtattgtccacttgttttctcgcctctttctccatcgcacgtcaccgacacttgtgactcctatttaaagtctcaactatctcttttctaaacatgcatatgttctatgctgngtttaatcttttgctccttt

SEQ ID NO: 66566 - DNA, 1081 bp, Arabidopsis thaliana landsberg
ttcggatatatgctttccccagcagtacctggaaagtggaagaaatatacaatttctgttttatgataatgaatttgctaatgttgactgcggaacctattgagcactatctaatgatccaataacctccacaggaatctaatgaatgcagtcccatgcaccaaatagctaatctcagttaaatggtattttcagacgactatgattacatgaatgaaatatagtttctcaagcacagttaataagctacaaactgtgcgccatagatagaagatcagaaaaggcgggaatcaataaatttaactgatggctgtatttgatgtatttcaggagctgaagaataagtgtacataccatttcgattcacaaagtcaccggcctgaaaaaaggtcaaaaaaagattgttagactaggagggacattgaataggttggtacataaactgtactctttgcatgagaaggcctaacgtttgagcataaacaactagtagtacaaccttaaaactatatcacatgaaaagcaggtgttgcgatcagacctgtatcctacagcatagagaacagcaacgactaaaaagaccaaaatccaaccaatgtcgataattaaaaaaaaaaaaaaagaaaaaaaaaaccaaaagtataagaatgaaacgtcatatcaataaatgaaagatgcagatagaaacctgtgctgaggaacctttcattattctatggaaaaaggatcctttataatgcaaaggttttccgcttctgggtccgatgcctttctcccctatatagattttataaggggaaataagtgttaaagacaaggaaaaccaacagtcaaattaataaacagcaagaaagcaacaagcttagccggacagaaaacaaacctgtgcatagtgcacggaaattctctgatgttttgggagcgacttcagggaaaagctaaagaaacaatgttaagatttttaacactttcgctagatcaggaaaaatacaagaaagtgaacattaacatagccaaacactattgtacctcaaaaaccatagtctcagctggatctccatcaattgatacatccataaaa

SEQ ID NO: 66567 - DNA, 362 bp, Arabidopsis thaliana landsberg
  unsure (1)..(362): unsure at all n locations
tggcaggacgtanagaccgaagagcttatcccgtactacnaaactcanggctaggaagcgtggttcaacgcccgtgcggacagggcacttaaggaaagggccgaacgtgactgcgactgagaaccacgtcatctacgctgcatggccggagggttgacatgttctgggccggattcgttatcgggttcgtcgtgtccgcactcgtctgcacgctgggactagcgtactacctagggaagacgtggggtcaatgaataaggcactctattacgtacgcggcaacggagaagacctagtgcaccttcgcagttcaccatggggactaagcggagatatcgtactggtcaagtcacgtatcacgc

SEQ ID NO: 66568 - DNA, 490 bp, Arabidopsis thaliana landsberg
gaacgacacaatgcggttcgggaagacgccggttatgtgtatgaccgcaacagagagacgccccagactgcgtcgattctgaaagaaattcaagatcccggataactcgcgcgaagagagatcaaggattcgaagacggctcagactagaaaagtgatccggaatctgaccggaaagcctattggtcccaggatcaagaacttcaagttgcttacagcttaagatatccaccggaacagtgttgaccaactggttattagacaaagtaagttccttgagctgcgacaacattccgatgaccggagagatagaccccgtcaagctcctggatcggtagacgagcctcgggacacggagaacgtattctccggtggtggcagagcgccgcctctagcagaaaacccctcggcgaccgcaagggttgacatcactggccgaagaacggtgactggagacttcgagctctgtttcgatgacctgaagagctttg

SEQ ID NO: 66569 - DNA, 819 bp, Arabidopsis thaliana landsberg
gcacaacccaatgccctcaaaagaaagcgtttatttcccaaaatcatatcactctcttccccattagcattagagttaagagaagcatatgtttaagtctcgtcctcaatacatatcaacgcaactttaggcccaaaggtcatctttcaattagtgcaacttctttttttccttgctctattctgtttttgaatgtacgtttttcatattacggtctatccgagaatagtcgctcacgttcttccacatgccctcaaaccatgacctcactatcttctttttcacatgataattttatgagatattacctttctctaatgaataaactttattctaattcacttttgattcttttccttaaaccaagtgcgatcggtttctgaattattttattggaaatttggcaaagatagagctttgttttgggcttgtttccatatgatctctagtgttcttgggctccatccaagattaggcaagtccagtctcctgctcatgtagtagttggatatatctcttctctggtatacatacctaatcggttttgatcttttgttggagattgttcgggtccggtcttcggcttcttcttttgtatgtaaccaaaccgaaattgaaattgtacatctctctctctctaactggtatattggatattttcctctaattcattatttccattgacaagatttttcccttaatatgaacaaacatattccattttagctttaaatcacaaaaaaaagagataaatttcttcaaagaaattataagttgacaccgccctttttataaacaaccctaaaagtgtaaaaataa

SEQ ID NO: 66570 - DNA, 534 bp, Arabidopsis thaliana landsberg
taagaaggcagcttctacacaaaattatgtcagctctctctataaaaatccagccgcctttcatcagttgagttttgcaattcttcttcttcttctttttttaaccatttgaggtaaaaaaaaagatttcttcttttattaaacagtaatttaatactagtacagtatttgacagttcctagatttttagtcaaatatgatagcgctgacaatttttcacatggattttgctgttttttcaaactatttgacatcgatttcatcaaagaattcagcatttaattacggttacaataaagacaaattaaacaaatacgcaacgtacacatagagttttaacggctcctgtgagatgcctctttctaagcaaaagtttactcttctttttgtttgtttattttcatatccgagattttgcagtatataatattggaattgagcttttgaggtttcaattgaactaaaaagaagttttaatgcattcaaactacttttctactaaaagagattgtttattctcatgggttttttttt

SEQ ID NO: 66571 - DNA, 303 bp, Arabidopsis thaliana landsberg
gaaaacgggatctataagcctaaccgaataacatgaaccacccggttataagaattggttggtttttgaccactacggatgtcacattgcttaacagggtggttctgctgagtggactgtgatcattaaagctgtgacaaaagataatcaaataattgaaagatgatatcccttctttgccgcttttgctcatatgctttgtacgtctatgtctgtatggctcttgcacgcctgcgaatgacaatgttcatttgatagctgtctctgtgagggatggacggcccttgaagctgcattacatac

SEQ ID NO: 66572 - DNA, 672 bp, Arabidopsis thaliana landsberg
tgttcatgatccttatgttcatatttgaataaactgtgttttcaacatcttaaatctatccagtctgaataagttcacttcacggactaagtttttgttggaagagatagattctgatggaataaatatcagcttattaaaagtaacatttctacctttatttgccaacatccaaaagtttcaacattcgttttgtctaggaagtaacaaataaagatataaatgttacttcgaacatagtttaaaacacatttacatttacaatcaattttatatgtgagattcaacactacacatactaattggatactacaaatgtggtttaaacgagattcgaggataaattggaaagtctttttggatcagctagcaagtcaatggattgatctggtccaaccacgatcaatgagttttcatctaatatagtcgaggtaataagcttctgaagctgtccacgttagattttaaacgaaaaacgcgattagccatttctattttttttttttttccatttcatcatttaacatttttagattctataatttttctatttcaatatatttaaaaggagaaagaagaaaaaaaaaaactatatgtaaacaagaaaaaatataagtttttgcaaaaacaaaatatgaaaaataggaaaatgtaaaattttgttattaaaac

SEQ ID NO: 66573 - DNA, 531 bp, Arabidopsis thaliana landsberg
ctaaccttactgaacatactcgctgcggtcaacggcaagattagccgctacacttccggctgtttctgtcagcacacaataagctccgccatttacaatacggaggggttgtacggtgcggtggtctatgggcatgcgggccaccaggtaatctgctccgaattcaataaattctatgccgatgtattcggccattgtatgttcgttacgcttgttaatgctttcgagcgtaacctcctccatgtttaaaaatgccatgaaatttgcctgatcagggaacaaattaagcgattataccggtaagtattttatgattttgctataaagttcctgttgcttaaaaggcttggtgataaaatcattcattcctgcctgcagaacccgctcacgggtttcttcaaacgcatcggccgtaagggcaataataggcacatcggggttcagcaccagcttgttttctccccggatttgccgggttgcttcatagccgctcatctcaagcatctggaggtccatcagcaccacatcata

SEQ ID NO: 66574 - DNA, 661 bp, Arabidopsis thaliana landsberg
tggaaaatcgaactcccgataaaatagttctgaaattacacgaataattaacatcataaagtcatatacaagttattggtctatggtcgatggcaaaacgtaataaaagttggaaccgggacaaaacgtgtcttacggtggatgaagttgagaatatatcatgcatcattggtccacttgtactaacgatattcgcagctactaatatgagccaatcggtaatacgaaatattttagcttgtcgactacttactttctatataaaagtttagcctactaattatctctttttatgattatgacaacttgattatttgtttcccaaccactgatgatgagattaaccatcttttttgctaagaaggtaaatatttcatcttgctaatgtcctgtttacaagacaatttgcacacatacacttataacattagaaaaaaacacttgaaactttgttacaacatatcatttagcttgatttttcaatcactttaagaagttaatgaatcataatgcctaaataagtcctctataacaaccatgaaaggagtgttttatctataaccctgtgcttttagaaagaatcataattttttaggagtcttttgtgatgagaaaattgggaatgtaattaaaagtaaaaattttctaatattctggtatc

SEQ ID NO: 66575 - DNA, 2500 bp, Arabidopsis thaliana landsberg
ttaagttgctttgatccattcatactctaataatagaactcatacgagatgtaaaggtttttatctcaatagattatccatgagaagttaagttcaagcgcataaactcctaattctgctttatgcgatcaaatatatcttaacaaacaatcatcaaaatagctttccttttaaacttgcacgaaaacataattgttgcaacattacagtatatcatcattgattgatataagagaacaatacaaaacgactactagtatcaaaattaaggaagaagaaagaggttcaccattatggttgaaagaaaccgtctaaaaccgttttgtttttttcttcttagagaagctttcaggcgtccggttttcttgtttacgctttgtccctgcaaaccgcttaccaccgctctcttttgaaccttttgcgtttgctttcgcctttcttgctgcaacagctggtcgcttctgacttctttcctttgaagcactattattcccagattttttgttgtcattgctgctgctacctctaggtctcatctttgtctgcgcggagcttttctgataaggtgttttcttatcatcaccagattttgaagctcgtacaccttgatatgaaagattagccttccctgttggagttggtgtgaccactttgtccttctgcagtcttttctgggccggcgagtaagcttcagacggattgctctttctctttgatggcgtatcaggtttgactcgagaaatccgtaactctctttctctaagcttcaagtatcctttcttgagtacgagatttgcagcttcctatagttaacaaaataaaaggactcatcagatctaattagtttttattactcaaaccttacaaagatcaaagtttacttcaacatacccgtgttttaaacaagacgtaagctattcctttcccaatgttcaagtgaggatctctaatgacacgaacagcttctatactgttctccagattactcttacccgtaaacagttgatacacttcctcgtcctgcattagaaacaaacaaaactgagaatctaagataaagttcgatcatcgcaaattaaacagaagaagagccttaagactagtactactaaccttcacatcgaaagggagattacccataaagactgtcctcttaggatcatacaaatgagtatcatcatgccctttctgtttcttacgaggcggacatgctctatcaacgcggacatgattcccatcaatctgattataacataaaactattagccaatctacacataactccttaaaaatcaaccagatagaacaaaaggcgcaaaagttacattaccagagacatgttatgtgccagagaagctgcagcagattgctctgtttcaaacacaacataagcatgaacactgcaattccacaaacattgacattagactttttcatcactgaaacttcaaaatcaaatgattactatatagagtttcaagcacaaaccttgaagctttctcattgatttgtttcagcattatagctcctttccttgtcctcttcgactaaatcaatcaataaaaatcaaacgaaatcagaaaccaatgaacacaaaaactcaacctaaattcatctttaggctttagctataagaaactcacatcaacaataggcacagagcgtatcctcacagattcaacctcaccaaatttactaaactccttcaagatgacttttttcttaaccttcaaaggcaaattcccaacgaaaacagttctaagaagcttactctcatcatcaaaaccttcctttgaaaccattgtatcagctacttcatcagctttcttcctcttctcaccaaccttcttctctttcatctcaacgcttccatacttcttcgtctcgtattcgttctcaatctcatctctcttcctcttcttcctctttgaaaccaacccactttcttctacagcctccgaaatcgtctctttctcgtcgccggaatctgtaagctttttttcctttttagatttcttcgtcttcacaggcaaatctgtttcttcttctccttcttcgttctctgcatttcgtttatcccctttcttctcatcaggaattgacgactctttgatttcttgaggttgttttcgccggaaagggttatcagcggagaagagactcgcaaagccagagctttcaacctcgccggagaagagagtggagaagattgtctgagattcatcgttttgagattccggctccgtttccttcgatttcttcttccccatcctcgttcgatttcaatgagagaagaggaagaaagagggagagagagattgaagaaaccctaaaagtttgtatgttttaaccagagagcgccatagagatgataccgggtcgggtttaaatgatccgaattcagcccattagttatttggttgggttaaaatagccccattagtccattgggcttttaaaacacacatcattggggctgaatcactttttgggtttcaga

SEQ ID NO: 66576 - DNA, 753 bp, Arabidopsis thaliana landsberg
gaatatattttagagtctaacttctagcaacggaacaagaatatcaaacaacaacaagtgtggttacaaaataaaaagaatcacaaatcgtctagaacccaatttaaatcgtgattatataaatgtggtttcagtataatagttttaagaatttttttataaaacattcttaaagcttcgtgcaactaaactttttgtcttcaactataacttacttatcgaagagacaaattctttcttacctaaattattttattcgttaaaatttcttttttgaaaatatatattaaagttacttttttagggattaaataaatcgctaattgtttatatgttatatataagttattgagatgacaaacaaaaaaagtttctttattttcttgcaaataagtagacttgtcaatcggggtaacttagttcgacctcgctaaaaactcttaaaaccaaatatatttggttcggttcggtataaaaatatttaatgcttaaattttaaaatccggttcttacatggtagataggtttctttattttttttttggagattccctttgacaaaaaaaaaaacttttaagtttataaattttttgatataaatgttttttaataaaatatcttgaaaacagtgaatctatatataaaatgagcaaatgaaaccactatcattcattaaacacaacttaattcaaaaacaaaagttttaaccaatttatattgtttaaatttatattatgtttcaagatgtataaa

SEQ ID NO: 66577 - DNA, 471 bp, Arabidopsis thaliana landsberg
ttgtagctggcagctgtcagtttaaactatccatacatatactgatgatcattgtactcacactccggatccatcaaggccgtgctcgccagagatggtttgcctataaatcggtcagtcggggttcatgttgtgctgggctaggtagccgtcgctggagctacacaccagaaggcagcaccgatttggttaccctgaagaatcaagttagttatattatcaatagatatgctttggatgagggttcttacgcattgtccggtctggagatgaacctatatcacagaaaacacgagttagccaatgtgttctccttggtagctgtccaatgtggggcagcattcaggagcaacaacgcgtcgctaccatgagctcctcccgcacctgatatcgaagggatgttacatacgatttcacgcatcttgaatggtgtgtaggtggaagttttcaatccattatttatctttttga

SEQ ID NO: 66578 - DNA, 474 bp, Arabidopsis thaliana landsberg
acgtgaaccgcctgggcaggggggtcgacgggtcaaaagaaagaagttattctaccgactagcccacaggcaccgccaagcgcaacaaaaacaccacccaaggacggggcggacaagaaacaacagcagcaggtgctgcaaaacaaacagcttgccgaagagaggaaaaccgccccattggaactacccacgcgagaggggcgattgacaaacaaacagcgctcatcagcgatcagacaaaaggcaagagtaggaggcaaccataaaagatcgggcacagccggatcgaaaaggaggcacgacaaacatacactcagaagaagggatgcgatgaaccacagccaccatccccaaggacgtggcaagtggagggcaccaattgtacagacaagcacccaaaccccggggggatgaccggcactcggaccaaaaaccaggaacaggcaaaacaagaacgcgacaaagctgcttcgg

SEQ ID NO: 66579 - DNA, 649 bp, Arabidopsis thaliana landsberg
  unsure (1)..(649): unsure at all n locations
gatgaaatattgaacttggttccatctgcatactctacctcaaccttcaaaacgatattcgacaaatcagatttcaattccaaaaatttctgatcgccgtgtaaacgtaagaagaaacagagaagcttacttgtttgggagatacaatagagaaacctgagagttttggaatactaataaaacttgttccatgaactcgccggcttatcactctcgtaatcgcccacatttctttttccggcgatcgccggagacgatgatttttaagcttctagcttcattctaactctaaacgtactttattgggcctaactcagaagcccattggatttggttatattagttttatactagatgctaaaacggcgtcgtaaggagagaactaagtgctgattagtgattaggtcctaataacttctgcggccataataactagtagttattaactactggtctaactntagtcaaaggtaaagcanaatcacgcctcaaacggaaaatcaaacgtaaaaattcataaaagccgtaaagaacttacaacatgaaaaataaacacgcaaagtatcccgttttttttgttttttcctactaaactacatatttttgttgttgttgttggattaaactacttactattcaacgtcaaaga

SEQ ID NO: 66580 - DNA, 1040 bp, Arabidopsis thaliana landsberg
  unsure (1)..(1040): unsure at all n locations
aagaaacacaaaaatataaatcttaaggttttaaatgttattgttttggagggattttataacaatcataatagctttggtaaattcacttaaaattatatatatatatatatatatattatatcaataaaactcaaatcatttaaaatatagaattgaatacatctcttatatatgtctatagataagctttgtgttcgtagtgttagattcatatgatattttttatgtagattatacatcaattgttagagttggacacaccactaaaagaataatcntttctatctttcttttaagaagaatatatctttgtgtatatgccaaactaattaaactcgtaataaaattaaactaatgctgtcaaaaaaaaaaaaattaaactaacaaaaacatttggaggaaaaagcaaagataataataaaaggtataaaattcaagaaaatgtacagaagaaaacatgaaggtggggacaaactgatttaaatggtttattgacaaaagaaaaagagagatttaaatggttttagatggttccacgaatcaaagttacagtagcataaattttggaaaattataagaaaacataacaaaaaaaagatggagccgacaacggttttgtttttaggcttcattttaagtgcaatttcaacatcatatttgtatttgtccctcatatttttataattataataccaacttatatttacattttctggatttacacatgtctaaataaattagcgactatacaagactttagattatgaatctgtggtattcaaattttctttaatatagaacattaatgttattacacattattgatgtatatgtgtgtagccgcacacgacaaataaatgtgacgtgaagacagattgtttgcttcacttcaattcagcttctatacgtctattgatttgactacattntatttcgattaaagaaactaacattgattctgaaacgataatacaagaacaacagtattattaaagagtaaagaatgcgtagaattcattatagagggaaaaagagtg

SEQ ID NO: 66581 - DNA, 576 bp, Arabidopsis thaliana landsberg
catttgaggactcgtgagtgttgttgcctgagatgtccgtttcctgagacagaaccaatgtcacgtgttctgcagaggttgcctctttccatcctgacaagccatttattcagattgagtaaacaacttccaaaatataaacgatagggagattaagataaaaagaaagggtaaaagaaggtttactctttgcaagaaacgcctttgcttcgtggttgttaaactgcaagcttatgtgatgagcgtttttcacttcgggtgtagttgggtttgatctcttatcttctttgtctgtgtttccattgactgttgaggtttttcttccctgactgctcactggtctccatatttttacagttgattgctcagatgcgggtttcacctcaacaggctttgttcttctctccccttcactgcatttggtttggttatgttcgccactgtctcggattgatacactccacgatccaactatgaattcgctgctctttgtctgatcctgctgagtcactgctgcatgttgtgatatcaactgggggttatcgggatttttgcttccaaactgtagtagtattg

SEQ ID NO: 66582 - DNA, 441 bp, Arabidopsis thaliana landsberg
cagcggtatgacttcgcctgacatcggccaaacgcggctgagacgaaaccgccatttctgacgccacgttgcgaagtctttgtcgtcctgctctttctcccattcggttgaaagaagacggccggcaataagtgtcaagataaagcagcccaacaacacgagatgatgaccttcagcgatctcctgacggacgaattgggcataaaaataaaggaaaacgagggtgagaattccgacgagtatttgcatcttatccccgaaataaaggggtagattatgtcacgagccaataaagctgtctaccaccctcacggcggttccgacgacttcaaaaccgtagaagatgcccttgattcattagatgacagggtaacgcagaacgaaacagatattggaacgtcgcatactgatattacgacactacagtccgacatgacgact

SEQ ID NO: 66583 - DNA, 425 bp, Arabidopsis thaliana landsberg
atggatttatattggatggtagaaatttgaagtatgttatgttttctttttttttcaaaaatagtttttgtagcctgtggttcaatttctaatatatttttggatgtcgttagggcatgttttggaaccatgaaatattgtcatgcgtggttgagaaacatggtaagcagatattgacttgcttttgctcactaggtccctctatatacttaaatacaaatccaattgtgtttcgtggatgcctttttgtttcatccttgctccaatgctgaatgcctttatttgcatgagattggtgcccaagaggatagtttctcaaaagatgagaccatatcagcgcacatgaggtaaattaatttcaataatctctgccttttagtttaaatgaaatatattgtggttgattcttgtttttcgttgatgtt

SEQ ID NO: 66584 - DNA, 544 bp, Arabidopsis thaliana landsberg
ataaattatcaaagaaccaagtaaatgtacacaattactatatcaacaaagaaaatgtacttaagacttgctcatgttagtatgatttaggtatcaatagagtatgcggttccgatgtcaaaaaaaaaaaaaaaaatactttcccatgttaagaacggatttatttattctctaatgttttagaaatatcaaaaggagaatatgaaatagtctacgatcagaacaagtaagtagaaagaaaactagtgtaggcaatgacatcggaccattttgggaaaagacccttcaaatgtatagtttcttcatcaagacgttgatcaagaacagctacatctactctcacttcttcttcactacttgcctctaaccagaagttccacttctcatcgctgttgccactcagtctcaatatgtacgagggaggaccacccggtgggagttcaggtgctgcaacaacgattagtcattttggttttacggtttttagtaaatgctttaagagaacgaaaaagaggttctgtgtgtgtcacctggaggtttgcca

SEQ ID NO: 66585 - DNA, 1199 bp, Arabidopsis thaliana landsberg
aacccaaaaaaatagattgttacatatactatttttccagctggtatggttattatatgcatcaatataatttttttaatcaaattattaatgttgtccgaagtattagaaattatgcacaaacattaaatgaattgaaagaaaataacttaagtttttttttgtttaaaaatgagataacacaaaatgtttctaaaatcggatagaatgcgaacaataactgtttcggaagtccatggtaatctatacatgttttgactacaatatatgttataaatatacgtatttttaatatatatatatatacgtatttttagtatgtatatgtatatatatatatatatatatatatatataatttgtgaaatgtcttgttatatagaaaacaaacttattttcgtccaaaattattttttcacagcagttcatacacatttatggacatgtactagtttttccaactataagcaaaatttatgtcgatttttctggatgtaacgtatatcttaggaaagagtaagcatatgaacgtggctgaaacaaactaaaaagtgtctatctacacatacagatgctagcctctatgaaacacacttgtttggtcattggtggtggctactctcacgtgctcgctttgcattagtttagtttttttcaaacttcaaaagtcttttatcctttttggttatttcaaatgtccccaccatttctgcaaagtcacaatcttcataaaccatttacgatcctctactgactcagcgaatatgccaacacaagggcgcgtgattgtcttgagattcttccactgctatgcgagtttcttcaaaaattcctcatcgatcgacgcacttacctttttttttaaatggatcaaattgtttttgcatcttagaccaataaaaccatattgtatatattacgtaaacataatcactagtccatgatactatttatgaaaggtcataaagaatcctctctaagcatggaacatatgcaattcgaattcgggttcagaagcactaaaacaatactctttttaaccggttaagtatttgaaatagtgcacacaaaaataactaaaaagtctcgtgttactctaattagtagtagtactatatatataaccattgtcaatatagtctaactgatataataggtggaccactgtcacgaacttgaatgccagcgggaaaaaaaaa

SEQ ID NO: 66586 - DNA, 610 bp, Arabidopsis thaliana landsberg
tatcgttcaaaaaacttgaccaacaaaaaaattactaaaacttatttttattattataaaacaagctatcaaaacattcgagattaagttgtaatatctgcatcagaaaaaatggcatatccacacatgcatgtgaacatgtgagatttctctttggcttctatttaattatacaacatgtaacataatttttccaaaatattatgtgaaacatagtataatctgatttcactgcgaaataaacgaagtgacttgcatatatcaccaccaaaatctttacaatattagttgtgacgaaaaagtaaacaaacattaaaagaaagtagtgtcgacatcatcattcatcatatatgaggataaaaatatctgaagagtcaggatctcgtgatcacgaactcaagaatatgatgcgtttacctcaaatctcaattaatcaaatttttttttttccctaacacacaaaaactacattatgagattttgtttcaaaaaacactattatgggaaatcgcttaatatgatttcttttggactaaatggactacaccctgacctgatcagaagtaaagctggttaacatacctttggcccatggtgggcggctttaatt

SEQ ID NO: 66587 - DNA, 547 bp, Arabidopsis thaliana landsberg
cagggaaccctgcagttgtcataagcggaacaggtgaaatcagcattcatcttctcgcctttccgcggccatataaaaatgctgtgcggaaggcatattatattcaccgcgtgtttccagtgctgaggtcgtctcagtggccaggaatttgccatgcgggaaatatttaaaaaagtcaccatagtgatttgcctggtagttatgaccgatcaggtccatagcgccggaatgagaaagcgagttattctcggcttccgggttattcatggcggaagtgatgggccttgttgtgtccagtgaacgcacgatgcctgccagctcacgtgcaatggatgcccctgcactgtcccactgatcggggatctcgatgcctatactccagatgatcaccgccgggtgattgcggtcccgccggatcatatcagacaaatcacgcttatgccactgatcccaatataaatgataatcataaggattctttccttttttccagcaatcaaaggccttcgtccataatcaggatacccatttgatcagccaactgcag

SEQ ID NO: 66588 - DNA, 4570 bp, Arabidopsis thaliana landsberg
aatgtagtaaaattctccaagtgtacgtattgaggacaaattttgatgtggtcaaagaacacaagtgagttaggtaatgagggaaatcatgtgatagtagtcgatttgtgtgggaaaatggtaaagcatgaaagcgtgatcgagtgacgtggtttgttgttgctcaagtcgtgtgtttcgttatgccaatgaaataaaaaaagaatacccaaaattacttatatactcttaaagagggaattttgccgactaagagacagagagaccaccgtaacttttggacaacaaaaaagctctaacgagtcacgcctttagattgcactttcttcttcttctttaaaaaaaggaaagaaaacaaaggtgtaattgcagtggagttgttccccaagtcacagagagaaatcacaggcaattttggttatcccttaaccggtccatccatatctgaaccgtcccggtacaaagatccgttggtttctggttttgagatgtcgaatcccagacagaggaaaggagaagcaatgatgaatccgacgatttcgtggaggttcgcgtcttcgacctctcttctctccattcctcgaacaccaaaaagtgcctttatcttcgccatgaccttctcttcttcttcttcttcttcttcttcttcttcttctgtggaaaaccctaacaaggacgattcctcctcttcgcttgaattggtcctcaagtaccacaaccagacgaagcactccttgaacggttacgcgagaggtcctcgtggtctcgactgggccaatcagcctaatcccttccgccggtacctctctgctcctcttcttcctctccaacaccccaatcacgacatcgacgacgactccgactctcctctctactctactctattcgactcgcttcctccgcccaaacccatctctcttcctacaatctctcaccttttctaccattctctcgctctctccgcctggaagaccaccggatcctccacgtggcccctccgcgtcaaccccagcagcggtaacttgcatcccaccgaggcctatctcattgctcctcccatcccttccctctcccaatccgctttcgtctcccactatgctcccaaagagcattctttggaggttagagctcacatcccctcttcctttttccccaacttcttcccggagaattcttttctcatcggaatttcttcaattttctggcgtgaagcttggaagtacggagaacgagcgtttcgttactgtaaccacgacgtcggccacgccattgccgctctctccattgcagccgcagacctaggctgggacttgaagcttctcgacgctttcggagctgatgatctcaagaggcttatgggtctccccgatttcagttacctgaaggtaaaggtaaagctgagctccctgagattgaattcgagcatcctgactgcttactccttgttttccccaacggaactagtagagaacatctcaacttagactacctcgcaattagctctgcccttagagacttcccaagcctagaatggactggaaaccccaatactctgagcaaagagcatttgtgttgggatatcatctacaggacagccaaggctgtagaaaagcctccattgatctactccacctcttcttcttcaattgatgttgcttccttcacaagcagtcgtgctctgtttagccacagttcatataataagttaacggtgaggcaagttgtaaggacgagaagaagtgctgttgatatggacgctgttacttgtatagacatgtcttcgttttaccagatgctgatgcactgtcttccttccacaggcgagtcccaaaaagagcaacttgcgctgccgtttcgagctcttccttgggatactgctgaggttcatcttgccttgtttgttcacagagtttcgggtttgcctaagggactgtatctcctagtcagaaacgaggatcatctcagtgatctcaagacagctacgaggcctgaatttgagtggactaaaccagatggatgtccggacaatcttcctctgtacaagctcgccgagggtgattgccagaggctggcaaaagggctatcatgtcatcaggtacagagtcggatagagttgtaattaacaatatatttcacttggttactgaatcattgtggttgatggatgcaggacattgcaggggatggatgcttcagcttaggcatgatagctcggtttgaaccagcactgcgggagaagggctcatggatgtaccctcgactgttctgggagacgggtgttgttggacaagttttgtacctggaagcacacgcattggggatctcagcaaccgggattgggtgctatttcgatgatccagtgcacgaggttctggggattaatgactctagctttcagagtctgtaccatttcactgtgggaggtccagttgtagacaagcggatcatgactcttcctgcttatcctggtcccaccaccaccgttgcctagatcatacatacatacccgttaatctgtgttgaatccgtaaacagccttcattttgtggtctgttaagtggttgatggtaaatatataatcgaattttatattcgttgtttttttattgggaaatggattttctttgtttggtgacattgctctaaaacgattttttaatgagcttccgctctatcatatttgcgttttgttgtccaaaaagtctcgagggttaaaatcttttgccaacttaacgattgctatataactcgaaacttaaaattaacttacatcagaagaatcaataatagccaaaagtttataaataaataaagcaaattagaagctatcatcttcactttttccattaagtcgacgtagagactaatatatagagttaaattgtgacacaaaagtatatagagtatgaaccaaatgacccatatgaagaaaaaaaataagggaaaggcgacggtttggggtcaaggagaagcaagaacaaaaaataagtcttcaccataacgtttctactaacctgatcccaagtcttgtctctggacaaggtttacttatccactcttctttcaattgcaaaattattagcctttttttttacttctcctaaatacatttttgagactcaagctgtgtcaaattcaccagtattgtggtttgaagggctgagcaggagccccttgtatgtctttttccgacagcaatttcagcttctgcgacaacatttaaaacacagttggattaagaatttaaatcagtcaccagtctttgaggttccatggtatttttttttgtatttagcaatcagcaactcttaaaagggatatgttgtgttaccgtgatgtactgtgggggatcatcgaaactagtggagcctagtaccacttctctcctcaaactgcttgtcaacttgtggcaaactcggagctgtcaaaaagttatgccaatgttgacacaagctttgacaaaaagaaacatatatagcattcatttaaggtcggatttgtttgaatgtatacctcggatcgagttgccccaccaattatgaatacaaagatgcgttgccccagcttcttgaactccgtagaagcacttttcaacactgagtcactgggtgtgaagaaagatatgaactactcttagaaaaaatccaagctcctctcaaatggaccaaaaaataagaaatcattatgtaaaatagaatgcctggaatatccatcgtcagaagaatgaggacgcgcccaagttgcagttcgtcttgatctcatagaatgaggggtggcttttctctctggaaccgctgtaggagcagaactcttcctgacagatcctgttcttgcttcactctcctccttatgacttgattggttcatacatagatagtcgcttttagatagatcgcctttcacgagtttctcaagcagctcctgcaacataacaaagatgtatctcagccacttcatgtttacatagtggatatgtagcttataagccggggtgttcatctacctcgatcatgggataaaaccggaacagttgccatgtttcttcttcaccagatcgatctttcctgtttgcttgttttgtctatagcaaaagagtatacatatccgtcagattcttcttcttattctcggtaactagtgttgatttttcataattaaactgaatctgttacctttccagcgtcaaatttgagggagaaactaccggacttagctttgttttctggggatccagctatcaattgcatgttgcttataaccttcatatccacaggtgataatctagcaagctgataacataaatgcagtatttgtttagcaagttgttccatgcattacaaggggtctctatcacacgaaaagctacctgcattagcttcacacccttgtcaccttcaaacttctcggggtacactgttgcataaatcatcaaaagccgtaatttgttttccgggtttgtgtcctgcattttaaatacatgatgtgtcatttcaaacactaaatcaatgcggctatcaagtttttttggcatgtttcaaacttattcacctgattcgtcctcagaaagttg

SEQ ID NO: 66589 - DNA, 448 bp, Arabidopsis thaliana landsberg
cggcaacatccatcttcatcaagcatcgacgttgggtatcctcgcattcaagtccattaccgcgcgagcagcacgttgtggttcctcacgccgtttattcttcctgctcctataaagcgacatcacattgcgcagattacggatgcttctgtatcctagaagacaatggcacaaatgaaccaccagccaagcgcttggatcgcagagaaaagcgcatcgaaggaaatgagcggtttttgctgccgcctggccttcatctaggcgcactctttgaccttccacttgtcaaacgagtctaagaggagctttgaagcgaatgctcaacacgaaaaggctgaaaaagcgaagcaggatgctgcactcgccaacgtaccagcagtttcttgtcttccaagcccacacagctttccagacctctgttcctgcctcaccagtcgaaggcaaatgc

SEQ ID NO: 66590 - DNA, 450 bp, Arabidopsis thaliana landsberg
  unsure (1)..(450): unsure at all n locations
agagctggtgagcgcgtcgatcgctacgtatatttctgatttggtgcgctcggcgcggcgccgacacttcggcgggactcacgttctgctgtgagcgcggtgaccacatctgatgcaccaggccttccccggcgagttttaccggattgagccagatgcgcatcgcgtactcgcgctgcccgaagatacgaacctgcgagacgcccggaatgcgagagagatcgttgacgacgttgtgttgcgcgtagttgctcaggaacagcttgtcgtacttcgggttgctggacttgagcgcaatacccatgacgaacgcgccggagtttttcgaaaccgttacaccgacttgctgcacgctctgcggcagaagtccgatcgccgattggacgaggttctgcacgtcggcnnnnnnnnnnnnnnnnnnnnnncccaagttgaaggtcgcagtgatcg

SEQ ID NO: 66591 - DNA, 533 bp, Arabidopsis thaliana landsberg
tgcttgtccgttttttttttctatctgtctccaattgttcaaataatatatacgagatattaaagaaatggttgagagaaaaaaatgaaatggttgaggtttatttaagaaggagaagtaacgagagtgtgcatgtatccacaaataacccaaattaaaatagtacatctagctataaaaaacgtcccgtctcaatgaagtaatcagacgacggtcttatgtatttgggtcgatggcgaagctattcgatagagagttcaagatctctgatcagcacatgtttatatgaaagattttggtgcatgactccttaaaatatgtatgagtattgaagagacacgtaactcgataaatatatgcaaacgtacgttctaaatatcacatcagaagctagcttgcacagtgttacaagccggtcaaaacaaatttctgactagaaacattttcttgcccttgcatggacatgtccatgcatgttgttgatatatagaaaagttatcttgttcctaatcaaaataaataattcttaaata

SEQ ID NO: 66592 - DNA, 615 bp, Arabidopsis thaliana landsberg
ttgaacatggacgtcgtcttcatcatgtaagttttgttggaacattgagttgaaattattgttacgcgatggagtcccttctaaaagattgaaattatgaggctttgaaatttctagatgatggaatttaagaaagaaatagagaaaggaagagggagatttttggatttcgatatcacacgcaatagcaatcttattgatcaaagaaagaacatatatacatatcttgtcaagttgtcttgtaggccaagtttaagttctttaattaatgagatacatgaatttaattgcatgagctgtaattaagcatttagtagtaattaatatacttaagtgggatttgttgtccagcctcctttatgcatttggataaaatttcaccaactcattttagtttctagtgacaccttttgacaaaatgtcacttgcagtttcacatctttgtcaaggttaatatagtcaaaattaaaatgcacaacgcatatccatgttcataaaacatagaaacaagagttgaaaatgtatatttctatctgtcctggattgattcatctcatgagctcatgcgctcctgtttctttaaagcttttgggtttatgccctttatcatttata

SEQ ID NO: 66593 - DNA, 397 bp, Arabidopsis thaliana landsberg
gatgtcaattgtcaacactctacaagatcactcctttccatggagttcaactagaagagcttttcgatcaatttcaccaaatcagaaacaatttcgaatttttaacactccttgggccgattaatgggccaaatgataggtcactccaggcctttcccaaaccctatagtcctcctcggctataaatagcaagtggagtagagcgactttgctcactcagtttccttccaaaagaaagagaaagagcatcgttttgagcaaatgagtaggaacatggaagttaacgcaggcagttccggcgaaattccgtctccaagtaaagttttcatctttcactgtcatttcttataaaaatcaaacctttatagtttacacgtcacatctctctttctaataa

SEQ ID NO: 66594 - DNA, 369 bp, Arabidopsis thaliana landsberg
taacttaaaaacgggaaactcctcattcatgctatctatctctgctgtgcaactcttctagactaaccttttcttcatcgtttgctaaagtctctttaataacgttcactttcgatgcaagtcttaacagagtacatcctccgccaacaacaataccttcttccacagcagcctaattaaaaggtccaacaacttattactctaccatatggatggaaacatttcaaggctcttttcttaaagataatgttaccttgggagcattaagagcattttcaaactcttaaattctttctccttaatctctgtctaactaagtgctccaacctaaagaacataaatacgtgtagattattctccttattacct

SEQ ID NO: 66595 - DNA, 1071 bp, Arabidopsis thaliana landsberg
ctacttaactgtttgaattgacagcattctgttttggcaacaagcaacttgcgtaaagccgcagacacattgttttcctaatataccattttaaccaagtatctggaattagttcacttggcaaaacccccaaagacaagccttaatggtaccatcttcacagatctgtttaagtgaggcgaatgattgtaaatagctttaatatgtatcatttatccatcaatatctggatccatatccatcccattttcattattatatttatcgaaaaatattcgagccatggtatatatattgataggtatgcttcgagagtgattataacaatctagtgggaagctagagtcacaacaaaaagaaacattattgcgaagtggtggacaacctaagctagaaacggttctcattatttaattcttcttgtttgatcattcccatttggttaattgaataatgtattcgatcgtgacttcatattctcaatagatagtattttgtctgagtaataaaagacttaaggtaagaaaaccctttaggagaggaaatgtgacgtgacattgtccttgaggtctaataatgaacaataaacggtttatcttttatcagcttatatgtgacgaccgttgcaacagcgtcatgtgatctttttttatttgatcgagactttcgttttacaacaaaccggaccggtcaatctaacaaaccaaccccatatagacacgtaacgaaaccaccatactccactttttcaattgcttagattttgaatcctcattcacattctaaatttccgagtctccaccgttagcagatatactgaaaaatcaataaaattcgaccccaatatataagaacaattataatttatttattttaagaatgctatcgaccggtttgctcattggttaaatgatagcgatcccataacaaatcagacaccggtcaggaactctttttttcctttatttaatatgtctatacgaaggaccataatatattcttcttttcttttgaataactttcggccataaagtttactttttaaaatttcatggcgtgtttttcaatttt

SEQ ID NO: 66596 - DNA, 622 bp, Arabidopsis thaliana landsberg
aggaaaaaatacttagacttgatcaatcacaaatttccgaagttacatgtaaatgaatgattggcgtggttataaggcaaggattgtgagacgacatctaaacccaagacatggaccacataaagcttatatatatcatttcaaattgtttgaaatgatgagctggctgctttttttcccaagttagtgtcgtcgaatataccaaatgtgtcttatcgaaaagagaaaaccagcttatttcatccaaacatcccaaacaaagaaacatttgttcttaaccttaattattaatttgaaccacaataaaatggcttagaggtacggcatcctcattaaaaatagttgatttactcacaaacaaaatcggactacaattaaggacagcttgggcaagtcacttagaccaaataattaaatccctttttttgggtaaaatcattacttgtttacggaagtattcacgtgacatttattttcaagatatcttaataatacaaataaagaaattatcagaccatagcatttacagagctatagacccgtggagttcgaaggagacaatcaaatcattcacagactaatcgatgcaatgcggagaatctacgactctactgttacatga

SEQ ID NO: 66597 - DNA, 124 bp, Arabidopsis thaliana landsberg
atcgaagttttgaaactaatgttgatactgtagaacatttggttaccaaaacttatgtattaaaaaaacatcctagacagtataaggagtgacctggaaaccactttattataaaaattgagga

SEQ ID NO: 66598 - DNA, 2519 bp, Arabidopsis thaliana landsberg
ccattcctcctatcaccccaatgatagcagcaacctaggtcatggtcggagtagatgcttgacgactctatcagtatgtctgtcaacattttcttggcactgtttcacctaactgcaaatacataaggtaaataaagccttgtttgtagcttaatccatgtcagttacagcttattctttgcacattttaaatgtggtattctcttggatgggtatctcaggactaaagtggaattgtcaattggtggagaaactttccattgtacggggcagcgtgtgacagaaaaggggtttacagctataatgccatggtctgcagtagatgagaaaaaactcccttcttttctcaaaggagagaggattgaagttttaagagtggagctttacgaggtcacattcttctccagtttttgttactgctctctttgctttgtactaggacacaaattactataatgtttccacttttagtttattttttctgtttgtatttgaatgttgtaaaatctacaggggaacactgcgcctccggactaccttactgagagtgagctgatatctctcatggagaagcatggcataggcacagatgcatcaatagctgtacatataaacaacattggtgaacgtaattatgttcaggtgggttaacctacccaaaggcggtgtgcttttcttcactgttacaatgttattctctcaggaagatccttttttgttttctgaaaaatctcattactcttgtttggtgcttacacacttttgcaggtccaatctgggaggaaaatggttccaacggcattaggaatcacgctaataagaggctatcagtgtattgatccagacctttgcttaccagacatccggagttttatcgagcaacaaatcactcttgttgccaagggccaagctgatcattcacacgttgtgcagcatgtgattcagcaattccggcgtaaattcagttattttgttcaacaggttgggaaaacctggctgattttatgttttcttcggaggcatctacagatattgtcttcgatttaatctgttcctccttaacatctttcgtatattgtcctttcagatcgaacacatggatgccctctttgaagcacagttctctcctctggctgattctggtcgtgctttaagcaaatgtggaaaatgcttgcgttacatgaaacatatcacagcagtcccaccacgtattttctgcggcacatgcgaagaagtttattatcttactcaaaagggcacagtcaaggtaaaaccctttcgtcaccttaacccttgagctgaaacctcagtgaatctcaagttttcttatcctttgctaacggattttctcacagctatacaaggaactcacatgtcctttagacaactttgagctcgtgatctattcagttccaggacctgaggggaagtcatttccactatgcccatactgctataactctcctccatttgaaggcatagacacactttttggagcctctaagacgcccaatgctcctgccaaaaccaaaaccggtgcaggcatgccatgttctctctgtcctcatcccacatgccaacactctgtcagaaaccaaggagtctgcgcttgtccagagtgtgaaggcacgctcgtcttggacccggttagcttccccaagtggaaactcaactgcaacttgtgtagttgtatcgttttgcttccggaaggtgctcatcgcatcaccaccactagtaaccgctgtcccgagtgtgattcagccatcatagagatcgatttcaacaagaaaactactcctctggagaacggagccactctgcatcaaggatgtgttctatgtgacgagttgcttctctcacttgtagaagtgaaacatgggaggtcctttgtgaggcgtggaggaaggggaaggggacgagggagaggccgaggcagaggagggagaagaggctcaaaatctgtcgacccaaaaatgagtttcagagacttttgaaactctaaactttatgtgtttatgtctttgcgttacttgcatatcattggaaattcaaaattctgaaatactgcctgcgtttcaaggaacagtttataatctttttagctttacttagattttttccacatacacttatctaaaacagctccccaaaacttttaaacatttgactaattcttgtttatgccctaaagaaaagctaaaaaaaccaagtgtaatcttttgggcttgtcacgtgtcacatgtcatgcatacaatctttccttttttagatcataacaacaaagttgaatgcatgatctattctctttgcaattactctgttttttgcttgtttaagagtttatgaagaggaagagcaaatcattcattaggaaaatggagaaagcagttcactcgtcgacacaagtctggaccggcggttccagggaacacaacaaaggcctggaacctccataattgaaactcagacaaccgctgttcaaagttttgcaccggattaaccaatatccaccaacatct

SEQ ID NO: 66599 - DNA, 135 bp, Arabidopsis thaliana landsberg
tgggtcaagtcaagatccgggctagactgcttttaaggtcaattttaagaaccactgaaccaaaccaaggggggtaaacagggggagaaaaaaaaaagccaagaccaaataccaaaaaaggtcccgtggtaacca

SEQ ID NO: 66600 - DNA, 463 bp, Arabidopsis thaliana landsberg
gaatgccgtcctccacggacccaatgtatgggaactcgatggtcctacaccgatcttgaacatgtttaacacttagatggcttcatgcggcatggtacaaaggtacaaaactaacccccgtttgcctgtttttaccgaacttccgggcccgtaaaacattatgaaccgtattattaaccaaattctatgcagctttcttccctgttagacaggttcaatgaacctgaaacgttgaaaatggccaaactgggccgtgagttaagagccaaaggcatcgatgtgatcgacctgagcctgggcgaacccgattttgatacaccgcagcatatcaaggatgccgccatcaaagccatccatgataactggagccattacacaccagtggcaggcttccccgatctgcgcgaagccgtatgcaccaaaattgagcgcgataataacctcgactatacacccgagaaca

SEQ ID NO: 66601 - DNA, 1266 bp, Arabidopsis thaliana landsberg
taagcaccctgtccagaaaacataattacaggtaatcggtaatccagttgaactaacttgcatgtaagtctacagatctcctacaaacaataaaacagaagggacaagacctaaaagagagtcaacctcaacaactaatttaaggtcctctatgtggcgtccagttctcacgtccacagtggatggacatgtcaaatcatccgcaccgtgtgatatggtcagtagaagttgacatacatggcaaggctcactgagatagataaataattcaacaatatctgcagcttgtggacatagctgcaaaagtaagaaaaagcatggaatttttttagctcaagtattcaagtaatgagaactaagaggtaatcttatatctaagttgaggtacccaagttatgtccttcctcttgatactcagcagactggacccatcattggaactttcggacatgttaggtacaggtttcagaaagaaaccagatggtcgagaaagtacctgacatgaatatttttgcagtgagaagtagacagagaatatagaaagcaacaaatagtagagtctacaaatcaacgaatctgttatgctcttaggaattatatatctacacacaataaacaaagagtatcggtccaatatgaaacaaaatctacatacacgcaaaaaaacgtgattcatactttagagcagttaatatacatggaaaaaaggagagctgagagctgggaaatttttactggaatcgtgtcaatgtgcttacatgtaaaggctggacaggaattgatggaagatgcttgaaaagcctcattcccagaaacatctcgagctgtttttgccgtgaactatcaaccatagcatttttatatcttctctgtagtgtaatcttcatgtttttctgtgctgcagaaaactgtttaaatgctcctgattcttcactgaagatgttgagaatttggctgtgcatagctttcgagccagtatagagggttgcatggatatcaccttgttgcagaaaaagatcggcaagttctgacacaggagataagatagttgatctcttaaattcctcaaacctcatgtcaagtctcttccatggtttatcaggacatggatgactccatgttgttgtctttgtattgcgatctatataatatgattttccagttacggcatcagctcttttttcccatcccggtggaaggggagcgttatatcccccctgattattaacagaattatgaccatatccaagatcagtatcaagtgat

SEQ ID NO: 66602 - DNA, 1785 bp, Arabidopsis thaliana landsberg
taaatatgtaattatgacggggcatacggaaatttaatttttgaagcagattcatcccattagccagctgtattaagtggtaatccaagagttaatttagttgttcaccaaatgattttagataaaatcaactactagtttaaaataactatcgaatgactgttaaggcttcgtattttttgttctgccatcaggatatcataaatatggttgaggttcgtataatattcgacgatcttttatatatctgagttgtaattgaattagagaaaataaaaaacagataatgaaacgtctttgtttttccataaaaagaaaaacagggtaaattaaagtacgagagattcacgagacgaaaattcctagaggcgcacgatagccaaaagaccatagaaaatgacatccgaaatatctttaaaatgctaaaatgcacatatttttctggtgccacgtagcatttttctccctctctcgttctctctacgtccacccagacctgcctgttcacagcacgacaaagccacttcccaataaaaacacaacacctttcccattgacgctctctttcccaaacaccgttatcctctttacccaatcaaaagttgacgcttgctcacgacttgttgacgccgttagtcccatctaaaaaagtaaagcagcctttcttacttgctaatcccctctacacatttaatttattttctcccctaatggattttttttggcaacttgagtatttatttttcaactcacagtaactgtaaataaataaaagtattcaactcacagtcaccagtaaataaatactaccagaccatagttttttcaagaattgttttggtcaacaattttaggatgacttaaattgctatatttctggggaaatacgacttggaaatgtctgcaatttgggtcttttcttcaatttatcttctccaatttgttttttaaaaaattaaattttagaaaaggatatgtcaattttttctattgaaaaggctttattaaaaaataagaaaaagtggaggaaagaaaataaaatcgtcacttgtctttggttttgtgaggtcgcagaccctggtcccccggaaatggttacaaccggtaatagccggtatgaaagagggaatggtaaccggtgaatgccggttatccatatgggttagaagtttaccgcggttgaaatgattgaagctgagttttgactacctctggttaagcccattggtcgcctcatacccagaaaaacaaaaggataggaaagacgaagaaataaaaagagagagaatgttagagagacaaactctgagagacaaaacaagagaaaatcgctcgtcgtcggtattcaagcgtctgtgactccgataaagcctagactagcgaggacggcgagagagagagagagagagctttggagttgtcgtatctctaaatcggaggcaatttgaggtgaaattggtggttttatcgtttgattctagggtttatcttctctgatagttttatcgagtaatgtcaaggagctaaactagtggtgattgtgtttgttagtgagataaagacaaaggaaggaatcaagtggactaccgaagcgagttttgagctttttcagagacggatttggagatttcttgttgatatcgtctgcttagaggcttatttggtaccagatgtaacagatctgagcttcggaaggtatggcgagttcggaggttcaaatgaaaggtaatcgtggaggagatacttctcccctctggttttagtgacctaaggagactagaaatg

SEQ ID NO: 66603 - DNA, 1517 bp, Arabidopsis thaliana landsberg
atgatttcctggtattgaatttccgtcattgccaacttcccaaaatgtttcctagtcctcattagaatgtaaccggatatatatgggatgaccaatgtattgaacccaattaaagcagccctcggttcggtttttctaagcatcccaacgtctatagacacgcctttaaggaaccagtacattacaaacccgaatgcacccccggtctcggcaacctttggcctcccgtcgtccgggaaaaacatccgatgaagcaaagagcctggcctggtgtaagaaaacaggttgatgaccacacaccccttcagcaatacaattgttttcacgtaatcaaaatcacattcattgtttgttttgcgtttgcatggtgtaatatgatattctttttgccaaaaaaaaaaaaaaaaagcacaaactaaatgagaaacttttacaattatccaaatataaaatgcttgtaatttaaaaatgtgaaattttgaatgaacaaaaatgcgcaaaatgaggtaattattaatatatatatatatatatatatatatatatatcgtaaaaaatcaaattttgaatgaggattatacaatgattcttttatcacaaataattaaacacaaaatcggaaaataacttttgaattttctttggaaatatccttaatcatttgaaagttaagagacaatcactctacttacaagcatcatggaaggcattttaggaatgggaatattggacattttgaacaagatctcaaagaactgccagaagaaaaataccgagagaataatgagctctagattgggtagaggatattcccaaaaatacaaccctactgatttgtgaagaattttctccgacaaaccgaaagagttgatcttagtcggaagcatctcacagaacttagtcccgtcctcgctgagcgaatagccgtgccaggccatattggtccaccaactcgcattgaagggatccataggatgtatagtaacaatgttgtatggtgtgagagttaaaaaatattagattttaaaaggtgttttaagagttttggtacaacaaagatatcctatatttaacctttaatacatgactatataaaaacaactttgcaggtgtttcggttcttgtgttcttggtgaactgattaaataggggttaggacagatagatttcgatgtttatcctaaaattagtgaaactcctttcatacactcaaatctatacaaggcgatgtaatttcagttggtgatcagtaaaccataacggtttggttataattgtacggtaaatgtttaatgatcgagattcagatttaggttaagatagattaagaaatagagaatcatttctaattgatgatcaatatataatatataggaatgtgtgtaatttcatttcttgtgtccaagatcagtctttcggatccgtcatagggtttagatgtttgagattgatgtttttcttagtaaaaaaacaataaaaaaaagttttaaaagcttatttaacatactagacgtgtt

SEQ ID NO: 66604 - DNA, 724 bp, Arabidopsis thaliana landsberg
ccttgaccgccgccgtgtgcacgccgaacgattaagccatgccgccgctgctgcgcaatgcacgtatggcccggcccggacgggaatcgagcaggttatacgttgcccacatggacatcagtacgaaaaaccagatcaaataataaatatgacgcccgctaccgagcggcacgccgaacagactgatgggttcgatgcctgcgatgccgtcgtactgccccagaaacgtcagattgccaaacaggtaatacagggaaagacaccatgcaatagtgcccaatggcagataatggccggacaagcgcagggtaatggcccccagcacatacgaaatagccagtgtcagcaccaaccccagcaccagtccaagccacggcgaagcgcccatggccgtggtcaaccacgcggtactgtaggcgccaataccgacaaatgcagcctggccgaatgacgtcagcccgcccacgccggtcagcagcaccaaccccagcaccaccaggctggacaaccccacgtaatcgagctgtgtgatccagaactcgggggtgatggccaacaacggcaacgccggcagaacaaacaccacaaacagggtcagcaaacggttcatggacctattcctcgtcgtcagtgtggggggcagcaaacgaacgccacatgagtatgggaaatatcagggtaaagacaatgacctcttttgtggcactggcccaaaatgacaaaa

SEQ ID NO: 66605 - DNA, 180 bp, Arabidopsis thaliana landsberg
ttgaacataacagcgatacataaactttgcttaacttttgggagacacatactaactatgccggttctacggggactactgaacatacccttgcgcgagcagcctgtactcgatggattcaccacagaacgggtaagaatactctccggcgagatggctctctaatagcgagagggtggc

SEQ ID NO: 66606 - DNA, 484 bp, Arabidopsis thaliana landsberg
  unsure (1)..(484): unsure at all n locations
tgaatctctgaagttgatgcataataatgtattttgaagtactttgaaatgaattgtgagatttcattttttccttgagnnnnnnnnnnnnnnnnnnnnnnnnnnnnnnnnnnnnnnnnnnnnnnnnnnnnnnnnnnnnnnnnnnnnnnnnnnnnnnnnnnnnnnnnnnnnnnnnnnnnnnnnnnnnnnnnnnnnnnnnnnnnnnnnnnnnnnnnnnnnnnnnnnnnnnnnnnnnnnnnnnnnnnnnnnnnnnnnnnnnnnnnnnnnnnnnnnnnnnnnnnnnnnnnnnnnnnnnnnnnnnnnnnnnnnnnnnnnnnnnnnnnnnnnnnnnnnnnnnnnnnnnnnnnnnnnnnnnnnnnnnnnnnnnnnnnnnnnnnnnnnnnnnnnnnnnnnnnnnnnnnnnnnnnnnnnnnnnnnnnnnnnnnnnnnnnnnnnnnnnnnnnnnnnnnnnnnnnnnnnnnnnnnnnnnnnnttttacatgcca

SEQ ID NO: 66607 - DNA, 433 bp, Arabidopsis thaliana landsberg
  unsure (1)..(433): unsure at all n locations
aaagagaaaaagacagcaaaaggaagggaaacaaccccgcatatgacagtaaaggaaccnccccaaaaaacaagaacacaagaacacccgagacaagcgaaagagaccaccaccaccccacgagcgcaacccccaaacaacaaaagacacaccgcaacgcacgcgaccgcacagacaaacaaacgcgcacaaaccggaaacaaacaacaacgaccgcaacatagcgaacagggcacccacgacaagcggccccgcaccagcaagcaaaacacccaacacaccgagagacccagacggacaccccccccaagaggcaaacgcagcccccactaacaaagcccagggacacgaaccaaaaccagaacaaaacgccaacccgcaacaccaacaagaacgaaaaacccacaacgaaggggcccgcaacccagaacca

SEQ ID NO: 66608 - DNA, 2091 bp, Arabidopsis thaliana landsberg
tgagtgtcatttagaatatggttagaatatgtcgattctagagtttaaagtggttttgtgggtttgattgcaacttgaaaacttagaagttagaaccctctgttgccacccttagatacccactcaggcaagtttcatctgatatcaccaagctctttgcatatgggttctgcatttcagaattttcggttcctttttatctgctgttaaacttcactatccagttacttcttaaaatggttaatgacattgtctccacagatattctgtgcaggattacagaaaatttcggagtaatcctatcaatcaggctgctatttcacttgctgagagcgggagaataggagccttaaacctgctatttaagcggcatccttattcacttgtttcgtttatgctgcaaattttggcagctattcctgaaacagtccctgttgaaacctatgcacatcttcttccgggaaaatctcctccaaccagtatggcagtgagagaagaagattgggttgaatgtgagaagatggttaggtttattaataacttgccggagaatggcaagaatgattctctgattcaaactgagccaattgttagaaggtgtttggggtataattggccatcatcagaagaacttgctgcatggtacaaaagtagagctagagatattgattcgaccactgggctgttagacaactgcatttgcttgattgatattgcatgtcgaaaaggcatatctgagttggaacagttccatgaggatctatcatacttgcaccagataatttattctgacgaaattggaggcgaaatctgcttcagcttaagccttgctgggtgggagcatttatctgattatgagaaatttaaaataatgcttgaaggggttaaagctgatactgtggttagaagattgcatgagaaggcaattccatttatgcagaaaaggtttttggggacaaacaaccagaatgtggagtcctttctagttaaatggctgaaggagatggcagcaaaaagtgatatggatttatgctcaaaagttattgatgaagggtgcattgatttatatactgtttgtttttttaaggatgatgttgaagctgttgattgtgctctgcaatgtttgtatctgtgcaaagttacggataagtggaatgtcatggcaacaatgctatcaaagctaccaaagataaatggttagttgtccagatccaatgtattcccaacccaaaatctatgtaactaaattatcggatgtccttatcgattcattactgtatcaaactgacatccatgcaaatgcagataaagctggtgaagacattcagagaagactcaaacgggcagaaggtcatattgaagcagggaggcttttggagttttatcaggtctcgaaatgttgctgcatcttgaattactttagttggtgtctcttagcaaaaaaatatgtagccttattccatgtgcacatatttcaaatgaactaacttaagcatagaaacatgtgcactggattagttctctgcatctgtagaagtacaaggggatcttatgtttgaaattatggaagttctaatgctaccttctctttctccacaggtccccaaaccaattaactattttcttgaggttcatttggatgaaaaaggtgtaaagcagattcttcgactcatgctttcgaaatttgttcgtcgtcaacctggacgatctgataatgactgggcatgcatgtggcgtgatctgcgacagttgcaagagaaagccttttatttccttgatcttgagtttgtgctaacagaattctgtagaggacttctaaaggctgggaagttttctctggctagaaattatctcaagggtacaggttcagttgctctgccatcagagaaggcagagagtctggttattaatgcggcaaaggaatacttcttctctgctccgagccttgcttctgaagaagtaagtggtgtttctatgtttgtgtataaagatttttgtctatcctaaatatatttatgcgactttcaatcctgtaaaattctttcttctggcgatgtagatatctatgatggcaacaattctctttgtgct

SEQ ID NO: 66609 - DNA, 2006 bp, Arabidopsis thaliana landsberg
ttttcttcttatatagaggtgagtccgttggataacaaaatatgcaagacaaggagtgatcgtttctcaggagtgtgcataagcacaaacaattgtgccatcatctgccaacaattcgagcactttgatggcggtcactgcgaattcgatggagccttccgtcgttgtatgtgcaccaaacaatgttgattcaatactctctatttgatcattgtttctatataattataagggacacactttgttaatttgtgtcctctctccatatatactatatactatctcattatttaagaaatttaatggatttttaataataattcaagtctatgtgtttggtttaattatattcatcaaaatctatccaattatacatttttacatagccaaaaccattcaagctttaatcaaaattaggttaactacttccgggccaagtaaatatatactagctcagacttcaccaacctgaaacactaaacttctcgtaaaatttgtgcctcaaaacgatatttcaacccgagactcgagcaaagatttgtctctcttcactatatcccgagtctcttggaaccacactctgagcagaatttggatgtctctctcaagtactgtgctccacattggtcacaaaatttcgccggactatttggctgtggaaagacagataaacatacgaggaccttaatggaaatcgaaattatactattagaaaatagatatagcgtagattttgtaccattacatggcctccagtgaggggttgcaagcaagccatttgtgtgtgagatagttcagggtcacattgatggttctgaccgggatagtgtgtggctgcgtgttgactttggtatatagattgatggtgttggtggctctggtgaatagattgatgaaattgatgagacaaagatgacatatgatgtttggaaggagaaggagtgtgttgttgttggctttgatcctgcaattatgacaaagatggttgataaattcgatgaactcaagatcatttccattagaatttgccattgattgtagattccgaaagagtatgcacttacttcgcgaaatccttgtgtattagctaacgttgaagagtctatacctggaaatgtctacaaaacaaaaacaaaaactgtcactttgttcttcaaactcagataaaagctataaacagagtgttgattggtcttacaggcaagccattgatgctggagacagaattctgaagacgcctatgcttgcgtcgagggcagtagaatttataatctctagcagagatagccatttcattacggcctgttaatcgcttaaacctgtagtgacaatatccaattatattctgatgtaaataactcatacacaattcacaatagtaaagatctgatgatgtattttcaccattcagcttcttcaataggcaaatcatttggcttttcaacaatatccaaaccattaaccaccacaaagcgaactcgtttctcttcatgtattaccaattctggaaatcttgtccttgtttcaactgaagttgccagttctcttctcctgtacatgcaagtacttgggacaatcacacatatcaaactagtgctcaaaatatcacttttgcaacacatcagagcagatacaaaatacctttcttaggaaacttcttagttaatttcctatacaagccaccagcagcttcaagagctactccaatagtcttatcccttattccattcaatgaagcaagcctcacatttgcttcaccaactaaagtctcatacaaatttgcaatatacatcaacggtaacgcaaaactcggatcaccttcatatcgcgtatcatccgacttcctcttcactttactattactatcacgtcctcctgaatccacatcatgatcaagtttgctctcgcagacttcaatcacatgttggctaataatgatatccgatatgatttgcagaaacctccctcttgctgcttcaatcggtgaaacatctaaaacacaataa

SEQ ID NO: 66610 - DNA, 649 bp, Arabidopsis thaliana landsberg
gttaatagtatctaataataataatgactttacacaaataagactgtggactttgtatttgccggagttactagccttgtctctgctctcagcaaccgcccaaatcagatctcagtcaccggtttctcaccggattttttcttcattttgtatctgtgtaactttgccactatcaggccttttggctcatttcaggggcaggcccattaaataaataaaaataataataataataactttgctttttgcaactgttgtggctttttatctaccaatttttcattaaaatatttatgattatttttatctgatcgtaattttttatggtacttttccgttataagttttcgtatgaatagtttttttattcaaatgttaaaaaaaaaaaaaatctattaaaatattgcgcacttttaaattctatatttttgtccttctttctaagtatttcccaaattttggttctttcacacatattattcgacaaaatataaatacagagagatttgttttattgttcaaagttttactttaaaattctagataaaaagtttgggaagtccgaaatggatattcctaaatattattctggagcttattcattgggcaaaaagttgggggcaaaacagcggttattatacctggttgg

SEQ ID NO: 66611 - DNA, 547 bp, Arabidopsis thaliana landsberg
gtcaccaaagatttttccgtaaaaggtaataagatcaacgtattagtctccaaatgtaatttgttatcatttcttagaataattgtaattaaccaatttgaaatttaattgtagcaccaatttccagaaacttttggtgccttcatgttaagacccaatcactgagttagtttccactaacatccatactatcgcccaaatactagcttatgtcaatgatcaaagtgggaaggtagtttgttaacaatgttttctactctttgcatattttgttgaatatatatatatatatataattcatatcttgaaaggaaaaaaagctatgcccaaaaatcatatacgtaatattaagtagagatatttaccctttaccacacttttttaagttgtgtttcattcacacacacttaagttttcacatcttttttttatgtgtgttaagtcatgtataccctctaaaaccaatcttcctcttttttctttcctaccatagcaaaataaatgagatctctctctccctctctctctctttctcactctctctctc

SEQ ID NO: 66612 - DNA, 581 bp, Arabidopsis thaliana landsberg
  unsure (1)..(581): unsure at all n locations
cagctcgaggttacgaggaacccgccattcctcaccagcttcatcccgcgcaggttgatctttttataacctgtgatcgctttctggatattttccctgctcttcgtaaaagcaggnnnnnnnnnnnnnnnnnnnnnnnnnnnnnnnnnnnnnnnnnnnnnnnnnnnnnnnncatcaaaagcattcaccgcctcgaaacggcagatatggtcaagaccgnnnnnnnnnnnnnnnnnnnnnnnnnnnncaacggcattttcagaaatatccaggcccagcactgattttgcaccgtaatgcgcagcatgtatttcaaaagtgcctgtataggtaaatgccccgagcacttccgcatccttcactatgttcctgatggccctgcggttatcctgctggtcgaggaaatatcctgttttctgcccgttctccaggtcaacatgaaatttcaggccgttctcgttaatgatgatatccgtattgaatggagcagagagaaaacctttttgctgcggtaatccctccagttccctcacaggcacatcattccgctcaaaaattcctttaggggagaaaaggatatt

SEQ ID NO: 66613 - DNA, 226 bp, Arabidopsis thaliana landsberg
cccccaacacaagagcgggaaaggagagcccaaaacgtttgaaaacaaaaagcagagaaacagagccggggggacaaacgaagagacccacacaaaacagacaagagcaacaagagataagagacagaagaagcaacaacaagagcaacaagagacaagacgactaggaagagaacctggcagaagactggcgagcaacgccaacgggacgccgaaacgaggaacc

SEQ ID NO: 66614 - DNA, 520 bp, Arabidopsis thaliana landsberg
  unsure (1)..(520): unsure at all n locations
agataccgggatcatgccgccgctgagtgctttgccgagtatgagtatgtccgggcgcacaccttcatgatcacaggccagcattttgcctgttcttgcnnnnnnnnnnnnnnnnnnnncggcgatgaacagaacatgatactgcgagcagagcctgcgtactccctgcaggtagccatcatccggaaccactacaccggcttcgccctgtatgggttctaccataaaagcagccacatggttattttgcagcgctttctccagtgcggtaaggtcattgtaaggcactatatcaaaaccgggcataaagggcccgaaaccgctgtagctggaggggtcggtggaagaggagatggcagccagcgtgcgcccccagaaattgccttccgcaaaaacgatccgggcctggttttcaggaacgcctttcctggtataggcccagcgcctggccagtttgatggcggtttcgccaccttccacgccggtattcatgggcagcactttatcatacccgaaatag

SEQ ID NO: 66615 - DNA, 612 bp, Arabidopsis thaliana landsberg
atctatggcccgaaagtcagtcacaagcttagtcaagcaactgtcgagagaagacatgacaaatagggtaactgaaattaactaaccctacattgcattcaatttctcctttttcttttctttttttatttattacaacaaaactttaactgcccacagtttatgcctcgagagtatgccattgaataaattatctatactccaagacaaaacctttaaccacagaccaccttgtgtatatatttttctaattatgtagtattatttaactttagattagaaattatttaacattaaataaataataaatttttctcaatacgtttctaggtctaaaataatgatatattcgaaaaagtgggagtaagataggcagattagttttatctaatttttctttgttttaacaacttttgtttgatacagtaatgatactactacattattagcttttagaacatctttttttttttttttttgtgtgtggctagaagactcataggccttaattattgttccttcttttggggacgagtgtgcttggatctttaaaccgacccatctttaaagtttgaacgttatgggaatttcatattcatatgtatgtattta

SEQ ID NO: 66616 - DNA, 603 bp, Arabidopsis thaliana landsberg
cgatcacaagccttgcttcatcacacgctgggtctactcgaccaatcacaaggatatctgcacttctttatctgggattctccatgctgtgcggaatcctcggcaccggcctttcggtcgccatgcggatggagttgcaggaaccgggcctgcaattgttcaacgaccccaacacctacaacgcgctggtcagcgcgcatggtcttgtgatgatcttcttcgtcatcatgccggcgcttatcggcgggttcgggaactggttcgtgccgatcatgatcggcgcgccggacatggcgttcccgcgcatgaacaacatctccttctggctgttggtgatggcgctcatcctgttcatcatctcgctgttcatgcccggcgcgtcggggtcctacggccatagcggcgggtggacgatgtatccgccctattcgaccgccggccagccggggccggccgtcgatctcgtcatcctgtcgatgcatctggcgggtgccggctcgattctcggcgccatcaacttgatcaccacgatctttaacatgcgcgctccgggcatgacgctgcacaagatgccgctgtttgcctggtcgatgctcgttaccg

SEQ ID NO: 66617 - DNA, 1441 bp, Arabidopsis thaliana landsberg
  unsure (1)..(1441): unsure at all n locations
atatagaacaacatgaataataagtttgtctctaatgattcaaagctggaatagatacaataaatttatcnnnnnnnnnnnnnnnnnnaataaaacttttgcctcaccagtcaccacaacatctcttagacataactctaccacttcctatatattgtttgcattctacttatgtttacatgttctatttactctgcatgtaaacacttatagaaagattccattagatcatttcttacatacatgaaataaaattaaaatagcctaaacaacaaagccaaccactaaatggatgtctgcctcaaagaacttgcattcacacgtgacaaaatctcatccatacatccaaaacgtcagcctcactttcttaatcactcactagccttttatagaaacgcaatgacgacggagaaaccaagtgagagagcgattgaaatgaacaaactcggagcaccattattgcctgaaggatcaaaatctccggccggaccaaacgcaggaggtcccggaaacgtctgtgttcctgaaggagtacctgtcgtgggagttgtccctgcacttctgtggaagacaaaacaggtaaaagaacaccaaacttctaagtcacgttacataaagaaagacaagttttaaccaaacaatctctttaccaaatcttgaaacaaacataccctggacttgaaggatataagcaaccagtaaccacagctgcaaaagaacagaggaaaacatcaaaaagattgcatcataacaccaacaaatttaggtttcagagattttggtttttacttgaaggaagattttggctggtagtagcagttcctgagaaattacagcttccagagatttgaccaaatctttggaaataagtattaaccgcccaatcacaatgactcttgatggtgtttggttgataacaaggacctttctcatgaataggattacaatcttttaaaactccacatgcataatctatcgatgtttgaagatctttctctccaacaccatctctacatagacaataagttgcacctagaaacagagaaagtgagagagagttggttttgtttgaaacctcaagaacagagaatcattttgaacaaaaagcttacttgagtaggtggttaaagccaagagaaacaagagactaagaagcaatctcatgatggaccaaagcaagtttttaactcctaaacacaatccaagaagatagcttcaaagacagaggagaagaagaagaagaagaagaagaagaagaagaagaagaagagatgagattttagatgagagagatatgagtttattaataaaagagagtgataaagaccataccatctctctctggttccgaggtttaaccacagacaagaatctgaaaatctcagtgtccaaactccaaaaatgtatatggtctcaacatttgtttttttctttttctttt

SEQ ID NO: 66618 - DNA, 453 bp, Arabidopsis thaliana landsberg
ggagaacaacgacgtcacgatttctatgccaatgactccatcggaattcaaaaaccgattactcttcggctcattacctcggtcatcctccgatcccacagacctacaatctacggagcctaacgtaccaccgtctctgttttctttaccagaacacaacgacgacacagctactgatatggctcctgaccaggaaacagagcaatcagtttcgaaatccattgcaagacaagcacttgctttgcttgttgtgtatctctctttaggtgtgcttatctattggctgactctagatagcgacaatgcgtatcagactcatcctgttgctgttgctttgtacttttttctagtaacattttgtggctttttaattgtgcattttgttttgcgaatcggatggttggattcgttttgtttccttggttttgtatagattccacagtagggtttttg

SEQ ID NO: 66619 - DNA, 526 bp, Arabidopsis thaliana landsberg
aaattgggcgccggctcgccaatgtaatcaaacccggtccagatgaacaggcccgttaggaaatcgtactttttaatgatcttccaggggtgctcatgagttgagccccaataagccgatacattgtcataggccgataccgtataatcggcattgccatttgttaaaggagttttgccatccttaggccagcgccggatactgtccgacggcatatcataatgcccgcgcgttgccagcgccgacatattttcagtgccgataaatttttgacctgggtaattcttcttaaaatcggcatatacctcctggtgataattcaggccaaccacatccagcgcgcccgattgataaataaagttctttttagggtccggttcgctcaatgccgaggtaaccgggcgcgtgttgtccagcttttttactatgcctaccagttcgcgggcaatgctgatgccggtgctgtcaaactgttcgcgtatttcggtgccaatgctccacataaaaaccgatgggtggttgcggt

SEQ ID NO: 66620 - DNA, 584 bp, Arabidopsis thaliana landsberg
tttttttgaacacaagcggtccatatattttaatatgttcgtatttaaatttatactttcttgaataaaaactgattcggcaattgaagtcataaaacaaaagcatctgtctttgatcgaactgcacattgtgggagataagctaattggtaaaagaagtatagaaaacctttataaagtgatccaaacttgtttttatcaatagtttagcctaagagaaatcaaacaacaaaatagtcgtcgatcatcattagttaaataccttagtgatagtgattaatgttgattaattagtagtagtaatctgtgtgatgatttatatatatgtataaaaagaatccagatataaacctgtttatcgcacgtaaacaataccctgcttatgtgcatttgactctgtgatcggttcaatgtactacactaaaatatttcttcgaaaatataatacgttttaaaaatactaatatataaatgttgacattgtgatgctacaattttgtaatcaagaactcgtttggtatattctgaactgtagacagaacccctggttctcgtagacaatgtagtggataacatactaactc

SEQ ID NO: 66621 - DNA, 519 bp, Arabidopsis thaliana landsberg
agactatagacgtctagacctaacaattgtcgtacactcgtattatttagttgaagttataaaaaacgtattacttttaaacgaattaaaaaaatcatgattaagtcataaactattgaacataatatagtctccattaatctatattatctaatactcccgtgatcggtcaatgatgtatgcagaattcagaacattagtacgtcacaaagtataaaatgacggtctttaatttacttgttcaagcttttcctccattgtttattttcaacatgattacatgaaagtgttgtttacttctcttaataaccaacttattcaaactgcattttaatctataaatatgactatatgagtgtgttaaaacacctcagaatatcagcaaagaatgcttgaatgtctatataacctaacctaccattatgttcttaccatgatttaaattatcttctcaagttccattttcgtgaagaatatatgaaagtcaaatattatttgctgaacctattttttttcctt

SEQ ID NO: 66622 - DNA, 569 bp, Arabidopsis thaliana landsberg
  unsure (1)..(569): unsure at all n locations
acatggccagcgacacgcccatttccgtttcaccggcgctggcggcgcgcatcgccaatcccgattctctacgtcaacaagggattcgattccagcggtggcagccagtccgctgacaaccactacgcacgactggatgccgcgttccagttcaatccggacctgaccgtcaaggccggcgtctccaacagcgtgcgcagcgcccgcaatgatacctgggtcggcttgacgcccgtgttcgcgggcaagggcgcgagcgatccggatggctgtctggagcgctgggtgtacgccgaccagatcctcgatggcggcggcgtgccgggagcctgcacggccagcaatgccgtgggttacttccacggcaatccgctgggcaatacacgcctttccgactaccccgcctcggtcagcgaccatctgcgcacgtacaacctgngcggcgtgacggtggtggggctggatccacgcgccatgtccaatcccatcgacttcatcaattcgctggctccgggcctgcaaaaaggcgagaaccccacggcgaactgggacgtgtcggtgcatacggt

SEQ ID NO: 66623 - DNA, 109 bp, Arabidopsis thaliana landsberg
ttgtgcatattctgttaacttcattaattagcctattgataatactccattctggatggttaaatttatctctttttttcttaggtgcgtagaccattgtacacaaggt

SEQ ID NO: 66624 - DNA, 2299 bp, Arabidopsis thaliana landsberg
aatctataaagtagtacaattttactcaagtcaataaaaaccaatcaagcaatacaaatgaaaacacaggaccaaacatgtttagtcagcatgaagccaataactcaacccaaatcagaacacagatacagacaaacgaaaagtcacctggttgaaagatttgatggaagaagggctggcattttcacaagcaggtggcagagcttcagctgtactaaaaccaccgctcaaaccgagattctggggacaaacgaaagagctgcagcaattcaatggatcaagagcacaattagattcctagattcaaatcaaatgaccacaaaagacgtcaaagaatgtgtttttactctaataagcagacacctaaacccaaaatcaagactttacctgcgactaaaggaagattgggcatgcccacgaattggggacacagctccgatcgatgagaatcgtcgccgactcaatgtcggaaaaattctatcgttgcttcttccgcaactactggacgcatcatctacggcgttgaacgaagttaagatccctgaaagcttgattccggaaacaatggagctcgtcgtcgccaccgcaataaccatcactcgattgctcaaccaacacagtagagaaaaacttgaacgagggagagatttctatgatggttcgttccttcctctctaataaagcaaagcgccttaaaccaaatcttaattaacttttaacttttggtctttttgatttataaagggtttccagtttagtactcagtattttattttttcttgaaaagtgtttattttattttattttgggtttcatttgaatatatttgttgattactgaatgacttaatgctgctttgactaatggacctttgaaatttccaaattgagtttggttggtggtagttggtaatgcttgggcagtggataactccttctgttagtcaccaacaacgatttccttgtgtgcttatttccgcacatttaccactctgctcaaaaagtaggttcatcaattttgtcataccaaacacttctttgttttagacatggtcaaacacagcacctataataggaaatcatataaaaatccatttagtggcccattataacccaataaggcccaataaggttaaacgacccaaactatatatacatcccctcccaaaaaaaaaacaatattacatgagccgatcagataatgatggtagtcgccggaagaaatttaacaccggagaaggtttccgatcacggaaaataggatgccggaagtaataaaaccctgacgccatagccaccatcttcgtcggcacatgatacaacaccaacgccacaaagaaacacagccccacgaatataccagtcgctcgtgggtcacgccacgtcaccaaagcttgcatcttctccccttgcgcagccacttcaccaagaatcgtttgaactctagctccgacgtttcgtagcttatcgtacctcaaccgaaccatctccggtggtcggttgctcggtacgacgtcaaactcctcgtcgagctcgtctctatcagctgcatcagctaacgagagtcttggatcgaaatgtggtagagcagcacgtgacctgaacctataattccacgcaccaatcacgaacaagtaaaacgctaatgtcggtacgataagatccgggaaccaaatcagcatcacgacaagtgcgtgaactagtaaagttgatgtcggattcttccagaaacgggtgtcatcaacccaccgcaccacgtcgaccattccggcgactacattcactatccgaagccaatttgctctgactttacgcatactgaaagtatgagtatcggcgtcgagcatataccgtactatctccggccttaaaggcggctcagatcgtgacaaatgtgcggccaagatcttcactgcagtgttcctcaacatatcttcttgaaacaaactcaacggtttaatgtgatgcatcaaaggcaataacggttgagtatacacgtgtaagaaatccaacggtggagctgttctcacgaatctaacggccaattctatctctcccaattttttaacgccgccgttaactaacatcagtagcggatacgtatttctatacgctttaccagtctccagcgtcgatatacgtatacgtacttttccaattcttagatcttgacgcgtggcttcttttccaccgtcgacttcgcccactccccagctatcgaagacaaatatagaaaacccgtccacggatcgtatactttccacgtgtactgttcgttccgtaagagctaaatatggtgt

SEQ ID NO: 66625 - DNA, 664 bp, Arabidopsis thaliana landsberg
tgtcacaaacaaatttattatttatcatttaaattgatttccataactaacaaatccattcaatattcacaggcaaaaaaatatgagcattaatagtatagatttccataaaaaaacaaatctattcaatatcgatgactaaaaatatcataatttaaactgatttccacaactaacaaatccgtttaatatctaaaagatggaaaattattcgattctaataaatcgtaataccattatataggataataaagtattctaattttgaaactaagtaaaactaaatattgagatattaccaaatcaagaatataccttttaaatccttattcgctattaaacggttgtagatattacttctctaaaccctaaactaatcttaccccctcatttcatataagtagatgcctaacgtaacaagattagatacacactaaccttttatacaagcattattcccttgacactcctttaaaaacatggctgcaaatcttggcatcaccaaccttgctgatatcattcaagacgaattagaagatccacgtcaagactgtccactcctgggacacaatacacgcaatacactggtgaaaccattcaagatactggccgatgaggatgtgagtatatattacaaattcattatgttgcaatgactattaat

SEQ ID NO: 66626 - DNA, 538 bp, Arabidopsis thaliana landsberg
tcagcttggcgtcttggtgaaggtgggagcttggtagccaggcgccacaattgcattgttcacgccatttttcgcgagtgaatctttgagccacagtcggtattcagggccgcgcagactgtggtctggcgaacagtccacactatatttgcgcaaggcatagccggcgatggcagcgcgcagcctgaggcgtagcatgccgtccgtcattccgtaatccatctgtgtgatttcgggatggggctgatcagggtgagggaccagctccaactccacgatgcgtgtccattggatgtcctggtcaaacaactcatcactcgccggcggccgatcagtgcagatttgggggttctggatgcgggtcagcacgaaatcccggaactgcaggcttttgcgatcaaaagcgcgcacatgccagcgcaggccagtgtccagcaacgcgaagggcacgatttctcgcgcagatcggtcgctgctgatcgcgtgatattgaatgctcagcgcctgcttgaaatggatggcccgggtgacggacgac

SEQ ID NO: 66627 - DNA, 172 bp, Arabidopsis thaliana landsberg
tttacagatatgaggtattatactgtctatcgtcgaggtcacgctcttacttatgttatatttctatataattttattaattagttttctaaaagagaaggacaatttaaaattattttaaagagttttttctaagtagttttgttttcatgtctatcttctgcccgctctg

SEQ ID NO: 66628 - DNA, 742 bp, Arabidopsis thaliana landsberg
ccttagcagaggcgagatcttcaaagcggtttcttgaagaacgccagcaacaaccataccgatgactaacggaaacgggactaaagcaagtttcctctcatgagcacaataagacatctcactaattgaagaaaccgccaatataggaacgaacaagaacttaacgactgatatagcgagatcaagaacgagctgtatgaagtttccgaaagctctattccaaggaaattccttaaccggctgtggagaattatcccaaacatctttggttctcctcaacagattatcgaaattaagcttctttggttgttgttgttcccctgaatgtccagattccatatgaattgcacgacagaggaatgatctctttggtacgttagcttcatatggactcttaaaggtacaatctttattgttcttagagtagctcaacgtgaactgcaaaaacaaaacttagagaactcaacaactcatatcacacacaagttcattatttaaaaaacagtaatatgcctaatgaaagattcgtaatttacatggttaatggatccaataagagttgtgaacctctaaattcactattctatctgattgaaattgatccaatatacctaaaggtggaaatttttgacattaatccaaagacccattgaagaaataatgaaaagttacaacctttttgctgggtggtagagttattttgaagatttttgagaaaagaagagagagagatatggttacc

SEQ ID NO: 66629 - DNA, 2291 bp, Arabidopsis thaliana landsberg
caacttatatcaatagtaaagctttttcaaatttcaatatgcttttgtggtcctgtccataatgagagcttgagctagtcaagactcttaatgtttttttaagagttgatacttagaatatgatcttgtgattattggctggcttatctccatttctaaggcaacttgttattgtttgattattttaattgtaggcaaagagagcgttaagggcactcaagggtttggttaggcttcaagcgatagttagaggccatatcgaaagaaagagaatgtcagtccatctgcgcaggatgcacgctttggttcgagctcaggctcgtgtgcgtgccactcgggttattgtcacgcctgaatcttcttcttctcaatccaacaataccaaatcttctcacttccaaaaccctgtaagccttgtaaaattccctatgattgttccttttaacctaaaacatgtcttttagttcaaggtccctttttaacaactcctctgtttttctttaagggtccaccaactccggaaaaactcgagcattcgatctcttctcgcagctccaaactcgctcattctcatcttttcaaggtattacattttcagttgctgtttgtttcttctgtttttgttgcttgtggtcccattagttcaaaatttcagagactatacaagttactgacattgctttatgttcaaaacaaatccaatctcaagaattggtttataggcttctcattgttcctttgttagacttatccatttcacattccatttaaactaagagattggattaaattttcagaggaatggttctaaggcaagcgacaacaacagactgtaccctgctcacagggagacattctcagccacagacgaagaagaaaagattcttcaaatcgacaggaaacacatcagttcttacacaagacgcaacagaccagacatgttctactcatcccacctcatcctagacaatgctggcctgtctgaaccagttttcgccacgccttttagcccgtcctcgtcgcatgaagagattacaagccagttttgcactgcagagaacagtcctcagttatactcagctacttctagaagcaaacgcagtgctttcaccgctagttctatagcaccgagcgattgcacaaaaagctgctgtgatggtgaccatccaagctacatggcttgtacagagtcctctagggctaaggctaggtccgctagtgccccgaagtctcgaccacagttattttacgagcggccttcatcaaaacggtttggatttgttgatttgccgtactgtggtgatacaaagtccggtccccagaaaggctctgctctgcatactagttttatgaacaaggcttatcccggttcaggtcggttggaccgtctcgggatgccaattgggtataggtactgagaacgttgttggaccctttaacctggttttgttgtagatcagtggattgagctttgcttctaattttctttgtttgtagtttggagctaagtggatttaatctaaaatgcaaatagaacttgcttaatcaaaatgtttgcatctctataaagcattgtcatttgcctagactttagttgttatcaaaaattttatgaatatgaaggaaaccaagagctataacagatatatttggtgtaattacaaaagcgtctaacactaaaaaaattgacaagaaaatgtcatgtccattgggatttagaggagtagcttagtttatggcaccacttacaatatctgttcaagctatctcctctgaatagtatcaccaatccagaagtaaacctgcacattggtataacatccatcaaaaccgaagtccggtttagtaacccaatcaaatgttctgaagcttaaccaacatgagaagaagaaatggtagttagtatcatgaaggatcaagaaagttctgaagcttaccctgcgacaaagacgatcgatgcaactatgcaaagcacgagttggcaagtgttgtacttgggtttaacaatggtaccaggcataagagaaacttggttttcttcccattcgaactgcggatgaatcaagagaagaaaaccgagtagaaaaccaccaaagaaacctccaatatgagcaaaattatcaacaggaggaagtgttcctaatcctaagttaacaccaacaatcaccaaaagcattactatagccacaccctacataacatgagataaaaaataaaacagaatcaacgaaccaaaacaatagtcaagttgctaaatatagattgattcattgcgggttttcagctcatac

SEQ ID NO: 66630 - DNA, 1697 bp, Arabidopsis thaliana landsberg
  unsure (1)..(1697): unsure at all n locations
cttctctttttgcaaaattccgtcttatcattttctctctctcatatcaaaagtgagaaagcgaccggtgttccgtactttggatgagatgtgtttcgtcagtttccttactactaatcaccattagtcttcttcttcttcttcttctctctctctctctctgtctgaaaacgactttcctctgttcttctctcccccaattcttcttcttcttctctcatcctttcccaatctccatttttcgatgcttcattgattcacgagaagacaattccatttctgatattatttgtttcctttctcgatcgattctttgcgtaaaaacctgtttctgttctgtttcagaatctgtctctcttattactctgttctgttttgtctgtcttaataaagtttctttctctctttaaagacaaattcatagttccagtttccgaacttcactctctcttgtcggattctctgatgagtcatcagatctctgtttgaactatccaatttctcatcctctcttattttcttttttaatttcacttcaccggagatctccaatcgccggagaaatgggaggattattgcatctcttcgatttccacaacaacagtttctcccgtaaagttttctctcatcacaaaaaccgcgacgaaggtaaacaatttcactgaattaaatgatattaactgagaaagatcaaatcttgtttctgggtttttttgaagattattcaatcactcatttttagttgtctttgaatattttctgcagatctggaagctccaagaaatagtttcgagcttcaagtcgacaactttcatacataccataacgagaaagataaaccggtaaataaataataacgaacatacttttgtttttatatctaaaactgaaaagacaaaaaaaaacttgtaaatgaatcttttttntttattataccaaaacagagtaatggatttgaggaagaggaatggtacgagagaagttgttatccaatagaggaatcaatgaagaagaagataatcgaggagctttcgaaacgttccaacgataagcagaacacgccgagtcttgtagctaagttaatgggaatggatgcacttcctttagagtctgttaagtcatcgtcggcttggatctatcctcgtcagagtaaattgaatagatttgatgatgagaaaggaggaagaagaagtagaaaagggaggttatcttcagcagtgaccgcattggatgtaatggagacaccaatgcgtagagaacatcctcaagaagaggagctacaaagattcagaagagagtttgaagcttggcaagctgataaaaggtttaaagattgttcaagaatcgttgattcgggctgcgtggtggctcgggatgagaataaagagaggcttttcacgagaactaggagctttggtagagattttaccttgaaatctgatagaactgctccaactaggattgttgtactgagacctggtcttcagagagcttatgattacgaagattcgttgactacttcttcagggacgactatggaaggaagcagaggaagtagtatagaagagtttcttgaggaagttaaagagaggttaaaaggtgagcttcaaggaaaagcagctctcaagagaagttcatcagttagaggaagcgggatcgagactcctttcagcgaaagaccttctccgaggtctgaa

SEQ ID NO: 66631 - DNA, 575 bp, Arabidopsis thaliana landsberg
taatgcgttatgcaggtttaaatctatctcaagttgttcactttcatgaaccatcatatcaggggtatatgggagcttatataaatttattttgtgggtatagaactaaagattaatgataccaaaatatagaataaaatctagctctaattgattaattttatctgagaaaaccaaacccctatataagagcactttaatctcagtggatacatctaaaaacaaagagaaaacaaagtaatagctattagctagtgacacctcaaaaaaaaaaaatgcagaaccagaaacattcacatatactcactgccataacaattgttctcttgtttgcgatggccggtaagtcaatttacaaattcataaaacatatacacaaactttttgatttctattagggtattttcttgatctaaaccatattaccttcgtttgtttatatatataccttatatttttttttttataatttacatcattcagcagaatacactatcttcgttagtttatcgcgaagtaaccttaccgtgtgatcgggatcgaatctcaatgtagagctctctaaatataaacat

SEQ ID NO: 66632 - DNA, 570 bp, Arabidopsis thaliana landsberg
  unsure (1)..(570): unsure at all n locations
gacaaacactcctttccacgcaggagtgaagcgtatgctgcttaattttgtttttgagaggatttgctgaagccttaaggtggcggcatacagtctcattgatgaaacttcttgaggataatcgcagctgatttgtactttacgttctatgctcagctccatcacttgttttacaactgcttccagggattcctgcaggccgaattcgctgcaatccagttccacatagctgtttaaagcgattaaaaaaggcacaggattagaacagaagatttagaattagtaactaagcgaatgagaagaatagaatactccaggtttcagtacccttcttcgattccctctatgtctgagtcgcttatgactttggctaactgctccctgcataaaacgcttgtcctcaggagcctcttttggtcttcacttaatccagatgaatggagcaaatcttgaaggaaggatattgccttttcggggtccttcacttcatggcggagatatgccaattttgtgagggcacangcaattgcatgctttgatatttgctgaacctgtaagcatattggagtc

SEQ ID NO: 66633 - DNA, 437 bp, Arabidopsis thaliana landsberg
gcatcggagcgtttttggttttgtatcctttttatttttttcacaatgtatcttatatctattttaaaatcaagttattgctaagcaatctggtcaaattgatgatgtagttttcttaaaagctgaccaaaaaagaagtgaagccaaatggaaacaagtaagaaactgttcaatattcaaatcggaagggtgaagaagagagttgaagattgtatttactattgctaacgaacaaacacattacaattttatcataatatttcaagatcctttaagtatgattctcctaatcgcatgttcacatttaccaagtgatttgaaacaaggcagtctgcggccaatgtgattttggtcagtctatttgttttttctccatgacgcctgcaaatgagtagagttcaagcaaaatacaaatcatggtaaatacaagcgtgcgt

SEQ ID NO: 66634 - DNA, 576 bp, Arabidopsis thaliana landsberg
atgtagcaaatacaaatgtgatatcgtcttaaactcgactcactttttcaagacaccaaatgtaatgcatttccacaggggaacaatggttcaattcaaggttgtgtactcagctgcctaagccaatggttacagttcaatctccaatataaaagacatttttgtctgacactgattcagtcttcttctagctttcatttcaaagaaaccatctgcataataaagcaaccgttgctcttctaattgtagattagtttattccttttaatccattaaaactacatcaagaaactgaagcaaattttatttattttcattagcaattgaagccacaaaaaacaaagagacgaaatcgataacaaaagctcgctcagagatgcttacctgcccaacggctcgaaatagccacaaaacacaaagagacgaaatcgaaaacaaaagctcgctcagacagacttatcagcccaacggctcgaaatagccacaacagagccaacttgactagcaagaataaccatggttggtgaggcacacttgtgaacaatttcatttagtaagccgagcactgcaccaacc

SEQ ID NO: 66635 - DNA, 619 bp, Arabidopsis thaliana landsberg
ggtcggaaactccaccggaagttacaacggttccaagtgatccacccccgcttggaccaccgcagactccgggcccggagtttccggttcctctcatctccatctccaccgatgccagatactccaaatcctcctacaccaaaaacaccacctgatgtagtgcctccgatttgggaaccacctcgaccaccggatatcttcccaccggagagtccaccaccgggaattgacccgccaccgcctttaggacccaccatcatgtagaactcttctctgtttctgtctaaatgacttttttagcttaaagtttctgtttccacgagaaatagtttatacacaaatgttgttacatttaaaacacaataagcaaatatggtacaaatcgatgcgactcgacgacaagtttgacaacagagacgcaaagaacacacagatgttacattggttttattggaagctttttgtcacggagtttagttactaacaaacaggaaatgtgaatcttgcgggacaaggaaactttttgcattcaagcagaagcaacagcttctgaaacccttccattaccagtctctgcactgagactgtcgtagtagtcaaccaacacctttcaaccaga

SEQ ID NO: 66636 - DNA, 238 bp, Arabidopsis thaliana landsberg
actgaaattaggtccattctgaatgtgaaataccctaaccacaaacagctaggagacttttgctgtttttaattcaatgcctcatacctaacggacgaagaactctactaagcatataccaaccatatagacatacatcacagaaaagatgagtcgagtgcacaaatctgatcagcaaatctgaactctatcataaacaagactgctgaaagatatttagccaattagttatacagga

SEQ ID NO: 66637 - DNA, 672 bp, Arabidopsis thaliana landsberg
aatggttattcatataaaattttccacacagcacaaattttgatatgcgatcatgatgagcaagttctcgcttttcttgttatgtagttttgtttaacattgatttaccaagattgaatggttggcctattgttaccgcggtaagaaaagacgttgtcgcagtaacaattactaaccaaagacttccgcaattgaaaaatgggcgtgatcacggagttgtctgttatgtgttaggttcaatatttttggttgaataatttacgaaaaaatatttggaaaagaaatattgagaattttaaaatgatatggtgacttctgttctcagaggaatggtgtaggaacgaataggagtaatttccggcgacattctcaagtggggaacactgttacctttgaccccatcatcatcatcattcatatcatccataatctctctctttttctctccgcgatacctacgttcataaacgacgtccaacgtgtgtcaatgagcaattatatctcttttgacaaccatccagctaggctagaaaacacaaaacgttattcaaaaagtaatttgacatcgtattgaatataagaatgttatgatctaatcctgtcaaatcaaatctttcttacacagttaagaatatgtgggatacgggtttatgttataaatttgatgcgttc

SEQ ID NO: 66638 - DNA, 1451 bp, Arabidopsis thaliana landsberg
ttcgatttatagatttcattctcaaacctaactgtcactgaatcaataataatcagactttttcactaagttatattgctcattatgctaatctaaactcttctccatcaaacgattagtcgccaataatcaaactttaccttgttaattactttatattatcattgttaagtcttttagtttatatactatggtttattgatgattgcctttgtgtagtagtagtattcaattacttttacatggaagtgtttttattctcccttcactttttcacaagcaacttgcttgcttcgtgggtcctttggtctaacccacgtgagtgacgttgtcgagtcgctagatttatcatattcaaattatgttgttgttaactctcccaatataaataagattacaagagattgtaaaattataaatcaacgataccataagtaatcactaatcaggtctgtcattttcttactctctatatacgtttatgtctgattttgttaatttttgaggtaatattttttttttttcgagtttgagatttttttttttctcttttacaaaaacttgtgcaaaaaaattaaaaagaaaaggggaaaaaggagaaaacggatctttttacttgggagacacgtgtcgtgacactggataactcagtcactttacgacacgtttcttgaagcagcactatggaacgccgacgtaatccaccggccacgtgtcgttcaggcagctctctcggcggccacttgcctcctctcagtcaaggcctgtctctctttctttctttctttcttcttctctctcttttcctctaatgtccaaaagggtcttcttctttgtctctgctcttcactttcaattataacctcttcgtcttcttcgccgtctctggtattaactccggcgagttttttttttttttttactttgatatgaatttgcgagatttactgtttaattcatgatgacaattttggatttttgatcggatgtgaaattcagagtttttcattcttcttcatcatcttataacaaagaagaaacaaaacaaaaaactttttttttctttctttctattgtttcggaatctatgggtgaagcaagcagacaacaaagggcatggaacagagaaatgacggttacgacaaatctttctctagacatagataaatacccgagagatctgttacgaggtttcatgtctgaaaacggcggtggaagagtctttcacggcggagaaacaaactgcgatgatgagagtacgattgagctcaatcttggtttgtctttaggtggtagattcggagtagacaagactccgaggaagctgaaacgatcttcttctgttttggacactgtaccattcaacgattcaactgtggctgagcctgagaattacacggtgggtttagagagaacgacttcgttaccggcggagatggaataggaatgga

SEQ ID NO: 66639 - DNA, 605 bp, Arabidopsis thaliana landsberg
aagtggacgtagatgcaatgagatatagatcatagggaatgacattaaagtctatgaagaagcctaatgtacaaaatagtatcatactaaaactgccgaggcgtgaccatgagtaaagagttgtaatttgaaatattaaaaaatgaagggaaagatagcttctcatggtattacctagaaaggtaataaaagtaaaaatttctgaaaatccgaagaaaaaaacgttcaatatatgatatttattatgaagatgacaaatttttaatcgaaaatatcctattaatagacgtcatcgtgaatcgtacgcgtggcttgatatagagagaacgcatcaacaaaagtaaccgtactaagaaaataaaagacatcgtgtgcatgagaagtgtgaaaaatcacacttataacgcaaaagaaaaacaaaagattgtgtgaaagttaattattatctcaaagagagcgaaaccgacataaaaccacactattgttgccttttttggttgaagatcggcatgcaatcaacggagatataacatctttccatcaatgctttccttggaatgatatatgaagcaaatcgacgaccacaaatatgttagaactcaatt

SEQ ID NO: 66640 - DNA, 105 bp, Arabidopsis thaliana landsberg
  unsure (1)..(105): unsure at all n locations
ggctgcagggggggggaaagccaattttnttcaatctntgatgnacattcacaanataaaattatatcatnaacttcaacctntcttcttaataaacantaatac

SEQ ID NO: 66641 - DNA, 1587 bp, Arabidopsis thaliana landsberg
cactatcaggtgaagcctattacgtttacttctgcagctattgccccaattactaccacaaagaatgtgttgagtctccttccgtgtttcattcctctgatcatccaaaacatcctcttcaacttctctggattcccgacatgtctttagaagaagaacgtgataaacgatgttgttcttgtaaacgtggcgtagacgcgctattttactattgctctatttgcgattttgcactccatatggcatgtgcgggaaatccaacatccccaaccattgacaatccaaaaaggcataagcatacccttcattactttcccaggaaatccggtctgttttgcgatgtttgtgcgttggtggacgattctgattacttatatgtatgtctcctatgtgatttcattgtccataaacgatgtgtctacttaccatatgtcataaaggtgtctcgtcacaatcatcgtctcacttttactcccaatcttccttccgaagagccaacggtgacggattgtggagtttgtcatgcaaagataaacgaaaattacggagaatactcttgcactaagaagggatgcgtttatgcagtgcattccagatgtgctatgcaaagtgatgtgtgtgacgggaaaaaacttgaaggagagcctgaagaagtatatgaagacactaaaatgtttgaggagaaaggcgatgggattatacagcatcagagtcatccacgtcaccaattgagacttgaaaaaatattccacgatgaaagccatcattgtcaagcgtgcagacgtccttcttatgatcatggtggtaatgtgtatcgatgtatgcaatgtgatgatttcatttttcatgaatcgtgtgcatatcttcctcgtactaaacaatttatgctacatgttcatccattgactctagatcccagttacaatttcatagattggttccaatgtgggaaatgttatcgttactcttgcggtttcagatatgcatgtgttcgtgtgccgtgtgacttttttccggtgttggacacactttgtgcttctatatgtgagccgtttgatcatcactctcatccacattccttgttcattactagtggtgaacacgaaagcaaaatctgttccatctgtcaatcatcggagccacaacctttaaattgtttgaaatgcgattttgttttgtgcttttattgtgccactcttcctcataaagcaaggtacaaacatgatgagcatttcctcactttttcttacgaagaagatgcaaatgatgagctttatggttgtgaaatatgcgaggaagatataaatccaaagaatgggttatatgcatgcaacgagtgcggagtcacactccacatcgaatgtttactagggagagatccgaatacgacgcctggatcattttcaaattcggtaggaacgttgtatattcttcccaacacttattcaactcgacctatatgcacaacatgcagaagacgttgtccgtaccaaataaagataaattcatcgggcggtccgtatatattctgctcttttgattgctatcaaagattgtgtcgtagcgaagactggtcctaatgcttgg

SEQ ID NO: 66642 - DNA, 297 bp, Arabidopsis thaliana landsberg
gttagcgagagtaatcgcagattgagctcccaatagagccaatcgcttggacaatgtcatcgatcagaaattgaaagaatcaataaccagagattaaggaactaggctaaaaacctaatcgcgttatggattttccggtggaggagacggtgatatcggaatcggagaaacgagagagagaggatttgagaaagctagaccttgacgacgaaagggttcttcttcttctacttctggctttgattcatttttttttttctcaatggttttggtgttttttacatatttaaccctttc

SEQ ID NO: 66643 - DNA, 523 bp, Arabidopsis thaliana landsberg
gcaacgctgaagccggtctccattaatttctcggtcttgcgacttatgcgaccctggcaacagcttgcggaacgcgtcggcggcagccttgagaaccagctcgcgatcgaagccgcaaacggtggcggtatgcgaaggcatcgaagatttcccggacgaatcaatgcgccggcatcaggtattcggcaatggggccgagcgccaacgccggcaggaaggtgagtgcgcccaccacgatcaccacgcaggccagcagcacgacgaacagcggcgtgtgcgtgggcagcgtgccggccgattccggcacgtggcgtttcgcggcaagcgagccggccatcgccagcatcgcgatgatcagcgggaagcgcgccaggaacatgcagatgcccagcaacacgttccagaacagggtattcgccgagagccccgcaaacgcgctggcgttgttgttcgatgccgaggtcagcgcgtaaaggatctcgctgaacccgtgcgcgccgggattggcgaccctcgatgcccc

SEQ ID NO: 66644 - DNA, 611 bp, Arabidopsis thaliana landsberg
  unsure (1)..(611): unsure at all n locations
gagacgcggtacttggtcatacgtcggcgccggcgagccgctcggcccaggtctggccgttgtcgtttttcttttcgagcgtcttcttggtcgcgtagttggtcagctcgttcatccagttctcccacaggacccaggcgttggagaacccgagnnnnnnnnnnnnnnnnnnnnnnnnnnnnngggacatggcctccttggagaaggccaccatgtcctgcacgtactgacgggactcgaccgcgtcgtcgcgggtgccccaccggttcacgtgcccggagacgacggcgtcgaagtcgtattcgagaacccagtcgtgggcctcgacccagccgcggatgttctccgaagcgtcgcacgcgttgtagacgctccacccggcgctgatgatgtcgatggcgcccagtaccttctgctgcggcaggtagatgaagatgttgcccggcgcgtggttgacgcccttgtagtcgagctggaacttgacgccgttgacgtcgagccctggccgagaacgtctcggtgggcagcgggatggggcgcctggtgcctaccaggtcccgccaccgctgcagcatctcgcgcgtgtattcgtgcgagatgaccttgacgtc

SEQ ID NO: 66645 - DNA, 557 bp, Arabidopsis thaliana landsberg
cctgtgtcccttggtatgtgcaaacaagacgatgctcctgaccccattgtgagttcttttgtctagtctttgtgtcatattatcttcattagctgtattctcttgtcactcttcattctctctgttgaaataatttcattaaatattagaattcatttaaaatgcacatgcgttgcttggtgttacttcttttcatgatcttttttgtttgattattttactctcttctgactcttagaatagtattcaatcatataagcaattcttcattgtgttatgttgctgaagtcaacgacaaaccatgtggatcattcatgtgttcagtctctttctttttgcattttgataacttgttaaatttatggtttgctctctgctagatcaatgcttgcaatggcttctactgtgattacttctccccaaacaaggcttacaagcctaaaatgtggaccgaagcctggactggatggtgagcagagacttaaattgaaaatctgcttatgttgttgtttctcagtgatctcagtctgagttctcgatgtttcaacaggtttaca

SEQ ID NO: 66646 - DNA, 407 bp, Arabidopsis thaliana landsberg
cttatcgaaacatggttaattgacttatttttgaactgcttatcttattttttagaagatcgtggtgatgaaccgggcagttaatctacacaacatcacatgaattgggacaaaatactctacatagtttttgtcagcaattgtaaggacggaacacattctacttagaagacattgacggatgtctgctccaagataaaataaccatatgttaatgtcatttgctttgttcgtaaacattatcgaaactagtcgactacttaaaaagccaacatattaagttagggttgatgaactatatagctaagatcgcacaaactaatttctatcttcaacctgactaatgacggcgtgctgcggataaccaatggatatgctcaaatcatgcgggcgactaagctgcaggg

SEQ ID NO: 66647 - DNA, 2299 bp, Arabidopsis thaliana landsberg
agcaatccggtccccccataaatacgacgggtgagctgaagcgcaatactttatgtacctaagatgcgtggttttcttcgcgctcgtagtatgcaattcgcagtagatagtctccgctggctctgtaaggtataactcgcctatttgggtcatgaggaagcagtcatgttccatgttcaaatcgtgtctcatgatacatgtttaggttggtcgactttatgatgccaaagtagtgataagaaacatctggggaggatctgaagtcgagaaagctgtagaaggttttcagtcggttatgaagaatagtggctccaagttaaatagcagatgggtggaactccttgataaaccacattcacgaggtcatgttaaggttgcttttaatgttagttctaacttctaagggtgttatattgtaccataaatcagaaactgaaaacattcaagtttaagaataaccttttccaggactttgatctaagaaactgagaatatataacttcatacatgacaaatctatgtagctaaattgtatgtcttgttgatataatggttgcagttgcattcattgggggctccctttttgtcctacagcaattcgcgggcataaatggcgttctttatttctcatctttaacattccaaaatgttggaatcacgagtggtgctcaagcaagtctatatgttggagtcacaaattttgcaggttctcaagtctcacctatatcaactttaaatttagatgattgtttttttctactgtttccatcacaatgtcccttttctgaactgttgggtctaataggtgctctgtgtgcgtcttatttgattgataagcaaggaagaaagaagcttcttatcggtagctacttgggaatggtaaatatctttttcgtttatcacataaactcttttgcttttcactgctttagcttattttgattgaattgatttggtgtcacaggcagtctctatgtttcttattgtttattctgttggtttccccttggatgaagatctgagccagagtttgtcaatacttggaacactcatgtaagtagcttgaagtccagcaattactagtctccttttctcagctcatatagtacccaaaaaaagacaaacgtatcatatgtttggtcctgttacaggtatatattcagttttgcaattggagctggtcctgtaacaggtctcatcatccctgagctaagcagcaacagaacgcgtggaaaaatcatgggtttcagcttctctgtacattgggtatgtgttttcttgttttcccataaatcattttataacctttgaagtttgaagaatgacgaagcaaatgttcttcaggtctgcaacttcttggttggtttgttcttcctagatctggtggagaaattcggggttggaacggtctatgccagctttggctcagtatcattgttggcagcggcattctcacacctcttcacggtggaaacaaagggtcgatcactagaagagatcgaactgtctttgaactccagagacgacctgagttaaaaaaaaaaacggtagaagtgaaagaaagagagaaagacctcaaaaattctatcagtttttcatcagttgttgtaaaatgtaaatagcctggaaattagcttgtgagtatatagatatatttaggtatgtaagaaaagatttataaaaaatgcgaaagaaagttgacaaggattacacaaaatacatacttatgaaaggtttgtgcctatttacaagtggtaagacgttcttgatttatagcttaatgtagtaacattgtctcgatctagactatacatgcttaccatgtcatggtgaaaatcgtgagtccataactcatgatctctatatattcatattcatatataatactggtttgcacgtctgcaaacaaagataaagatttctgataatattaaatttatcccaagaatattgaatataaagatgctagctggttctctaaaaaaaaaaagcgtacacagcttgtcattgaatttataacctatacgaatatgaggctcgtagaaacaactcttaaggaattgtgagagaatgttacttttagccgatcaaaaaatttgtaacataaatacactgacaagatatttgtattataataagttttcgaaatttgaacacaattctatgcatcatgctttttcttctaacaagaagaagaatttaaacacaattatatatttaacgcgccaaaatcgcgtgtgaagtctctctattagtcaacgctatatcttgaaagggtctcgagactctccagccattt

SEQ ID NO: 66648 - DNA, 1838 bp, Arabidopsis thaliana landsberg
tggatctagtggaagataatcggaagattagcccacgtgactatttagaaattgccttaaggccagttcaaggttcgggaggggatattggtgctaaaaacgaggtactatgttatttctttttcgagtaattttattttaatagtcaggcattcttgagaaacccgggtttggtgatcaagtgtaattcctttggtagaataattgtatgtcagtgacacagtgtaactgaaagcaatttctttttgcagatccgagattcaatccgtgctctttttccggacagagagtgctttacccttgtaaggcctctgaacaatgagaaggacctgcagagactggatcaaatttcggttagtattgttctatcatgccctttacctataatacttagttgtttaatgtttagttggataatatcctgtgtgcttatgcagttggaaaaattgagacctgaattcggtgctggcctggatgcatttaccaagtttgtttttgagaagacgaggcccaagcaattagggggtactgtgatgactggccctattcttgtcggtattacacagtcttatctggatgctttgaataatggtgccgtgccaacaataacctcatcttggcaggtttgatatctcttgcctctatggatgttcaattctttacattgtctgatacattacatcttaatgggtaaacatatggttgattattgcattcatacatctatgtacttcaaaccattgtgtctctcagttttaatgtttttaccaatgccttccctagcctattttcccctagattaataacgttatttttcttgactacgttcttgtagagtgtcgaagaaactgagtgtcgaagagcatatgattctggtgtagaagcctatatggctgcctttgaccaatcaaaagctccggaagaagtaagcatcttagctttagcctactgttttttttttctttttctttttttgtaatatatgattcatgtcaattctgctatgtgtagggtgcactgagggaagaacatgaagaagcagttcgaaaagccttggctatatttaactctaatgctgtagggaatggttcagcaagaaaaaaattcgaggatcttctccacaaggacttaaagaaaaagtttgaggtaatagattctaaaacagtgttgttcagtaggaagcagttgtttttgaatcctgactgtttatttacgcatctttcacatgagatttctcctctcattgtcttatgctaatatagacaatactttggtgattcaggattacaagaagaacgcttttatggaggcagatttgcgatgtacgagtactatccagcgtatggaaaagcagcttagagcagcttgccatgcctctaatgccaatatggataatgttgtcaaggtttgttatttatggatatatttttggcatagaaggattaggtttaaagtttctgtgtttttttttggcttgtttgtaatgatcgattgtatctcaggtcctagaagctcgtttggcagaatatgaggcatcatgccatggcccggggaaatggcagaaactttctgtatttttgcaacaaaggtattttactacttccactccccactgttcttcatttatctttaggtattttttgaggtttgatcatgtaatttgtgctttgtggtctactttttactcatgcagcttggaaggacctatatatgatctcaccaaaaggcttatagatagcatcgctatagagaagaattcccttgcaatgaaatttcgtaaatgttgaagatgcgatgaaacatttaaaacagcagttggatgatagtgagagatacaa

SEQ ID NO: 66649 - DNA, 1650 bp, Arabidopsis thaliana landsberg
ctttacgttcgtaaagtttccgcctttatctatctatccatctcaataacactttggaacattgggaactttctggtcccttcatgcgtctactactatattatatgcgtgagttgtgttaagtgatgttgaaattggctttgtgtttgcagactagctttccctctaagtatcgtcttcatacttctttagtattcatgtagaatagtcactttttgtaaaagtttctgcctttatgtatatatccatatcaataacattttggatcattgtgaacatttgatattaatgtgtgtactacttttatgtgtgtgacttgttttaactgatatgtgtagaaaattggcttttgtgtttgtagaatgagaataagatagaagagagggaagcagtggagtcggatgaaggttcaacgaatggttcattccaaggaagtaaccaagtgaggcaaggtggaggccacagcactgcatccactgaaggatttcttgtacctagtaaaaagaaagacacaattgacacgacagaacgtcgagctggttttgatgagaatatcatcaagaaggttaaactcaaacttggtggttcgtcaaaaactataaatataatatcagcatccgatggtgcttctgatatcggattgtgttcgacaaagtcgtcccatgcatctgatgatgccttggggattgggcagacttaccaggtagttaatcctttcttaaatgctaaatgtttctcatttcttcaacggagtatgtgttggtgattgcctgagttttttcagtctttctgatgaaattaggctacagcatttgtaatttgttattgtctacttatttactcgcaggaaatttcaaacgagcgatcgactaaactaagagggacaccgttggacactgcaagcaaatcagattcatgtaatgatacccgagatagcaaagcgaacacaaatcctattcgtaaaagcaaccggatttctaaacgacgtgttctggatgaagaactcgatagtcttgatgatgatgacgaagaaattcagtttctcagaaggatgaaaatggctaaagttgtggctgtagaagaagatgttgatgacgatgaagacaggaccagaaaacataaaaagctttccaaggtaatgaaacaaaatgtcgaattcccacgtggtgtaggtacatcagaaaaatcagccaagaaggataagatgggaaaagcatttgacgatgctgattatgtcaaggatgatgatgaggaagaagaagaggctgtttcagatgttgagctcgaaaataagagcgcgagaactagaagaggagctgaagaaggtcagagtgaagttaagacagaaatgactgtgactactcgtcgacgttctggacatagtggaaaccttatcgagtttcctcgtggcctacctcctgctccacctagaagtaagcttgatgaatatctaatctactcttcttttgttattagataaagaggctatcactaaaatcacaatcttgaatttttagtcgggtacttgctatgttgcactcacgttagattgttgactcaatcgcagggcctagtgactttgttcagtgacctacatagttgctcaatttatgctatagttgaggttcttatcaaattgttctcctactc

SEQ ID NO: 66650 - DNA, 226 bp, Arabidopsis thaliana landsberg
ggtgtatgagcttctaataagtacatgttacggtaggtagcacattctcaaaaatgcaacaaatgaaaattagtagctccccaagtagcaagtcttccgagtctttgtactcttttgacaatacgctttctagcaattgagtctatacaaagaaaaatagaggaaatggctttacatgaattttgagattcaaagtccaaacatttactgaaaatgtatagtggtt

SEQ ID NO: 66651 - DNA, 2843 bp, Arabidopsis thaliana landsberg
  unsure (1)..(2843): unsure at all n locations
atttggatactttatatagtaaaacaagtttcctgcaacaagccctaaagaaagcttctttggaaattcccagaagaaaacttggaagccaaaccttcagccataccatcggcatcaagtttcacattctgtctcccagcagtaaggtcgttttcacggtcccatggcttccacggatgtttccccatccactcgtccttctcggttttctctttggatgaagacaatttcttcttctttttcagacggcttgaagaagaagaagactcttctctgtgcttctctaccagagactttgctcttttctctttgttatacttgtccacaagctcagcatccatgcttcttttcatattttccccttcgtttgatgcaagtgcactcgccttgttgtatgcctccaagtaactgcaacaccagaatgaacaataataagaacaaaggtatgaaaccttaactaagtgaccaaatccttgaaaatccactccctaacttatgcagagaaagccctattaatccatccctaacttatggctattatcttaccaactcacaacaacaacaatcgcgcattaagtactaggctagctatagtagacgtataggttaagtataagttttagtagctgaacttcttcaaaaagaaccaatgtgttttgctttcatgacaaaacaacatcgtgaaatgtaggtaacaagtgctagcgagagattggaaaaatagtgtgttcgtacttcatctttgctctttcagctttgtccataggagtatcagtccaggctgtagtgtctccgcgtccttctctagcatttctactaaacgtggttgattgttgcacagccactccaacctgcgaaagaagaaccacagataagatttaaagttcgaaccctacccaacaattcaaaagcgtttttcaatcaattgtggatctctcacctttctttcaggaggcagagtggtcatccactcgtctcttttaggtataggtttaacttcggttgctgccagcagctctgcatcaccttccattgatatgcctgcaaaccggaaaaaagctctattacttctttcatcccataaaggcaaagagattaaggagcctgcgtgacacaatgattgatcttcaccttgtgatcttctccactgtgctgcttcttgcattgaacgtaattcaacctgcagggcaaatatagcgtgtctatgtaagtaaaaccacagatttatcctgaaagattacatagatcaatccggtcgaattaccaaccttaaatgcctcctgttcttccttaagtttaatcttgtcatccattgcttttctctgtagacattaatacattagagattaaaanaaaggggaaataaagagatggtaagggaacacacataaagaaatgattgatggccacatgaatcagtaagtctatgagagcatattgaaagataatcagacagtagatgattcattatctcaccttttctggatcttgtaattctttgaaagctttattcagtaaaacaaaagcttcctgggcttggggatgagaacatttgtctgggtgaacaagaagcgacagcttccagtacctacagaccagaattgtcaatatcaattatgtaactgattactttaacttgtgtgaaatgattgagcgcagttatttagtgactaataatcatttttcttgattccaaaaagtgtaacagagtacatacctcttcttcatattatcagcagccatattgtgattcactcctaagacgtcatatggactattaacgtcagcttccataatccgtgtcacctgtttatgcaagaagtatgagttgctactgtagcgaatacgctatccagaaactttgtaaaacaaagaattgtattgataatgccagaaggaaaactaagaacctcttcaaatcgctctgcctcgtttgacgatgcaacttctgcaacaacagctggtggagcaggtccaatgaaatattgtgaatcttcttctagctcagcttctctgaggcatattaatgaatatttattaaacgaattattccatataaaataacaagactataaactttgagctgataattagataaaagtacctaagttcatcttgagcttctgttagctttgctgctgcagcaagtaactccgccgatggcattgcaggtccaatcaccctacaatcaaattataacaccattatgttttatcctcgagagtctagacccccttaaagatctaatcgattaactaactaatatcaagcacacaagtgaaccacaaagagaaagcgtaaatcaccttttctttggaccagtaacatcatcagctgaattcgatcccaaaccgttatcatctggcaaacccttatcagtgttcttcaatggggcagaatcatcaaggcttttcttgacttcttcttcaccgcctttaataagatgccccacttcatctaaagaaggagaagcacctggtggtaatagaaagactctatccccacgttcctttaacttcaaagaaagaaacaacttcttcaacctcttcttcaaagtgctctcagaaataccctttatatcaaccgcttgtccatcatcaatcattttcaaaagctacaaaaaagtgcataaaactcgaaacatcagaacataaagacattgcacgcataagactagctatgagttcagggttcactacaaatcctactactcgtaaaccaaacctatctagagtaaagaagtatcacattacctggttcaaatcattgccaacattagggaacttcaaaagccttttttttaccacaggttcaagatcatccttttgctcaaagaaagaatc

SEQ ID NO: 66652 - DNA, 2968 bp, Arabidopsis thaliana landsberg
gttacctgttttctgtctactcagaaaccttacactaggttgatttctgaaattaatgtatttcatgatattctcctcagttaactcttcctaagcatgtggatatctctctctctctttaaacagatattgggttacagaaatgcatgttgacggcttccgctttgatcttggttcaatcatgtcaaggagcagcaggtgcaaatgttctagagtacgtcaaatgagtgcttgtttggtccatgtgtttctggaatatttattgttctattcttgttagcctttgggatgcagccaatgtttacggggctgatgtagaaggtgacttgctcacaactggtactcctattagctgccctccagtaattgacatgataagtaatgatccaatactccgcggtgttaaggtgatcaactagttcccttgatatgtccccttcagatagcgtcggttttccttgtttagagtggagaaatgctgactacatgactactattttatctcaatccatgaccaaactttaaaatctcccaatgtgattaggcaccaaaaggttaattagcgtacaacatgttttatttcttcttgttgtacttcagcatagagcttcctttgtgtttttttttcaagtcatgtcataatctccagatctaaagatgattgttaaaaagttgtcattttcttgatggaaatacattcaccaatgtaagatctttgacgatgagatatttatgtgtttatgttgcttctttgcaaacagctaatagctgaagcatgggatgcgggtgggctgtaccaagttggcatgtttccacactggggtatttggtctgagtggaatggaaaggtcagttaatgtattacgaggataaaatgcttctttcaattgtttgagacatgagatatggaagagtaagtgtcacagtgtataagggtttcatgccaaatgtgatgtaattattagtggttattcatctttctgctgacccttagaatatgctctaatcaattgaaaatgggacagcctatgtgatctgcctgtactagctaactgaagtgtatagtaacctactagcctgtattagcaatgaacatggaagtcttaaacttactatccaatagacaacacatgagacaacaataatgaatattcagttctcgtggtagttcccattagtgtgtgcactgtgctggatatctatcttcgttgtgaatttgatatggtatagtaacatttttgtccatttcagtttcgggatgttgtgagacagttcataaaaggcaccgatggcttttctggtgcttttgctgaatgtctctgtggaagcccaaatctgtaccaggtaaatttaactcctattatactggggtatctggatatataactaatctttatggtgttctcttggttgttttgtctgtgaagcttcatattttggttgtatatcttatcgatatctgattgtgtctgtgcatcagggaggtaggaaaccttggcacagcatcaattttatatgtgcgcatgatggttttacgttggcagatttagtaacttacaacaataagaataacttggcaaatggagaagagaataatgatggagagaatcacaattacagctggaactgtggagaggtaagatattaatctttgttttctctttcatcagctatgtgaattcagtctcatattatatcatacgactttttgtagaatgtttataagctgaaatgaaatggctattgcacttttacctaaactaaaaaggcttcatttgattgggctgcaggagggagactttgcgagtatctcggtgaagagactaaggaaacgacagatgcggaatttctttgtttccctcatggtttcccaagtaaagctaaccatttgttgcttctttaattttaattcctgctcaaagctcgtttcactgatgttatgcacattgaactatgatactggagtagagggcatgagttcaaaatataaattaataagccacaagagaatctaaatccactagcaattaagtactatgcactgtttgtttgcctttgcaacatgttaagttgtgactggtaatggcatggtgtcatgcaaagaatatgtattaagggtactgctttgtcagattgtgatgctccggttttcattgaaattagtgtattgcttaaccttttccttttctgtctttctgaactattaatcaccagggtgtcccaatgatttacatgggagatgaatatggccatactaaagggggaaacaacaacacgtattgccatgacaactatgtaaaccccttatgctttgcttccagggtgattataagtaattttttcgatcttagctttccgacattaacacaactctgatgcagatgaactattttcggtgggataaaaaggaagaagcacattctgacttcttcagattctgccgtattcttatcaagtttcgtgagtatgtaatcttctttcatgagtctatcgatcttaattgcttagttgatcgcttcacttagtctcaaatccaataattgacatgcttcttccttttcacctactgctatgtgttttctttcttttgcaatcccctgtttctcgggtttcctctgatcgatggccattatgactgtattgtagtgaatgtgaatcacttggcttgaatgatttcccaacagcaaagcgtctgcagtggcatggtcttgctcctgagatcccaaattggtctgaaacaagtcgatttgttgcattttcactggtaccattttctcataccccttctcttacatggacagtttccttagtgggtgatattaatcccttttgtttttcggtaggtcgattctgtgaagaaagaaatctatgtggccttcaacaccagtcatttagccacacttgtttctctaccgaataggccaggataccgatgggagccatttgagacacgagcaaacgagccctt

SEQ ID NO: 66653 - DNA, 307 bp, Arabidopsis thaliana landsberg
tgtgtcgctcaacctatcattcctcccattctaggaggtggtatcaacatcgtgattcctccgaatgtagatatagacctgagtgtaactacagtggacaaagaaaacgcgtagtggtgataatggtgaaatcgtgggaggtgaaagtctttttagttagggtttattcttgtcaatcgtaaaatgtatgtgaaatatgaatttcttatattaattttagagttgcttattgtgatcggtctggtctatgtattgaggtaaaatcattatgtgcactcgtcataatttgaatagtttgattgatgtt

SEQ ID NO: 66654 - DNA, 1824 bp, Arabidopsis thaliana landsberg
aattaccgaaaattacccttttgttttttagccgcgtaagtttcgtctgatattatttttcttcttctccgagaaacaaaccatttaatttactgttgtttctcacaattctcaaaaatctctcatccgaattgcgccttttccgcttccttttgctctgtcaaatctctcaaccggaaaaatcttgggaaggttcgtctgatctaaatcttctttgcttcttccaattctcagaatttgaaaaacccaccaagaacttcgaggtgaatttgatcaaaaacctgtttttttttttgttcttgtgtgtctctattgttaattttgacgaggagatttagatatcctatgatcaggtcgtgtttcacttctctaattaagttgctttcttttgattccaccgtattgtatctctggatcgaaattagggttttagtgtgtgttgtgaactttaaacgcataaagtttctgcctttcgcgtatttgaaagtttgatgcagccatattctgtagtgtctccaagcaattttctagggttttacataaatatgatgtaacttcttatttgttgattttactaattagatgatacttttcagtgaagttattgtcttttgggattacttgaatcaacccaatagctgttgcaccattttaacccagtaataatcgtttgtttttgctttcttgcagatttaattgaatttttcactgatgggttacaaagcagtttaccgatctctcacggaattgtttccacaggtaagctcatatctttatctgttttcactaaacttgacttgtagctgacattttcacaaaactaagggtttcataaacttgagtaagacgctagttttctgttgagtaatggtagattttacgagatgcttgtgtcgatatgtttctgaggttttagtataaattttcctctatgaaatgcgatgattgattatgtaatctcacattccagtgtagtctcacactccagttgctgtttagcctgttttggaaccaacttatattgttattaaatctatacaataaaattttctacagattgatgcaaggcttttaaaagctgttgctattgagcacccaaaggatgttaatgaagctgcagctgtagttgtttcagagattgttcctttcttttaccctaatttggctgatagttctactcaacctgagaacaagacacccggaaatgtgcctaccgaaggtacttattctttgcaatgataatattatatttttctgttctgctactaggacattttttttgtacatttgaagtttgagggtatgttctgatgaaatgccagttgaaaatgcagttgaacgtgatatgtcattcagtgtgttgtctggttcagagatgggtggttcatattcaggatctgcctctatggcttttgaatatcatgaaacaagggccccagttactgaatcggtttctaagaggaatcagttgacacatgttatgccaaatgttgttgttgatattccgagaaaaggtaagatcgggttgagcggatcggatgagtctggagtagtttcctcagaaccccctgtctcctgtcaggcaggagccaaatcgactggcgatgattggcaaggtgatgagtttcacagtacagggaatcaagcagaagctagcacaagcgcagattcagaagatgctgtgcataagctggtttatcctgcagacaatttggcaattacacagaactcacatcctcttcaaattagatttgggagtatcgatgatgtgaaaaagacatcaagtggttcattggctgttgaaaatagtgatgccgagttgag

SEQ ID NO: 66655 - DNA, 1350 bp, Arabidopsis thaliana landsberg
aataaaaaattcacattccaaaaaaaatggtggtctatgaaaaatacctctggtcgttcgtcatcaacaagtttctgaattaacgaaaagactaaaaacagtaatttctcatgattgaccacttgtattggagcttcataatctgacttgcccgaattgctacccatatgcttttccccgtcctcgccatttgtttgctgtggagtggaatctgcattattgaatcctgcaggaacagctcagcttactattttttaaaaatagagcttctcttgaggtgaggagtgcagactaggatttgacagttatttacccgatcctttctccactagagacccatggtggagtccttttgctacgaaatcagtcaaagtccacaacaggccaatggcagtcaaacttatattcaaatcagtcttttgtgcactataagctccagtaacgtctatgcacctgagatattaatatcattaactaccatcccatataagacaaggaattgtgttgacatctctggcagctaagtatcagcatgtaaaataagaaaacatagtaatttaaacagagataggaacatacacatgaagacagtcttccgggagtgtaggaagtccatcactcataataacccggagactctgggaagaacaaacaaggtatcagtgacaaggtataaagtaagagatggactaaggctgtacactactgctaatttatcgaatctacaggaagtcatccttcactaacctggaacccaagggtcgccacatccttctctgatgcgtctgcaacagacctaaagagaatatgtgaggaataggatcagcaaatagaatggaaaattcaattatacatatgtgggaaaaaatggaaagtaagcaggaaacatacctcaacatttcaagaatgctcgaccagctatagtataacttttctccacatctctgatgatataagatttatgcagaagcaaaatgtcagatattaaaggtaaacaaagattttgaatgttcatattgtattatacatacctccagtacgtgaagaagaatttttaatgacccaactcgaacatcagccttttgagcagaaaagtaaagaaccctgagagaagatagtacagcacactcaactgacttcacctcagttgactttgagtctacctaggaagaataccaaaaaatagaagagaagaataatcaaagtaaggtcccttctgcatgagatggaaaactctcgaatttaagcaaggacagcgaagagagatctcacatccaaagttgcatctcttgatctgacaggatcttctccaaactgctctgaacctaagacagcacataggaggatcag

SEQ ID NO: 66656 - DNA, 1856 bp, Arabidopsis thaliana landsberg
ctccatcatccgctgaaatgcttgcttgttactacaacaaataaaaaagagtttttaaagtagatgatagcgattccacatcaagctacatatatatcgaatggtgttacctgctcttttagaacatcgacttgactctttgctctcaatggtcttcccactataagttcaagcaatatcactccaaaatcatagatatcgattttatcttcgtctttgatgctgttaagaaacagaggattaaaccatataaaccggtttacaagctgatgagaaacagaggattaaaccatataaaccgtttttgattcttttgagaaacagaggattaaaccatataaccgggtttacaagctgatgagaaacagagtaaagaagattattacacaccttggagtgcctttaggtccgctccgagatcctacttgccccaccttagaaaggaaagcaaaagagattcaaaattcaagaaacaaaaacattcgaacttttgacatcgtcatttacctttccaagaccttccacaagcaatggaagattatagctactgagtttcgccgcaaggttattgtcaagcaaaatgtctgtcattttaaggttgttatcataaacaccaggcacaataccggtatgcaagaactggatcccttttgctacacctatcgctacgcttatgcgttgttcccaagtaagcaatcttcccatgtgcccatctagcacagcagagacaagaacaatccgatttagttattaaaaaatatataatgatcatcttcattcttaaaacacatgatgtttcagtgtggtaccagaaatccaggtcctgagttctccatttgggacatactcaaagacaaagaacattctgctgactgttgaatcatccaagtagcactcgaagcagtgcccgagcacactaaccaagtgacggtgccgcagtttagcgatgagctcaatgtgatgcatcaagttttgtgtgctgcaacttttcttcattttcagacacctaattgccacaaaggatccatctttcaatctccctctataaatctgaaaagaacaatgaaaacaaaaatcttgtttgattcaactgttcaaaaaatggaaactagctaaagaaagattgaagcttcactgctgtacctgtccttgagaaccttcacccatgaaagcagaggattcaaagttatttgttgcatactcgagctcctccagtgagaatgtcctgtaagctggaagaccgagccctcctagcttcattgtttgagagatatacccttcaaagtattgcagttacagcacaagttatcaatgaagacaagttctatgtaatctatgtgacaatatgtgagagatattttatcctcttacttgcatctgatagtagtttcgatgtgtaccccattgaagcattctctctaatcaatcttggggaagatttcgtcactgttttcttagcatttaatctcctaagaaccacaaataaggcaccggcgaggagaagtaccccgagaatgcttgcggttacacctaaagcaatacccactttggaaactttgttcctcctctgtggtaggattccaacagcaagagcttcattactacaaaaagaaaccggacgttgatcttcattcgtagtagccaaacagttgcttgcatagacaacatctctgctagtgccggaactcggtttaaggcaagtaggcaaactttccggtaagaagatttgatgacatatctacaaacatcagctgtgagttgcaagaaagatttgctgaaagccgcccggtgagtttgttgtgtgaaatgttcaagtaagttatcgggggaagagacattaagggagtaggaaatgg

SEQ ID NO: 66657 - DNA, 385 bp, Arabidopsis thaliana landsberg
aatgaaaaaatgtataacttcctatcgcccatctcgtaatagtttagttatgaaattcccaagaactttcaaacgtttcataaatcaaggcttcctaaaacaataacgaccaatctaaatgttcgttccgatctaaattctctcttattgataattaaacgtatattttcgttccataacggacgtatttatagataacttctctcattagttagggatcacaaacatcacataatcgaaatatctcatattgaaaaaactaaagaggaaagaagatgaggcttttgtgtagaaccaaatggaaatggaagttttaaaatgttagattcgtggatctcgaagtctttcggctcatacccatactataaattagttctggtactcc

SEQ ID NO: 66658 - DNA, 765 bp, Arabidopsis thaliana landsberg
atttttaatcaataagatgatgatgaaaaacaaaaaataagttcgtatcatccatctaaaacattgtatgtgaattgtggtgttgttcaagtatggttatttcgttttaagtataagaaagactagtcttataaaaaaaagtttaccctatttccttttacatgagcagtcagttaatcactcatgcaccaaaaagattaaaataagaaattagaccaaagtttttaattcaaaattttggttggaggatgggctgtcaagaaaaaaaagctgagcaaattttttttttaaaaaagagagaagagaaacatgaagatcttcatgcttaaagatttcttgattttctcttccaaatctattaataatcaacatttagattttgtgctttcctcttttatcagtgtttggaccgtttttgattgaagtattgaccatatgtagatacacttataaatcccgaaataaaaagaaaagagaaggacatgtgaatttttcgatttgtgtacgttgtcgacaagtccatatctaaatgatatgtatgagagatagagagagcgagagaatccctttttcgccacttttctttttattaacttttctgtgtttatatatattatacaagtaggacataaggttcaaattgcttttccaatcaaatgaacaaatccaaatataaagtagacataagggttaaattacgacaaaaatatatatatatgaaattcttaaagatgaaagttacaagaactgttcgatttaggcaat

SEQ ID NO: 66659 - DNA, 413 bp, Arabidopsis thaliana landsberg
cggtggtgagccggcgcgtgatcttgggactttcctttgtgatgcttcggaggatggcgcgcggcagcggggggccgggggcgcggtcggcaaggtcgaatacgccgtggtaaagcgccgtgcgttcgaaggcgaacgtttcgccctgcttgagcgcgtcgtgaatggcgccgtcggaaagacccaggcgtagcccgagtcggcgcacggctttttcggtggcgctggcgtggtcggcgtagctgaccaagtcgccgtccagcaccagatggctgtcggagaccatgttgacggcattctggaacgcggcgttgcgactggcgtagaagcccgcgttgtagtcggcaaagcggtacagcatgctgtcgtaggacacgcgcttggccagcagatgcgcgatgccgaaatacagt

SEQ ID NO: 66660 - DNA, 455 bp, Arabidopsis thaliana landsberg
  unsure (1)..(455): unsure at all n locations
aattcatatcctttaaattaaactttatcacatcacataaaatctaactagcaaaaataaagaaaacgaagacgtatatatatcagccaagccgcctgctggtcatataaatcaactataaaatcaacaaacttttttttttgttgaagaataaaatcaacaaacttctcctaacgctttccataaaaacggacaaaatagtaatccaaatactactgtgagatagtttgtcggtatatgaatttaagaaattgtccaaaaattaagtcgtacaatattgtttaacagagggagtgttcttcggggnnnctttttcttttattgtcttattctttcctttnngggganaagnnnnnnnnnnnnnnnnnnnnnnnnnnnnnntttgggggaaaaagaataaaagagttcaacaaaattaggagacgattatagagtttttgcatgggatttttttt

SEQ ID NO: 66661 - DNA, 165 bp, Arabidopsis thaliana landsberg
  unsure (1)..(165): unsure at all n locations
ggaaagcggaggaaagaggggaagaaggaagaaggaaaaaggtagaaatttagaacagggccggagacngggggaccgggggacgaggaaaaggagaaagagagaaaaacacaggagaaggggagagaaaaaacgaaacgggggcaggaagggaaggagccaaag

SEQ ID NO: 66662 - DNA, 406 bp, Arabidopsis thaliana landsberg
  unsure (1)..(406): unsure at all n locations
tacaatgatattctaggtatcttaactgtgcacaccgcataatctccctcggattatgagcctaaactggggcgattatcacactatatgcttnnnnnnnnnnnnnnnnnnnnnnnnnnnncgattacagatgaatacttattacctagcctcccggggcactgcacagatccttcatctgattgagtgagtgattatccaaacaatccaatactgtataggaatgccgaacgagggattctcactgtatttagaaccagaagaacggctctctccttgcaatatgcagcgatccagggaggaccatgaggtgcgccaagccacatacatgtcatcaggtgagccagtggaaggtttgaatcttaactcattcatgtttgcaagaacccattggtatggatatctc

SEQ ID NO: 66663 - DNA, 491 bp, Arabidopsis thaliana landsberg
aggatccggcgcattccctgagcagccagctcagcccgtccgaagcccaccgactggcgatcctcgccaacaaggcaagcgtgccgggcgggatgccgacgttgaacatgatgcgcccatggctggccgcactgacgctgaccgtatcgccgttgctgaaggccggcctggatccggagcatggcgtggacaagcaactgcgggcgcagatgacggacgccggcaagaacgtgctgggtctggagaccgccgaacagcagatccgctttctcgccgacctgccccgcgcgatcgaactggcgctgttgcgctcgaccatgcgcgatgccgacaagggcgcgttccgcctcaccgaactgatcgacgcatggaaagccggcgacgtggacaccatcgtccgcctcggcaacgacgacatgcgccaacacgagccgaagctctaccaatcgctgttggtgctacgcaaccaggtctgggcgacgaagatcgcc

SEQ ID NO: 66664 - DNA, 539 bp, Arabidopsis thaliana landsberg
cattatcaactgaaatacaaatttaaaagcccaaagatcatcttctcttttcttcctccatacgcgataataaccacgagggtcctccccgagggaagtgagatctactccgcccatctcgcgtgacgctagtagctatatcccttgcaatccgatttgcttttggggaagataactgaaaagatactttaccaaagctcgggacaagatgatgaatcttgttaagataagacgcgtaccgtggccaatgtaaaggctccaggatagctttgatggcagcattacaatcagaccagatttcaatgttatccaagtgtaggtctcttaagctttgcaacacccatataaatccacgcagttctccagcaatgcggttcgaaaccggtaagacatatcacgcgcgtgaaaaaccgcatcaccaaagtgatctctgataatccaagcaccaccacatccgctgagaatcgtttatccatgaaatatgcatattacatttcatcacattgaagggaggttttgaccatctgttactaataaac

SEQ ID NO: 66665 - DNA, 553 bp, Arabidopsis thaliana landsberg
acgtgctttggttttggacctggagaaattacggatttcggcccaaaacctcgtggtattaaaaaatttaattaagaagatatttttttttctttcatgaaacaccatttctattaaaggtagttttcttatgccgggaaaatgggatagttttcttaatctttcaacgtaccaacaaacttttaaaagtattctttgttgccagaacaaaagtataccatctttgtcgaagaactcaattgcagtgggaatgcacgtgtggttttgttttcacgtacacagatgtttgtagaaagtttgaaaattcttatggtcaaaagtctcacacgaccggatttggtcaatttcaaagctgatgtgtcatagactcattcactcatatgcttcccctctttcaaatgtataccatttttttttgttaaactcaataaattattaagagagactcaaactattgagtatgtaaactaatgtcttatatattctaattttttaacgcatctttggtttaacgtttcttttaactacagattcggatgattacgaaaataat

SEQ ID NO: 66666 - DNA, 386 bp, Arabidopsis thaliana landsberg
gattctcacttcgcgttaccaaaagtgtgtccgtacctaagcaattaaagaacgtcgtttgcgctttcgatcaatctcacgatggcttgggcccagtgagcgtttttacctacgatttttgtgccgtcagcacagtcagccgttttgatggtcaaagagccttcggagaatttctggtcgaaaatttgaacagaataagcgctgtcgatttcgcagagttcgaaatcgggttggctcaattgagcgccggcgggaactttttcgatggccgcgagaatgttagttaactgttcttggctttgcacgcgggcaaaagctttttctctagtggaagagtcatcgatgtagctggattcttggacataaaccaagccattgtctttcat

SEQ ID NO: 66667 - DNA, 1086 bp, Arabidopsis thaliana landsberg
ttctatgcttgagacagtttcacagagcaatcactcttgaagctattagttgttcatgcttgacccataaaactcatttaagatatatatattttttcatatgaataatgtaaagaagaatgaattcaacaaatgaaacctaatcaattataacttatcaaatttcaataagtgtgattcatattggataaaaacgatgttaaaactggcactattttaagttagaaacaaattccaacaagttttatagtttaactagttaaccagggacaccaaagccaaagagccatacctgtgaagtagcaacaacaacagcagcaatatacttcaactgtaatcccattaaaatctctacacctctaaatcttaactaaactaaataatgtatctcttgttagttcatgttgtgtgtacacttttgtccatgagtacatgaaacagtaaaactatgatctaattgtccaaactaaatttttctaaaagtaggcatctgctctacttcaccactaaattcccataaacaaacaaaactaaaccaaatgtatattatcgtacaaaaaagttagcagaagatgaattcagaaacatcttaccactaccaagcctttcgtctgaagagctgcaagcctattttgttcaccaaaacttgttttcttcattggggaaccaagcaaccgtgagaaatcaattgcatctgaaagaatcatcgaaaaaaacccagaaaattccaagttccacaaacaccaacagaaaaattacccattaatgtccatcttgaagtttcattgtcgccttctgcgttgtgtttccaggtgcttcacgggcaccaccatcagctatccagccacaagacctggctacacaaaatttgagaaactcgaggaccctctgatagaatttaccaacatgaaaaggacaatcatcctcgatcttgatgaaacgttggttcacgcaacaacacatcttccgggagttaaacatgatttcatggtgatggtgaaaatggaaagggagataatgccaatctttgtggtgaaacgtcccggtgtgactgaattcttggagagacttggtaaaactacaaag

SEQ ID NO: 66668 - DNA, 1691 bp, Arabidopsis thaliana landsberg
aaatatgtatttgtatgaaagtgaagtcggcttacaaccactaggatgagtcagctgtagttttcactaagttggttttcattgagcaaattgataaaaattcgctattttcgcctttatggaagatggtacaagagtcacaccgctataatgtaggatagtttctcaaagaaatttattgacataggtgcatcaatgtttttgtccttaatactctgccaacttctaacgtctcttaaatgtttctatggaaaatgcaggaaagaaatggaaatgatggtttgattgattttacatctgctcctccttatatgaggaaattgaatgaaaagggcccaacagcaaactccaagagagcagattctcggctagaaaatagaatgagagatgtagacagtggtgataatcctagttcgtcttcgtttgagtttcatgtcagtttggaagagggtattagcctttcagttgatctaaattttaatccatcagattggatcaatagcatgagagatgaggtcaatgtatgtgatagcatgcgccgcagaaaatccccacattctgatcttggcattacagagtgtaagaaacagaagagttcagggcaagacacggatggtcatgtaaggagagaatcatctttaagtccgccaatgaaagacaatgctcagttaccttctgatcaccatcccaatggtgaacgatctctagcatcatctgccatagaaccatgcaacagaatcaaagagagctcagacacttgcaaggaaaaaagcgggcttaacttgtccatacctgattcttcaggaccttgccagattgcatcatcttgtgtcgaatcatatagtaaaagctgctgtgtaaatccagttgacttggactgtattattcctccagggaagaagttggcaagtgaatctgatatggttgctgcagaacagaatcattcagctggtgatctccttgtagaaattccgaaaaatccatccatggaaagctttcaaatagtcggaaactcaagtactgttatatgtccacggggagctggctctgaattatcatcatcagaagcagaggcctatcactcaaaccagccgtgttctcctcgtaagaccagtagatcctcaactatctcttctccagagttcatcatcgatagagagtccactagttattctgagtcattcaagttccgttgcaatggaggcaaaagtctgccaccaaacacggaggagcaggtagaacatctcctttctaatcaattcgctacaatcaataaacacaatagttgccttatcctatgtgctgtttcttcctctgcaggaaaagagcgaagttttaagtgagcaggcgcggtcagagtgacttgtttgaagggtgaagcatccattatgttgtataatattgttcaagtaatagaaaaatggctatatacatgatgtagagatagtcaagaaatggcctttcctctaaccaagaggtttctactgctgctttttttttgaggtatgattttgtgctctctctataaacatacaattgatacaacaaagagtaaagaagactttatttttggttgttggcttgcacttaggccatcaaacacatggagatgagagcattgagtcaaatattactgaaggttttttgcaatgacctaggagaagtcagtttttaggtcagtatgcaattcg

SEQ ID NO: 66669 - DNA, 1779 bp, Arabidopsis thaliana landsberg
ctcgcaagtactttttagatgctagaaaatctcctagctgcacatatcatgtgtatattgcttttgctaccatggccttttgtattgacaaggaaccaaaggtgtattttcttacccactatgtggtggtctatatgctatttagaactgcttttgtttgatcttgttggtataggactaaatttatttgtgaaggaggtagtggtcgttcagtcaagtttagaacccactcgtcttattattctcttagttgtttaagttaaccaggacccatgagacttttgtgataataaagtcaaaatgatttgaatattggagttttttggctattgatgcacttaaactcttcatttgtttgcaaagtacatgtacgttacttttatgcctcgtacattcctctttgtgtcttcatttgttcgattctttaacaaagaattaacatgttcttgcaagacatatatactaatgtaaaccatctgacttcaatttctattcagtttcacaataaaaatccttatgtttgtattttatgcaggttgcacataatatctttgaggaggggttgaaactctatatgagtgaacctgtttacatccttgagtaagtgtcactgtagctttacttagagttccattttcttaagatacttggaaactcttctttattgaagaaatattgagactttaagaccttctcagataaaatatcgtcaaacttgtttctctcccaaaccttcctaagacagaattttaaccatctggttttgctttgcaatctaggtatgcagatttcttgactagattgaatgatgatagaaatatcagagctctatttgagcgggcattaagtacattaccagttgaagactctgctgaggtacgctgatagtgatgtattgtatctcaaagctgttttaagtatgcagattttgttcttaagcatgaaaagagacaacaaggaaaattaccaacctgctaatgaaatatccaaaccgagcacctaatttgattatagcattttttgaatgcataaatatgataatggttagcaattggaggtgtaatattgatgcacatctgagccttatgaacagtcttggggatggtagacatttaaaactgaactgaaacagtctaatattattgtggttcacatgtaatactgtttaaaatgctaaaacagtaaagaagacgactggtgtcaataggttacaccctaatgctaatttttttctagaattaacttttttcttgctccatgttttgcaggtctggaaaagattcattcagtttgagcaaacatatggagatcttgctagtattctgaaggtattttaactcatttgaatgttgtcaacgtatactaggaaagctactattattagcttcctgtgttttgttagcattttttgtagttgtgcttcctgtgttttgttagcattttttgtagttgttttttagttgactccgttatgatgataagtttgttgaagggtccaaacatttatgtctattccatcttactggcttttagttgcatggaagatctaaaaatgctgacacgtttaacttattactagaatagaacctcataaaagagacattcgatcaacgatgaaatttactgaaattagatccacgatacatccagtatcaagtgtggctgtttgatggagtagtctgcttatcttcttagttttttgctcataaatatttctttactatgacaaccttgttgtaggttgagcagagaatgaaagaagcacattctgaagagggc

SEQ ID NO: 66670 - DNA, 401 bp, Arabidopsis thaliana landsberg
tttgcgttgctctgtgctctgcaagcgtgctcgtacgccttttctgactttctcttaagaagcatctcaggagtaacgcctgtgatatgaacaaggagggcccctggagacgctactggcctcaccctggacacttatagcaccttgacaatacctgctcccaataggagtccagagatacttggcttgccaaaaaagcgattatggcacaaaccctacctcatccatcagtggagggggtgctctcgtgtcctttggggcgtgaatgaacaagagtaggtgccccattctgtaaagccataggagtcgcatctagtcctgcactagcgagagagctgcacggccactgataaagaacgcgtggagcctcgagaggagcggggccctactggtccactaca

SEQ ID NO: 66671 - DNA, 2041 bp, Arabidopsis thaliana landsberg
aatcaaagcttcatgcacttcatatatattcaaaaaaacgatttgaattttatcacggaacaaaaatatgtgaattagttcattaagtttcaaagctgtccattgtcttctgttgtcgagacagctaaaactgccacgatgaatggttacaacaaaaactcaacgtttgttgagataaatttgatacaaaaattcccaatttcacaatgaattcgcaaataggataccgtaacgctgccaaaattattctaattggttgtatgtagaaataacgaagttttatagaattcttcatacgtcggtttctctaacgacatacattgcaataatttgaaacatgaattaatataaaatacaattgcatcgtgcgggccatttttcattaagaaaatcacatgcacgtttttaaggactctgtttcgtcatattcgttattagattatgtgcatactttagctaatcggtcatacatcaattgtttagagacaatgaccctaaatttaatcacttatctcgtaacctacgttttagtaggctagcgagtagcgacccactacactagtcgtatactttgcatttggacactgaactagtaaccataatttttcaaagttatagtggagtaaaccacaactatacgcatttatttttgcaagcgccactaaaaacactcgagcagtctgaattctactccaatggttatttgtgtcttcataatgataatgatacagtgaactgtcccttgcctcttaaatactttttttttttttttcgacgttgcgtattaatttagttataatgcggttatcaatttcgaggtagaaattgcattaaatcagtccagaacggtaacatacatttattatcattttgagtaaaactaaacaaataaatgtaagtgtaattaattattgtaccaggtacttccacaattaattttccggtcgctataaaatggagtaatgcaaaacaatagtaacaatcttgtaaataaaatattaatcaaaaaaattcgaacacaacaattgtttgcataaaacaagaaaatttgaacacacgtaacgtggccatatgtatagacaataatcatgcaaaaccactgccgaaacaatgaataatatggtccactacatgccattttcgagcttctccttattgcaatatcgtttttattattacccatgcaggtccaaagtgtaccactattagcatgaaaaaagatacttgtatttttattcaaccatcattacaaatatactttcaacttccgcacatcaataattgcacctttatacaggcacctgcacatattgtctaatcatcatgtatgatctatgtgtgtatgctcatgaaacacacatgcacacacacacgttactagaaatattgtgttaatcaaaccaagctaatttaccttttgtatggtatataaccataagatattaagatggataaggtttaattaagatcttttatgttttgagtgatcccagaatttggatcacaaaaagaagtacgtgacatgtgaatcaatggaagagatgtggaaaggccatgtgtgagatattatatgcattgggggcgaaatgtcaatttttattcatcataatgtgatgaagagaagagacaatgaccctacactattaaattgcatgttctctttatctttaacattaccatacatcatttcatgtatgggccgctttggttatgtcaacaatgacatgtaactatcttctccactcttatcatctcaccatccacaattgtgtaatagactaaattaatatcaccttacaggcccaatgggctttaatatattttattcatttaggcccataaacctttattttttctgcaaaccacgcagacgcagattcgaaaatcgtaaccgtagatcgggaaaagtaacctcacgaatccggaagatttctccgatcaatttggcgacgacgattttttggttattaatcttcgaaggtgttgaagtaactggaggtagattggacacgattgtgaaactaagtgtgaaacgaaacga

SEQ ID NO: 66672 - DNA, 646 bp, Arabidopsis thaliana landsberg
  unsure (1)..(646): unsure at all n locations
tatccttctcgggcaaaaggcagcccgccggctgcatgtcatcgataatttttccaaccaccagacttccgccagtgatcagaacggtcagttgctcataaaattcggtcggtgttaaaaaagagtctccattgccatgataactaaagaaatttccctctttgaaagttcgctcggccggattcggttgtcgggcatctaaaaagccaatggcacgaccaaaatcacggaagtcttcttcaaattgaatcattcccgacaacggcattttagtatcaaaaacgaaagcacttgagtgatcgctgtaaccacgaaaaaccaatcggatcagagattttgtcagattgagcatattcatgccgacaaaatttgttttgaccgtgtcattgttgtagtacgtcgtcgctttaaaatccgtattatagattgtcacgggcttcaaactgatcaaattgacaaagtcctgccatgaccgctgaagctgttcttgttcaagacttgtcctcccaattcgattcaacaaattggcaacagacattgtctganaagcttgacngagatccgggactgaccaatcgctttttcgaagtacaaatcgtcaatcgcccattgagtcattttccaaacattatattctaagcgaatc

SEQ ID NO: 66673 - DNA, 491 bp, Arabidopsis thaliana landsberg
atactgttacaactaagatatgttgatagttagagatgataagagaaggatgagcaggcgatgcaagctaggaggaagatggctgaggaagctccatcgttatcgagattactagtgcttcgcttgaatctgcagcttttttctttgttgcaatttgtgattgattgcatcttcttcttctgatgacgatcatcttctttacatctctttatgatccctctctgcttcattgcttcttcagctctgcacaccattctatttttggtgaaagagctcagagaatttagtgtaggagtacaagagtcccacttcctatgtccatatatatagagccaagtttttttttaataataaagtataaactataatttggactagttcgaaatggcattttaataatttttgcttggatctatgttctaaaccaccaaaccgtattttaacacgtgtaaatgatgcatttgctcaaaagtttgttattccaaattcgt

SEQ ID NO: 66674 - DNA, 250 bp, Arabidopsis thaliana landsberg
cggccgagaacgaaaatcccgcggacccacaatcgcgacaggatgccttttgaggcgctgggaatgacgctcaccgccacacgactgatcttatgatattatgatataacacactaaaccaaacttggagatgattctcgtagtatacatgcgtaaggcaacgatgttgcgtgtgttaagacttaaacctgataaccagggcacacgtcggctggttatggacactcagggcggaattaagaaaagatgt

SEQ ID NO: 66675 - DNA, 568 bp, Arabidopsis thaliana landsberg
  unsure (1)..(568): unsure at all n locations
ttataagttaatttggttttaacattagcaaaatattatttcgaggtgcatttaatttaaaatataaaacatagatttatgaaaaaattttgtagacgtttgtggtacaaattagcttagccggtaatcttttatgtatttctagttgaccagaaaaaaaagatacaagtacataattttgttttttttaaaatatgaatatgattcattctttacaattaaattcgtttttactttaatttactttgatttgtgtgtctataatatagtttatgccaaaattccttttatcaacggctggtcatgtatgaaatttgttggttctagttcgatataaaccattcaaattaccaaaatcaaatatgaaaaaatttacctgactcttatacaatgcaatacattattttcattaatatacacctaaagtctacataaatacatcatttttttattatcaaaaaataacaaaaatacaaaacaaataaatcacttacatgctaaaaacaatgtgaaacttaacacgcaatgcataaanaaacttacactcactttaacaagataactaaac

SEQ ID NO: 66676 - DNA, 541 bp, Arabidopsis thaliana landsberg
atcaatgactcgatgtgcttacaagtagtaataaatagacgttggcatgtcaagatttgttggaagatggagttgtcttgagtagtgtgtgtgtctcttgtcatctctagtgtcttttgttttgtgttttactcataaattgaatcatttccagttgtacgtagatatattttgcttcatacattttttccttacaaagtaaaaaaccacattaaagtactcaactaagaactgttaattttaacttttaaacgaaggcattactaattagttgatatatctcttcataatataattatgtacatcacaattgtcttcataataactacaaaaacaagaaacaagtataataacgctacgagtctatgcatgataactccattaaatgttttccttgtttttgttgttataattgacgtaaattatttaataattgggtccatagaaacgtgattatgttttaatgtctcccatgattggaataagacaagataattagactctattaagtgtgacgaacaaaataatcccactcgtcttt

SEQ ID NO: 66677 - DNA, 503 bp, Arabidopsis thaliana landsberg
caggtgagttctttttggtagctcaattgtattctgccccctactacatcataccccgccaatttgcccctcctcctcctccttcccaacctacaccttatagctccctcgtcacatctccccttcacctgaaccaccagacaggaaatcccagcgaaaggtaacctaacctgagctccggtgacggctgtggccaattgccccatccgcatttgctgagctccaagcaaatcagctgtgttccccccccttcccttctccccgttcggcctgtctttttgggtcatcggtgaacctgtccccccgccgttagtcacacgcggcattcgccttaaagataccagtgcccgcgctgctttttttttccattctctcttgcaaaccagactgatctaattctccatcagatcttctatatccaacatgcctatctccaaggttcacgctcgttctgtgtacgactctcgcggtaaccccaccgtcgaggtcgacattgtcaccga

SEQ ID NO: 66678 - DNA, 240 bp, Arabidopsis thaliana landsberg
aaggaaatgcctttcccgtttaatcctaaagcaattggtgtgcatcctaacccatcttgacctttttgtggcaaagctaaaggtgatcttatctcactagcctaacaatggctggccctgccctaaattggaagagttcctcatccgatctcgttactaacttatgctgtgacccgagtgacaggctgcactgtgaatgccttgagtggagaatgggaccaactggctgggattcatact

SEQ ID NO: 66679 - DNA, 633 bp, Arabidopsis thaliana landsberg
cattttcgtgctctgattcttgccactgaaacaaaataatttttctcaccaccagtaagatcccaacaacgggggcggtccgaattgatggattcgagatccatgcgaagatttccatttgtcagtacgcttcaacatcactgcaaagatcaagttaaatctcaggatcaaacggaactctgagaacaattctaagttgtaattatcacattgtcggagaatcaaattcgtatatcaaccaaattctacagaaatttcactaatgaatcagatcaagcattgcccacaacgaatcacagggactaagactaacagtcaacacttaccggatgagacaagaggaatttgtaaaacctttattccgaccggcgagtggtttacccgtaagtaacccgtaaggttccgagagaactcacgttgctttgaacgacgactttaaactttgttccgtttgctcacgattgtgaataataacattcaactcccaaccgttttttcttttattattctggtgaaaagcgctccgttttgcatttataactcgcacgtcctgccgttttaaaccaaggaaataaataaagttatcatctgtgttgcataaagtttgatgttttaagttttgcacataaataa

SEQ ID NO: 66680 - DNA, 613 bp, Arabidopsis thaliana landsberg
cagtatcgcctctttcaattgtcaattccatcatgagatcattaaggagaaaataggtttcgcgatatagatgatcggtgaatattcattatcgatttaagagatcgaaaatggattatctgttatcaaacgaagcatgggagaacttcctttccctaatgcttctaatgatgatcaccatattcacacatgtcattggtatgaagaatgtcgtcgaaggctactcatcgatggagatgcgaaactccgaactcaaatagctatcgccctaaccaaactaatcgataaacaaaaaatctttcttcatgatatttcttcaggaaaactcagacaagaacgagcagaagctgttaggttaatagcgtcgttgtagttgctgcctaaacatgaaaatttgggacgtgcgactattactttttatagcggagaaatcaggagatgcatgaaatctatatgccttcaagatatagagcttaacccgttatgtgtaaaagcaagtggtgaaaatttggttagctcgctttccaagaaattgcaagaacaaaaagatatgtgtgaccaaacgttgtttcagttggtagcaccctcaactcaatcatctaacttttttggt

SEQ ID NO: 66681 - DNA, 701 bp, Arabidopsis thaliana landsberg
ggttctttttttcttatctgataagatcatatatcaaatttgatttcttccattaatagatttttatgccgtaaaagacaaaaactttcccgtgatcatagagatttttctcacagcagaaagaaaaaagtaaaagtgagctattttggtgaattatgatttgaaaagttgtctactttaactgtgacccagatctgacaaaaatatgaaaaagtgttgctaatcagtcttcttgatctgggttccattgtttttcacgctttaatttgaagggtttaggcaagaattcgaattttttacccgggaactttacagaattgaatttaaatctctttttactcattgctttgtcatttcctcggattcaatctcctctgttttttcgaggtctagtcagttttggaccttttgagtctattctatctaatgatggtgactaaatcaaaaggtttagtatatcattgtgtgttttgtgtgtgtgtttatctatcactcttggtctaatgttttgcaatgcatattctaatttgtttccactgtcacaggaagcaaagatgaaacctttttcgattcgcagccatggctacaatctgactccgacgatgatttccacagcgtaaatggcgggaaaagttttgatctctgtttctaatggcggtagactctgtactattttcaagattcaaatcttgatcttttta

SEQ ID NO: 66682 - DNA, 602 bp, Arabidopsis thaliana landsberg
  unsure (1)..(602): unsure at all n locations
aggtttgattattatatcttcacttttctcactcactacttttctcgtatttcatttattgttttttttgtatgactagaaagtcggaattccaaattaataacatggttttttcaaatgatttgactataccgtaaagcaactcaagtttcaaccatttgttcgaacttgttctcaaaactagtttcaccccgaaaaataatggtttgtaaagatatgggcagagaaagaaaattgaacttggaaagaaattggattagacatcacttaaaaatagtaaatttgtgctaaaagaaatttactgaaaacattgcttaactttcttatttacataacatcctagcattcttcaactaatgataactatcactttatagagaaagaaaatagacaacattatcacaacattgacataacctcatagggtnnnnnnnnnnnnnnnnnnnnnnnnnnnaatggattttaaagcctttgtagtattttttttgccaatcagactnttttcactttattttttttggaagtttttaaaagctttntttttctttttcctttattttcctttttgaaaagcacgtaaatgaggcttttaaaacaaatta

SEQ ID NO: 66683 - DNA, 504 bp, Arabidopsis thaliana landsberg
  unsure (1)..(504): unsure at all n locations
ataacaatcatcgtcgtgcacattgatggactaaaagatgtaaggaaagcttttggttgttgactgtatatcatcttttcttgtgtttgttaatggctgaggttagatattgaatattttgtaggatgctcctcggcaattgtcgagtacaggaactcaattgcagcctcctattccacaagttgtggagcttacaggttcggaatctccttccacctttggatggaactctaaaaatcaacgtgtgaggcatgatctatctcgagctaggatacgtgccattgagaattcactagagaatggacatgcttgggttcctccatctccagcccacagaaaaacctgggaagaagaagtaagagtgcttgtctgcttcgtatttgctcaaccaatcaggaatgcctcgagtcattcttatattcgaaggctaaatgctggattttctcgtgcaggcacacattgagcgggtgttgcgtgaccatttcctcttcangaaactcactg

SEQ ID NO: 66684 - DNA, 550 bp, Arabidopsis thaliana landsberg
gccttgaccttgccatcccaataaaggccatattcgccgaacatcttcttggccgtcatcgtgcctgcagcggcgctctgttcgaggatgtaggcgacggtcttctgctggctgctcacatcaccgccccgacctgccacggcacgaattcattgtcgccatagcccagattttccgacttggtgcgctcacccgaggcgatgcgcagcagcaggtcgaagatttcctggcccttggcctcgatggaaacgccctcgacgatatcgccgcaattgatgtccatatcctcggtcatgcgggcatacatgtccgaattggtggcgagcttgatcgagggcaccggcttgcagccataggccgagccgcgcccggtggtgaaagccaggatattggcgccaccggcgacctgccccgtggcagagaccggatcgaagccgggcgtgtccatgaagacgaagcccttttcggtcaccggctcggcatattcatagacggcggtgagcggcgtcgtgccgcccttggccgccgcgccgagcgacttttcgaggat

SEQ ID NO: 66685 - DNA, 612 bp, Arabidopsis thaliana landsberg
  unsure (1)..(612): unsure at all n locations
cgtcatccttggattacaaagttgtctccagcatagtgaaaatgacgtgacaaaactcatggctctacattggcaacaacaacaagtccacttccaannnnnnnnnnnnnnnnnnnnnnnnnnnnnnnntgataattttgtttccatcaaccgaggagtaatcgactccgtttttgaccggttaaagcaggaagaaaaatttcaaaaatatttcgatgcggtcaactttaagaaatgagacgacatcatcactcctgaaatatctttttctgaggatcacagtcttgcatatatgattgtcgacaaaattgtcgttcttgaaacaaaagatgagaagggagatgatattgaagagacaacacaattcgcatggctgatcgttttcattaaacaagagtccggcgaatgggaatcagaatgtatcgtttccactaacgcaccgtccatcatcacttatccaggcaaatgaaccaacttgtattctttggaattccctttattttatttcttgcggcatgcacacctgagacaacagctggaaaagtagttggcatttcagatggtgatacatttaccatgctggatagcaacgaacagcaaattcgcgttaga

SEQ ID NO: 66686 - DNA, 500 bp, Arabidopsis thaliana landsberg
  unsure (1)..(500): unsure at all n locations
ggtcctcaacttcgctgcttttctcctttgctttgatcttgcttgcttttatttttttggtgctcttcagttgactttgaaggcattgacaacatcacgtcatcagtctcgagtagctttactttagcatcagcaaaagaggtagtatttccgaacgctagggtgaccaccaagtaggcttcccccaannnnnnnnnnnnnnnnnnnnnnnnntcgcggtcttcgtactgtcctccagccatacgatactggcgaaccaggtcctcaagctggtcaaggtactgcttcatttttcccttgccgtcgaagttgaggccgatcaactcgcgctgcaccttgtagcgcactgcatgtgactcccgagcccggtcatttgaaactgccaagagggcactagggacgtcgcggacatcttccaacagaacgattttctcttcggccatcatagccatcacgatattcatcgccttgttgttgttggccaccaccgaaacattagt

SEQ ID NO: 66687 - DNA, 413 bp, Arabidopsis thaliana landsberg
acttgcagtttcattaggggtgagtgtgtgatatcctttccaaccgactcttttacttgtatctgctcctggacccgtatttctgtattcaccatagtacaaggtcgatagggttccaatatcagttatgttccatggagtccaacccgctggatcgatgacatcgtctataaacgactccatgaatactactctcgagaatgcacgccacggacgtcccagaaacgtctttacaattcctttaattggagtgaggtcataacttgcactgatgttgcatttctggaacgaaaatcccgaagttgcagtatcttcctcgcgagattgagcattcacgtgcctacatttggcaaatattgaaataccgctgctgcccgtgcgaaaataaaattgacggctcccgtaatataaca

SEQ ID NO: 66688 - DNA, 584 bp, Arabidopsis thaliana landsberg
ctacagctttgtccaagagacatgctgatggttctttaccgttccaagactataacatagagctgggagatcggggaggtcataaagtacagtttggaactgagactgatcagaggtattgcttaatcaggttggagcatggaactgccacctaattttttaatgctaatgagattttttttttcttttttgtgttcaacagtgctgcaatgatgggtcttatgttacatacaaaggcaaaaagtttaatagaaattgaaatgtattccgatgcagttgaagttcttgctatggcagaggttagttgttttttttgttgcaagtacgtttttgttgtggtaatggttctgcaatagcttcctgatgtttgtttgtttggttgttcgtaggaatcatttttgctctgtgatcccaagattctcgaggtcagctctctctcctgtttgcttgttttctgagtctctgcgatgctgaattaacctcatttgtatctttgacatggctgtactatattcttacagcttgttgacaacctccctatgatggaaatagacattgcctggtgtgattccttgctccgggac

SEQ ID NO: 66689 - DNA, 501 bp, Arabidopsis thaliana landsberg
caacaagcgacaaagtcgcacgagaaaccccacgcgcagaaacaaacccaaaccgacgccgtgtctatctgaaaccccagcaacagatcactcccacctctccagcttcaccaggcaccataatcaacaccctgcaaaggcgtagtgttacggggcccgtcccaagaaacatagccagaatgctcctatggaaggtaaaatccaaatcggcgagaggatgcgaaagtgaaccccaacctcgtgcgcaaccagagactagcgtgaagaaaagcaagggaaacacggagagtgcaacgcaagtcgagcccccacatacaaaagaacccgaagacaacaagaaccctaacgacacgctcgcgagcaacggaaggcaaccaacacgacctggaagccgaaaaacagagaggaagaaaaacgccgccaaaaacaggaaaaggagacagacgaggcagaacaaagccgacaccaataaactgcgaaaaaccaccacgccaccgaaga

SEQ ID NO: 66690 - DNA, 599 bp, Arabidopsis thaliana landsberg
aatcgaaccttatcccaaaagtaaatactctaaaaacaccccaagaaatgaaattgttcaaattaacccaacctaaatcacactgtacataattggatttatttattactatttagtgttcttttttctaacagtacaacgctctccaatttttaaaatttcttgtttcttctaataacgaatgcaagattacacatatttagactttttgaaaacgttaaaatctaatggtgtgttgtttttaataaacgtattgtttgaggtctaattaaaagtgaaaagaatctcgatcggggaataataatcatgaccgagaaaccgactcagcaagtttcccgattcgttggacaagttcaggagatagcttcttcaccggtttcttctccttctccggtcgaaaatcaaaaccaagtgcatccgatacttcttcggagctccatccagcttttcggagcgactccgagaaccgacccgctttcaaaagcaatgcatcaagaacggcttgattatccaaaattaccatttcaccctcaaagaaaccagatgctgacacgtgtacaatatcatcaacgtcggattcgctccacccgcttcctctt

SEQ ID NO: 66691 - DNA, 2623 bp, Arabidopsis thaliana landsberg
ttagaaacgataatagttcttgaaaacatttgtcgaagactgaaatctcattaaagccacagaaaacagtaacatcgcttaacataaacttttcaatgttgtagaatgatagttgctttaaaaatttcaacgcttttgatcaagagctctcatgaggatccaaattccggaatgctgtgtaaagctggcctccacccaccaccacctcttcctccaccgtggctcctcctcataaacccatctcccccgttttctccggcgacctataagatcggtcgaattaaattaagcattcgtacataaatgataaaaggataaagcgatcagagtaatgtgaccaggacagtcatctataaatatcttattcatcatgtcacaactagaactaaaattaaggatccattttatatgttaaaaagaaaaaaattggacgatgagagtattaacatgcacttaccgcattatcagcgctatcttggttcggattcggatccgaattcgggttgactttgcccgtttcctgatccagcttcttcttcctgtgtttcgtcttcttcttcgtcaagtcaagccctcctccttctttcaataacttgccaagcttcacacatttcttcgtcgcaaactcgttcaaaacctctgcatgatagtataaaattgtcaacagctttatagatcattttatttatcagaaacagagaaatggagttaagagtgtatatatatataccttcgaagctgacgagacgatagacatgtccgatgagtaaagtgtcgtcaggacgaaggagtttaagctgcttcagtggcaaacctttctcgttcttcatcgtaggtgacgtcaccaccaccgcaacgtaatgaccaggattggatttcatgatgtcactcgctgtcactgaccagtaaatcctctccaccttgttctccgccgggtgatgaatcaaaaccgtcgctgcttcggccgcttgacaattccccatttttattttttttgcaaaaaaaaagaaaagagaaaagagttttgatttttttgttgggttcctgtctgaaactaaagtatataagaagagattgttttggttttaataaatagcgacgtcagaattcttcatcatttgggattgtcaggtttgacaaagaggtcgcttgagatcgataaaaaggattaaacacaaacaaataaatttagaaaataaaaagaggaagaagaagaagaaaataacagaaagatagaatttgtaaattaagatgtcgacacaagagattaagcaatgagacgaataaataaagaggttgggagtggtagatctatttattttatttctgatgtataatgataatgacatttgaattttatatgaaattaataaatgttattaaggatcttgcatatcgcaaccaatgaattgattaacaacatgtttcattctcttgaattattaagttgactagaggttatggtatctaattaaaaaccaaagtagactgtaaaatttaatcaacaaccatcttttactaatactattcaacaattttcatttagaaagtaatatattgatgatttgataactaattaaagggaaaataataaataattaagaaatattttcaatatgatcaaagtttttttttttttttttaactttatgtaatttgttttatgtatggattgattgctgtttttatggcttcaatgtgtgatacgaatctctgaaatgatatccgagcaacacgtaaaactatgtccaattttacatgttatttgaactaaagtgtagttgataacaaaatctttatggatttgatttatttgaatattcattcacatatttcttatcacaatccgatagtttttttgtttttttcatcatatcacaatccgcatcatatcacaatccgattgtttcgaagaataaaaagtactattacaaataaaggctgttccaaaggaagctgttgattcagagttacggtaacagtgagaatgataaaatgtagtatgggacccatgacgagttgaatcagatgatttgatgaccgttggattcacgttagttctcattcatgaccgtcggatacagaaacgatgtatctgataactctatcacaatggcagagtacctaaagacactgcgactctttactgtcaatagatttgttcgactttttataatgcatatttttggttggattcaccagcgtgtgatgtttgttttttctaattacttgcaagcgatgtgtaaattagattaattcaatccatgagtttggaacaatttgtttggccttctatcattaactcttgttctacaaagccgtttgttttgaaatctttattcaagaaattcaaggacacacgtttattcataaatttagataatatttcactaaataagttgaaattgacccgaccaagcaaaataaattcgttacaccaaaacacgccaccaaaaaccgatgaagtctggtaagagaacactcgtaattaatttactctgatggtagagacttcgatgcgtgtcaaattttgcgaacaacacacgctacatgtgtttaatgataagagagagattcactatactcgtcaatattgggcttaaagcccatataaagtcttaac

SEQ ID NO: 66692 - DNA, 992 bp, Arabidopsis thaliana landsberg
tggttatctaagaactcactcccttcttgtctcagattagacaatttctccaaaggagctcccttctccttaacaaagttgccaattctggctgcaatctctgaagacaagcctgtctcctgcaccatttctttcttcacttgctcaaacgattgcttgtctagctagtcgatactcgaacagatggttcggaatttctcacgtggtactccacatatgtgcagcattccatcaagcatctggcggcgattcagtttcacctattgaaacaaaccagaattaacaacatagccaaagaaaaaaccaaccaggaaagattaagactttcaacttaagttattacctcataatctcctatttctaactcatcgaggagttcagttaatatcttgacaatttcaaaatcgggtcccattggttcgaacaaaccagcgatatcaaaatcacactgataaaactctctgtatctccctttagatggattatcccttctgtacacctttgctatttggtatcttttgaatgatgtgattccattcatagccacataccgtgcaaatggaacagttagatcatatcgtaaagagcaaagctctccaccctgcaattaatagatccatatgagctcaaattttgacaaacaaatcatcacataaactgatgatattacagcagccaagaagagttctacctgatcagcaatatcataaaccaatttcgagtcttctccgtactttcccataagggtctctctcaattcaaaaacaggagtatcaagtgcagttgcaccatgcctcttgaaaacgttttgtatgattgaaaaggctttttctcggactgccatttgttctttagcgaaatctcgagttccctgtcatagaatgaaacaaatcaaaaattaactctgaggcctaaaccttctccatatacgagattgtaatttacctttggaagcttgggaagtctcctattttcattactttctacaatct

SEQ ID NO: 66693 - DNA, 329 bp, Arabidopsis thaliana landsberg
atgtttgacaccgaggcaagaaacacacttcgacttgaccatgtgttttgcttagagcagacaaatagtttacaatggactcttgcttcagttccattaatgaaagccttacagctcacactatctttcctcttttggtaagtcctccttgtgaagttatcgctttcattattgttactttgtcaaattgagaaactttttttctctttagtaccctggtttaccgaaagatcgctttcggagtctctttcgatgtattggtgaatatgttttttctgtccggtgtgcaggcattcatgtgttcaccatcacatttgctctctggggat

SEQ ID NO: 66694 - DNA, 489 bp, Arabidopsis thaliana landsberg
  unsure (1)..(489): unsure at all n locations
atactgaccgtgatgttcggggaatcgtaactggcggtagttaccgcggttgcggcaacagccgttgtgccggttaccggagtagataccgccgttgcacgcatagagccggtttcgacattcccgtcatcgagcgcggaatcgagttgcttggcaaacttacccaggacaccggtcgaacatactgcatatgatgcacttagaccagtgatcgtattctgtggattcgattgtacgcctannnnnnnnnnnnnnnnnnnnnnnnnnnnnnnnnnnnnnnnnnnnnnnnnnnnnnnnnnnnnnnnnacgccagccaatcgaatatgctgccgaaagttgaaagtgtcgcctggagctgcattccacgcaccctcaatcacaccgtgaccatcaccattattggtggcgcctacatgggtcgcggctgtcttgtcatcaccaggcaaggcacgggacttgtcctgataggaatagacttgtacctggata

SEQ ID NO: 66695 - DNA, 507 bp, Arabidopsis thaliana landsberg
tagcatagtactttccaaaaaaaaaagtgtcaatcatttgccgtaaaagatttttttttgaagctactatatggagcttgactttccaaaaaaaaaaacatttaaaattaacacaaattcacaatcaagcacacgaataaaccttagattatccagtttggccttttgtattgtgaaaaagaattagcgacagacggacgataatatataggactgaaaaattttcaacgatgataagttaaatctttaaggttgtctttttttttgttgttgttgaaattctttaaggttgtcacagaaatatgttttcttcatcatggttactttttttttttggtaaaattcatcatggttacttctaaaaggagaaaatatataaaggaaaaaaacatacaaataattcttaaaaagaccccacgtaaatattaagagtggtatcatttcatgggatggtcataatgtgttgcaaatattaaaaatgtttttggcgaataaagaataattacg

SEQ ID NO: 66696 - DNA, 179 bp, Arabidopsis thaliana landsberg
tactcaacaaatgacccgcgataaaactagattcacgtgcagaagatcctatcaccaacaaagatttaaacgttgctccgacacgtgaggcggttagggtagcatcatccaacgcgtggttaggacttaggctgtctcgtttttcattacgttttttttttactaatttcatttatttt

SEQ ID NO: 66697 - DNA, 1675 bp, Arabidopsis thaliana landsberg
cacaaggaaatcagatcgagcttattcctacaacgttgtaaaccagagtaggataaaacaaagcacgagcaccaacaccaacgagtgccctctttgtagtcaacacattcttgtttcctctgctcaccaataccgccttatctccatcatcaacgttatcctcaaccgatctctccctcttctcctcatccgtttccgtcagttctttgatatacatattcctcagtcaaagatctaaagatccaacacacaccaaaaaaaaaaacaatctattctcctgccaaccgatgccctaataatcaatcaccagtcttatatacacagacacgattattcacaatcctaattgattcgaagacaaagccaagaagaaagtctacacgtaatcgaaatcgcgataaagtcaagaggaagcaaccgaagaaattttgaattcaaaatcttcagggagatcaccaccatatttcgcctgaaacaaaacgatgatccgatcaaacgccggtaacgacgagacggagaagactgaaaaaaatccgatcaccgatggatataaatcaaattcgccaaatgaccaaagagaagaatcgccctaagaacaagttttcgaaatttggggatcgagaattttgttttggcctaatctctactcaacctttaggttttctcttaaagagaggagaaccaaaaaaagaaggatctcagtgttttcaatgagagggtttttgctaaactgacaagcgtttcacctcttattgtagcttttatgtgaaagtcaatgctctgttgacacgtgttttgccgatttatggagaaagagtcatgcgtcgcacaaggcccggataatattaggattatcctttctttaactcttttttttgttttggataagatcctttctttaatttttaagtatcaaattaatttgagttttttaaaagaacaattaatttacccatatttgaaatgaaaagaaaattatgtttttaatgttaaaattcaagaagtttacccatatttgaaatgaaaagaaaattatgtttttaatgttaaaattcaagacttcttgagccaaaaataaagttctctttgagcttaagaaaaagtatctaagtcctctaaaatattaaattcaaaacaaacaaaactagtcctgggtaatactttcgagtaaaaagaatttacaactaggctacaaaatagaaattacagcaaataggctttattatattggagtgatttactaaagtcaacaaaaaaaattcaaaagtagctgagcaaattatctacagcccacgagagtgtagtaatgggctaatgggctaatgggctaatggcaactatgatgtgtagatgattagagagagcttgattagttttaaaccaaatcttatcacgtctttcattagaatccgatataaatgataaatacttggagctttctattaccaatatttttgttacctttattacaacaagtagtctctctttctgttcaaacttgtaatcctaaaaatagaacaaaatcctctgttttttctgtaacgaattctttcttattgaatcacccaaaggtaagagcttttttagtggcttctctttctttgatttatccaatttttcacacacacttgaaaatctgagaccattgagagaacaatggagaaagttgatcacc

SEQ ID NO: 66698 - DNA, 774 bp, Arabidopsis thaliana landsberg
tacaaatcattataaaaaatgagacgtttagattatataagatgatttgcaaattgcttaaacctattgattggtcttaactataccaaaaatatatattaaaaacatggaaacaaagacaaaacgaaattcagcacatcgacatatcatgcatgcattaatacaaacagattaactagaccattggtcgtccaaccaaaacaatacaattatgccactattgacaatttcatacatggataaagtgagatgtcatgaatgtggttgtacataactaaagatggaactgaagtactaaacacaaattgtaattaagagatactacgttacaactttttgggtgaatttgtgaagtttaaattatttgcaatatttgttttctgaacatgatgcagtttaaccaaagaaattgacatttttaaaagcttgaaaattaggcatgattgtttaaatggtggtgtgtttaaaaatagtaattactcatatagctaaatgttaatttgttgaagaagaaatcataataatgatgaagaggtcccatacataacaataattagatttcactgtgcttgtatttataccatcaagatggtcaagagaaatatgaagagcccccatcattaaatgaagacattattggctatgatttacacaaaagtaaatatttaagcttgaagtggataaaagaaaaacaaagggtatagaaacaatgaatttgaccacattagaatccttattaagtaccccaacgcttctcaatgcaaaaaaacacat

SEQ ID NO: 66699 - DNA, 1448 bp, Arabidopsis thaliana landsberg
aatgctcatcttcttcatttcctgcattttattgtcaatcaggtttaacttcaaatatttcctttcacagttttggttttcttactgtatttaaggcttaggaggagagactaacccggagcctttgcttctccatttctttttcctgcctcagcttattgtattcttgcaacattgcaacaagaggtacctggataactcttaacaggtgatgattactctatctaatttagagtttctctttgttaattcaaaaaggcatcaagttgtgttacctcattgtataagaagactttctgtctttctacctcccagctcttagccttaaccaatatagattccactaatcctggtccaaatattatagaagggtcagtgactagtttgcttcctaacttaagaaaatgcagggtcatttgtagctttatttgtgttggacactaaggaactgcttatattacctgagattttgctgactgttatgcgtgcccgttctgctctccttaggtttcgatgagcatttctacttactgagtaccgattctcgtcctgtgacaacgttagtgtttcttgtatgagttagactacagagataacatttagttactttcatagaaaagagattggaacctggtcatattcttctagccagcgctcttcatcacttgccaacatccacctatcaactttttcaattattccttttctacttgctgcttcttcctttgctcttgctatcttttcatccatggcggctagaaggtcaacatggtcaacttcccctttaaaatagaggacaaaactctgcaatgagtttgacatgtataacaaagacacgtagcagttgcagaaagttacaattagtcaaaccagagtctacaaggttcgtgatatttcccatttccgttgatggagtctccatatgcgacatgttgcacgtatcttctagttccttttgcttcttgatgaaaagttctttgattctgcttgctttcagttgatctagtctcttgacttcagcctcagccttgggaaaaatttgcacaaagaaaaggcggttaccaccagccatcattggtatgaaaccattgtactacatgtctacatagttatatacttacctgctgaattatgtccaatgtaatgcttccaggagcacacacgtctgatggtgcggacgacagtaaatcaatgacatgaaaaaacttttgacgaccttcataagatgcatccatcagatcccacaggttcgataaagctctaccaagatggtgaagctgcacacatgatgtcttaaaagttcagataagataacaacctcttttgtgtttgataaatgtgcatctctttattgatttgtctttcaccttatatctgttaagttttatgtaaataggatagataatgaattgaaacatttctagtacgcttcaccttttcaggcgttt

SEQ ID NO: 66700 - DNA, 710 bp, Arabidopsis thaliana landsberg
atacttatttttttttcccaataacataattttaaaaactcccttacatttagtttcttttccttttttttttgtgtttacaaacttttaatttcttatttgcttatttttaactgtaatctaaaactaacgaaatcatgagaagacaaagttgcctcattttgtctaatagaaaaacaaaatacttaatttttttttcccaataacataattttaaaaactcccttacatttagtttcttttccttttctttttttttcacaaacttttagtttcttatttgcttatttttaactgtaatctaaaactaactaaatcatgagaagacaaagttgtctcattttgtctaatagaaaaacaaaagaaatatacataagttctcttctcctatataatatattgatcataacaaatctaactctaacacatcaagtcatcataataaaaataatttctcatttacaaatataatgtaatgtttccaataaaagtagattttaaaatacaaatactcaatagttcaatcaataacactgaactttataagatttttttaaaattcatgatttaataacacatgatttgttattatacaatcactttatgcttgaaacccttaattgtatttgcagtcctgtcgcaatattcttcatagagaggtccgacgagaaaatcaaaagagaaaaacaaattatgacttttgctgatct

SEQ ID NO: 66701 - DNA, 223 bp, Arabidopsis thaliana landsberg
aagaagctatggcggcgaaatacatttgagatctgcctcaggagtttcggtctaaagcccttgaccctctgataaagactcttctcgtcttgtcggtttagtttatggcgctctgagtgtgagattgaatgcccgccacgtggattattactagtgtcctacttcatatcacacatcgctaatcacggataaatgcgatccactgatcaaacttggggtgtac

SEQ ID NO: 66702 - DNA, 578 bp, Arabidopsis thaliana landsberg
cgtatagattttaatattacatgatttttaatttaaacaaggtaaatctgtattaatctgtgtacatcaaccagtaaaaagaaacatgatctttaaaccaaaaactacgtagtaaatttcaaataacagactgaaatcttcttctgcggcctaccatgccacggccttcgcttcctcatttatttttaggactcttttggtcagcttcctcattaatcgcctttctatttttcccctctcttcaagttcagcggatgcatttatttttagatatacctttatagtagtatcatattgtacattaacatacatatgtatatacataatatacgtatgtatatacatattaaatttacatcctagaattatgatcaacccataaaataaaatattggatctaacttttaaatactcattagatctttataatatccagttgtaactaacaatgtttataactaagtttagaaaataggaaatgaaaacatcaaaaagaaaactttaagagagaattttcacaattttagttcaagattaaatctttatgggtatatttaaaataatattacatacatttt

SEQ ID NO: 66703 - DNA, 400 bp, Arabidopsis thaliana landsberg
ggaccattaccctcctttgcaggtggggtcatctgtttctttttcccatctccgctgtccagagaaacctgggagcatgctgagcctttccaacagaagatgatgtcatcatccagatcccgactaagcatagggccacaaacacaactactgtcactgtagagcaataatttgatgagggcctcctgttatctatcctagtgtaccttggttgcgccatggttcaaatatcagcgacagatgataacaacgcgtgtacgcctacacggatagcgtaacaaggaaacagatcgttggcgagcaataaaatcagtatcatcatatccaaagacacagcaaggcacgtgtagtttagaaaactatcaaatttcttgacgaactatgcatgcatatatcagct

SEQ ID NO: 66704 - DNA, 198 bp, Arabidopsis thaliana landsberg
atctacggatgagataccaaatagacatagtttcaatgtattatgcaaaatttctaaacttaattaatgtatatggaaatataagatcattgttgaaatttcttaagttttctatatatttatcttatactcattaagtgactgatctgtttagtattgtatttggtgatacaaaattgacaacacttttgctggtac

SEQ ID NO: 66705 - DNA, 400 bp, Arabidopsis thaliana landsberg
  unsure (1)..(400): unsure at all n locations
ccgagaagagaaggaanccanaagacgacctcngacaccgcncacggaaacgangaatagagactaagcaccggngnaaacggcacaggncaccggcgccgccaccggaggacccagcgacancccgaanncgacaccagagggaccaccacgcccgaancgaaaaaaagccaaagcaacaacgannaaaacgaggancgaaaagccgaagaaacacagagcgacgaacagaaaaagcaacagaccaaacaacggagaaagaggaaaagggcgaaccccgccgcgacaccggagacggcacgaaggaagaagaaacgaanccggcgnaacaaacagcgacgcacccnccacgaaggggcacagcaggcccaaaaaaaggaagaagaaacgaaaccagggc

SEQ ID NO: 66706 - DNA, 573 bp, Arabidopsis thaliana landsberg
ccaaaaacaatttactaattttttacttttctttatgttcaaaactgatacctaatcaaatattaaaaaaactgtgcaccaaaatttatttaaaacacagaccataaatatccatttaatttctaatattatggtttatattctattatataaattccaaaatagaaacaagtaaaacaagcaaactgcttatatattttatacaatacatattttaaaatataaaatctcgcatggataaggatctagttatatataaatctaaatcaaatacaagaatagcatacatgtaaaataaatacctaaagaaaatattaagttgtctaatttcattaaactataggttaatatctagtatcctaataaaaaaaataacagggcgtgttatataatattgttgattaaaaaacaaatcatgttgttttcctaaaacatgattaaaccaccttctaacaaaaacctaatttattggtgcttgtctgattcaacgtcttcttctctcaatctcttccgttgtcaacaatcgaaaccgcgaaccctttgatttgaccagatgagatcaacatcgaagca

SEQ ID NO: 66707 - DNA, 587 bp, Arabidopsis thaliana landsberg
atactttggggtttttcctttattggtcaatctaaaaagtatatttttgactattgaaaaaatccttaactagtaggattgacatgaaaaaagtaattcgatataaaaaatatatttaatgatagatctttaagtatctcaaaaataaaactaaaaaacgaaaaccaacaaatcttaatattatactagtgaatatctaataaaaaaactcattaattaatatgattttaaaagtattttttaagaaaaagaagccataattggtactactttctcactcatgcgacagaaaaagttgatcttcttctccttttgctctagttctcctcgtcgttcatctttgaatcgatcatgttctcgagcatatgttcctttctttttttctaataagtttaatatatcgttctttgatgatgggaactggtaatgttaaaatgggctacccggcctttttaggcccatacccgtttaggtccattgcctatttacaaaaaaataaagtccgtttcgagtcgcaaccttttaaacttgagcccgctcaaacccgtcaaatttgtaaaatttaggcccgcctaactcttacctga

SEQ ID NO: 66708 - DNA, 551 bp, Arabidopsis thaliana landsberg
  unsure (1)..(551): unsure at all n locations
gacgtctatttgctctattacctgctggagcctgcgatcgaagccagccaccagatcgccgttgccatgtaccttgccagcatcgncgaggagcgcggatcgatgctggagccgcaggcggatttcctgttcgcgctgtctgaccgtctggatgaccgttaccgcgtggcggaccgctccggctatatgaaggattgccagccgtccctgttgctggtcgaccagctgcnnnnnnnnnnnnnnnnnnnnnnnnnnnnnnnnnnnnnnnnnnnnnnnnnnnnnnnnnnnnnnnnnnnnnnnnccacccagacgctggacggcaatatcgtcgatcctgtcggcgtctatccggcctttgacaagctgctggtcgacgggcgcgaaaagggcgggctgcccgtgacatacgatgccgcgcttaatgaccgtgtggagggtttcgcgcgcctgatcgccagagtgccgcaagacagcaacatgaagaccggcgacgcgctgcagatgatcaaggtcacggcggcgggtccgctgcgcgatgcggcgcgcgcgtc

SEQ ID NO: 66709 - DNA, 1224 bp, Arabidopsis thaliana landsberg
  unsure (1)..(1224): unsure at all n locations
tttcctcttcgcgtgctcgtctacgaggggggtggttaattttgcatctgatcatccctccaacttcaaggtgagttccttctcttatgacttatgattcgatccgggttctctgaagaatttatctttctgctttctcgcaatttgaatcatcgatttgcgtctttaattttgctattctccgaaaaagtctgagatctctggtactcgtcttttttattacttctatcgaaatttgtgagaaaattctgatcttttggctcagatatatctgagattattgcaaggaagatgatctctctgctttgatnttaatcggcgttgatgaatcgttttaagtatagaactaactatgctacattttttggattccattgctttttatttctctgatggaagttccttatttcattgactttttgctagatttttggttccacattgatatcttggtccctgaagctgtcaaagagggcacctggtccgcttggtcctgagctcagatggatctgcatccaccaggtgagtttctttttgaagattcaagtgtttttttttttcactctagctgttttcatcatttggttggctaattttcttatcttcttggtgtaggtggttcaaaaaagacatctgtagttgttgtcaccttagacactggtgaagtctatgtcattgcaagtttgttatctaaggctgatactcaagttatctatatcgatcctacgactggtatcctgcggtacaatgggaagcctggtcctgataattttaagtcagagcgtgaagccttagattatattacgaatggatcaagaggaggtgttagaagctctgtttatgccagggcaatactcggttatgctgtcttggggagctttgggatgcttttagttgcgaccaggctaaatccaagtattccagatttgcctggtggtggatgtgtatatacagtggctgagagtcaatgggtcaaaataccactctacaatccacagcctcaagggaaaggtgaaaccaagaatattcaggagttgactgagcttgacatcgacgggaagcactatttctgtgatactagagacatcactcggcccttcccaagccgtatgccacttcaaagccctgatgatgaatttgtttggaatagatggttgtccgtgccttttaagaatattgggctacctgaacactgtgtcattcttctgcaggttcgtcctccag

SEQ ID NO: 66710 - DNA, 510 bp, Arabidopsis thaliana landsberg
  unsure (1)..(510): unsure at all n locations
gatgctcctgtgatttactttgatcagaaatttcgatgcccgtttacaaagttgcatttttatatggattcaggccacgaggaggatttgatctttctcatggaacaatgtttttcactcttagttggctcaaaattagtgcttgtccaccacaatgtaagaaatcatgacaatttgaagatatcaagtgcttattactctcagatgagatggtcattaaaagagtatgctgccataagcaagtcatacaattttctgcttaaaagtgacaacataagcccagcattaacaagtgtcatcagctggaggatacatcaacaatgtgaaattgacaaatgcggttttatatcacaaagagattcaattccagaaacaatacgacaaagcggtgtgcanagatggtttcagtatgtacgatcagtgaagaacttgttgagtccaggcatgatttcaggtttcttgttgcgaacaaacttnctcaggacattttccttatacttctctccctct

SEQ ID NO: 66711 - DNA, 121 bp, Arabidopsis thaliana landsberg
aatctgctttgtattttctttctgtagttttctgtatcttgtaatctgatcgtcattttaatttggtagcacaagaatctagcctaatcacaatttaatcatattatccatcatccttatt

SEQ ID NO: 66712 - DNA, 507 bp, Arabidopsis thaliana landsberg
agaacacacattaatctattttaaagtaaaaaaataatagaataacacactgaagatggtttttggttgattttttctctaaaatgtccaagtgcatacccctttatacaatgtcatactattgccacacaaaaaaaatcgtataatttgttaaatttatgctcacaaattttgttttataattattttaacatacaatatttacagtggtcaagattctattacaaaaagtgtttttatttatttattgcttttgctaaaacgggtttctattgatgattacaaaagagaatagacgatttaatcattttcttcgacaaccaaattatattgactgtcctttttctgatccacatgtgacatgggggtggagcattaaattaacccgaacagaagttcgtacgcggatcttgagactgcccactttaattgaaacagataaagaaaacttttttggccacatacgacacttcttttttatgatcattgaagattttcttttcatta

SEQ ID NO: 66713 - DNA, 486 bp, Arabidopsis thaliana landsberg
ccgccccgctcatcgagctgcacatctccaatgtgcatgcgcgcgaagagtttcggcgacactcttacttgagcccgattgccagcggcgtgatcgtcggcttcggggtgcgcggttacctgctggcgctgcgctacttggtcgagtcgtcgggggccgagtcttcgggtgcctcggtttcggacaccgcgctctcggactgagtctcggcgccgccgttgtcctcgatcacggggaactcggtggtggcgtcggtgtcggccgggaactcttcggtggtgaagcctccagaaagaccggcggggtcggccagtgtcgtctccgcagccggcgcggcggcttcggtctgcacggcgccggtctcttcggcggtcagcgcgggcgcgccgacggtggcgaacacgtcggtcgccggctggctctcctccacggcggacgggaccgggcggcgttccggatgcttctcgtactccttgtcgatggcgc

SEQ ID NO: 66714 - DNA, 2209 bp, Arabidopsis thaliana landsberg
aatgatagatattcatgtgatcatagatattttcgatttatatgctttgggtgtggaatgatgaaacagattcgggtttagtaatagtggtctcaaaaatgtttataaaagtaggtaagaaaatataagatttgtaagaactaagaaaaatatctacttaaccaggaattaaattaaagtttacaagtaggtaagaaaaataagatttttcaggaaaaaattatgcttgactacatacgtataatgtaattaaatttagtatcatgggatgggacataagttttataaatacaagtttttaaaacagagaaattttttaccaaaacttgttttgagtcatacggacccaaattgctgaaatgatcgatgacttagtcaaacctccatttctaaggtcacaattgtttgctcgttacgcaaataagtccaaggtcaactatataatataatactcataaaaattcaatccctactttcttaaatattactcagaaataaataaaatataagtcaccagaaatgtgggttgacttgggagataatacgttatcacatttgtagctgagtcacatattgtggagtttttattggcactagttggattttcgtggacggatcaaaatccatacacattatcatcatactgagtccaattttttaataaatggtttgaacaattctgacatacgggagctcttattttggacttaaccgtctcttttacattatcactttagttccactgagccgttttactcaaattacataagcattttgttttctacaaacattgacattcctaatacaatgagtttctccatgaaatttcttttccttttttactctctacataataatttcgtaatgttggacatttttcaagatgatgacaataaagttgaaaataataatgttctaaaagctaaaatgtcaaaaatgacagaccaataggcaaaaagcgataaaagggaaaaaataaagtcatttcccacttcccctgtattctctcgtcatttatttaacaagtaaagccattttcaaagtggttgacagcatgattcagagatcaagcatgacaaaataccaaagtctaaaatggaacaaacaacatattatataacacacaggtttatgatcggacgacattagaaataggggtttgatcaaaaggcccgaggggttatgaactccaaacacagattctctgaagagttgagaagactgtaaaaggaagggatttgcaaattgcaagtccacagctaaataaatggcgaagaaaatgattgttgcgttctcaaaacaatatagtaagagagaaacttttgccaaatacaactgaagcaaaatgtatcatatcataataccaacttattcattttttcagagttgcgactggaaaagcataggacttttaatttgcttaatgagctcattaggcacttttcttcacctctgcggccttaatgatgtcgataaactcaggctgcaaaaagaccaagaatgaaaacattagtcatggttttgaaagagacaaacgaaagatatcattacaagagaaaccatattatatgtacctttagagaagcaccaccgaccaagaaaccatcaacatcggcctgtccacctagctccttgcagttaccaccattgacggatcctgataataatttgcataatcaagctaagtaacatagaaaactatataggggtgtttaattaaagatcgtgttatcatctatctacctccataaatgatgcgggttgtagcagcgacatcagcactcacgttcttggccagccatttcctcagctcatcgtgtacctgttcataaacgaaacaagctctcgtaaggaaaacagcattggttttcctattaaatcatgaccatatgcaacacgttacagtgcaactgcgcatcgagaaccacttacttcttgagcttgggctgggctagcgacctttccggttccaatggcccacactggttcataggctatgacaacatttgaccagtttgtcacccgatctgccattaccaacaaaaagagttttttagccaacaaatatttctgtggggtttgaatctcacactaagggagtatagtgcgtagaaacgggcatcactatcatcaaaacaggtctcactgtaaacgagaacgaactgagatagcaaaaagagattaaatgtttgacaatatacataccggc

SEQ ID NO: 66715 - DNA, 514 bp, Arabidopsis thaliana landsberg
caccaatcgttcttataatctaaccttgtcagtaagaaaacttaatatagtcaacacatttagattagaccatctctggcttaaggcgatcaaatgacccttcaccaaactctttttccctgccttttcctgattgaagagaggttgtttgaaaagagaaagagaaagaaagagaaatgttccgtcgattatatcggcgtccataaggaaaacctcttctctcgcttccaacgctaccactcctatagccttctcttgaactcctagcttgtggtaacgtcttcatgtggctcagttgccttcgtacttcttccggtaactgcaatgtgaatctgtcaaggttttctacacgtggtactagagaatgtccagtcaatgggatcttgggaacaaaagctccgttattctccagtttgataaccctgtagacctcgatcaggcggtgtatttgccccgtgttattgctccatgacaatctatctagcaaacgtacatctggagactccaatacact

SEQ ID NO: 66716 - DNA, 400 bp, Arabidopsis thaliana landsberg
cacgctacttctactcagcgccaggctgcttatgggctgaacattgcacggaccgagcgccttgattgcatttagcacgatcttctagaacgccccaagggcgactggggaaaccagaggtagcggtccgcccatagatcgctgaaccatgggtggtatgcatcatctgaccgctctcctgatgggctgaagagaacggtggaggctactacctgattcgtacaaccagaggcaatgcgtgtggctgcgtacgaggtggagggagcactacccctctggctcttatgctggtgcctcctgtcgaaccacacgaataggtaagtggtatgacactacagctaacaaccctcagatatcgagtgaccagaagtgctgagtacaggcccattctgtcaaagtc

SEQ ID NO: 66717 - DNA, 195 bp, Arabidopsis thaliana landsberg
  unsure (1)..(195): unsure at all n locations
ctcttgggttttcttggtcagaacaagctgcgtctctctggtgcttctcgggtctgtagaagatctatagtgtactgtgtatcgtacgtactatagcccatagcacacaatcgatcacnnnnnnnnnnnnnnnnnnnnactctttacgtctcgacctgatccctagcggctttctttgtttgatatatgatcgtt

SEQ ID NO: 66718 - DNA, 538 bp, Arabidopsis thaliana landsberg
ctccgcgcgtgcagcaattcgaagatgaatacatccggcactatataaaccgaaacgggagtatcgctgagttgatccactagccattttatacgtgcttcactacgcataggcagggtgatgtaaacgcggtcgatctcacccgcgcgagcttgttcgactaggtcttccagattcccagatatcggcagtttgatcttactattgcctagacggatgagatcctggtacttgtcgtcgaagaagccaagtaggtccagacccatccagggagcaccggcaatattcgaagctaggcgttgtcctaaagggcccgcccccgcaatggcgaccgagcgggtgttgaaacctttgcgacgaacagaattgagtgcggtacgtaagagtactcggtaggtgcacagactaatcagcaccagtgctaaccattggagcaggacaacatctgcgagcaagggtacgttaacaaaaaagtgggcgcaaaggaaaactccaactaagctaatggcccagatgcctcctaccttgcgaatttcct

SEQ ID NO: 66719 - DNA, 294 bp, Arabidopsis thaliana landsberg
gattcgtttttcgccgtttttgctggtctattgcgacaactcagcgaagatattgcttaatggggtcttgggatatattacctgcccgggattgcttccagagatggttctatctgactccactatggtatctatgatgactttcatgccaacggtgcacggtttctgaaagatcggggggtgggaaatgattggacttgcatttttattcgagccaccgagagtcacatatgtcattttcaagaacaatagattggtatataagatgagactgaagacagctctgcttatacc

SEQ ID NO: 66720 - DNA, 551 bp, Arabidopsis thaliana landsberg
atttcatcatcacaatgatcatgctttatttgctcagtttccagtctttcaagtttgattgctctgataatttcctaatagaaatcattagtgtctggttttgtgttgtgtttcttcgtgtgtgaagctaattttgtaaccttgaatgatactagttctctggtttcttgaaagatttcaatttctttgttctgcaaagtaactgtttccagagaacttgtttagtatgaaatacttgttagcaggtttttcacctttggggttaaaaaacccgatgaaagactcatgtcaatgtttcctccaaaacatgagcctttgataccaaatggtaatgattgtttcatggttcttcaacatcttagctttccttcaatcttccacagtcttgctttctttaggaacattcttcagaatctctaagagagaccacaagctttttgttattagtctttttcttgaatgttctcttctaattctagtttttatgtagcttgtttggcttgaagttatattcttccttttagtagacgttagaatatggtttttggacg

SEQ ID NO: 66721 - DNA, 800 bp, Arabidopsis thaliana landsberg
taacaaaaagatactgacatactactgctaagactaaattaggactaaaattttatcttagtattctaattattgtatgtttacaaattaactttgcacattccctatgtttcagaagattttggttgtttctttatgttccatgtgccgcaccgaaacacatatatataaaagtatactatggagaagtgacaatttacgtgtgtaaatatgctctatttatacttttgtatatgttttagagcaacaacaactactgttggtacttagcttgtattctttcatataggagaggagtttacataattaaaattgatttttagaaaaaacaaattacgtaacaggaaccatttatgtaactgtatatagtttcatttgttagttttgttcgttattttattcaatatgattgaatatatagacttaaatgttggtaataaccaacgtataaagacaatgaaccagcagaacaccgtccaaaaacttgaatttaaataattgaattcacaacgacacgtattatttatcacagctccaagttccaataaacctatttcattaaactttagatttggaataatctctttcgacaaaaggataaatctcaaggaataataaacccgatagataaattatgataattaggttatccaaaaccccatcttatacaagtaataactaaatttttgtagctcattagttgaatttaacaaaactaattcgtctaggcgagcccgcacccagtggccagagccggacatggtttataaattttttaatttttttaatcttaaaacctt

SEQ ID NO: 66722 - DNA, 441 bp, Arabidopsis thaliana landsberg
gaaaatattagattattggtttgtaaagcattcttctaagccaaatacaaaactttgaacacgaggtacaaaagaacagttgatgaacaaactaatactattcctaagagaagagtcagatctgatttcaaagctctgtctcaatttcgttgaagttccagtctctgacaatgtctcttctcactgcacggcttcgtactaaccgtggtgaggctccttcacctgcttggaaattgggttgtggggttacctttgatgacgatgcagggaaagggttcgatcttgcagcttgaatgagtgatttccttgtgaggcagcttgcaatcacagagcatcttccctcgttgtctgagctagaaacagagtagcttctaaatgagtgggatgggctctctacactatggcacacgaggcatgcaaaactcatttttttgccccggt

SEQ ID NO: 66723 - DNA, 567 bp, Arabidopsis thaliana landsberg
acgtgtaatgcttaagtgagttactaactattaatgatatatcaattataatgatatataatatatatatatatatatatatatatatatatggagtatatgtatatattttggtaatttaactctataaaacaacattatagtgaaaaaacaagttaaacaaattattcattcaaatatctataaagcatctactcatacttacaaatccaaaaataaaaagtaatactaacttatctaaaaccaaaattgttttctattatcaagttaaagcatatactcatgttatattttattttaatcccataataattaatctcatatttttccttattattactcctttattaaacatattcatactattattcaaattatatatactaaaatataattaattgcatatatatatatatatagttgtaagaaattataaataagctatgaataagaagagtagacgtaaatttaccttaatgtatttcttcgattctttcactaatctcttataacattttcatctttggaacatgtaaaaaatgatgtgtattcatccacatatataaa

SEQ ID NO: 66724 - DNA, 552 bp, Arabidopsis thaliana landsberg
ttctgtattttgaaatacagattaagagacagatacaaaggtttgtgtattttctttttctattaaaatacaaagattggaaccacagattccactgttgactattgagtaaaacttgtttgtttagttaaacttgcttccaaatttaaatcaagttttcaatttgattatagtaaacaaaaattcttacttggacaccaagatacctatgagccacgtatctcgtgatcattattaaacggcatcgtacatagatattggatggtttaactttttaatattatgttatggatgtttgtttctctgtgtggttaactgaattagtaagcatatgatcatttgttcttgggattttttttttttaatgatttttttttttttttaaatgatttgctttgtggttgttgatagtaaattctgcttaattatctgaccaaacaaacaacatagtataaatgtataatgtccatgtcaaaagaacgaaaaagaattctgttcggtctacgtaataaatattggatcaaaccaatagcctgaaaagaaagctaataa

SEQ ID NO: 66725 - DNA, 1386 bp, Arabidopsis thaliana landsberg
gacaaatagataaaatatcatcggaatttggtcggaaattctagcattaaatatttgccgcttaaatttctcgcaactcgattaaatgaattatctgaagacatgatatttttgatgaaggccataaaattcgtcataaatgtcgttggaaatagggtaataattgtttgccggtcaaatattccccatgcaaaataaataaaagcatctagtttaatataacaggaatgtccgacgaatcattgacgacgtttattgttgtcgccggaaaatcatctgaaatatggtatatttaaatgattattattattatttttatttattattagataaatgataaaatattattaaccaaaaaaacatttaaatgtttgataactaaaaaatactgtttaaacaattttttagcaaacatcataggatagaaacaatacaattctcgatttaatttattcagagtcagaagaataatctgaactagcagaatcattttgatgttcaaactcttgtgcaccctcttcgtcttctacattgtcgcaaatctctgcaacttctatatttttaatatcaacaaggggaatgtcaccaacagattgatctatttgggtaatcactagttactgcattttgttggagcggtttcgtttctttcaccccatcggttctacgtcttggattgatttgtggaaccgtaatccatgggtattgtctctcacctacttcgggatatggtatgtagcaaacctgttccacttgatatgccagaataaatggatcgtactttcttaaccgcttagtcgagttaacttccgtgacaccatactttgtaactctaacaccttttgtacccagatcgtaccagtcacatttgaagagtatacatttcaaatttatgactcctggatactcaacttccaatatatcagtaatttcaccatagtagtcaatcgaatctgtgcgaaccacgaccacatcatttactgttttccttttagtcattcctgaacgttttataaaaacgtagcctcgagtgcaatacatcgggtactacatcgccctcgatagaggacttccaaccaacttttcaatccatgttggatattgttcttgcctacttgctgctgatttgatctgaagataattaaatcatattagcgatgataataattagtaaccatattctaagtaatataaatttattgagaaaactaacatattattttaaccaatttgcatattgtttctgcttcatttcctcttttcgagtctctgtcatgtgtggatatgctctagacacttggtcatcaaagattctacaaacattaatttttaagtactataagtattttatagacaatataaacgtattgtttaggtatgagttat

SEQ ID NO: 66726 - DNA, 634 bp, Arabidopsis thaliana landsberg
tctttaaaattttagcttcaaagttaatcaaacatttgatgcactactagttgtaaaaatgttattttttctttaaatataatttaatattaaattaaaaaaacgaattaatacacaattttgtaattgatgtacatttattatttaatgcaacaatttttatgtgaatatgttaaaaactaattattaaatttgcctcatttaatttgggatgtaaaaatcctatgggatcattaaataccgtaaatttaagtcattatatagtacatttacatctgtcatctttgatataaaacttatgcaataaatttttaagatttcttttaattttgtttcttaaaagaaaaataatatgttatctatctaacaagtttagaatatttatggtgatgaaaataatttatggtaacatttataattttatatacaagtctatttaatattaattaatcaacaccctaattttttgtttgtataaaagacaaagattggttgaagggtgaaaaactcaaaaccccaatatctatactacaagcctccgagtcgctttcttctttcacaagagaaacaatgtcttgatcttccaccggatttggtgggaaagacataactctctaggggtccccagccacat

SEQ ID NO: 66727 - DNA, 2053 bp, Arabidopsis thaliana landsberg
cagagctcttcaatccctgttcatctccatcttcttctactctttgaaattcatgtctccatgtctccatctgcaagaatttcacaattcaatgagttgataagtaataacggagacctagccagttgtgacattcattacctgatcatctgaaaacttgagctgttgtgcgataaagagaaccgtgtcatggtttactggtgaatgtaataccacacctaaacttgcagcaatctcttcatagctaactattttcacccgaaaaccattgctcatgaacagtttctccatccactttgacaaatccgactgcactcaacaccacatatagattacaatttacaaaccaaagatagatgcttttaaggtagaagtccaaagatcgtcaagagatcaaagtgacctgtagtgttatatttgtaggcaattctcctatgagatagcattcattcatggccaagctactaatggccgatagaatagcttcaaaacctgattgtgactccaaaggtaagccctgttatgaatagaaagaatcatgtcaacatcatgtaaattgcctggagaagagaggtttgatgaataactcatatacctgcattgcccatatactagggcgattcccactaaacccttttgagcgtaaacgttgctctatgttctcgaattccacgggaatgtgaaagaataagcaacttttagggatcctagctcccacacctggatcagttaaagaaacaatatctaacccttggaatgttttaacagtcccaaacaaaactagggagcattcaagtcccgggaaattaagtttgtaatcaaaatggacgcttcaacgcaaaggaaagcacaaaccttgaagcttttcagatgctatttcgaaaactttttccggtgatacatcaaagatcatagtggaagttggccaattaagcctataaggtcgagtatccatcccatctgtgaacaagacaacctgcaaagatatgatatcacttgcacataaacaatttaactttcactgtataattctcaaactctgacagtagaagtaactaaaagtaacctgctttagcccatcaatgcgtttagctatttctaacaacttatcatcgatgaactttgttgcaagacagtaatgttgttgttgttcatggatgtccaaatccttctttgtgtaaggaggtaagaaacaagcggcatatgggtcgatgaaaagaggctctgcgtgcagaaattagaaagcttttagtcaaatttcttcaagaaactatttgatcaagctatattggtatgtgtttgacgaaatgcctaagagaaagtcaagacacagtaatcaacggtttacaggagaatttgctgggatgatcttacagaaattgaaaaatgaactcttttgagtagaaaaagacagaaattgcttacctgttcgattggtttctcgcagacgaagggacgccgaatctaaagctgattgaatcgaaggctcattctcttctctacgctctgctcgtacggaacgaactgcggtcgtcagattacgacaacgacggagtgcggtggccggaaagtgtagaggaggaggagcacatagactctgcatccgtaatgatatcgctgactttttgaatgaagaagaagctaacacctctgacggaaccagaggtttcaagtagatcatatattttttttaattctcaaaccaactccggttcaagtagtcttcggttaactccagtaaccaccggttagccagatgattcatgttcacaaaccatcagatagtaatcaacagttttggtagtcatgttgtatttcttgggcaatttcacaatgtataatgtcaaagatctctagcttatttatattcatctagaggactcttaagctttgtgtttacaaaattatacttctataaccaagtcttatcaaccacctctactttgaaatacaacaatacaacattataaagtcgttaagcggtccataaagtttcaatgatatatatcaacatggtctctatcatgtgcaaaaacattctttctacatatgt

SEQ ID NO: 66728 - DNA, 511 bp, Arabidopsis thaliana landsberg
tgttttggagcttctaaggaaagcttctttctcatctatctcttctaggtctttctggcatattaattagaaaagaagaaaaaatacatgaggagaaggcgaaaacagtaacaataaagaaaaattccaacaaactaaccatgatttcaagttgaagctcattaacacttgaagaaggtaatgcttcgatctcagcagcgactgtattcttcaaatcgtgcatctcaagttcctttgtcgtcaaaaccttctctgcttgcctgcggtgcttctgcacaagccgaacaaagaaaaatatggaaacggttatggatactagcgaactaaagctttgtaaattcaagctaatcatttcagttaagatatataaagactgggaactctagtttctactggattaatcaatgagacaataccttcagttggcgcactttcaactcaagttcctcaagattcttctctgcctccctcttacgtctcatgcattgatttatctcgttttgtcttttga

SEQ ID NO: 66729 - DNA, 604 bp, Arabidopsis thaliana landsberg
  unsure (1)..(604): unsure at all n locations
gtgatgcattccattaaccacaatcagtttatatagtttactgttcactgaaaagtgaataaaattttaaaaaaaataaactgttagttgtgagtgataatgaaatgtaaattgtctgtctttctgagccccacaaaaatgagatgttaaattgtccaaattctccaatcttcactttacatgttgaagtgaccaatattctaacatgttaataataaagtaataaggcgagacatgtatcacacaatatacaactttacttgatattttggtagtctaccaaatgttaaactgaagacagactatcaaattaattaatgactgtcaaactaactaaccaggtgaaactattgatcttttttaagcgtctaggtgaaatattgatcatgtgcttaattaaacttggttttttcttctattaataacttgcttttgattaggttacctcgagattacaaaccataaagtcctttctaaaaagactaaaagagcacttgtgattttggatgtggacaacaatcgaagcttcttggcggggaatcgggttagatttacatgagactgattagagtttgcaaagnagaactcactaaagatcattgtt

SEQ ID NO: 66730 - DNA, 409 bp, Arabidopsis thaliana landsberg
tgttcgaattttggatctgcctacgcccttgtactatcgcatcgagtatctacgatctgatctgatgatgaaatttaatcttatcctccggcctcgcgcgatttctgctcggatctgcccggatcttttcttgcttaccaattgatcgattttttaggaagtgaaaggattagtttgcatcgcgaagcttgagagagaggtgttaactgacgcccattcgaatctattgtgagttattaaatccaattcattttttttgaaccacacttgctctaggagtaattcaccatgttggatacaaacgccataggacgtcagctagcttatgtacctgacatctgcttatttgcctctgtctccgaatcggccaaggcagctcgtgggtctctccatctttacataatcttta

SEQ ID NO: 66731 - DNA, 573 bp, Arabidopsis thaliana landsberg
  unsure (1)..(573): unsure at all n locations
ccccggcccctattgctagaggccggggaactgatttcacgttagggttttaacaaccttcagcgagccggacggcgtgggggtgttcgatctggcgcttgtcggcgcgagaccgagcctgcgaaccgttcgggtcgccgggcgtaacaacgatcgtcgagttgaccatcgccgcgaactggaaaaaggcatcgcgcacggtgtccgtctcggtgaaaagttcgtcgcgctcaccctccggatacatcttggcggccagaaccttgttcgcttcctccacgctctcggtctcgcgcgtgtagttcttcacnnnnnnnnnnnnnnnnnnnnnnnnnnnnnnnnngaggacctcggcgagtgaagacgtgtttgtacccattttgaccacttccctttccttctttgccggggcccttccccgacatgacctactatccaggatgaaggtgaacggctggcaaacataaggtgaacgagagatgaacagttcagcacgttttcaactactgttatgtcacgttggaatggggccctttactttgtttgtcaaccccgcgtctcacaatgtggaat

SEQ ID NO: 66732 - DNA, 581 bp, Arabidopsis thaliana landsberg
taagtagtttttttttttttttaagttacaagtcagagataatagtagagtttttttttttaatatgcatgattaatagctttcttttccctataaattatagccactataaaaattcaaaattaccatcatttatagttatttcaatgcttacctatgagtttactatgtgtaacatgaggataagggttatcggaattattctacgtacatgacaaagttttcggtctaccgggaaaataataatgccgataaaaaaaaattaaattgaatttgaaaggcgaataatatgtttcgtttttacggttttaatcaagctagagttaaattattcttctattaatgcgagccaaacaattttttttagatttaagcaaaatctaaccgggtaatgtaatatagattccatttacatcaattattttagaacatttgtttcccattaataattttgattgtttttgattaagtcattaacttagaaaatttaagaaaaaatatatgttgaccaacataaagaaaaaatattgtgataatcattataactttttactacaaaatttttcaaaaaaatatgatta

SEQ ID NO: 66733 - DNA, 435 bp, Arabidopsis thaliana landsberg
  unsure (1)..(435): unsure at all n locations
aaaggtaactcgaaatgtcattaccacccaagataggttgtatgcgttgagccaattgcggttaatagatattgtgtcttcctgcaataatatttgagatcgataaatataacattgttgttgtatatatagggagagggggctgtagncataanaaaaaaacggcgagagatccagttatatacttgtgatgccatcatggaacacaatattcccgatttgatgcactaaccgtggctaaacaaacctatacctataacactggggagaagatattacaatgatgacactactattacttttaacaggaatagttattactttaaaatgataccatattatgtcctgaaaaatataagttatgtactgacgatatgtgatcaaacaatcaaaaatgttcatgaccataggataagaatacttgactgtcataaa

SEQ ID NO: 66734 - DNA, 698 bp, Arabidopsis thaliana landsberg
ggtaccaacttggttactagtcgtcttggtggaacaaacgtgtatcgtctctcagcctatcttatatacacacatgacacgatcatatgtacatatcatcattaattatctagttatttattatttacatattagtgcaaaacatttactactcttttaccgaaaatgatttaatgataaattctccaaatggatttaatggtttagttgtcttgctgaatagtctatactaataaagagactcacaaaaaaataaaaagatgatcaatttttcaaaaaacagaacccaataaaacatcatcctttataaatattttgagatttttttgatatacccaatattttgagattttatcaatatgaaattactgtatgtggtttgttcatttcattaaatgtcgttttctcttcacacaagcacggcggcggcggtgaatacttttgagtttaactcaaatttaagatttctctcatgcgaaaaagatagtgtaagactgataaaaacttaaaacacacattttaaaaagagagagttaaaacacattaaaatctgttacaattgatgtcaatggttaatactacactagaaatactaaaaagaacatgttaagaaaatagtcgcgtgttgcacaaaaagaaaagaacatggttgatctaacacttgaataacttcttaaatttgacgaacactataaaat

SEQ ID NO: 66735 - DNA, 570 bp, Arabidopsis thaliana landsberg
aacaaagtttagtagtagaaagcttctaaatcattatactcattttcgattgattttttaaaaagaaatctataaatgtttttaatagacaacttttttttagaaaaattgatcctttcttttggtatattagataatacaatgatatttgccaaaaaaaaaagaacgatagataatgcagggatattgatatacgtaaacacacattattccttttaacacataaaagttgagagattttagaaaaacttgggacatgtcttttattgacagcttgcctactttgtcttaatttctggtgaaacggatccaagaactcaaaatttaacgctcgaaaaaattacaaaccaactgtatacggaatccgcattaaaacggattcaacggaaatagggggtgttacttttcacataaacagatggttgagtaacggattggcaaaaatcatatggatttcatcaaagttagatattcttacttttcacattaaatgatggctttgtaacagtttttctaaaatcctatggatttgaacaagttagctgttcttacttttcacaaaaaaacatg

SEQ ID NO: 66736 - DNA, 581 bp, Arabidopsis thaliana landsberg
  unsure (1)..(581): unsure at all n locations
gaccattatggttatcatccttattatactaattaagaccaagcagaagaattagattaaaaccataccaggcatcagaaaagaaaaaaaaaaatcaacaaaacatacttacattacagagatctccaacactcataagaaaaaacatcaattacaaaaaaaaaaaaaaaaaaaaaaaaaaaaaaaaaccccaaaacaatcagattgattaattagagaaaatcacatggtttggttctttttctgttaatttttttttttctaaatggaggtttttctaaatggacgtttttacatcctatataattaacactatctcattgttggtttttgtttacaaataactaaaaaaataaacttgttttctgaaaagatcggataggggagcttaaagttggtagacaaatctcattgtgataagagttttcattagcgagtctggaatgacaatgcaatactcttataatgaagattgatcgaagcataactaaagttaatttcagctcaaacggaaaaaatctagtgtttgagcttttcgatttatatttacagaaccaaaattngttttgaaactaaatgaa

SEQ ID NO: 66737 - DNA, 311 bp, Arabidopsis thaliana landsberg
cccgccaagaaaaaaagagcagcgccaaaaaatcccgagaaattacagttaatagccccaccaaggccaggagccgacagagaaccaacaccgataaggagaaaacccacacgagagacagaagaagaggccaaactccacgccaaaccacgctgaccgggagacggcgaagccgcacaaaaaacacggacagaaccgactaccaacaaccaaggagaaaacacagaacgagcgaggggaaacgacaccacagagagaccaaccaacccataggcccccatgaacaacgagaggccagcgagaagcaaaca

SEQ ID NO: 66738 - DNA, 839 bp, Arabidopsis thaliana landsberg
ctttaatggcagacttactcatctttcgggattaaattcacatagtagtatataataaggtaactaattaatgcaatgattattttaaaacataatagtatttgtgtttacaagaagagaaaaggtaaacacataattaaagcaaaagggtccgatcgatacaaaggattaatggaccatgggaaagagcatttggaattaaaatattgaacaaatgatttaaggttaactagtttttaaagaaaacttggaaaacacagcgcagagagggatgaaactaatgaattagccgatgtagatgtgaatcttgagtgcgagaaggaagacgcaaacaagggagaagtagagaagagaatggacgataacggagacagcgcttgtctgaaaattaccaaactcaacgtacttttgtcgtcccggcaactgaaacagaagccctggcgtaagcatcacgaagagtatcaccgtaactagcaccggtccccaatccgacattttctctctttcttgatgataaggatgatgatgatgcttacttaaacgagtgcgatgtatcgtggagaatgagagagtgtgttttatagtgtcatattatatagagagagagagagagagagagagagagattggacgggaacgtgacaaaagtgggtcgaagagttgattcatgaagtcactgctgattcgcttttattgttaacttgtaaaccagagattgattgtcttatggaattgtaatgttctttctccaaactaagcacctatcgtgaaaagttaactagaactgatgtaacaaacctcatttgatacgtctcagatcgctacaaatttttattaat

SEQ ID NO: 66739 - DNA, 540 bp, Arabidopsis thaliana landsberg
tagacctgaccacatttggcatcttcttatggattaccctactattaatcattcataacctttaagataatcatttatgcaacacatgtgcatcagaaatccattaaaatgatgttttgttttcgtcaaaatttatttgcataatttcgttttcaaaatttattaacatatcaatctatattgatgcttttggctttatcttcttaaaaagaatcttagtttttctaattaaacactagtatagaaatataaaaaaattttgggtattacaaaattgttgtatcttgtcatgatatgttttgggcttttggctacaaatattaactatacttgctttaatttgtcttaatatatatacacattcaatttttaattcttatttagaaaaaaactactaaaagtattttcgatgtggaccgtatgcaaacgactatcccactttatacaagagcctataagtctttggtcaatcaatgcttatatcgtattaattaatactctgtatattttccgaatcttataacaatcaacaaacacatg

SEQ ID NO: 66740 - DNA, 357 bp, Arabidopsis thaliana landsberg
taggagtggggattagcatagaggtacataacatggataaacatagtgcagtgaaagagatacataaagatacataaaaatttaactattaagagaagtaacatacataacaatataaaaatataataaataaaataaactatgggaagagagaaaaaatattaatgaatacacggtattactataaccgaatatcctattaatcatgaagcaattttatagttgggcaagatgaattgtatattgaacacaagaagttgaatcaggggtacagtaaaagatgaaaacgaatcacacacaaatcgcaatgtaaacgactatagtcatataacacataaaataaggggatgaatattt

SEQ ID NO: 66741 - DNA, 468 bp, Arabidopsis thaliana landsberg
acgtaatgaaggcgactcgcatatggatagaggtaggaatgataatcctattgaaactgtcttggcctcacagtcagctactgaagtccccgtccatgacttccttggacgtaatgaatgtgactcgcaaaaggatgataatcctgttgaaaatttattggcctcacagtcagctactgaagtccacgtccgtgacttctttggacgtaatgaagatgactcggaaaagaataaaggaaacaataatgatcctgctgaaaatttcttggccttagagtatgcttctgaagtccccttccatgacttccttggacgtgatgaacgataaacactcaactggagttggaaacacttacgaacagaacaaggcctcttcaaggatgcttctacaatagaaggtgagggtgttctctagctgttgtgtcattttggtggagtaaagtgtcttcttaatcattttgactgtac

SEQ ID NO: 66742 - DNA, 379 bp, Arabidopsis thaliana landsberg
gtatatcctatattacgcctccagttgtagttgtgtcctgagtagccaggtgaagccccatccatgtacaccataacctagccttcatccggccttttccaaccgatcaacctctcaacccgacatcccctgtttgtgcagcttcttgtaacatcaaaggcttttttgacctccgctgctatatctttgacgaaccgaattcgggggcgggatttccccattttcccaaaaacgttactatatctccatttttaacccccacttagttgtcatacttagtagtggtggccaactttccctttccgaatcttgggtattcccaaatggactttggaaaaaaaagggggggtttatatactaataaaagactctaaaattt

SEQ ID NO: 66743 - DNA, 509 bp, Arabidopsis thaliana landsberg
aggactgaacggcgcatattgacttcagtttccaggcgaatgtcaaacataaaatattacaccactcaccacaggagccagggataagcggcagcgaatcagcgtcggcgaggctccagttcgttttcacctcccttggccgctggctggggcaggcggccgatcctcgtttggccggcgagtttgcgagagactttatctgcattagtctgcgacgataggtcttagtcgacgcatctgctccgtaatcaataatgataattctgacagtcaagataggtacaagcatgaaatgtagggcggatgcggtcggcgaatatgaatgcgcgtgtacaatggctggtacctgccgacttatcgattatggatacacgcatcccccaatgaaggcatactagtactaatctgcaatgtttgccccgcttagagcactgcgtggagaagaagtcgctctgaacagcctgtatgcgcaaatgcatgcaacagacacccttcttgagcacaccagc

SEQ ID NO: 66744 - DNA, 644 bp, Arabidopsis thaliana landsberg
gggctaacgtcgatctgaaaatctttgccactgaactgattaccagagaccaatctggattgattagattttcctcttgtttcgtgcataataactctgtatataaaccaaacgatatctcttgtatcatgtatacaagtaatgagctcaacacattccttgtgcagagagttctgtttttgccattccgtcaagccttgtaaaataacactcgattcttggtcaaagataaaatggtatctagaagaagctaccattcaaaaatcatataacacgtcctagaagctatttttgcccttaattcaatatgctttttctctataatgtttttattgggaaaggaaatttggctcggcaaaaacagatattgagaggtatcaatgatttgtcaccggctttgatgactcaaagaagcaatgggcaacgaaacaacaggtgtacaaggctgcaacatagtttgagccattgggattggtgaataatccatgtcttgttttttgctactgttgttgttgagccaagtctctgacttgcttcttgagtcattaaaatctcaagagctctgtttcttctattaataacaaaaacttttattagttttgatccctcactttctcaatcaaaatcttcccctcattaaaaaa

SEQ ID NO: 66745 - DNA, 207 bp, Arabidopsis thaliana landsberg
agctcttttttataggtgatctctggaatgccaacttctctgaaaggaagagactcttctagagcagcttctcctgatccacttggcgttatcatcaagctccggtactgccaggctagataaaacggatagtttcagggcactttgattttagtttttctccacttgtcagggatccatctgagatatgcttgtggatcacacgag

SEQ ID NO: 66746 - DNA, 631 bp, Arabidopsis thaliana landsberg
aacccgaaaacgaaaaaacaataggttaagtgaaatattatctatgatcatgtaatctgatattagattaacagggtaggatatatttctataccttttagaaatataattctgctaggtttataaatccaaactacatttacaaaattaattctcaaaacaaaatcctaactgaatctatcataacaacaacaataaattaattcttaaattttgaaggcaatccaaatttccatctaattttcatatatcttcatcaactcttttacaaaaacgtatatgtgtttggtattaaagctagaaaataaacttttgtctttaattatcttacggatataacaaatttcgattcaaaaaatcgttgattggaatatctgtgttttgtcatggttcacaatacactaactgaattttggatttcccgataattatacaatcaccttagctaattaagactatcagtctataatgcatttatctaattgcaattcaaaataccatggtggtttaagcaccatttggttttaatgttcacacatatgcacatctggatgtctttatcaaccaaacatcggggcggttttttttaaaaaaggacccgttaaataacgcgcttctaaaccaaatgaca

SEQ ID NO: 66747 - DNA, 206 bp, Arabidopsis thaliana landsberg
tcgtagctgtatcgaatcactgcaggcgggggcgtctagtctgcctcggaaaagtgttgctgactcataccagcctgatcgccatcatcaccgatgtgggcaccacggttgatgagagctagcgtagtcaccagttgtgattcgaacttttgcttgccacgacggctgcctgacaaatacccatgtctgctgcttattagtataat

SEQ ID NO: 66748 - DNA, 344 bp, Arabidopsis thaliana landsberg
ctctttgttcagcgccgtgattgtttcctgaacgaaagcctgacatagtctcagcatttcctttttctgcatgaatttgagacctctcagaatgctcaccagtcagcaaatccatcatacttggttgctgctggccaggttgagaaacaacgccagaggaaccagatttagcaggggagataaagtctcctaacaagtcataactatcttgaggagcatgagaaacactagcagattttatcgctttatcctccatttgcgatccaactaataaatcaacatccatgtagttttcaggtttaattgcagaagctgagcctttcatctccatctgagggtgtcca

SEQ ID NO: 66749 - DNA, 1074 bp, Arabidopsis thaliana landsberg
ctctgtgaaagcaattgatacaaacgaacctccccctcagtttcataccttttaaacgtctcaaactgtaggagtctgatagtcatggatgaactcgggagggctacttcttcctcagacgggttagcaatggcatggagctgctgcgagtatctcttatcactcaaagcgtaagcatttcacactgagttttccccactgttgaaaggtactttataagtaactgcatatgtactttttgtggctttcaactttcaggtacacagtatttgcaacccatatggacagtctcgcagagttagcaaccatctacccaaatgtcaaggttcttcatttttatgtagacatcagagataaccgcttagacttcaaggttctgtctgtcttcctttcgtatgagttcgagactttagctactgctgctgaatgttacattgttctgatcagtttcaactgcgagatggaaccctacatgttccacattatggccttctattagctgaagtggcgggtctgcctagtacagtgatcgatacagctaggatcataaccaaaaggatcacagacaaagtattacccaaaacttaataaatatgctagcatattaagctctattgttctcatttcatgatgttgaacaggaaaataaaagaatagagctaaattgtgggaagcaccacgaaatacatcggatctaccgagttgctcaaaggttgatatgcttgaaatactctagacagacagaagactcaattcgtcaagcactccaaaatctgaaggaaagcttcactgaagaaagactctaaatagtttataacagaggacactaggatacattcacgttttaattgcaatgtctataagggttcaacattactagtcccaagtgagctttcgatttgttggctttcagaggctaaaggtaggagcaaatctacactcttgatattaagtagggaaaaattaatcatcaaaaataagtaataactaagaaacattgctttatggtcagaatcaaagaactcaaaacttgaaacaaactcttgaatgtgaaagtcttccatcccaatgtaa

SEQ ID NO: 66750 - DNA, 567 bp, Arabidopsis thaliana landsberg
caaatcagcattcaatcatggaattattgtccctacggaaagcaccctattcaatatttaattaagtatttcacataatactgtagatagaacaaattacagagacaccttctttgatcgatatcttgagatacattcactgtaccagaatgttgatttgttttttctttttgttataaattattcatgaaggaaatatgataaattatatagaaagcccacgtcccagaaaatgacagaggcatgcaaaatcgtgaaatccagcaaggtatgtgagacttataatcttattgctatgttcttttgtcccctatttgtgtgaaatagtactgtcgtttgatttttcttgttctccattatagattctcaaaatctttaagattttatttttttgtaaggaggtatatatagaaatgggtgatgcacacgagggtacaattaaccctaacatagagacatagttggctccacaaccatctcctttagtctgattttcacgtgcattttcatccccacggttccctcttcttattggttaaatgtaaatgttatgactattttacatgc

SEQ ID NO: 66751 - DNA, 568 bp, Arabidopsis thaliana landsberg
  unsure (1)..(568): unsure at all n locations
ataccaacctgagtgtgacatcattacgactatgagcaaagaagaagaattgttggaggtatatcacctgntcggaatacaaatacggctttgtgactgatattgaagcagatgaagctcctgcgggcttgaatgacgacattatcaggtttatctcggctaaaaagaacgaacccgaatggatgttgcaatggcgcctgaaagcgtaccatttgtggctaaccatggaggaacccaaatggccgaacgtgcattatccgcccatcgaattccaggctatcaaatattactcggcgcctaagaaaaagaaggctgtcgagagcatcgacgacatcgatcccgagttgcgcaatactttcgaaaggctgggtatctccttaaatgagcaaaaaagaatttccggcatcgcggtggacgcggtaatggactcggagtcggttttcacgactttcaaggaaacgctcaaagaaaaaggcatcattttctgctcgatcagcgaggcgatccgtgagcatccggagcttgtgaaaaaatacctgggcttcgtggtaccgcctaaggataacta

SEQ ID NO: 66752 - DNA, 538 bp, Arabidopsis thaliana landsberg
gtgaagtcctctgcgttttcgtttgaaaatggactttatacgactgtccgcccatctaatgagcagaatctggataaaacggggtccagggtcagtcttaacatttgcgttttctggttccgtcttttcatcggactctggattttgaattgcgataggatttggtgaatatatctcacgttgtttagctacgtcagtcgacagaagttctaacaacgccgatctttcaatattgggatctacctcgctatgatcaatttcaatagcatgaactttctgttcccgaatataagtcactttatttgcttcctcggcaagtttgcgagtaacgaaaatctcaattagaaagcggctaccatctgcctttatgcccgcgatatccgccccgtagcgagagtcatttatcggccatttattcaccggttgaatatacaacatctcccttccttgtagtaacggaatgatttcctgtcaataattcctgagccagtctatgcaagggcgtcatcgtgccacctttgcaatgcgtggtagatct

SEQ ID NO: 66753 - DNA, 1112 bp, Arabidopsis thaliana landsberg
agacgtttctgatcgtctagtgcagttctacagttgtttattttgtcatcttagtatcctacattatattacttagtagcatttttataacaattaagtagatatttcacaatcatacgtcatatactaatattaaaatgtcgaaacatataaagattgattacaacaaatagagagacaggcaaagtcctacaagcctagctgtatattgttgaagattccacgcttagagaatcttgaaagagaattcgaatctcgaaagtagaatctaatcggacggccaagattcaccgtatatcaagctttcgtcattaatatatgtggagaatatgtaaggtttgaggaagtgggtcattcgtgacatcattagaacaatataatatactttagacatggatattaacgtgcaataatggttttcaggccaagcaaatgatacaaaagtgggtcctatgcatctcttgtcgatctcctaaaactaaaataagattaaggaaatgattgtttatttcttagtgttctcgttctgagggctttatacaatcggttttactttggagtttggatggatagtttctacgttaacatcgatgtgagtatgtgagtagcaattgatgactgtattattggtttttctgacaaaagaaattagtttaaggtctgcaacaaatattcattctaaaatgataaaatctagatagctaattctttttcgagaacatatattcgaactaatatcttaatgttttacttatactatttgtattttggataagttttaatcatgcatacaaaataatagtatttgtattatttatatagttttatacgtatcttattgccactcgaagacaattaagcttcatgtcttgccatgcttttagtttgtggatatttgatttgatgcgtttgtcataaatattttgtttgatggttatagaataagatgtgtgagtagaatccaaagcaagttggatccaagctcttaatagcttaattaataagatagaaatataaaatggaaaacaaaatagctcattataactttatttacatacaaaaaagcaaaataattattgttatttcggtttctatatatgattctctttatt

SEQ ID NO: 66754 - DNA, 578 bp, Arabidopsis thaliana landsberg
cctcgctacatacttttctttctgaccatccactgagaaaacaaagtgaggcgtcttgatgtctttcatagtgaattgaagtgttccttgagaaactgacgaagatggagaccacgaggaagaagattgctcaaaagaagaagaactcaatgaatttgtgcttgataaagaaactgcctttcagggcatgtttccagaatgataactcagaaactgtgaatccggggtgttccttttcctctatcttcctcacaacatcatatgaaaccaactcgctttcaccattatggcctcgccttgtcccgatattattaccatcaccatctaatgcttcgagactgtgtaacgtaggcttatcaagcatatatgtaaccctcttgcaacctatcattgcacggctaatcactgcactgcctgaatcatctaccaacggaagatcaaacacaaggcgagcaacattttctttggggataacaggtaaatccaaccgacgtgaagacaaaccaatctttgatcctacacgattcaaagaaaggctgcacctggctgacttaaacgcacttgatattaatcacgtc

SEQ ID NO: 66755 - DNA, 937 bp, Arabidopsis thaliana landsberg
acgtttgttacagcatataggcacatatgtgggagtatgcacttttttatgtttatttcactgcactttttcatgtttatttgactgtttggaaacaatcaatacaattatatcaagaaatgcctttgacgaatgatttagctgtgcagcaatatatagtactttgaactgctctaatgggagtggattgtggattttcctttcttctgtttcttaatcttgacattagatttccactccaccccatcttcggctagtaccttataagtcgctccaccaatgtagaaggtgactttcttctcttcaaggtaccttacaaaacgtttagcaaactcaatgggtgttgaatggcttttgtactttgataaaagactcacagcaatctcctaattaggcttgaaaatcaaagtcttgacaactcgttatgcctcatcaatcacttttcctctagccaagccgtctaaatatgtccccattatttcaatagttggttctatccatagagtcttgactatccttgcaagaagataatgcccatactcagtttgtcgagcatgtgtacaagttaccatcacgttccaaaatgttgagtgagttttgatcaaggtggaaggaatgttctcaaagacttggattgctttgaagcattcactatttgtgcctaaggttgatataaatgcattccacatacctatacatgtagctccagatttaccgcattcatgaaagagtttttctgttaagaagagtttcaaactccaactcttaagattggagagatatattagtcacatggtaactttgttaaggaaaaaaaaaactcaaatatttttaaaatttgttaatcatataattttaaaaatgatttcttgtataaaagtattgttttcttgggtattttaaattatatttttattttaataagttattatgaatc

SEQ ID NO: 66756 - DNA, 176 bp, Arabidopsis thaliana landsberg
caataccacccttcaccacctccatcagaacatatcctaaaccttataaatcactctttttcctcaacactccccctattgcatacataaattccacaaccaaataacttcaacaatctactaaccccaatcgaaaaaaattcaatacatacaccaattaataatgtatgaaaata

SEQ ID NO: 66757 - DNA, 366 bp, Arabidopsis thaliana landsberg
caatgcgaatgagtttgcagctatattattttattttaaagcatacttgaactcttttctgatgcagatattgtaagagaacagaaacaatctcccctttatatcacttgcatctgtattatcctacatcattaaaatggatgaatgaaaataattaagattgatctgttactaccagatgaaagattatgacaaataaacactaatctgacagtgcttgcacaatatgctccaagaaatggccatgagatgcatagggatagacattatattagaacactaaccagaaatactcacataacttgataaaacatatttagagagaggccaggaatatacctttggagccaaacacacataaatcat

SEQ ID NO: 66758 - DNA, 620 bp, Arabidopsis thaliana landsberg
agagaaacatgaattagatgttttcatccttacccacaaacgattcatagtcacgtcaggctcattatccacagaataatcacaccaatgtcatcactatctaaattagaaaatgtaatatcaaacataattggggaatcgaaattgggtaaattaacagaatttgcactggtctgattatttatactctgattattaatataacacagaaaagcattactctttttcttacacgcgtttatgttttcaaaaagaaatatttatccgattacaacaattatatggagtcataacactgttaacaatttgcacaccacatttttagaaaataaaaatttaacttgattacaacgaggaaaagtcaacactttccgagctttccttttataaaaggaggacggaagactcgccgtctcaaatgcttccacctaacataacactacatacaagacatccgagcaaacaaacaatcaaacattgagtgaaaatgaataatgagaggtgaaaactcgtgcaacatggcagaaccaactcatccgcttatgaccggttacaactcgtcatcaccgagatctgtcgacgacacagtcgagagttacattggaagctttgggtgggct

SEQ ID NO: 66759 - DNA, 114 bp, Arabidopsis thaliana landsberg
atccaagaaatttagccaagaaactaatttaatattaactattcaaaattaatacttaaaattcagtgtatggtgtaagttagctaataaactatagtagtggtttgaatttga

SEQ ID NO: 66760 - DNA, 173 bp, Arabidopsis thaliana landsberg
aagaaaggaagaacaagtatagcttatcattttgccaattatccaaaaacaaaagtatagcttattcgattatattactatgagtctattgtaggattctctctaaaatttagaattagttgctaaaagctttcaccttctttcaacattgattagaacaagaaaaatgaatt

SEQ ID NO: 66761 - DNA, 596 bp, Arabidopsis thaliana landsberg
aaatacggtttgcctgaataaactttctttgtccatttgtcatgaagaactacttccaataatagttttttttgaccttcacttaattatttttgttttctgttaggttgccaaaacatttgatgttagcttgatgggagcttcatcgaggtcgtgtaaatatgttttgaacacacttatgcaggtaacttcgtgtgaattagtgatgctgctcttcttcattagctggctagcccacttagatttgtttgtgaagttcactactcataagtatgtatttttgcagacattccaaaataaaaagcttgcccatgcagtcaaagaagggactcttgaaagccttataacagagctcttgctttggcttctggatgaaagagttccacgcatggaagatgggagtcaacttcttaaagctctgaatgttttgatgcttaagatcctggtcagatattcgttccatgctaaaggttttcatcatatgtggctatgaagttctctgacttcattatttttatttcttggtctatttaattcaggataatgcagatcggacatcttcgtttgtggtgcttattagcttgctacgtcctcta

SEQ ID NO: 66762 - DNA, 407 bp, Arabidopsis thaliana landsberg
  unsure (1)..(407): unsure at all n locations
gctctcgaggatccatggggtcattggtttacgagatcccaagccttgttggcgctaacaagaacggcatgttggcctgtgcacaggcattttttttcacgtaaccacggatagtgttagtgttcatgttaactcccgaatatgaatgtttggggtagcctggaaatagttgatgttacctgtgtgacaacagaaacgatcgaatgtgagtttgacaccagacgtcgtgaacaacaaaagggccttgttattgagcttctctataggcttttgacgagcgacccgnnnnnnnnnnnnnnnnnnngtcgttatgctgatgataatagtttaggagtttcacctagtctgtactattccaactgactactgaaaatcgctatattgaattgcatcgctagatatgctaa

SEQ ID NO: 66763 - DNA, 587 bp, Arabidopsis thaliana landsberg
agaacgttcaatggtgtctcatctaatcggtgaatttgattgcaagctcgacgcgaaaggccgcttaatggtttcttccggtttaaagaagcaattgcctttagcggagaccgacggcttggtgattcatcggggtttcgagaaacatttaactatttataccaaagccgagtgggacaagattaccgctcagttggccgctttaaactccttcgaaaagaaaaccagagaatttatcaggtattttaccagaggcgcaaccgttttaacattggatgcctcgggaagggttctgttgccaaaagccttgcttgaatatgccggcattaacaccgaagtggtactttcatgccagtttgataaaattgaggtttgggcaaaagaaacttacgatgcccaaatggatgacgaaccggaaaactttgccaatttggccgaggaagtgatgggcaacaaaggaaggagtgcaaatggagaataattaccacgttcctgtgatgttgaaagagtgcattgaagctttggctatccggccagagggaatttatgttgatgttactttcggcggtggcgggcattcaaaagaa

SEQ ID NO: 66764 - DNA, 2457 bp, Arabidopsis thaliana landsberg
tgaacatcgccattgccagaaaagctcccaagggttttaatatgatgatcaataaatttaactcaacagcaagaaaaagcaaacccactggtaagaagttgctagcccagcagtaactgaggttactaggaaacaaaacttgggggataatagagatttggtccaaatatgatcaatcaatatgaagttttgtaaacactgaaatgcctctttaaggaatatcatcgacattcaatacaaatttccaaaagataacatgtcactagagtcgcaagcttgtaccaagtgaaattgaaatgcaaataggcaagagaaactaagaaatgtttatagacactaagaataagcaccaaaccagaccattactggatttactctctcactgctatagaggtcattgggctgaatcacagaggaagaaggtgaaattcatgggacatgaagtcttcactgggtctgtaatacttgtctggtgagtacaagcgtaggtttgagacttggcttgtgtacaggcatgcgaatctttccacctgatgattcgaagataatgcagtttggaaaaagttattccccacaatcgcaaaacaccacataagaaagcaaaatataaaccgtatttacctgatgagcaaatcgagaactctggtagccagttttcatcagttgcccccagaccttgtgaaactgcagtttccaaggcccacataacatgagaagtcgtaacagattgaaactgaaactagctgttacaccaatacacactcagattaacgaggctagatttaccttttggtgacattctctttgagcttgttgatgactctgtcgtactttatctcttttagactgttgaatttcacaaaaacttgacttagaatcactcatccaactgttgaagatctaggaattatacttgttctatcttacctctaagtccttgagcgctgataacatttcgtgcttattattctcgttgatatcctcaaacctgattgatagaattggttacgatataaacaagttgtgtgtaaaatggctttaacaattaagaattctactctatgcaacacagcttcttcggccaggacctaatttaaagaacactcactttagagaccaattcaagtgatgaattttgtcttcaactgaatcacgctcatttctcatcaaaataagatcctgcagaccaaagaaaatactgaattgaaaaggaagaataatgtatacaattataaattatgatcataagcagttttagatccaatttcgtcaaggacaattcgaagacttgccgcacaaatgcatgaaggcctttcacaaaggaattgattatttagtttaataaaagatacttcaacaaacttgatttttttcaacttaatagatctctgagaataataacagttatatagagaggatccattcaccttacgcatattcctcagttcccataaaagttcaacctctttttctaattctggaactacaagcatagttctccagcctgaagaaagaagaagatcaagatccaaagtaactggcgcaaacacaggacactttgaacagtttcttcatcaacatgcaagtgctactagcctacttacatactaagctccccattcacaagtaattagggatataatataccatatatttcttctcagaatccatacatagttcagttaaacccatgaagatttgtttaagttacttcacacaacaaaacataaaaaaagagtctataactggaaatgaaaaccttaccaagtatttttttgctgcgcaagatatcaccgtatatatgatccccaacataaagtacctaacaaatacaatagctgaataagtgacgaatgatgcatagtaaatctgcagtcagtcactatagagttctgaggaatatctgtcatttcaaactaatctgatatatgtaatagagcaagcaaaattttctttgtaaaatagctagtgctctctacctgtgaacttgactcaattgagagcaaactgtgaagatgcccaacatttccaccttgaaaaactcgacaacctttatctttactcttcagtaagatttttggtgaaggatctcccaccttgaacggatacacaaggatcatttaaataagaaatagcaatatagcttgttgaagacagtgaatggatgtcacaattcattaaaccaaacctgagccataggtgttccattgtcagtattaataagcattccagactgaggttccacctcaaaaaggttagcacggctatcttcatggaagaacccaggttttgcacttaatgaaaaaatatccaattcagaattcagataacaaaaaaaaatcaaacgagataggaatactttatacttccaacaaaattcataaccaataataaataaatgattgtctaatcatttgatcacaacgattttgtttagagagattaaagagacttagt

SEQ ID NO: 66765 - DNA, 702 bp, Arabidopsis thaliana landsberg
gatgatgagaatgcagaacctttagctaacgactttctcgatggtagcgataatgaggaggtaaccatgggttctgatttggattctgactctggtggatccaaactcgagaggaaatctagagctattgatagaaaacgtaaaaaggaggtacaagatgcagacgatgaattcaagatgaacattaaggagaaacctgatgagtttcagctaccaacccaaaaggttacattttcctttacttaattgtggatttgttcatattctggatctctggagctatttgttagctaatcttttctattactctacattgtttaggaacttgaagaagaggcacgtcggccgccagatcttcctagcttgcaaatgatgtataagagagagtgagtaacattttcaaattttattcctttttaagaattctggtgtaatgttattattatgattgttttaaatctcctaaggaatcatcctctcggttcttagtttaatggtactaatttgcgtttcagttgatagaatcctgtcgacttttaaggacttgccaccacaaggaggacaagcacgagaggaatgattatgttggacagcttaaacctgaccttaaattctactaccagtatgatgaatcccttattggaactttaattgaggctattccctatactctgactctactctgtatgctcgctgtgatct

SEQ ID NO: 66766 - DNA, 375 bp, Arabidopsis thaliana landsberg
aacgcagatacaaacataccgttattttataaaaaactgccttctctccccaccatagtaagcttacccatatcatttactcccctcttccaatccatcccacaatcattgtgccatcaccgtccatctctttttatctttcccataactttcaacataccatcctactacatcatgcaaaccacaactaagctcaaacaaccaaaaccctcttttaaatccatgcaataatcccttcataccactcaaccaacaaagattaaatctactttatacatcaatattataagtccaacattccaacaaacatcacctacttacttcatcatttcaacaaaataaattacacaattcttccaccccatatcaatttat

SEQ ID NO: 66767 - DNA, 121 bp, Arabidopsis thaliana landsberg
caaggctgtaacaacatatgtgaagaaaagctcatttagtctttggctccaatctaaagacagccaaggaggtactaaagcagatgcacaggatgaagacaaacctgacgtggacttgcct

SEQ ID NO: 66768 - DNA, 552 bp, Arabidopsis thaliana landsberg
agactccgtaaactggaaacactggccgttcataccgctggccatcagcgcgagcaggatggagtttttgccttccagcggtgttaccacgatatggtgcttctgcgcagcttccaccagcaactgcccagggtctgcgatgccggggcagcctgcctcgctgatgatgccgatattcctgccttctttaagcagcttcaggaaagactgttttacttcttcttcggccttgtgtatcgtgaaccactggtatgcatctatcaccatttccctccatatagatttcaggaaacgccgggccgttctttcattttctgtaaaaaatacctggcaatccttcacggcatccaatacatatgcgggaatggtctgcagcgcatcatcatacagaacagtgggcagcaggtaaacttttccggtctgcatgcattcagggtttatttgccggcggctttgagcgggtatatgctgagtgtggcggcgatcacggaataggccggtgccagcacccagcctacaaacggcaggccatgcattaggtaaaagatcatg

SEQ ID NO: 66769 - DNA, 207 bp, Arabidopsis thaliana landsberg
aaaacgaattatgatagctttaaccgatagactacatttacaaacttagaaaattcggggcgatatttcaacgatactccgtgaacacacaagagtgcaaaaaaattatcagaaaaataattaattttccaggatggcgagttagttggatcgtttttgtttgtctatgtcatgtgcatatatagatcattgttaaaatggtggaga

SEQ ID NO: 66770 - DNA, 2699 bp, Arabidopsis thaliana landsberg
atagagatgggtttcgaggagctgacatgttcgacatgtgcctcttactgtcatttacttcatcaatctcagacttcttcttgccctctttctcttttatattactattttttttttataaaaatgctattgtctagattctttgaattaatgatgtttaaactgttttcagtcaaactaattggggattaaaagaaaaaataacgtttaagcaacatatgagttttggatacaagcagaaaacgaggaaaaaaatgtagagacttgtggacttgtgtcacttgtctattaagcagaaataaataaataaagccttagaaatttgaaaatttcgtatgtctatagtcatactcatatacattctcgaagatattttatttttgttattttgtggatatgataaagagttgtagctagtggtcattgctgaagagtatgcgcaccaaagaagcataagtgtgtgagagacacatattatatgcgatggtgtttatgtagttaattagaatatctatctttatgtggattgtagtttgtgtttgttgaaattgtaattaagtgttagacggtgatacgttagctttgccggttatgcataattgaagtctagattcggtggagagttcagctcaacactggtcggttatgaaaaactgaatgtaattaaataaaacggtaaattaagaggatcgtgctagcatttatacgtgttaaatggaatatttccttctctctttttgagaagatttgttgttggaaatggtctcaaaattgtggtttagaagaaccaaagtttgttaacaaatttcgtatgtattttattttagttctctttcactatttcatatctttttgtaataaaaaaaaaactatttggtcttaaaatcgttaaaactagtagttattgtcgatcatatagcggttaaaaagaaaaatatacatcttataaaatcaattttgagtttgacaaataggatgataaacacaagattactatcactacataaattttattgtgtctgcgaaattgtcaattatcttttaattcttccctttatctatacacccttcttttcatgattctctctatcaatgcattttatgcaaaaatgtaaaatgttaattctctctttctttcgttttccttgagagagtttgattgcatccatcatcttgaaaatttagaatattaggacacctgattatgagaattaattagtgacttcttacggacctttcttgaaccacttaggagtgttcttttttctttttggtatcaagacgaacaaagctcatagctaaagtttatcagtacaagttttcttattcatcttctctatctgccgggctatttgtttttggctaaagtaggttgtttatatataactcattacagctccaaaattcttaataaatcaagaacttggcatttatatatgtagtaagcatccttgattttttttttcaaaataaatgaacaaggtcaaagttctggttaaactaatcttttgtcatgttctacttttgatatttaataacatagatataattgaaaatattttgttattatcgaaaacctaaaatcataacaacactaaacgctgagacatgttatcatcatattaagacctcagtctactaaacaagtatatatatcactagagtctaaactaacataaactcaaatcaaatctaagtttgtgtacccgcctaatcctttattttatttttcatagtcgtatacatccaattatcatatgatttatttataaaaccatcaaattcacagatcaaatacattgataaattattgatcagttttgtataaattaaaactagtggcacgttggagagataatgttgtcttttgccaactttttacaactcttttggcatttttgtctttccactttgtaatttcctaggttggcagcaaactcaaaagcatctaatacactctttatatacaaaatccaaattactttttcatctatcatctatggttcatatattccttaaaccaaaccaagaaacaatttcccaatagacaaaaatggataagtatcaacaaaaccaattatcttaataacttcaactccaaaaaaagtggaaagaagtttattgaagattccacatcaacaacaatattaaagagtgatcgttttcaaacaagtggatctcagtttccaactaccaaaaggagcaaactttataacaagcttgatacaaccaaatacagaaaagaaagatcacaactttctaatctctaggcttggaaccataatgcaattacaaagactttaattttttttatttttatgtaatgataatgtatggtctttgaattggattaatcttttggaaaacaatcacttccatttcttgaagaatttccctttatgcttcccaaacatgccgtgtttaccgaattttccgtgcttgaacttaccgtgtttgaacttcccgtgaccgtgatacccgtagccatagccatgaccatggtggtgaccatagtgtccatggtggtgagacatatggtgagcaccagctgctgcagccactccacccgctataatcgctcctatgcctccatggtgatgtcctgtcacattaatttggtttcaacatcaacattaagtctaaaggtctctattgtctattgttacaaaagccatttacgaataattttgtttaagatg

SEQ ID NO: 66771 - DNA, 632 bp, Arabidopsis thaliana landsberg
aactgaaacaccttacatagacatggatgtcccatttttttcatttgtttgcaatttaagttaaaattggtatatatgaagaactatagatgcaaactttggatcaaaatgatatcgaaatgattggacatgaacaatcagatcaaaaggattgatttgatctttgtgattacagattaagtaaagcaatgggaggagcagagaaagtggagatagagcatgggaatcattctctctccaatagagttcatgaagctgttcaagccatcattggttttgtcaaaagagaaggacccagtggttgggatgatccttggagctaaatctgctttttccatttatgtggatgaaaaacttatccaaatctgaatctcatgaattaattcacttcttggctgattcgtaaccatttatccttaaaaagtaaaaaagtaaattgttgtccttttgttctgatatatacttggatcattaagaaaagtgtcttccttattatatccttcttttgatgcttggttttgtcttgctgagtccataagttaagcttgaacagagatgctttgggaaactatgaaaaaaactaaatcagtaagcaatcaaaggtaaacggtaaagatgatataacagagtgt

SEQ ID NO: 66772 - DNA, 2201 bp, Arabidopsis thaliana landsberg
acatccatgtctatgtaaggtgtcttcagtacagatttcttataattactttagtttaactgccctcacctattgaccaatgctttttgtcgacataatctggtacatactcatcacccatgagaaaatcacctgttagaaccaagacatagatgatataagaagctaatcaatgcccaattggccacaactagaaaaatttatgttcagcgggactggaaatgcttttgattagtttttttttatacctgacaaggtgtgttagccatatggccaagtctagttttcaactgatcatcactaaggtcagaactaaacatatcgtcatctcccatgtaagcgcagagggagtgatatctgcaggaagcaagcaaaagattgatttttgtatttagacatgttcgaatcacaatttttccattttcaaagctacgaatatggtagaaggaaatagatattgacctataagcagagattggagcacaaggatcagcttctctaggcattagctcctctcctcgaccttcttttatcatgtttgcagccaagtctatcatagcaggtgtttcaggaagcgttgctttgtactctctatcgctgactggtgcctaagtaaacattgcaataggcaatatgatcaaagctacactacagtcagaacatatgatacgaggcctttcacataataaaaagtgtagcttcaagagagaacgcagaacagaagtcaaagaatctaggactcgcacctgtaaaattgcagcccggacagctcgggagcatgcagcatttgttcccatataatacacaatgtcctgtttcaaaatgcgagaagacacaagtttctgtcataacttttctttcagaaccatgatcaaaaagtgtttgagggcttaaccaatcacctgacagccagtgctatgaccaagcagaacaacaccttcagaattctctttgttgatgaggtggtttattagctggtcgatttcttgtgcatccttcatcagaagaaacaaagatatattgtttagtatattgcggaatggagaaattcttagttttttcccagagactaacaatattacaaggcaagatgaaattatatgaaataactcttacttgtttcaagctggaagtgccaaatccagaatatgaagaagacatcagtagttgaacaagtgaccatttctctttatccaaagcaatcgcaagaggttccaagtaactgaaacagccaatttgcaaatgttctatcaattaatatacatgaagcaaacatgattcgataaggtatctgcactgtacacaatttctcccaaaagataaagatttaggtcaaagagagaagaagctacatactcagtagctaaaagtccatcagttaatccaccgataaatatcacttgttgtttatactctccggtcttaaaagcaacctggtgatgcataaacagacaaggaagctgatgttactatacccaacaatctatagtaaacctattctgattttcaaaaaggatccatctttgtaaactttgatcaaagctgctacaagtggtcaactaaaatcatctaacttgatgcaaaagttgaaatcaaggtctcacatggcttggaacgttgacctaaattttcattgactttcttcaacgaaccttaaacatgatcagcaaacaagcttgtgatgaacacaatgtttgctaaaaacagtcacgaagcaatataacaacacacatatttaagcaaccctagaatcacgaaatgataatttattattcaaaattttgtgtctttgcttggaagtaactcaaaagcaattcaatttaacaaatcgaaatcgagaagcgaacctgaattgatttaggaccgtatttgaacaaaacaccgagaaattgattcttccctttgattggtccaccgtaatctgcgcttccgcttcctcctccagccatggaagagcttttagatagcttcgcggtgccggatttatcaccacgaccacgaacgatcccggagaaccatgacgtggttgttgaggaagacgaagcagccgccggagaagatgatgatcccgatgttgacgccgcagcagcggcggcggaagaagatagaagcgagagagacatatctagcgactgtgtgtgaccgtttcagatttcgatttcgactgtgcgagacaaatgaaacgaaattttaaagagtga

SEQ ID NO: 66773 - DNA, 1619 bp, Arabidopsis thaliana landsberg
gtttccctcaaccgcctctttttggatatgatcttattatctattctgattatttttcttttgacttcttttttaagcttgtccttttcgaggtcggttcagaaaggctatcaaatatgtcaaaatgatattatcagcgcctcccatagcgagtcagcatcaagagcagtgctaatgatgatatgttctccctccaaatacatatcatcgagggcccgagttaccctgtcatttatcctagaagaaggtggtgagcaaaatttgaattcccttgtgaattttctgagttatattccatcttcaggaggttacatactgccaaatatactccaaactaccgtgtgtttggtgggctttgcatgctattcatcgatacctcaatatgcgagtttcattttaagaaagcagggtttggagatacttttatctttctgtagctggtatcaaaggaattgggaaaatattggagcatcaagttttgctccttcttcccagagcatcactgaaaagaggatatgctgctgggtatgtacggaagactgggacaacaaagatgcctttcttctatacgctctcttggctttggccgagttggtaaatcattcattctttggacagaatcacgctgaagaactttcaatgaagagcggaaatttgaaagatcggttatgcaccacacttaaggaaatccgcgatggaacatatggctctggtccaaggtggtatgctgcacacatcctaagctattttggatactacggcttcgaacataagttggggaaaaggctcatgtgtgcttatgaagacgaggaatatagtgatatgcgactcctttttgctagtggaaatagtgcgagtgtaaacaaagttattatcgcggtcaggtgtccaatgctactgcctcccaaggaaggagctcacagtagctcaactatatcaactgagaaatctcagagaaccgttcaagaaatccgcatgtctgccaatgtggatattttggcacttgttaaattattggaatttgcttactctggttatgtggaagtagaaagcacgacactgaaaaagctgaaacctttggcgaaacattgtaaggcaaaggttctgctgcagatgctctgcagaagaagacccaagtggggatcttcaatacccgaaattgatataccccttgccctcactcctaaactcatccacttctcgtaagtttatcagtctcatcattcttctcgacgctaacaatcagattaactcaggttttatgacatagtattcttgtaatttcagggatgtgatattagtacctaaagaaacaaacgtggcttgcttcaactgccgtatgtgttccttaacatctcctcatgcccactctcaccgagttatactgtcgtcaggctgtgaatacctacgtgccttgtttcggtccgggatgcaggagaggtatgtaacagttactcttagttcacataatttttctttggcatatatagtggaacgtatgttggtgggtgtattagttctgattttcataaagtaaatttcaagtatccccaactcaaatggaaaccccatccggtagatcagggtaacgagactccctggaccaaaactatctgcga

SEQ ID NO: 66774 - DNA, 468 bp, Arabidopsis thaliana landsberg
gcgtttatcccgaccccttgaagactatatgctacagcagtgtacttgccaggggatctgattttgttcatatctagaaatgagtggtctggtgaactatagcggttgctgattggtcagggcggccccactataggggtcgtatgctccctatttcaccgcattgggcgacgccctcacttttacaaatctaaggctctttcaactaccgtttatcatgcttcaaggtgaccaaaggcgctctgtacgacatggtcatagttgaaagccattgtggaagccgaagcctgtagcgtgttaacagcatagatgatttcgatgccgctggtgcactgcttgagaggagtaattattgcgacccgcatagatcttggacgagatgatgattcacgttgaaagacaagataaaagaaaaagtaagctcaactacaataggctcgagaagtttcatctcgaccacgccgtctt

SEQ ID NO: 66775 - DNA, 443 bp, Arabidopsis thaliana landsberg
  unsure (1)..(443): unsure at all n locations
ggggaaagtaaacttcaataccttaaatccttaagcgatgtttcttgcagaaaatacgataagcatggtctcgctaagagacaactaaatttttaactaaatgaattaaacaatgagatagagagaggattaatatagatatatattatattaaaggagaggattacaatatgaaactctaaaggaagaaaataagataaaataaaattatagatgcctaaagtagtgtttacgtgacaatctcaatttcactccatacctagaactcattcaagctcaagaaacctaaattttaaacgtgccttttgatttgcctataaatacacgtgcctacacacttctccaattaaaaaaaaacaaagccacagcaggacataaaattcacaaacatcaaacattctccacctactgcnccaaaacgacagcattcctttttcagcaac

SEQ ID NO: 66776 - DNA, 293 bp, Arabidopsis thaliana landsberg
agtcattgaactttaactatgttttgtatccatgctcatagtttcttgttctgatatgatacagaccaggaagcgggaaaatcaggttgaaattgatcggctgaggttcatgctggtacattgattgctttctctcaatatgtggacccgataaattaaaatttgctaactaaatttgttgataattgattgcatggttaggatcaaaaagagcatgagttgtcaaggctgaaagagcagattgaaaaagaaaaggtaagatactactctcacatattcttgcaaggctgata

SEQ ID NO: 66777 - DNA, 567 bp, Arabidopsis thaliana landsberg
  unsure (1)..(567): unsure at all n locations
tctttgtctatctatatgcattataatgagcattttcataattgtttgtgtaaccaggtctttaaaatgtaagttacttggggactctgtatactcagcataagccggcggggacttgtggtatagtttttcttaatttattgaaattttatagtttcattatgcgtttatgggttaaatacagtgtttcaagaacaactatatatagttatatattattagtttggtaagagtataatcaagtgtcatatatgcatgtatatcattgttgtgttattcatcaaccaatagttactgggaagagtattaataagcttattgagaatttgaaatgtatatgactagttttcatgaaattacaacattttgaaactaatgtttgtgaaaggaagaactagaatcttttcatattattttcagtagggaaaatgtcataaaagtcatcagttaaacaaagcaccaactttgcttatggtgaacgggtcaagacccatttttatcttttattngtgatttttttaaaaacataaaacgacgtcgttttgcagtttaacgaaagatgggaat

SEQ ID NO: 66778 - DNA, 1918 bp, Arabidopsis thaliana landsberg
gacgctcttgttgacgtggcatataatgagagccagtcaatagaagaacctgaatcttttaccaaaaggtccaagacaaggaaaataaaaactttaatttagagttttagtaacttcaatattttctatggtttatgtgtttgctgcgaaggactgtagatttttttatgcctttttttttaaccttagacctcaaagttttatttatttacaattaaggaattgcgactttgctgcttggttgctttatatttcatagtgcaattttggtgaccataatttgtatttattgtctgaaaacttctctagatcaagagctaatgtaatatccattcaaacatcggatgaaacctctcctaacatgacaaagattaaaaataaattacatgaattgtgagaactcaagcatctataattctattttcgttgagctcatctatacaactctttctgaagtccaacaaattctaaaataacatgaaaaagtatgatccacaaaaaaagaaagataacataatgaaatcaaaatttttatcggacccacccacctaatctcctcccttcatggcttcatctacccgccacgtttattatatggcatagtaagaatctttttttttttaccatcacaatgtcttaatcgtcatagattgctctctacacatttcatagaaatcaatcctgaaatactctcacgcattgcatacaaacttattcacaaaaaggaagcatcaatttataatgaatcattccttcaaatttaaaaccaaattaacaggagaagagaagaagaagacgaaaaagaagaattgacaagtattctaaaaattataataacttttatccaacatcgtaaataatgagacatgtatataacactatattcacttaacttacataggagacacaatatcaacaacttattgttcctttggttcgaacaattttaccaaaaaaatgagtgaagcaaagaagggtcacgtactgttttttccatatccattacaaggccacattaacccaatgatccaactcgctaaacgcttatccaaaaagggcatcaccagcacactcatcatcgcctccaaagaccaccgtgaaccttacacctccgacgactactccatcactgtccacaccatccacgacggtttctttccacatgaacaccctcacgccaagttcgtagatcttgaccgtttccacaactctacttctcgaagcctgaccgatctcatctctaggtacaatacatgaatttccaatatgacataccccccttagttattttagaggtaattttactttggaatttgatgagagaacaattttagtcaaaaatctatatcctggacttccgagtgacatagaatttctatttttgtcaattacgaaacgttttgtgttctgtctcttttaatgtatattttgagtgattatcaaccacttttcatgtttatacacagtaatccagctagattttaccatttacaacattcataagccttttttttttatgaatttaaaatagtttatataatgcattaatgcccatgtaagaaataagtttaattagtgttaaaactatcaaagcaagtttcgtagcgtttttaggataagtataatttatatgcaaaaacgttatcaatctctactgttatataaccccttgtatatgcagtgcgaagttgtcggacaatcctccaaaagctctgatctatgatccatttatgccctttgcattggacatagccaaggacttggatctatacgtagtggcatatttcactcaaccatggttggctagtcttgtttactaccatatcaacgaaggcacctacgatgttcccgttgatagacacgagaacccaacacttgcatcgtttcctggtttcccattgttaagccaagatgatct

SEQ ID NO: 66779 - DNA, 467 bp, Arabidopsis thaliana landsberg
  unsure (1)..(467): unsure at all n locations
gcatcaatttagtttagttatcaccagttgtattattatcaattcagtgtagaaatatgtttaatcaactgtttgagtcaagagctgctcattactagtttgttgaatgttagacacatttatgtaagatgattcacgtattaatattcatgtatgaccaatgtaacttgtactatatatcacacaaagaatcaaacacacttattaaatctcactagagcttctttaaatctcggtttagtccggtgcattgcaagtatttgtgcatttctgtttagcctttgtttactaagttttgtatattgcttatgtaacaagtttttatccattcagcagaaataacagaaacttgacacttatatggacattttgttgnntgttgttgattgaagatcaatgtttaatccggtcaaaccactttgatgtatcccgaaactgaaccgaagaatgaaccacatcattatttg

SEQ ID NO: 66780 - DNA, 2860 bp, Arabidopsis thaliana landsberg
ggctaacaaacgcaatacaaatggagattccgagcaaattgttcaacacccaatggccagagatgagccatgccacaactgtcatagcacaagccacaagtagcaatccttggattcttgtaaacgatttggagcagcagcgtgaaagaaagggatcagatagaccaagctgcgtcttcatatatatcgcatatggtgataaccaatagaagagagaagaaacagaggcgatggctgtaaacgcggtcaggagctgagaaacagaagagaacaaatagaacatgagaagcaaactgcaagagctcataactgggatcatcaaggcctgagagctatctagtgttatggatgcttcagagaagtcacggtttctctccatctctttcccgtagttaagtgcacggaaagcggatgcaaatgtcacggtgacagctgtgacaatgagagtagctggagcaggttctagcaaatacaaaagagtccacagagtctccatgataagaaaagagttctttcggattatataaatatcccccaagcctcgtacgcataaaagcaaatatgtgaaatgcctttaggagttgcaataagtttccaacagatgtgaacctgtaaaataaaaaatcacaccaacaaacctcatgtaagccaccttaaaaccaaaaagattaagtttttacgaactttacagaacaagggacatcaagaaagataatagttcacaagacatggttactaagctactaagtacatgtttggcacaaaaattcagacctcaagctaaagttgagttctttaagaaaaagggtaaatttaaaattgtttataaccagattgaagttaaggaaactcagttatccaagtgtgtgtctacattttaataacaaacccagaaatcaaaaattaagttggtatttcaatcaatgactcaatttcgaggaatttgttgtactcaacggacacaaaactttgagaactggtaaattcgatcaagaaattaattatacttctcagcaacaattaatgtgggaatcaagcaatatctaaggtgaagaaaaaaaacgtaaagattgcagaaaccaattgacgtaaaaattagatcaagacggaaaagaagagaagcgaagtgtgtcacctgagaaaccctaacgacggaggagagacagtggtggaaacggagaattgggatctaggtttcagtcgcgacgttggatcctctgtcgcatatcagtctctccgactaaaggaccaaacgtttctataatattgaaactattaattaattacagtgtatcgtaaattaaacgataacgtattgtaatgcgagtcaaaacgacaacgtatttaagacgaagttacagcatcaccaaatcacaacataaccgtacttcttaaaaatcggaccacttctaatttgaatttgaatgaaccacaaatcataaaaatttcaactggctgtagccggtacatgaaagtacttacagatccgaatttacgggctatagccggtatatgaaagtacttacagatccgcatttacgggctatagccggttaacttcaatctgtccaaaggggaacagcaacacatgcttttgaaaaaccctaattttcaaaattcgaactttacgctcttctctcttcttcttcaacttcccaccttcgtttgaataatctcattgccgttattctctctagctcttcccatttccaggattcttcgatatgggagcatctcacagtcatgaagatctagagatctgttcctcagatgaagatgaatatgaagaatatgaagaaggaagagagggagaggaagaggaagagacgtttcaggactcgcgggatgatacgttaggtatatcttcctccggtggtcgtcgtctccggcctaaatctccttcatcatcactcgacgacgttgaggcaaaactccaagccctgaagctgaaatacccatcgacgcaatcagccccgtctactcagaactcagctcggcttttccgctacatcaatggcaacactcccaaagccaaatgggtcacagctgagaaactgactgcttattgtttcgtcaagactaacaaaggagatgaagatgatgaagacgacgattagaacggagatgtggaaaacgaatggtggattttgaaagtcggaagcaagatccgtgaaaaggtatcagatgaaatgcaattgaaagcttataaagatcaacgccgtgttgatttcgttgctaaagctgtttgggctatgaaattcgccagcagtgaagatttttcggtttttgtaagcagctataacaattgcttgtttgagaacaatcatggtgttgagtttaatgaggctaacaaggcaaaaatctatgggaaagatttcattgggtgggctaatccagaagctgctgatgattccatgtgggaagatgctgatgatattttgcttcaaagcccaggaggaggatctgcaactccggctagagatacacaggatttgactgaggcttttgaagaagctacaagtgagggcatacatagcttagctctaggtgctttagataatagctttctagttggagattctggtattcaggttttcaagaacatgagacaggggattcaagggaaaggtgtttgtgttaactttgagcctggttatggtcgaactcattcttcagcaccgaagaaggctcttctcatgagagctgagactaatatgctgctcatgagtcctatgagccaaacgcctcattcacgaggtatccatcagcttgacattgaaaccgggaaaattatttcagagtggaagtttgagaaagatggagtggatatctctatgagtgacattactaatgatggtaa

SEQ ID NO: 66781 - DNA, 382 bp, Arabidopsis thaliana landsberg
tattcatactatcacattaacggatttcggataagtgtaacataattcatgcttcgactcttctttacatttgtctcacattaattatcaagtgtgagatatatttgcgtggctcggctgcaacaatctccaattctggatagaggcacgtctgtgtcaacaaactaatgttgcatgtacctcttaaatcttaataaaacttacgaggtttcatgatctgtcactttttaatattaagaaatatactctgaaataggcatgacggatgcgaattaatctcatattattgacttagactttacaggtatgtccctactagagcccaccacctactcttatttaatttgtgaccaaccctaactaccaaattattagcacatgc

SEQ ID NO: 66782 - DNA, 603 bp, Arabidopsis thaliana landsberg
aggtggcatacaattacaactaaacttgctaagtactcatgccatctccactgcaggtgttgttagtcgttactgcttctactttacaaaatctatcgatatattgaagaacacttataagaagaattttgtattgaactttgcagggtgaggccggtgagacctgcggttgtatcaggggctttggaagatgagacagagaagtttacagaacagaatcacacatcacaagagtcacttgaaaatgaaaggcagctaagcaaagccgtgatgctatcgaaaccaatcatagctcttcaattcaaatgcttaacaatgcaagtagaagctcctgttgtaatttacccttcaaagtaaacacaacactcaaattccaagaacatacagcttccttcctaaaaggttcacatctttacaaaaacaaatatttccgctttttgccgattaaataagccattcttaggataaagtggtttgccaaaatctattattttatacttacataaggtcaagagatcatggtacaatatcagatttcttcagggagaggatggccgtccaagaacgccttgaacggacaagtgatctctaagcttgtgagat

SEQ ID NO: 66783 - DNA, 172 bp, Arabidopsis thaliana landsberg
tgaggacccgacaaaaaaaaaataagttcgaggacaattatagtaaatattctacttttttcaaaaaaaaaaaaaaaaatggcataagttagagacactaaaactataaaaccttaattaaagaagattattaacagaaaagtagacattcataaacagttatgaaatcaca

SEQ ID NO: 66784 - DNA, 421 bp, Arabidopsis thaliana landsberg
ggcattcaagttggtggtaagtacttctagctcttgctcttgttacatgtagcttatattaagattacttgcagttctcagtaggcattgatttccatacatattgactagttgggccttggcgaatggataggcttttcttgttcagcgtctaggtccgcccatttttgggttttgaacagtatcatgttttaattcatatgatctattggctaaaaattagaaattcttatatccatttttgcaaaaaaaaaaattaataggattaaatgaataaattagtatcttttgcttatctttctcttgttatggccagagattataacaatttaacttacccattttgatagtccatgcttcttatatgtttttcacgtttcaccgtcgaatttcaaatctttttcacttatcttgaggctct

SEQ ID NO: 66785 - DNA, 567 bp, Arabidopsis thaliana landsberg
acgaataatacacttattaaaacggctgccacataatagatggcctgtctaccaaattgcgctccgatatagccactaagtgttctagaggccaaaatccccattaacagaccggacataaccgtaccgatggctcttccccttttgttatcagtagccagctgcgcagccatggggattaataactgggcaatgacggccgtaaatccgattataaagctgaatacctttagcaaaaagggtgattttgatagcgccatgccaattaaggcggcaataataaaagcgaagtcaaccagaattaattttttgcgtcttaatttatctcccagtggtacaataaaaaacaatccaaaagcataacctatctgggtaagcatgggaatactgctgatttgtaactcggatatgccaaagtcttttgccattagtcccagtaaaggctggttgtagtagttattggcaacaactacaccggtagtaacggacatgatgattaataaacctgtactaagtccctgaccgtcttttagatgtgtcatgacgttattctttgatgggaaatac

SEQ ID NO: 66786 - DNA, 579 bp, Arabidopsis thaliana landsberg
gttatcgtttaagcactgatagcattttctccatttctgcagtctgatgtaaatactgtgtgctttgctgatgaaagtgggaacctgattttatctggaagtgatgataatctctgcaaagtgagtgtctttgttgctgcaatagtacaataaatttctggcctttataagaaaagttgtgacaggatcttgttaaaaaattcattacacgaataggtgtgggataggcgttgtttcattgggagagataagccagctggtgttttagtgggacacctcgaaggtgttacctttatcgatagccgtggagatggtcgctatttcatatcaaatggtaaagaccaaactatcaaattgtgggatatcagaaaaatgtcctcaagcgcacctgcaaggtaactattttcgatataaaactgtattcagccagtagcattattggtcgcaatttgtttgttggtgtatcacaaagaaattcttaatgaaactaattgttctatattacagggcataagggtgctaaataaaactattgaattggggtactaacagaattgggatggggatttaatcccttta

SEQ ID NO: 66787 - DNA, 399 bp, Arabidopsis thaliana landsberg
  unsure (1)..(399): unsure at all n locations
ggctctcagggcgagagtgagaactagggatggcgtgaccttaccgggaaagtggctcgcagaagcactccgttttttatgtttgaccaacttgtattggggccaaactttactactccattactttcagaccggaagggcaaacaagggatgaggttccttttaggagagcccaactactgtcctacatcgaaagaagtacggcaatggaccctatcccttgactttatgaaaacnnnnnnnnnnnnnnnnnnnnnnnnnnnnnnnnnnnnnnnnnnnnnnnnnnnnnnnnnnnnnnnnnnnnnnnnnnnnnnnnnnnnnnnnnnnnnnnnnnnnnnnnnnnnnnnnnnnnnnnnnnnnnnnnnnnnnnnnnnnnnnnnnnnnnnnnnnnnnnnntgt

SEQ ID NO: 66788 - DNA, 572 bp, Arabidopsis thaliana landsberg
catccatggctgctgcgattagagctgagtcaatggctactgagaaattagggattacaattgaaaagaatcctcctgagtccaaactaacccaactcggtgttcgtagttggcccaagtaatctacttgcccttcttcttcttcatttgttagttgctgaatatgaaagttttagccttttttttcttttccggaaacgaaagtctctagctttgtttgttgttgttgttgttgatgaatctggtctttatgataatcccaaatgtagaagcttgatagctgtagtatcgtagtgaatggcttttaatggcataagtcatctccaagagatctagtctctggtactattggttaatgggacaatcgtttggcggcggtgaactatctgcaatcgaaagtgttgcacctttattgttgcccggtgaagaaagtttttaactttgtctgttaaagccattattgatctccaactgatctattatgtttgattacgtgaaaaattgacaatttttacaggaattggatccccttcaattgaacgttttaacctttttcgttgccctgtgaagaa

SEQ ID NO: 66789 - DNA, 2086 bp, Arabidopsis thaliana landsberg
  unsure (1)..(2086): unsure at all n locations
ctagctttttacacgactttgtttataattttcctttgagagtagtctgccacttatcatcattgctcttaacttttcatagggtcccgtcgatgtaccactatacaaaacataagacccagagaaaaaaaactgannnnnnnnnnnnnnnnnnnnnnnnngttaagggtaaggttcaacagtttgtacctgatgatagaacacaacagctgaataagtgatgtttgtggcacgaactctgaactgtgctccacttccattaacttcagcgttcatacacaattattcaatataattctatcttttcctttcaaaagagggcaacaaaggaaacagattgaataataatatcagacatcagaggccaacctcatagtagagttccagaacatttaagatcacaagagtgtcttttgtacccttcatttctgcctccagtaaatcaagaagccccgatttcttaacttctgaagctacaagtcgagaaatcgaaaaaagcttcactatcaacgacaaaacccggactcgtgcctgaaaaacagttggaaaattataaagcgaaaacaagaaatggaacatcatggtacaaaagttttatcatgcgatgcattaccagtgatgaacaccttgcagcaaggttacgaagatgtgtaggatcgttggtttcagaagggaaaattacggactgagaaaaaagaggtttgagttttatgcatcaaaatggacggtgtaaaagaactagccactgagccaaaataaccggttagactttaaacacagaccattgcatctggaaagcgagctaggctcttaattgtctcacttgcagcatttgcaacttcatcatcgctacagaagcaaaataaaaagaacaagtcaatggtgaattttgaggcaaagcaactatttcgagttattaaagccatatttgaatcccgcaagactaatccaaaggcttgctccaaacaatcttccactagttgtttccggttagtccatagattgttaaactagagtaatcccacacgaatgaacacaactgtaagaatataatctataactattaaacatggcttctcacctgttaatgatatagtcaagtagaagagggtatatgccattgttaacaactagctgaacagaagaaacgtcgtttgtatcgcaatcctccaagagacacagaaccttcagaaaaaccgatacaagactccaacattattagcaaacacttcaaaccaggcaaacactatgacagcataaaccactacttttatagacacttacagttttgcaagccagagatttcacaactgcagaatctgccttgagaccaacttgcagaacaggctataaaaacaaacaccagaaaagtataaattagactccaaatatagcaattggctcaaacatatttcatcctgacaattaaatacacatataacacgaaaccaattctataaatagagtcttaccatatactgaggaataagtgaagcgccatacttagtcttaaacaacctctccattcaagtcaccaacgtgttttcaaatcctggtatatccggatcggtttgcaaagcactgcaggcgattttcgagattttcagttagaaactttataaaaaaataatcccagaactcataaactacttaaaccctggaaaaaccacaacaacaacagattcaaagaggaaacgaaatgaaatacaaagttggaggaagagaatcacttgaagataacaggaagagggaagcgatcgaggaattccttaacggaagtttcgttttgagcgcctgagatcgaaaacggtaatcggatttcaatcacgacggaattgaaacaatcgcaaaattaggtacgaaaaattggtatgaatgcgaagcttagcttaccgggatagtgtgcgaactcgaaagcagcatcgaacaactggttaacgtcttccatggcgatttcctttgttttttttttccaacaaaatatgtttcgttgcgagcaagctgaatgagagacaaaaaagacctcttgatgaccactctaaacactgcatcaaacgcgtggcaattggaaaactctttaatgggc

SEQ ID NO: 66790 - DNA, 806 bp, Arabidopsis thaliana landsberg
gctattgttacaaaactaagtatgaagcatttcgaaccaactttttaccttacttgatggctcttcatgagttagacgttgggtggctcgcttcccaagatcgatctgcacagaaagctttgcttgcgacagatcaatgcctgcattctggagtgcttgtgttaatgagctcaataacctggccatttcagaattaatgtctcacaagattagtacacattggagttaaaaaaaaagggtagaagcgaacacatcaatggcagcacagtaacagaaacgaggaagacttagaagatcagactcactcatgcgagtaggcactagagatgctaatggttccaccttcaataaccaggtcattactttggcctagcccatcactagttgcaggacattcattagcttgttcgccttgtaccattggaagaattggttgtagtggtggtaatcctttgtcgtctaactcaggttgactttcaatcgatatgccggttatagctcttgctttgtcagattcaatcgggatttgcggttctgcaacaattgcaggtgtcgaagtcacagtgttgtcttcaaactttccaggaaaaggtatccctggaccagatccattatttatagctactgggtggttccccaaactttgaactcgccaatgattattcctctgttccaatcaagaaaacataaccttcagctaaaagtcacacaaagaaagccttgcgggttcaaaaacatactcagaatctacaatcacagaaactcattgagaaaccgacataagaagaagctcaaaactttaccca

SEQ ID NO: 66791 - DNA, 2824 bp, Arabidopsis thaliana landsberg
agagctgtactctgagcattttgatcggaatttcatgtgctgtttttttattgtgttttttcttacttccgtttttttctttccttattgtaaaattctgtctgtgttctgtttggttgtttgttcctcccaactcaaagagtttcaaattgaattttgagtctttttttcttcctacctttactttgtcgtattatgaagtaacagaatcatatgaaaccaatccaaaagaaagtactaataaaaagatctaactaatagagtagacagataaaaatatataatggacaaataataagcccatagagacaggcatcgatctaaaatgctttaaaatctcatcgcacaaataaggcttccactaaaaggccctacaagggatggcccaatatacatacaacaactaaaaatagttcaaatcttatccatccacgtggcacatttccaaccatccaaattcaccggagagattcaaattcaacaaccataattcgaatcatatgcttcctccaccaccggagatccatcaagcaaacaatcaatcggcggaatcgtcaacgtctcttgtttcccataagcattccaacaaaacggatcatcaacaagctcaccttcttccggcaataactcaacctccgacatcgttatattcgtacacgcgacggtatcgctacaagcgaaatgaatcggtggacttctaacgtcgtaagtacctttaatgttccgatactcgacgtcgaatactttaaccgccgatgtttcgttacggcaatctttggattggcaatagtattgatcgacgattatgcaattgagaacgttctccatttggatgttttcgaagaggagatttgatactgatccggtaccgccttgccatgttttgactcggaggccgttatcggaatcgcgaatacggtgtttctcactgttatgtttgaaacgcaggcttgtgaattgtgcacgcctaagctcccaatgctgcgtttttagacattttaacaggtttttagcggttagaatccaaatcgcgttttgaaagcgatatacgactaaacaaaattgtacgagaaaaatatagttttcttaaaataaaataaaaattcagctaaaagaacttgaattttcaattttatacctaaatcatacgcgtaattagctttttagaaaaatacaacaaattttcttagctttttttatttatatattttgtataaattcgaaaatgatattttatttagccacaaaaaaaaataatagttgatattttccaatattaaaaatcattcaatcttgagttttatacctaaattaaactcgtaatttaagatagacctacgatattaaaatattggtatatgagataccagccaaattagaatattttttttggtatgttcttataattttgcatagaaatatttattcaagttcgaaaataatatttatgaatatgagtaactttacttaaatccagcaccaagttcgatatttttttgtcaagtagttccaatttccaaagctcaatttcgggtggatggatcattcagctaacatccgtgatgcatgtaaaacacacagacatcgtaatggaatcaattcgggaaaaaataacattttaaagattttttgtaacaaaagaagaaagaagatgaggaaataaatgaaaagagagaaacctgatcccgtgactagggccacaagtgacaccttgaatgtcaacatctgagcagccagttccaatcgatatgcaatcgtcccctgtgttaattaataacattcttaaccaaagttataacacatacactaccaatatacgcattattcatgatacaaaaaagtttagtaaataaaacaaaaaacagtaccgttgctaacgacagaattgtaaatgccaacagatcttgtgtttccgagatggataccatctgtgtttggacttagttttggtgacgatatttggatttcgtttattaaaactccttgacatccgtcgaatttcatgtgaaattgtggactgttttggattcttaatcctttaacctctatattgttgctcatgaaaaacctaatcatctataaatcaaaagaaacaaaaaaaaaggttagtactaaaccaaataaaaccggtctaatttaatgatttggttcggtttaagtagacttacagtcggacttgcacatggtccggacgatgatgatccgtctggaccctgaaaagataataaaacacacaatcccagttattttatttgacaacatttttttggtttttacaagtaaaactatttagggagcatatagtagctagtatggtttgtcgtgatgttctatttgtcacgaccacgacttatgaattaattaataatcagcaaatctctagtgtaaaagttataagtaaatagttaccctgtggggcttgcaaggtagatcccaccatttttgaccattgccttcgacggtgcctttgcctgaaaacgtgaaaccgtcgaggcggtaaaaaaccaaccactggtttttattgtctttctctggccattcctctggtccgtccggtggcatcaacactccgtccaacttcacattcccaaaatacatgtaataaataattaataaatattattgttactttaaataattgcagattttttgaaaatattattatcattaatgctatgctttttcttttgaaaatttaattttgtttactttttgttataagcctgttactggtaaaagaaaagaagcattttttgtttgactcacctgaaatacaagacccggtttacatggaccggaaaaaaagtggaggtgattttgaaaa

SEQ ID NO: 66792 - DNA, 1233 bp, Arabidopsis thaliana landsberg
  unsure (1)..(1233): unsure at all n locations
attcagatttgaatttttggatttgaaattatagaactcgttcggatatattaaaatttcttgtttgggttttgcatcaggtttttcggatctagttcggattcggatattataccaagaataacgtagaaaatgccatatctattttatttaataaaaaaaattagatataaaagcccaaactaagaaacatctgaaaagcccaaaatgtttttaaaaagcaaactgaaacttggggccggagatgtccagattgaacattgaaacattgtaactgtgtaggggtgaataacgaaagaagagataaatacatggctcaaaatgtaaaaacagataaataaaggggtggattcagaaataagggaaagaagaaggtgtatataaaaccaagaaaccctagaagaagaaaaaacaaattagtgcctgaggccgagcgcttccctctttagtgaggggtggcgtggtataccacgagaagggattactgtggcgtaccctaaggggtgcgtaggcgcatatcagagaatcagggctctttctctgctttgctgtttcctttaagctttaggctgtcaaagcagagacgttctttgccctacattttttgtttttcgatctcaatctttggttttgaattcttcagattatttttggttcttttacgagtcttttgatgttgatgattagtcttttattgagacactaattcgcaatatgttatgttgatcttcgataacctttctttggttcaaaatattcttagatttttaaaatggtgagtaggttttggttaattttgtttttggcaatcgtcgttgttcgtatcgttgtgccaagatttggttatttccggttatctgtggttgaatatcggttatttattgttctggtatcaatcattcaatacattgcaaagagttcatcaatctgaaaatggtaattagtttttggttaattttgttttaccggttcgcgggtgttcgtattgttgtgccaagatttggttatttccggttatatgtggttaaatctcggttatttattgttctggtatcaatcattcaatacatnggcaaaagttcatcaatctgaaaacgattgatatgcagtgaagatatattatgtagaacaagatcacaacagtttanactcgaaagatcatatnattgcgattgtgttcattagtaacttagtgaatgtataatcagcaaacatacatatcgtgatcatgat

SEQ ID NO: 66793 - DNA, 350 bp, Arabidopsis thaliana landsberg
ggcgtttctatgcggcacttggcttcaggatgggggggatcccctgggtgatgccgtgccagttcgacgacgccacctggccaccgccagtctgaaaaatgcaggtcagcgcgccggacgcgcctgcgcgcgcgatatatatccaatctggacgcgcacatgcacggacacgggcgctcgggcgggcgcgagcgcgcgcgggcacacaccttgctcgtgcgcgcgggcagacgcatgagcgcacacgcacatgagcgcggacgcacacgcgcgcgtaaatctggacctgaggcgcgcgcgagcgcgcggacgcaagcgcacactagcgcgctcatgcaatctggacgcgc

SEQ ID NO: 66794 - DNA, 209 bp, Arabidopsis thaliana landsberg
ttactaaaccacggtcttgctgccacgacctgcatatatcgaagagctgaatccttacctgtgtcatattccttgctgatagccttacgaactgctctcccacgactgttttttgctgcctcgcattctacactcagtggctgcatactttctgatccaattgcagggctttcatccgacgtgtactcaatttgcactaatatactatc

SEQ ID NO: 66795 - DNA, 580 bp, Arabidopsis thaliana landsberg
ttctcctgcggctttgaggtgagctagatacagtttctgcgtcaaaattgtcttctataatcttttgattgttggttagatgttcctagacatttgaacaccgttgattctttattccagttcagctatgagttttgatctttttcattcttgtcttagttttgattttgtttccttatgtacaagttcaccttttctatctcaggatgctcttaatagcacagaaacacatggccagcaactccattatggatatgaagggtttgatccaagcataaactccgctcctgatttccatgaccaaaaactcagcagcaacttggatataacttctcagtatgattatattttctccgaagtgcgtcaggaactagataacagcccttccactaagcttgattcttctgaagagattgacaactttgctgaattttctactccatcaagtgtccgtgtgcctccatctgcttttctgggacctaagtgtgcactatgggattgcacaaggcctgctcagggctccgagtggtacctggattactgcagtaactaccatgggactctagctcttgatgaagat

SEQ ID NO: 66796 - DNA, 1462 bp, Arabidopsis thaliana landsberg
acacttaaaccagatgagtttcctgttatcttcttggcaaagctgcttttgtcaaatgtatcattgccattctttgttatgaccccctgcatatacaaacacgttgagagattcagataaaatgagcataaatatcttccagaacaagcaaggctggtaaaacgaactttctcggttatgattcctgcaatcagctctgctggagtcatatcaaaagctgggttccaaactgagatccctggtgctgcaatgcgttcaccaagtcctccgtgtgtgtgcagcaactcctttggagatctttcctctatcacgatttctttcccggatgaaagtgacagatcaactgaggtaagaggtgcagcaacataaaatgggatcccgtgatgttttgcgcacaaggcgagactgtaagtcccaatcttgttagcagtatcgcctggagtatgtcaatgaattggttaagaagtgattcactcataaggaatcagatttgtggagagaaaacggattatctaaggtgtttgagtgtaccatttgaagccacgcgatcagctccaacgatgacaccatctacacgaccatctttcatcagtgcagctgcagctgagtctgcaatgagagttgcagggattttctcatgcaccaactcaaacgctgtaagcctcgatccctgtcaattatcattttgtcgtaaattcaaaagactttcaacaacagttcaacagagatatggaaactctataaagcaacagccacaagaagtatctgtcctaatttccttcattgtttggaagcttttaccaccgttttgatgaacacatatgtcaattatacaggtaattatcgtccctaacagcttaaggtattctacggattcttcttcttacgatattgagaaagcaaaagtattaatttaggagttttacttgattaaatggacgagtttctgtgcagtatgctctttctaagattccttgagtatggagtgcacggatgacaccaagggcagtaccatatccggcggtagcaaggctacagagacaaatagaactcttagttaatgccttactaggaatctaccacataaacataacaccaaaaaccattacacaactctattggttgaagctgcatacacatatgtggtaacatgctattactcaagttgagtaacttatgcagacggtatctatgcaattcagaaaatctagctaaatcaatacctgccagtgttgcaatgggtcaaaacagaaagcttatcaggattcttggcttgttgcctcaacaagcttaaaccaaagtttcctatagctttgtttgaaacaacatcatcttcaagcatatcctcagccgcttcaatatatgcctgaagaacaacaagcacagagaatgagctaaacttacaaaagcaaaaggcacagagataaattacgaaacttcgtgataccttgaaaatggttct

SEQ ID NO: 66797 - DNA, 460 bp, Arabidopsis thaliana landsberg
  unsure (1)..(460): unsure at all n locations
ctgcatatgatcaggttatggccgagctttcattcttggcaggtctgccaagaatattgagtgaagatagatcggttgcagcactcaaagccttatgccagtataattttacaatggatgtggggccatacattaaaactcatataggcggcaggccgtatgcgctgccgggcgaaggagggatggtcatgaataccaatccgcataatgaagccaaaccatttggagaaaatgtgagctggcagctgggttattttcatgaatgtatgagtggttttgagcaccaggttgttgcacatttcatggcagaagggatggtggaggaaagtctggtccttannnnnnnnnnnnnnnnnnnnnnnnnnnnnnnnnnnnnnnnnnnnnnnnnnnngatcgaatgcagtgaccattatgcccgggcaatggcaagttatggtacttttatcaatgcctgcggctt

SEQ ID NO: 66798 - DNA, 704 bp, Arabidopsis thaliana landsberg
catattctcagaataatttagggaagcttaccgcttctgctccaaaacaggaaccacagtatgtttcattgtgttccaaccttccaccatgtttttgtaaaggtttttcaatctatggataaacaataacattaggtaattagagacataacgaagcaaacaagacagaacttcaacactttcaatctcttaaaacttcttgcaatgagatcagagatgacacatgaaaatgaaaaatttcaaaaccatagaaaaaccaaccttagtatgaccaattccgtcttgttttgcctcgatgacattgccagaagagtctaatctccttttaataatgtcatgtcgctgcaccatacaaacgaacagaatccaaaatcagacaaagtaaacacacacataatctcaatttgaaaagaaaaaaacaaacgtaatggaacaaaacaattcaccaggacataccacatcaaggtgcctctccccactgatatccatggaatcaagactaataatcgaacattgaagcgcagggaatgtaacatcaaactacaaatcgtatatgacaagttattaaaagcactcccttaaacaaaaactagtaagcaaaagaacaaagttttacattaatccgtagcttctctcctcttgatgtatcaacacgaagctgagtctcagtaaccgggtgaatgtacagctctaaaccaaacaaa

SEQ ID NO: 66799 - DNA, 804 bp, Arabidopsis thaliana landsberg
tatttttaacatctttcttcggcatcttttgacactttttatattcttaaaagtttataaatcacagcttgaccattttttgtttagtttagttataaaaaaaaaagaattaatgatgctttcaatactttggaaaaatttacataatttttgaataagaatcgatttaaagaacatggaaaatagagtctttgataactcattttgtccaaagagtctgccacttcattgcattggcggggaacctgtttaaaatcagtacatgcaaagcgttaagcccaacgacatgtttcctccatcaaattattatggaaatagagataaacatatacatacactgatacacactcatacgtataaaatacgtatgtgacatgaaggcttctactgcattttaaaattattcttctacaattcataatgtgacgctgataaaacaaaattcttctacaaaacaagaatagaaaaaacgaattgaattgaaaaataaaattgctcatagaaagtaattaaaaactaaatttacacgaaatccttgaaaagaaaaactcggagatctatcacatgacatgatcttacttgcacgaaactaaaactaaaagcccttaatctgctcctgaataacatacacatagagacacaattagacatatttgtgtaatgcatattatgtatgtacggacggttcgcaacgcaagtcgccgacatcaggggtcgagaggttcaacggcgaggctgggctcattagaaggagaaaaagcccagaaaatgaggagaatcatgaagagtagaggaaggaggagg

SEQ ID NO: 66800 - DNA, 654 bp, Arabidopsis thaliana landsberg
cacaacaatgataaatggaaatgataacacgcaccgcatatgatgcattcaccactgatcatgcaccaccaataaaaattcaaaacctatgtctccattatcattaactagattttgacgatttgtacatttaatttattttattaattcagtattgaatactatgttattactcacgtcatgaatgagacatcaatatcaaaatttcatttttttttttttaaaaatacaatatttttgctattacaattttgagttcgaaagtataggtattggtgttatcgttttagctacttaggatttagcgatggatttatcattttatggtgcatcaaattgtcgaccatttcaaattcacatagcaattagaagatatccctcaactagtatgaaattttgacccacaagatcaaaatatcagaaacattatattctgaaagttccgatgatatttattttccaatttgtatgccaagataattatgtaaatagtttactgaaatgtaatgcaattatgttccaaaataacaaactagtacatctttttgatagctttttattgtaatagtaaagaaaatccaaatctttaggtattacaatgatagtaattgttgaaactcccctattatctttgattgacttaaaagggagtcc

SEQ ID NO: 66801 - DNA, 471 bp, Arabidopsis thaliana landsberg
cagatttacattgtcggatagatgggagcctgctttttcgcgaccggtatgaagaacatttgtgactttttgaccttgttgactattactgcgaccactatggtttacacgatgggagctaggccaacctgtgtgataatgagtagatgagaaaaaacagagatgtggttttcagagctataatgatcatgtatcacttgggtctgatgtaggttttagacaaaaactacaatgtctgctttcaatttatggggggacaagccaaccctgcatgtgattgagtagatcgttcggtccaactgtgggttccagactgatcttaacaccgatgcggctgaaaacacatgtaactgtgatagcaagacccggggtgatggagccataacatttatgcgaaggaatgtagaatatggaagcaaagaggactctgaccagtactatactcgaacgagagggtgaagggcatacatt

SEQ ID NO: 66802 - DNA, 498 bp, Arabidopsis thaliana landsberg
tgtacctattgcgattggatgtggtgagactacaatgatctttgttataacttttaatgttaacttcactacatgatcggttaataatcaaaaattgcttcttccaagttaaaattacactaaagagtttgttagccaataggaaataaggaaagtggacccactctctcattcacagaacgattttttatttttttctgcataaattaaattaaaaacatttttaagatcttttatcaaaaaaaaaaaaaaagagagagagaagaaaaaaacgcgtcttcctcagtgacagcgttgaattctctcatctctttctctctctgcttcatcagtttctctcactacaaagcttctcatcatctccctaaattagggttaaagggtcgagcttgggattgtttcgcacggtaaaaggaaggatcttttgctcgtcaattgctatattagcagaccttgcgaggtgggtttacggttttgttgtaaaacatttttggggat

SEQ ID NO: 66803 - DNA, 579 bp, Arabidopsis thaliana landsberg
caccgtaatctccaatgaaacttcgaagccaccctatagttttatgtggtctaagtgaatatcaatgtacactttgggtgagctaatgtaaatagacaatgacgtaccaaaaccatatttccaagattttgctctcctactctttagcgcggtgattagaaggcctagcgagaaaattaccgcaagcaaaccatttgcataaatcaagaggaaatgagatttccctgtttcttgatttttaatctcgggggcgtgaaactcactgatcaatccctgaaaacgtattataactaagtatgttacttgttgactaagtaacctagaaaatgaagttggttatacctttatagcttcttgtaaaaacagaacagcaatcaacatgccaaaaagttccccagcgattctcgtaaacctcgtgatgattgtgcccgcgttaaatatcgaaagaaggataagcaaaactgaagtccatacacataccctatagaaacaacatataacatcaaactcttagaaagcagattacatgcacgtacactaacaagattattgattttgtgtgatcattaccatgcaacc

SEQ ID NO: 66804 - DNA, 443 bp, Arabidopsis thaliana landsberg
gcaagaacttgctcaatcaattgatcttgaacccacagatctgcatggctgcctcctgtttgttaatattcacggagtataccaccatgcttgcattgaaccatttattcacctagaactatctctgtctcaggctagccttgaactcaaagatttgctgggctttgtcttctgggattaaaggagtgtgccaccatgctcggtcttaagctttacatggccactgaccctcaagatccagatcaaaagcgtgagtgctacatttctggattgttagctcatttcagattagaatatcacgagcaaacagtaaccaagtagtgctaacacctagatatgactatactttattcaactgcaaaagcataatcactaaggcttacttgcctggaatcttgcaaagaggttaccacttctttaatctgctatatctccttgaacat

SEQ ID NO: 66805 - DNA, 236 bp, Arabidopsis thaliana landsberg
aaacaagtgcccaaaaaacaaattataaaaaataataaaaagtaaaaagtatgagctcaaaggatcacaagagaaaaatcgaaacaaggtaaaataagagaaaaataatgaggaatagaaataaaatgaacagataaaagagataaatttatagaagaacgtgcctatgacaataaaaagttttgaaggataaaaatcaaataagctgaaggaagaccaagaaagatagtcgattt

SEQ ID NO: 66806 - DNA, 503 bp, Arabidopsis thaliana landsberg
actggactgttgccacccgcgccgtcaagaacatgcacaagcttgtctcggacgacaacgtcgatgtcgtggtgtggtcttcggtaacaccggcgtcactggccatggtcgatatcgccggcgaaaccaaaacgcccatgatcagcgtggcggccagtgcgaaaattgtgcggccggtagaaggcacgcgcaaatgggtgttcaagaccccgcaaaacgatgacctcatggcgtccgcattggccgtcgccatgcacacgcaaaaagtcacgacattgggctgcatcgggttttccgacgcttatggccacacctggttgacccagatgaccaatgcggcctaggccaagggcattcaaatcgccgatgctgaaaaatccacgcgcaaagacacctgggcgtcgggaacagatactgaagctcatgctcaacaaacccgatgggcttcttattgccatgacgggtgctcgcgccggcctgccgcaacgcgaactgaaaagcca

SEQ ID NO: 66807 - DNA, 429 bp, Arabidopsis thaliana landsberg
cacctcagtgttaacccgtagccgttaccgtttaagaagttcttttatttatactggaaacataattttctcatactacaacaaacatagtgttcatagaattctgacattggaacttattatgatttgaccactaaagtctcctgttttgttttaaatttaaattaaatacaagtgggagtaactgaatattttttgaagtaagctatggattagaaatttgtgcgaaatatatcaaatcttaagaaaaatatgctgttttacagactattattcagccaactacgaagatgttgtaacggtaataatttgatttggtttataaaagaaatggaaaaagaaaattattaaaattacaaaatgatacggaaaactaaccgaatcttgatcctatcattttgcatacacatttggtccgttaagcgtatc

SEQ ID NO: 66808 - DNA, 1852 bp, Arabidopsis thaliana landsberg
tacgtttgatgtatgtttctacaaattgaagaccacccaatatatatacactttaagaattactcaagatatacaatttcatacattgcaatattgcatctccgttggtattatcactattttgtttttttacatatcagatctagatccacatcatacttaataatttaaaatgtcaaattgtgaaagtctgttgaatgaaagaatatctagaattactattagaaaatgcattcagcatatcatcaacctacataatatggcagaagacaaaaagaaaactttgttgatgtgtcgtcaataaaagatgatttagtgcaactagatatagcaaccaatggataaaatttgattaaaagtatctgttaattagccatagatccaaatacataatcttattactttatcaagatctccgttcgcaaagggagggcacatgttcactttgactagtcagagacttgacacgataattcagataagatcttcatttcattttgtaagtgaagttggctccaataagtgacagtaaatgcaatgagtcaagcaagcttgcttcgctaggccatttgcttctcaagacttgtcttgaaaagacaaaatgtgcatccaataagtgaacatgcatttgcttagaagaccacgtcagttaaattaattgtgagattcaatgctaacaaacaaagcaggactatttctcctaagttcacatccaacatttgatatgggtttaatattctttaaaacaattgcttaagtcttacaagtggtgttttgttttcaggttcattgcaaagttcctatttaacaaattgaatgttttttcttcaatgttgttcatgttcttctgaaataaaggtctataggtggactacaagggtatatatatcccatggttgaagtttactttcaactttttaactttatattgtaagaaagaaagtaaaaattcatgaatatagaccttgagtttagaaaaatctttaaatatattagtaaaacccttacaaaaaggggaaaaaaaacaatggcttgaaaacaggagcttaattattagcacctccggcggtgtttgctgttactgtattatgtttgctgttacctaaacataaatcaacggaacctaaatcgttgaagaagccaaaaccaataaagaaaatcgagaaaataattagaaaccctaaatagaactcgaagaatatggccaacaatgtttctagccaccttccaacttctccaaaagagtcaaactagtgagtagtgaattatgtgctgccatgtgtcagtctacgtggaggagatcatttgcttcgatttctctcttcttctctgtctctatcggttgcttaaaaaaaaaaaaaaagatttccttcgtaaaacctctgcttctggtcaatctattgactgaaaatatgactttttcaattacacaaacgtacggtatgatacatatgttcagtaatgtatggtatatgaagatgctcgatgtatagtagttccactcctgtcttatatgtccacgatctctatacttgcaggcaaatatggtaatgttttaaggttcttacatcccgccatctccaatgagacaagccgagaacataacttgattactgaaggcactttctctatcgcagtttcgcctagagacatgaactgaatctgcgttgaaatcaaaggaaagttattcagcttcgagcatcctctcatattaaggacactgagggatttcaagttgatgttgtctggcagactcttcagttttatgcaacaagacatgtccaagactttgagcttatgaagattctgtagacaagacgaaggaactatgaccaaatttttgcagaaccta

SEQ ID NO: 66809 - DNA, 120 bp, Arabidopsis thaliana landsberg
cactgatcctctacagcactcacctgtgggctgagtagaaagggtttctgattttgactcacgaggtgaggtctataaaactaacgagatgcgctaagccgaaacccctaagaccgacac

SEQ ID NO: 66810 - DNA, 418 bp, Arabidopsis thaliana landsberg
aacgatgtgatattatacaccgtgttaaaacgaaaacgtttcacctatcactatgactacagaatgatccagacaagaaagggcattaccatgattataaacagggaacacacatcctggggttcatccgactctggcaactctactataagctaaggatgggattttggtggtgatagagcaagagagccctaacctactatccgaacagatactttttataaacctacttactattttcatgttgggatgataaacccttaatgcaaccaaacgtgcttggagtcttttaagggacccagaatgcatttaccttcactcttaaaacccatttacgacctagaacatactgtgacgcgatgccaggaactaactgcaacacttgattctgtgataatgccgacatgatttgatgcat

SEQ ID NO: 66811 - DNA, 1180 bp, Arabidopsis thaliana landsberg
gtcgttggaaaatagcaaaacatcatggtttgatgaagattcatcgagaaagaagcatcagagatcaacaaaagagaaaagtaaaaagcatcattccctgcaaataacaaattagaaaactgaaaaattatacttgccaaaaagtgtgattggggaaatctatcaggaatagaattattagtttaaaactatgtttgattatatatatatgaaaaaggtaagtcttcttctcctttatagaacaaaagatagttccaaaattatttttttatgcatcctctattactaattaattttatgtaaagacagtaaaaaaaattaagctttgaaagtgctagctaatcacccccatgatgattggttaagaaataataatgatggctttaaaatcatgagttcaattggtcattgaaaaagaataaagattgagaaaaatgtttgaataaatctgtcaaaaaatgccaaacaaaaaactcccaatttgttttattgatttttctttttaattggtaacttatattgaattctcatttgaattgctaactttatctacttttacaaaaataatcacttcgttaatttgactgacggaacaatttaacagggttaactctctatttagaatttttgtttcaacaaaatttgcatgcagtttctgttttgtcaaatagtttcttcatcatctttcaaaacagtcaaaaaattataagaagtcagggaaattttttttaacagaaacacacaaaggccaaagccatagaaataattggtgattttgatatgttgttgttgtgttggaagttggtgacacctaaaattaaccaaaacaaaagtgacgtattcctcaaaaatagcaacactaaccaccaccacaacaattatcctttttttctaaacgtagaacacacaaaccggttaagtggctttaatttttcccaactgttttttcagagataaacatgaacacaaaccgtgacaacaaatcgtgagtttttgataccgtaatttatctgatcaaaagtaaaacaaacccataggaaaacaatgtatcaaaaatggtaatgatataagcaaagggaagaaacaataagaagaagaagaagaagggtatggaagagggtcgtagaggatcatcttcaacaccacagtctcgtaagatcatggtgatcgctgatccgac

SEQ ID NO: 66812 - DNA, 525 bp, Arabidopsis thaliana landsberg
aaaacaggggacgaagcattggctgcgaagctatacgagacgttaagtgatatccagacgggtcgggtcgaggataccaagggatggacggtggagattgaccgccagggctgaaagttgaaactgtaacttgatgctaaatatgtgtgtgtgtgtatacaaaacttatgtaagaaacatctgaagatgtctctgatctttgtgattgtgatgatcatgcatgtcctatcgttgcgatgtattttataaatgttcgtctgtaagttatttaataactatggctttttgctttatctttttaattatttttaaaggagtattatcatagaaaatcttatggcttttcaatttacactaaccctttacaactactactttcttttttgtccatgtagatgaaagatgatacagaactcttgaatggtcttagaatctttctctgaagaatttttcttagtataaaaccaatcaagagtttattattcttgagccttagctcgagtaataaccaagtgcaattatgag

SEQ ID NO: 66813 - DNA, 1093 bp, Arabidopsis thaliana landsberg
tgtgatttcttctttttaaaatctcttaaagaactatgaccttaaaaaaaaaacttgtggttgtatcaatgtatttcttattttacaatgatttttaacataatacatatatttatttgtggttactaaagtacaaattttgttttgttatgacatcatacatcataataatgtgcaagttaaatatgaaaaaaaaaagagttatacatgactaaatgtctcatctttttgttatttttcatagtttgttgattcttttgttaatatctaaactttacgtagcaaataaaaaaccacaaaattcttttgacaaaattcagtagattgaaaggcaaatacatagaagatacatgaaatgacaaaattatccatcatccttttacttttgaccgacgacctgcattaaacggcttcactttgaaaatttttagccgcttattcggcaactaaaagacttgtccgtactgttaacaacacatgtaggaagtaggatctttcatgtgaaacacccacgtgtatactacttgcatgcacgtgtgcttctaaacccgtcagacatcagtaaaaatttatactaaatgggccgtatcaatcttcatttgttaactttggcccaaaacggctcaacaaatagtaaatacgtcatcatctagtgatgccatcttcaattctcaagaaaccaacgcttatagttacttattttcattgttgtttcttatgcattatggtgatgtatgttttcagaaattctagctacaaaactgcgaatagcgaattgttgtttttttggggtcagtttaagttgatccaacttaagcttatcatcattttgagattcggagtgctattttatttcaaacattatggaacttcatatgatacttagttaatgtttacatgcttgattggagatttaggatctaatacgtcaacgatgatttgacttttcaaaaattttgagactttgagattttctactgtaagactctgtttgtatagtcgtctcatatctgtctagtaatgactattggagaatatccaatgtctggatttcaatggactcattgtaaaggagcagtatagttaaggttat

SEQ ID NO: 66814 - DNA, 517 bp, Arabidopsis thaliana landsberg
ggggagcccgtgccgcacccccgacagcacggtgaccgcgtctttctttatacttcatccgggccccgcggccatggccgaggcgccggcgagcgagctgatcggcaatgtcagccgaggtgacggccactccggcgaccatgccctcgaccatggccaccaacgcgcgaccgtgcgattccccggcagttatccaacgcaacacgtgtcccatcttcccatgccggtcaggcccgccagggcttggaggagtttacggttgcccacacgggctgctcagcgcagcgacaagcgggattcgatctcggctcgagacccgccagccgggttcaggaaccgtttttgaggatcaggtacgtgacggcgtcacggccgttgctcggtgaggtcaccgcattgagctgactaccggcattgccgaccaccccgtcgagaatctggtcgaagtcctccgcggaggtctccgggtcgatcagcactaacggcgattcacccggcgggacagcggaactcgggt

SEQ ID NO: 66815 - DNA, 2518 bp, Arabidopsis thaliana landsberg
atatcttttcataaccgccatgaacatcctcaattttcttagtaagctgatgaaacttagaaacactcatactatagagcagatttctcttcatctctgaagtaacaagagaacaagatcccatcctcttcttcttcgtcgtcgttcccagcattaatacccttctgataaaatcgttgaccagacaattctacagcttgtttaagtaaaggacatctctttacatgccattctacattctcctgcaacacagagctaacaaaattcgaatcaaacagttgctacaatagcagaaaaattgcaaactataacctttgaaaaaaaaaaaaaagtatttgactcactgagaaggatcaatagggcatggaatccattgaccttccaatctctggctatggtttccacaaaacctgtttgataactttgaaaaattagctcctcactaatttgaacagaagaaaaaaaagaaactttactctttcacttacatagaactctcgattcgagtattcgcgcatgatcttttcttcttcggaagccagaaactgcatcgattgctacttttcgcctccattctctcagccagagttttgctctgagacaaaggagacggaggtcttcaacgtgtcctaaaatgggctttgttttaggcccattaagagcccgtttaagtttaaaatcgaatcaatctaagcaaccatttgaaaaaagacacgtggcatttccaaaaaacaaagaagcatgtttcttctcctccttacatactctttaacgccataactctttacattttcttccgccggaaaaacagatatcacacagaaaacacaaacgacgacgaagaaagaagaagatgtctgcaacggcaattctctctgtaaataaccctaaagacttagtcaccggatttggtaatcggacatttcattcccggagcaactttgctaaacccagttcgagattatttccttcttcttcttcttcgatgaagcctttgacccttgcttctagattctctcctttgatttcaacaaatagatcctttaaatcttcagtcttcaggagatttgatactctcatggagtggcaagaatgcaagtaagcgatttatcttcccctctgctcttgactctctctgacttcatgtaatttggctagatttacaaaaaatactcgcatttttaagaactatgaatctttccttggagagttttcgaaattgcagaatcctgagaggtaaaagatctgattttgatatacttatggtgatcaatgattgctctggagtttcaagttcaatactttttatcaacgttagctttagatagtcaaatttgatgtttttaattgttcatgtcatttcttgacaatgctgttcaaattcaagctatgaattttatttggctttgtttagtcaagaaggttcttttagtgtttgaatctttatttttgtggagaatttcagagtaaagatgaaggtagaagtgcctgtatcagttgcttatggactctactcggaacgagaatcaattcctaaatggatgacatttatttcatccgttaaggtaatgatgtttgttcatatgatcactctttctgttggcaaatgatgttcagcattggattttgtttttttatattacggtttagttctgcaggtattgaaggacaaacccgatttatctcgatggaccttgaaatataaagcatttggtcagaatcttgagtacgcttggcttgctaagaacttgcaggcaagtatcatgaacaattgaactggttataagtagctccattcattcttatgtatggatctttaagaatcttttgttatgacttcaatagttttggtatatatgccttgatatcaagaacatgttaaacagctttaatactctctttttggatctcgtaattgttttctagattttgtttcctgcagcctctcccaaaccaaaaaatacactggatttctcttgaagggcttcctaacaagtaatagaactgaaacgaatcactgagttctgagtctcaaaattcatctcttgaatcttgatgttaacgtcttgctatttttacaggggcactgtccgttttttcccgctaggaccttcatcatgtgacgtagaagtaagtttctattgttcatatcatcggttttcgagttcccgatgatttttctgagttctttgctttgtttgcagctaacctttgcatatgaagttccactgctacttataccatttgcagcggtaagcaagcattctttattcaacatgtgaaaactgtatcaatacttgatgatttagagagtgattcaacacaactaaatgtctcaaatcctatcttctggtaacatttcatatttgctttcctcaggcgcttcaaccgctaatgcaaggattgatcaagaacagtttggagcaatttgcagagatagcaaaaagcacaaagaccacttagttaatcaacacaacagcaaaacttatccacgacacacatcatcacattgttctta

SEQ ID NO: 66816 - DNA, 583 bp, Arabidopsis thaliana landsberg
atcttcttcttgttcttcttcaatcctaattctcagtcgactttgattaatgtttctcattgcctctatagtctctgcttcttcgctcacaagatcaatctcaatgagaccatcatcatcatcatcatcttcatcatcgtagccttctccttgggacccctcagccaaacatagtcttgtcttttccttgaagattcgtaacaagaaaacagaagaggagacgaacaagattgccatggttattgtgagagaggagactccttgagagttcaagaaacagaggaaagctacagatgaaattagggttacaagaaaaaacagcagtgacagctgtgaaagaaagcaacaccgagtaaaatgcttttcatcatcagatttttccaccattatagaaactttatttaattcaaagcaaaaacaaagacagagctagttataaagagaagtcgagattgtgtcgttatccattgatgttaatggatctttgagttatgacctattcaaatctttaaaccaaagtttccatgtttggatcttggattaaaagagagattgaaaagagacgaatctgagtccttgaaaa

SEQ ID NO: 66817 - DNA, 244 bp, Arabidopsis thaliana landsberg
  unsure (1)..(244): unsure at all n locations
ggaactcacgtgaannnnnnnnnnnnnnnnnnnnnnnnnnnnnnnnnnnnnnnnnnnnnnnnnnnnnnnnnnnnnnnnnnnnnccggttgtgcaggagtctcatggagtctcacggaaaaaacaccggctgaatcaaaatgaaggggtaattccaaacaaggaagagaacggtgaccgaccagacggataagacatgggcgagtgacatacaagagacataccaaaggctcttcgaagagtgta

SEQ ID NO: 66818 - DNA, 600 bp, Arabidopsis thaliana landsberg
tatgccatcacaacatacacgagtgactgattttttcaattaatagttattattattttatatgtagtattatgtcgtatttttgatggattatgttataattgaggttaattccgccaataatatttccgttattaaatggaatggggaagatgaattaaaacaaatttaaaaaaaataataagcaaaaatagttccaccaataatatttacaaaaatattgacaagaatagatagaatatgctccctgaattaatagaatagtctattttcaaaaatatgttcccatatgtcaacaaagtttgaaaaacaaaaaccaagtaaggaaacaaaagcatgcaattgtcggcataatcttgacaatttccctaataaacaactactgtaggtttagtttaaatgtactcaaccaatacgttgtttaggtttttttttttatatctataaaggattataactattatttcatatacaactatagtctagtagtttattccatagtggtttatgctaatgctatattttatattatcatccgaatttgaactgatatatagcagattattaatgaaaaaaatcaatccgcatgaagatatgctg

SEQ ID NO: 66819 - DNA, 1052 bp, Arabidopsis thaliana landsberg
ggagactattaaacatacattaacgtgagagtcaggtgcaatcagctgtctctcggcgtaagaatacctctcgtagcgttctagtaccttctccatgctacaaatattaagcttacgagttagaattagtttggattcaaccaccaatataattgcatacacaactatcttatcagctagcacaagaggccacttgtttcaaacgtaattaacgattcacccaaaatatgtgataacatatagcatctgattatgtagggttatctaattaatctatgtcattaaacattagtttcttcctttctattatggaataaagatgatctctagttttgtgcctaaaccctagctagaaacagtactgatttctaccattttaaaaataaataaaccagttgagccactaaccccacaccccaagacgtattcaagcaccctataaaagtttaaaaggaactgttgaagttaagtttgaccatcagtacggaggaactgtttagaaaaaaaagaacgatctgttttacattaatccccagaggtcaaagactccccatacttagatgtcacatacttatttccagtttctctatacctagctataaaccattattaaatgggaaaaaatgaagagtttctttctaaacttaattaagattattggtatactaatatatatatatatatatgagagagtgcgtacataaaatgcaacttaaagatatttaagcaaaagtatagctttcctaaaagcacaaaaccctagtctagaccataaacagtccgttctttctgtacctaatatactaaacttgacttggagcaaaatgtgcatttccagattaaagaagaggctgaagattaattacgagtgcatgcgcctataattaagtagatcgtatagaagggttcactacaagccctaaaaaattgcagtttctctgatatatgacaaagtagtggaaaaaataaactaatgatatgaccaacacgttcagctcgtagatccaagtaaatagataccaaatcagtggcaaattttcagagtgacagtt

SEQ ID NO: 66820 - DNA, 568 bp, Arabidopsis thaliana landsberg
  unsure (1)..(568): unsure at all n locations
ggcaccgtccaccgctgttacctcgtttcttgcacacgtcattgcatcgagcgtagcctaatttgttctcaaaagtcttcattgtcacagcgagacccagtgaggaagttccagcagtcgccggcttcactttggtggaccagcgagcagccaaccagacacaggagtccgaaaacgatgtagattttcatgattgcagttattgtttgggaaataaatggcttgattttacctacctttcagttctgagcttttataggaaaaattatttggatttcactttttacctaagactgaatgaagaagtttttaattgcattttaccttttaccaaagatttgtccctctttattgcacaactttacgacctagataacggattagccgattctattgctaattaactgggcgttttatgactcgctacctcaagttggaggaacaagagatgaagacaaagtcaacgatctcaaagaactcaattggacgtctggagtcaatgtggtgttgccatcacacgaggaaataacataggtgaatgaattaaaacggaatgcggtanaatgag

SEQ ID NO: 66821 - DNA, 530 bp, Arabidopsis thaliana landsberg
tcagtggcccatatgaaagggtcttggcggtagagccatgacgacagagagggaccacatttcatggctttttgctggaggaaaggggaacataaaaagagaggagagccgcatgaggtgattgcgcgttgaggcggtattatcagcagttgggatcccatcgtttcaattacagtgcctcaatcaacgagatccttcggtgaagcttgggttgggtgtccatgttgagtcaccacggtgagcgtaggttccctgtactcaatgcttctcgttaattccgagtttcaagcgcagcctcaagagaattgattgacaagctcccctgcatcccaatctctctgtcacaactttttcgccccacaatcgacaggagacacgcagtcgtcatgacgcagctactgaaagggtaccatgatcagaccatgcaaaacagttgtagaaacaaaccctcgctcaattctctatgaggctcaaatccggtggctgtcgtgcgaaaactagccatgcatgacgcctgcacatactcccgt

SEQ ID NO: 66822 - DNA, 620 bp, Arabidopsis thaliana landsberg
  unsure (1)..(620): unsure at all n locations
agaattaagggaaaacaacaatgactaaccttctcttaatgttctttctgaactctcctctcgtcgacgtttaggaagaagagagatgctttgattttatgattatgaggactcttcttgggtgaagcatctaagtaactctctgcgtcaacaactctccatgttttcgtctttctttaaacaataaacaccttttggagtcatcgtgctaccaaattattaataagggtctcttataataataatgttatagcttggaatatttcttatactaacaatttcaagtactattgggttttatgaaaagacaactacttctaatctacccattttttaattttaccttaatagctgtcttaatttcaatttacctgattcgtttcgtcttcttcctccaacttgtctatgatacatttcttggaaataattgtaacctttacaaaatcaaattcatatcttttagatgataaaactaagaccacttccaaggatgtattnttttttgtggggtccaatagtgtattttaaaggagggctattaacttaattaaaaactattaaaaataaatntaaactgtaaattaatngaaaaaccggctctaaaataataatttatagat

SEQ ID NO: 66823 - DNA, 471 bp, Arabidopsis thaliana landsberg
cgaagccgcagcagatcgaaatcagaattttcaaccaaaaatatcgaaatccttagcattacccaaagatacaacggggcatcataaggaaaatcctaaatcgaagcaagaatattcaattcccaacctaagaacacactgaaacaatcaaaattgagaatgtcttagctcagatctagatcaataatacctctgcgtgaaagtttcggagctatctgagagagagagagatcgcgagagacgaacagaatttgaaagagagagcttcaaaacaacgctaaatgcgcgacgccgtaattgcaaaaacggaagaagatctttatagaggcaaaggataaaaacgtcaattcacataaattatcaccggtaatacctagaatacccctcgacgaatgttttcgtggaggggccttgtgcttacgcggcttacatgcgtgatgggtcattggccgtggattgcatctaaccaat

SEQ ID NO: 66824 - DNA, 546 bp, Arabidopsis thaliana landsberg
tgctaatatcaagttaagtttaatcaaaaagcttacaagctttattggaattttcacgcaggaagcgatacaatgatttgctcaagcaatgccagacgatgcattcaagtgtgggaactggttcacttgcctatgttgtgggatctaaagttatggatatgcggaaatcttatagagatgaggcagtaaaggttgctactacagatgaaaacagagaagaagcttttatagataataatgataatgctaatactgaaaatcatcacagtgattggagtaataatggtactgatacatctcatttacacagaaggggaagttctagtgagtcagttgatttagtaagtggaagagaaagtccggagagcgtagtatacaacacttcctcctttgtatctgcctctagtccttatggctatgcttcccctgacggttatttcgactttccctcgctaccggttacagatttgtttgggagaaatagtttagataacattgaggtttcttctccagatgaggatgcttcactgacaagtgaattaatat

SEQ ID NO: 66825 - DNA, 1679 bp, Arabidopsis thaliana landsberg
ccttcactttttgatggcgtcgcggtttcaggaagcttcactggtttcttcaccgtcgtatcctaacgccggcgcttggtgatcggaaaatctcatcgccggcgctgctggtcatctagtcatcatcattgtaagttttcttctgcttcgttttttgaggttaaagtttgagtctttttaaattgtattgatgacttttgtaattgtcagaatccggctttgcctactggccctcgtggattgatcacaatctctgacgccgagctttatcagattggtcgtgttcgctctcaaggtctgttttttttattgataaatacagaattttggtgtacctgttttatgaaaattcagatcaaatttcaaaatcctgcctgtatgtttgccaattcagatttgaagataaaaattcaatcttttgcaactgtttagttcttcatgaagttgtgtgtttgtagaatttctgttggtttctgtgttttcgatcattcagaagtttcggataacaatgtgagtgatgatgtgattgtagatttgctaactggtggactcttgccttcgagtttgaagcgggaaagaagtccatgtgttcgatctctctcatggtctgagataggaatgtctccaaaccacgggtactttatttcttgtaacatgttcagttttgttttgtttctctatttcctaaattggtgattcaaataactctgctcaggtgcttactggctgtttgcacagcggaaggaagggttaagctataccgacctccatattctgatttctgtgctgagtgggttgaggtaggtcgtaaattctctttcgccttttataactaacttatgcatttaaagttgctttctcctctctttcgcagattgttgatatatctaaaatgctttatgagaatctatcaagcatgaactttggagagtccaaaaatccttctacttcattatctaaggtaacttgtatctctaaagtgttttcagtggaagtttgataaccatgaaggatgacttactactcccgcaaactatatgtatgtgtttcctataagggatatgtagatagtttgtacttcgtactcttcacttttagataaagacgcatctaaacaaatcgtttatatctttagttatcctttattaatggacaaatgttgttgtggaaggtattgcgttttgatggaattgttgatgtttgtctgcataatatttttatccaaactatattattgaaatgatttgtgctcttttataacaggatcaagtggtagaacatgaccatgaagaggatgaaaggatttcaagtctgaaggcacgcaagcgaagaaaaacaagtgcaaataacatgtaaagagcatttttttcactcttcaatttcgtcagatgcataccagtggtttgagaaattgttttccatgttctttttcctgttttgatcacttgactaacttactttcttcattttagcaacttgcatgaaaaaaattatacagatcgagcatcatgttccaagcaagacagtcaagcagagcataatgtaagtcctcatttctcttaacttctttctgttgtagtgcattgctttgaaaaatactatcatgattcctccaacttattttctgtccacactttgtggtgtattctgtaacaagtttcagattctaagtctgttcc

SEQ ID NO: 66826 - DNA, 376 bp, Arabidopsis thaliana landsberg
atagatatctagacggcttacattattatctaggcttttgaattttttatcacggcaaaggctgttggcggtatcaggtggaatctaacaacacggcaactattttttataactatctcctactgctacttgtattggaagacgcttgacgaaattagttcaactcgattttaaaatctggtactaaggtaattgtgaaagactaattcacacatctagtgtacataaccaagatacggtaaaatcccttctttgtctactctactagatggtaactaaaactcataaagacaagggattaacgtgtattctatcccatcatctattctggatatccgactatcagactctgtgtctttattataacaggctaggc

SEQ ID NO: 66827 - DNA, 577 bp, Arabidopsis thaliana landsberg
ttctaaaaagccctcttgataaagatttatatttgcgaaaaaggaatataaaaaaagattcatagtttctaaaacaataccagaagttttattagtttttttgtaataggtttatcaatgacaaccaccacaacatcctccaatgttgaatatcattagagattgatccgggttatacgtcagaacgatatccttttacaaaatagtttaaattttaaattacatttattttgttaatattgcttgttttgttaagtatttaagattatacaattttatttcttaattctataatttcaccgtagtattatcagatgaattttgtaaagactaaaagtgaaaatactaaatactttaagaatttttggctaaaaatctacaaaaacgtacatgtagactatcagtttcaagtattttataaaataaataaaaaaaagtaatataataaagagtaacaacagttagtagttggtggcaagcttttgcctaagtctatatacattatcaataccggtgacaacaatctccccaaatgctcgggcactatatatctacttctgttctcaagaaatgaaaa

SEQ ID NO: 66828 - DNA, 688 bp, Arabidopsis thaliana landsberg
atttttttttttttggttttctctcttccctcagccaataacaaaaggccacgtgtaagactcttcccaaaccaaaaacacctaagataaggttcgaaccttactaatttcatgacttttgatttaattttagcatattattctaaggacttttgctaaaaaactcataaggattccccactggacatggtctaatttctccacaatttagtaactatatacagtagtgagataaaaatatacgcatattattgaaaaatatgaaattaagtgtgtgattttttatatatttttataaaattgtgtgaagttatatgaacttatttgaatacaggtcgaatttgtggtaaaatatttttttatatagatttatgtgtatgtttactcaaaaataatttattaaattcagtgtaattgcaaaaaattatgaaatattagttttattactgttaataatctttttaccaaaattttcaatatatgtgtatgtatttttttatatctatatatattaactaattgtcaatattcctcgatttgtttgagccttaaattattattggatgacaaaattttttttactaattgtctcttgtgaagacaagaaaaagaaattatttcgttcagctacatatatttaagataaattttaaaaagtagaagtaatacactaccattaataatgtag

SEQ ID NO: 66829 - DNA, 1877 bp, Arabidopsis thaliana landsberg
tcccgaaacgcattttgcgatctacagagaaaggatctcaacatttctactatctctctcactcagagactatcttcaacagcagttcctgattctaaacccaaaaccctactctctctctgtctcgcaaagttcggatctttaaggagatacagtaattaattcttaattgcaatgaatcaaatgaaggactttttgttacaaaatgtttcacaaaagcacagtaatttcaatatggttcaacataaaccaaatcaaaccaaaccaggtgaaatagaaataacacaaaaccatagcgaacgaactcgaatctctcaactaaccggctctaaaccgaaggaaggagctaaaaaccaaagagaacaattgcaacgaaaccaacatcaacaacaaaaccgccgccaaaaacgctagaatctgccaagaaccataaacataaacctcaaccaatcttccgatcttcactttccaccgtccggtataataacggttaacatcctcgatagtcttatccaaaaaaccaactttggtcaacctcacagatttgctcataccattccacatctctgcagcttcttgatcactcttgagacggctcacaagaacgccttgttctctaagcaacctaacgtcttcttccgaatctattattccgtttattagctctgtgtaacgagtgaatactaatggtcctgaagtgttcgtagcttcgtaagcgacaaggttccgaaggactgtttctgtgttgatgtctaggtttattacagggaggtagaattggccagagtttgaatcgaaagttaccgttgaaatgttaccgtgtgctgttggtttgaatctaactccggctttgtggagatcggagactgatgggattgtaagttcttccacaagaggaggcttttcgatatcaagaatcgaaaccgattcttgtctcgttgttgttgcttcgttttcttgtcttgtgaagagataatcagctgaaagtttcagagccatgaatccaggaagattcgatatgattctccacgggaatctcaagattaaatccgcaggtcgagacgcgaaaacccttttgaattgatgcttaatctcatccataaacctaattgctctgtttccgccattttcgtctgctctgttttcttcgtcatcttcttctagctcttcttcttcgattctcggaacgatcatctgatacaagaagtctaagatatgattacactcttgaaactgagccttcaaaatctgatcatcgtcgaatttgataacgagaggagagagatctttgcatagacccgtaagaacagagagcagtagatcatcagctgattcagtcgattcaagctgaaactcgagtgttttcctcaaaacgaaaagtgggatttggttctcgatcatcattatatctctaagaatctcgttatgaccaactctgttaatcaaagtctccacctttctaaaactgtaaatcttaagaaactcgatcaagaacgatgaatctaccgccattatccacaacagagtctctccgttaaacccgatatacttatgataacaagctcgaatcttaatctccatggattgtaatttctctacaagatcatgaaacctgaaagagttatattgatttcgaatttttctcgcgatcattagtttatacctctccatttcgtgaagctctggttttagacagtgataaggtccgatcgaaactcggtgaggtgtgtatgaatctggatggctacacattaatgctttaggaacattgaaaatgctgactgtgacttcttcgagatcgtgttcttcgagctctgcatcgagagatatttggacattgatgacccatcgagtttcgtcaaacctgtgttgctctg

SEQ ID NO: 66830 - DNA, 1462 bp, Arabidopsis thaliana landsberg
tgacgcccgcaaggtgtttgatagaatgcctgagagagatttggtttcttggaatacaattgtggctgggtattcacagaatgggatggcgagaatggctttggaaatggttaagtcaatgtgtgaggagaatctgaagcctagttttatcactattgtttctgttttgcctgctgtctctgctttgaggttgattagtgttggcaaggagattcatgggtatgctatgcggtcgggatttgattctcttgtcaatatctccactgctttggttgatatgtatgcgaaatgtggatctctggaaactgctcggcagctctttgatgggatgttagaaaggaatgttgtttcatggaattcaatgattgatgcctatgtgcagaatgagaatcctaaagaggcaatgttaatttttcaaaagatgttggacgaaggagtcaaacccactgatgtatctgtcatgggtgctttgcatgcttgtgctgacctgggtgaccttgagagaggaagattcattcataagttatctgttgaattgggtcttgatagaaatgtttctgtagtgaactctttgatctccatgtattgcaagtgcaaggaagttgatactgctgcttctatgtttgggaaattgcagagcagaacccttgtctcttggaatgcaatgatattaggatttgcacagaatggacgtcccatcgatgctttgaattacttcagccagatgcggtctcggacagtgaaaccagacacatttacttatgtgagtgtgataactgctatcgcagagctgtcaattacacatcatgcgaagtggattcatggggtggttatgcgaagttgtctggataagaacgtgtttgtcacaacggctctagtcgacatgtatgcgaaatgtggtgctattatgattgcaagattgatttttgacatgatgagtgagcgtcatgtgacaacatggaatgctatgattgatggatacgggacacatggatttgggaaagctgctctggagttgtttgaagaaatgcaaaaaggcaccatcaaaccaaatggtgtcacatttctttctgtcatctctgcttgcagccactcgggtttggtggaggcaggactcaagtgcttctatatgatgaaggaaaactacagcatagaactgtcaatggaccactatggagccatggtcgatcttttaggtcgagctggacggttgaatgaagcatgggactttattatgcagatgcccgttaagccggctgtaaatgtatatggtgccatgttaggtgcttgccagattcataaaaatgtgaatttcgctgagaaagcagcagagagattgtttgagttgaacccggatgatggtgggtatcatgtgcttcttgcaaacatatatcgtgcagcttcaatgtgggaaaaagtgggacaagtgagagtttcaatgttgagacagggtctgcgcaaa

SEQ ID NO: 66831 - DNA, 589 bp, Arabidopsis thaliana landsberg
tatagcagatctttcatcgagtaaatatcaaaatatttgcggacaactgtttccgttaaaggcttatgtgaatattgcaagtgaacatgacaatgttcttgttcaatccgatcaaagtgtagacatcaattttattgagtttaatttataaatgacgagggtcataagacatcttaactcaaaggatttggagactaagctcaagtttcgggattgaagaacctatttgatgagaggcttctcttttggtgaattcaataccaatggcatgagcatattgaagggatgctctttttcctatcaaaaaaaaaaagggatgctctttcacgactctttaaaatatcttaaaaagtagatatgaaaaagaagaaattgagagaaaagtcatatagagagaagaaaattagaagtatatacaaaaaaaatcgataaaaactgtaaagaaatcgaagaggatataaaatttctcgacgtcgacgaaccaaaactctatcgataccgaaaattagtctttgaagtggtatttcaataatattgcatgaaagtgttttaccagtatcatcactaaaaacataagtgtttgttttaa

SEQ ID NO: 66832 - DNA, 674 bp, Arabidopsis thaliana landsberg
ttatccttttaaatttgctccctatttatacagttgattaacaaaaagttatttgaatactcttacttggttttatgaaactgttcacaatttcaacaattcaacgaaaaccgaaattataatacatgaacatcttagacatgcctcttttatccccttgctaaagaccgacattagtataattattctacttgagttttaactgtgtaagaaataataaatgccaagcacagttgtaagaaatcttagaagtaacttctcaacaacttccacggtgatttaaactttttttgttttttatccattactaaataaagtattttaagaaatttacctcaaatatttttgatgttgatatttactaacttttaagttggtagatttgataaatggtcaatattgtgcttagaatttgtttacattttgtttagcttcagtatttatttgcattatcattagtagctagagaactcaagataaatgcattttgtttcgtggaagtgtccaaggttttatgagagaaatgctacctttttcaagcttcgaaacatgagattgtattgatgtttatttttctttcaagacatagtaattgacctaaagcttttcgggcagggctcacttgttcgtagaatagatcgatgctttcccgacccactaaactttagacgaca

SEQ ID NO: 66833 - DNA, 543 bp, Arabidopsis thaliana landsberg
  unsure (1)..(543): unsure at all n locations
acccgcggcanggcgtgtcggaaacatttgcccaatgctctccgtaggcttcaattgtatccgctgggccgggcattgcttttggcccttgccgcaccgggcggccatcgcgagtctggcgaggtttggcctgcgtttgcaattcatccgccttcatcggttcgaacttcttcgcagaagcatctttgggcgttttgcgaccgttatcttcggcgcaaccaccgttgtcttgtagaaagaaaatcaccgtattgtcgaagttaccgctgcgcttcagttcagcgacgatgcgcccaatgccttgatccatattgtccagcatcgcagcaaagacttccatgcaacgggcttcccattctttattcttttccgtgctccagtcacccactgtcggagcgacattccatcgcgcgttcatcaaccccagatttttcaatcgcttaacgcgctcctctcgcacagcatcgtagcccaaatcaaatcgtcccttatacttggccagatcgcggggcagggcatgcattggccaatgcgcggctgtgt

SEQ ID NO: 66834 - DNA, 341 bp, Arabidopsis thaliana landsberg
tgccctcgctgaccacggccacgccggccacgcgctcgccttcggccagctgcttcttcggaatctcgatcagcttgttgcccttgcccttgtcgagctccggcagttcggctaccgagaacatcagcaggtggccttcggtggtgaccaccacgatgcggtcgcgcgccgggtcggcactgagttgcggcgccagcaccttcgccttgtcgctgagcgagatgatctgcttgccggccttgttgcggcccgtcagcgcctcgaagcgggtgatgaagccgtagccgaagtcgctggcgaggaccagtcggttgtcgttgacgccggcgatcagcgcgtct

SEQ ID NO: 66835 - DNA, 772 bp, Arabidopsis thaliana landsberg
ctgatagctacaagaggatggtggcttgatttaaattttatccctaagacttatgctcctcctagtctaactccaatggattttcctgcactaagcatctcaaatagccatggtattcctgcccagtttggtggggatgatttgcaacaaactggaaatcattaccaatctcctgaaaaggataacatgttcttcttcaagtcgggaccatcggtttctcagcctggtgcaatcgattatgtttctgctgtcaggaagttagcatctccaggattctggtatgtggaaatatgaacgaaatgattcagcagactcatctattggctctagcaggaattctggtgcttacaaaagtggccgtgggaggagtatatattctgataagctgcaaagtcgagcccaaactcgacctgctcctgtttgggtggagaccggggatgctgttagtaagtttcttcttttaacaaactttattgcatagacaaataactatatgagtcttgttatacatctgtattgaacatatgttatcttattcgacgatgttgcatttctggctctctcttttatctggggatgaacaggcaatatgtattctgagttacgcgaggaagcacgtgactatgcacgtttgcggaatgtgtactttgaacaggtataatatacttggaaatgacattttactcatttatgtggcctctagttgttctgcagacctgttgttttttgcaactgggaagttccatttggtacatacctgtctattaatgta

SEQ ID NO: 66836 - DNA, 407 bp, Arabidopsis thaliana landsberg
tgaacaacctgtggttcgatctcgccacggtcagttagggcttccagggcagccagcaccacaaagtgggggtcgagttcgaagaagtgacgcagcttcttgcggctgtcgctgcgaccgtaaccgtccgtacccaggaccttgaactctttgctcggtacccactggcgaatctgctcggcgaacagcttcatgtagtcggtggaggcgatgaccgggcccttgcgaccgttcaggcactgctcgacgtaggtctgctgtggcttctggccaggcttcaggcggttggcgcgttccacggccaggccgtcgcgacgcagtttcgtgaagctggtgacgctgcacacgtcggcaccgacgtgaactcttcagcaggatcttcgctgcttcgggacttcgcgcagatg

SEQ ID NO: 66837 - DNA, 549 bp, Arabidopsis thaliana landsberg
gccgcggcaacctggctgactgttctactttatccgtccaattagggcctgtttactacgtcatgacatttaccgacaaactgaacgcttcctgggccgactcggggtcgctgcttatggtgggccttgaccccgacccaagccgctttccggccgatctgcaagggcgcagcgacgccattttcgaattttgccgggccattgtcgatgccactgcgcagtatgcctgcggcatcaaaccccaaattgcgtatttttccgcaaaccgggctgaagaccaactcgaagccctgtgccagtatgttggccggcaccaccccaacctgcccattgtgctagacgccaagcgcggtgacattggttccacagcaaagcagtacgcccgcgaagccttcgagcgctacaaggccgacgccgtaaccgtgaacccgtacatgggtttcgattctgtggaaccctatctgcaatactgcgacaagggggtggttgtactgtgccgcacgtccaacccaggagggttggacctgcagtttgtggaatcggccgacc

SEQ ID NO: 66838 - DNA, 437 bp, Arabidopsis thaliana landsberg
gtggttcgatcgctggtgtctgaatagagttctggactttgttggcgcatgaattccgatggtgggggcctgtgcttttgtttccccctaaccattcgctgcattcctgtcccggagtgccgtgtcggtcacgatgcccgcccgggcgatggccccaccgcgcagcgctatcgctgcgccttccatgctgatgctccgcgaagattcagaccgcaacagtgatacccggcgcatgggcacgtcgggccggctgcaccacgatttcgacctgctgatccattgaaaccagcgcctgcatcagccgctctagcgaaatgttctggagcttgtagcggcgcacttgcgacaccttcggttgggtcatgccggtaatcgtcgcagccgccatctggctcaacccgcgctggtcgatcagttcgttgagctcgagcgcaagc

SEQ ID NO: 66839 - DNA, 591 bp, Arabidopsis thaliana landsberg
  unsure (1)..(591): unsure at all n locations
acaagtgcatcctgatctcccatgcgtgagttcttcttttttgtttagaaatatttatacagcaaagtctggggtagagggacccatctgaggctagtcttgaacatttcatcctcaagccatgaactcttgagtgtggctaggagtggattcctcacatgcaaaagtcaaactatttttatnnnnnnnnnnnnnnnnnnnnnnntttgaggcagttagagggcaagagacaccttgattcctctaggctacagttgccaggcaaactgtgatcacaaatctcatctcaagtctcaatatgaggggttcagcacttgacaagaggagcttggagaatcagaagaccaggtttagttttgctccatagaannnnnnnnnnnnnnnnnggacacatgagattctacagaaataacaaaaatcctccctggagccaatggagaaccttgtgttcccataattaagaactctacctcagctgctgatctttgagctctctatcaagctggtactcagtctggagtattgtaactagnnnnnnnnnnnnnnnnnnnnnnccaaccatgacagggatggtgggacacaactgggatg

SEQ ID NO: 66840 - DNA, 366 bp, Arabidopsis thaliana landsberg
  unsure (1)..(366): unsure at all n locations
tataaaaccaactcaagaactctgggtatccacttccaccgtctgcaaagatttttatggnnncccggataaataccggaacccggaaactacacttccggagagtttcactccttacttatacttatcggaaacaaatctaaatccttcctaaattggcggccgatgagctaccgtaatctgcgctgatgaataatacttaggatccgtcgggggattgatcgtctaaccgcagagacccgaaccgggttgggtgactgtggcggttgcataccctacaattatggatgtgcaacacaaagacttcatcggaaaccaccagggataggatctaaacgccgtcgtttcatgcgatgtagccgatac

SEQ ID NO: 66841 - DNA, 432 bp, Arabidopsis thaliana landsberg
caaggaacaagaagaaaagaagcgggcccacaacccctccgaacccccccagacagaaaggccaccgagggcgaagggggacgccaagacgccaaaacccgcaggccccacgcagaaaagaaaaggacggcacgaccccacaccccccgaaggagcaccagcgaccccaggaaagagacccgaaaagacaacaacaacccgaccaacaaaaggaacggcgaaacacgagcacggaaagcacaacagcaccagcaaaagcgggaaagggcaccagacacaaaagcacgagaggacgagaagacaaacaaaaagccggacacccccgccaacacaggccgcaaaccccgcaaacccacccaggaaacgaaggacaaccccagcaagcccaagcccgaacagagggcgcccacccaaacacgagaacccaccaca

SEQ ID NO: 66842 - DNA, 563 bp, Arabidopsis thaliana landsberg
agtttattagcatttcattatcttacctgcatttcaactatgggaaaagaaaaaataacagatttgaattgaaaaaaaaaaggaaaagcattcaacgttgatagtatgtaaactaattgatgctctaaattagcgttacatttgttatgtaaaataagaaagtcaaagaagcagagtaaagattaggtgatacttgcaaagttacctttcttttccaaatgtaagtaacgtctcaagtttatcaaactaatagtttatgctttacatattttcccaatctataaattttatttgtaaacagaaacaaatgccttcgaaactcttgtatggaaaaattaaatccaaaaagttagtatattattagagtaaacactcataacagaaagatctttttcatactccaatatggaaaattttagcatcaaaaataacattttgttgttgttggtgccaatatatcagcatttaaaaaaaaaataaccattcgcaagtttagaaataataaagtcttagtaaaagtgaatgcaactacaagtctctgggatggcaaatttgtagcaata

SEQ ID NO: 66843 - DNA, 908 bp, Arabidopsis thaliana landsberg
ttggtaaattaaaggaagcgtcagattggctgcatgtaattactcagtaatatgagacgataaaaggcgagagttctggtaaagacctgctgtttgaatcagatgctgagggagaaacctggcggggatgagaagaagttggtggctgcgtgtttgactgatgagaaccctcccctaaagcattgtgaggaaggtttgacactgtgtcactctcatctctctgagatggagaagaaggcatgggaggatgaggtggaggagaagaagcattaggttgcgaagagaacaccatgaactgttgatgtccttgacttgacgacctgcttctgtggccttcccttcttaccccatgtcttgctcgtcccatagcagcagcagcagccaagtgctgaatgattcgttcttcaatctcagcattatccacccccactggaagctgcattaaagtaaaaagatagagctctaattagataattcacaagaaaagagatgttatcaactcaaaacgatagtaaaagggccacatacatgttgtaattcaaaatcaccaagagttggatgacgaaatatggtggcatttctagttggattgaagcggaaattcctctcctgttccacagcctcaagcaactcctgactggacacattgaaatacacataattgaaaactctatcgaggatacctcgtggaaatgttagcaaaaaaaaaaaaaaatcatattacaaggagacgagattaaccttgtggggtctttgagactaattgattgccaacacatagggcactgtgagcttctttgacacctgtaaataaaaataccatggaccttataagcttggcacaaagaagaaacacagatacaatacttggggaattgattattgtgagttcttcttctctccgctta

SEQ ID NO: 66844 - DNA, 824 bp, Arabidopsis thaliana landsberg
gagggcgacagagtcaatagagaccacgcgcagagacaaaagagaccaaaagaaaattaaagagtctttgtcattgtcttccttcttcttcctttttctctcccccccccattatcttcggcgaatcatgaatctagggttttgttttctcccataaccctaaattttcttccatcaatcttatatttttctcatttcttcttctccgttttagctcatctcccgattcatctcgatttccatggaggttagggtttccgtttgaatttttcatttcatttctgctccttgatgcaattcaatcgaatccccttgttctatgagcttagatgatttgattcggcgtaattgcgttaattcttctatataattgccttgattttggggactcgaagttacaatttctcttgatgattctctcgtcgtctctgttgggattttgatgatatctgacaattcaattttttttgttagggagcgggagagacgacgacgtcggaggggcatttgacttcggcagcagcttttgtggaagggggaattcaagatgcttgtgatgatgcttgtagcatttgtcttgaatccttctgcgaaagcgatccttctactgtatgtttgctaaatatttagacttttttttctatttcatttgaggttataccgattcattttgttttttattctctcgcagttgactagttgcaagcatgagtatcatcttcaatgcattcttgagtggtaagctcttcaacaaatttaacaactctgtttttgagctgtcatgggtgatactctcattgaacatatatattccaaaagggttg

SEQ ID NO: 66845 - DNA, 181 bp, Arabidopsis thaliana landsberg
tcccaaaacggcagaccccacacaggccccggcccccaagaacaaaagaaaaaaggagaacagcccccccaagcaaacgccccaaacacagacccaaaaacaaaaaaacgcacaaaaaacaacacaggaaaggaggaaaaagagggcaaagaaccgaaccacacacggaaacccacaaaac

SEQ ID NO: 66846 - DNA, 584 bp, Arabidopsis thaliana landsberg
  unsure (1)..(584): unsure at all n locations
atccacattccccgcggcactnnnnnnnnnnnnnnnnnnnnnnnnnnnnnnnnngatcgttaccaaagtattgtatgagaaagacaagaaaagggccacaggtgtggaagtgctggatgcggaaacgaacaagacctatgtatataatgcaaagatcatattcctgaatgcatctactttcaataccacctggatactgatgaactccgcaaccgatatatggcctgatggtttgggcagcagcagcggggagctgggtcataatgtaatggaccaccacctgggtgtaggagccagcggtaagatagatggatatgaagacaaatactatttcggccgccgcgccaatggtttctatataccgagatatcgnnnnnnnnnnnnnnnnnagcgcgattacctgcgcgggttcggttaccagggaagcgccggccgccagggctggagccgcgatatcccggagatagccataggcggtgcattcaaagatgcattaacagagccgggtggctggaccataggcatgggaggttntggtgagatactgcccgaccacaacaatataataatgctggataaaacgc

SEQ ID NO: 66847 - DNA, 122 bp, Arabidopsis thaliana landsberg
  unsure (1)..(122): unsure at all n locations
ggaaaantttagacatgggnaccagaccctccacatgnaagaccgacagcccaagccancttgtaacacctctttagggcaaccggccgcggaagcgcccactcgaggaggagccctaggcc

SEQ ID NO: 66848 - DNA, 292 bp, Arabidopsis thaliana landsberg
  unsure (1)..(292): unsure at all n locations
gacgacccccagctgacgtcggggagctgaaaagatgaattttaacgtttttgtgacaaaagcgtctacatcatacacagggcaatgaactgcctcataaagccataacaagcaccaatgctgcaaagcatcaccctgactacacgtatactccctgtgacggatgatgagaaccacatgcactaccaaaacctgatagcacnaanntagaaagaatctaccatgatggccatgggactcacccccatgagagctggaaccaagtccctggctcggctacacacactaacca

SEQ ID NO: 66849 - DNA, 476 bp, Arabidopsis thaliana landsberg
cacgagtaaaggagcgattttttaatttatgcgcagtgtatcgtacatggcgaaggagataatgagccaaaatcaaaacactacagtaaacacttaaaattctgacgaaaaaaccaacattatatgtacaagaacacaaaacagtggggccctttcaagatcattatatgactctcgaatggaaattagaaaacgatgaaagatatgataatatgattgcgtgggttttgattgcgaataaaaagatgtgttgataaaacagcaggctttggagcaggagcgacggagactactacatcgaccgcctgaaaaaccttcgctagggcaagctgtggcacagctctgggagtagagacaaactccttgggacttgttacttggggactcaaaagttcttgctctcacaggacccattcctaaatcacaatacccatgcccggaccataattgaaaaccctgcacatgtttggtactat

SEQ ID NO: 66850 - DNA, 1362 bp, Arabidopsis thaliana landsberg
gggcccgcatttaaaactaaagtttaattagctcggtagtcggtatggttgtaattttttttcggttcagatttagaaagaggatatcgaattgataccaaaattcctaagttcctaagtcaagagccagaccgtctctttctcgtgtacttactttctcggtttcttcatcgtccctagcttgacttctttagagaaaagtcgaacaaaatccggatcataacatacgtgagatgacaataaagttcagaactttaagagaaccgggtgatcagaatcatacaagccaagaatgagcaactcttaggatttcgattattgaagaacaagtttcttgctcagaatcatgtcgtcagtggtgaaatccgcttctttccggaatgttccgcgaccgaaatcaaggttgtatgagtcagtgagaccctccactaagtcgaactccggtttccatccgaggacatgctttgctttctccaccgatgcaaagaaatgctgcaagagaatatacatatatcaaaatctcaacttctaaattggaatcgttcatgttgcagcctcgatcattagaacgttgtggtttttacctgatcacggaaagggaatgccttcttcttcccaaagtcgaactctttcgggttgtaatgaacaatctctggctccggaaaccaccggcctgagagagagttgaaaacatgaataagtttactcaagcaatgatccaaaaagctcagagtatgatatctattacaaacggaccacaccaggatgtacttgaaacgatttggattgatgagacaacaataaagccaatagaaaagaatgtacctttgcgcaagcttttgctaacccatcaaaggtaacatatttctcccccgagatgttgaatatctctctgctggctttctcgttaccaagcacgttgagaaaggctgttgccaagtcctgaaattacagaatgatttgatgttattgatcaatactcttcaagattgatcagagctgagtttcagtcagtgggtccctataacaatgagttttctgaacatgaaaggaagctcaagaattagagaaagtgtgactgaccttaacgtgaccgagttgtgagatctgtatcccagagtttggaaccgggattgggcgacctgcctttagacggtggaaaaaccattcttcgacggggttgtaattcaatggaccgtagatgtagacaggacgtatagaagtccagtttacaccttttgattgcagtaagctcttagtctccagctatcccttgtgcctgctctttcgatcaactgcatcctcctgcatcagttatgtcccaaataaaaagttattacaaatggccttagataataaact

SEQ ID NO: 66851 - DNA, 1331 bp, Arabidopsis thaliana landsberg
tttacggaaatacatcgatgttagctaagtctttatatatatgtttgcagacaggctagcccttaagaaagaaaacactatttgtaggttctgttcaaaaattatatcaacgataatacgtaatgtttaaaaaattattggtagaactttttataaaaaaaaaaaaaacacttagagaccccaatatgttagattttactttaaagaaattcaacttttgtgtgtgggggctctgttcccaacataatgttttaagcttcatttcttctatgactcatttgctgttgatcaaccagttaagaaaactggtgagctttaccaaaaaagtacaatggtgatatatatttggttagtttgaccagtgagaatgcattttatcacatttatgtaaaccactcaacaaagaacctctagcaagcgtcggacaagaagtttaagattactaaggccagaattaattactaccttgttcacatgttgtatgatcatcgtagcataatgtcttagaacaaacagatcagctacatgttaagctctacgaccaaaatgttgaagggctcgaggctaatgtagtttggtgtctcttatgaaaaagctactccacagaggcttcaaatattatcttttaagcacaagacacatgcgattaaagtagcattgaggacttcgtgattgtgattacttccatgtaacgccctcgatgcaaattaaaaatgttgttttcatcaatagccactcctaactcggaagtgtttagttatgacaatcaaaaacttaagagaattttctgtgtattccaatacgttatgaggtttattcaaagagaaggagacctaagtattttctttccaacaaggcaaaaaacaggtaaacgcttgagacaaatattatcatgtttgtccaaaaatagtgagtatcatgtgaataatttagaagctagatatgttcgtcaataaacaataaaacgcgctaggatacaaaacgaacgcttgggacgtgttttaggtacaaaacttcaaaaaaatctttatcgagacagatttccagataaaatacacataccattttaacaacgtgtgtgtttatacaaaaataacaaaatattaattttacgatttcaagatatatattgtcagaaggggaaaagaaaaaaacaaaacaaaaagatacaaaacagagtaacaaactctataaaatatgataatataatacataattgggaaaatgactaaacattatctctgccttttggaactcatcaataattatatatttttttatttctcataaaagtcaaaactatcaattcttaaattcattctaattcactc

SEQ ID NO: 66852 - DNA, 148 bp, Arabidopsis thaliana landsberg
  unsure (1)..(148): unsure at all n locations
attgaattaaatcataaattaaacacaaaaaataagttataagnatattatgattttataaaaaagtaaattattatatacgatcaaatatttattacataaaatatatttaatatttttagaacaggagccggaaaaaagaaatgtt

SEQ ID NO: 66853 - DNA, 301 bp, Arabidopsis thaliana landsberg
catcggaggcatatatcacattttttgatgacagtgactgtgtatagcagaaaactccgcaactcaagcttatatgcttatgtgctgactcctcggtctgagacacctagactgacacctaattggactactgacgcaccatgtcagcttcggggggcaatagcaaggttgcattgtgatcagccacaccatatgagtagtggaagagggggtcactgattgtaacctcatgatccggaacccaagcttgctggcgagcgaggtgactccttggttgaagacagcactacaaagactcata

SEQ ID NO: 66854 - DNA, 242 bp, Arabidopsis thaliana landsberg
tacgacggcgatatcgtttttttgttatttctcattgatttttctttcttcaaatatgaaaaacgtttccatatttaaacctatacaaactaagagcagatttcgacagattatacaccgttaaacaatgtatatctctctcaattccccaatgatttagaattcgaaaccggttaaatgtcggtttggtatgtttagacaattgatagtgtctttggttctgttatatccgatgaaaacaa

SEQ ID NO: 66855 - DNA, 440 bp, Arabidopsis thaliana landsberg
atgttaagtaggttcacgtgcaagatatccaagtggtattaatgggtgctcagagttagcgacaacatacatagctattagctaacatagtctattctttttatttggatcgttgaaagcactaggatggactatatcttatataaagttatattttgtctcactattttagacatcaaaatttgcatacgaattgttcagagtttatcttatcaatccaagagctttctgagtggcatgcgatttctatcagtttataatctttcgtgataagtatatacatattttcttataagaaattgataggtatgtttcaatttctattttctattttattttattcaacgtaacttaagtggaaaatttgtttagctactgttagaagtagaaacataaccttttttttgtaactcttcaactccgattttaagtttaaaaac

SEQ ID NO: 66856 - DNA, 2747 bp, Arabidopsis thaliana landsberg
ttgtaaaccaggcactgagtcattgggtataacaaatttattctttttctgtatataaatactttagggttgctggtgtttatttcttcttaaatggttatctagtaaacgatggcaaggatactcttttgagtcattacgagagacagagttagttacatgagctagttcagtctttaattagcctttctttatgtacattatctcataaatctacatgtgaaaactttatttactctttgtggagagaaaataaattgtaaagcagcagcacaagatcgatttactgttgatttcacattttgaatgtagtactgggccttgagggacatagaaaagctaagattgcactgcagtactgcacccattcattttgtgactcggcccctccccattttgtacgtaaacaagaaaacgcgttcgtgattcactttaactttatgaaaaaaaaaacaatttggcgacttgcatcgacgtgcgcgtttatattatataaactgattttcaaaagaaggcatgattcatcaaagcatgtatattagcattcttaattatatctttgtttcaatcatgatcccaaaaatgtgagttgatctattgtcgttgtttccacgtatgttcgtctatttccaattttcagtgtattttattattctgctacatatttaattttagctcaaacacacattttaaccatattctccttggccatttatttattagtcgatagcaatttggttgcaataatcttctgttatacttgaaaaacgatctattaacaaatatattcgaacgagtttcaaaacaatctattaacaagtattcgaaagtcgtcacatcgttgactaaagctgaggacaactctgtcatttttatcttattcacgtggctacctcttcttcttcgtctctcattttatgtgtaatcccacagagcttgtcactccaaaaaaggcaaaaaaaaaaaaaaacagcttctaaaaataaaaaacaaaacaataatccagccaccgtaggggtaattccgtaaatttgtaacagaaactccattcccgcggcgtatgcagagggcaatcccgtaaacttaacccatctccggtgatgaataatatcaattccttcacgccggagtgattttccacaaaaaataagatatgaaagcaaatcgcggcggcggagagcacggccaacacgaggctctaaagctttccagtttcttcttcatgccggagcggccacgtgattacctcgtgcttttcacacgtttctccgtcctcacgtgcctcatcgtctccgtatctcttgttctccgcgccacttttttatccccttccgctcgagactattccaccacctacggtctcaaattaaccgccgtacctcaaaaagccatagctctccctccgtccgcatccgtcggaccaaccaatatctcccatatcttcttctctatcgccggagcagctgagacatggatcgatcggagccagtacatctccttatggtggcgaaacacgacacgtggcttcgtctggctcgatgaaccggtgaaaatccctgaaaatcactccgatgtcagattctcgatcccgactcgagtttctgatccaggctggactcgattcaaattctccagctcaagagccgcggttcgaatcgctcgtataatctgggatagttatcggttaaatctaccaaatgtccggtggttcgtcatgggagatgacgataccgtcttcttcaccgagaatctcgtcaaggttctctcaaagtacgaccacgagcagatgtggtacatcggaggaaactcagagagcgtcgagcaagacgtgatgcacgcgtacgatatggcgtttggcggcggtggtttcgctctgagccgtccattagcggcgcgtttggccgccgcgatggatgattgtctccaacgttatttctatttttacggttctgatcagagaatcgcgtcttgcatcagcgagatcggcgttccgttcaccgaagaacgcggttttcatcaggtacgtctgttgttatgcacgtgtccgttatctaattggttaatgtttatacacgtgtcgaaccgttttgagctagaattttggagcccgacaaattcaaaaggtttttattagatgctgaatttctcggtgatttaagtggattcttgccacgtggattctcataaacttatggggtcaaaaattaattatcactaatccacttgcttagtgttagtctgctagaaaaagcatgttggagtggatttattgaataaagtcacaaaattgttgaccaaaaaggaaaatattagtcattcaattatggacattagtacctttttccctctattcgacttatatatgttaagtactcttagttgattgcagttacagtttttacgttaagtactcttagttcattgcttgatataaatgctctccgaccgttttcccaaattttataagtttatttagttttagtgagtggttcttgtttgttgtggtccatgaatgtggcagaaaattgtttctaaattcgtgggtttaatttattggtggagcacatgatactgtcatgttcagatacatagcttttaatcatgtctagctactgatcagctttctgcaatgtgcttgttttaatctttagtgtccgctaaaatcttatactatttgatatttgttaatcatatctgtggttcttaagacatttatgtttattgttttatctctatgtgcgtgtcat

SEQ ID NO: 66857 - DNA, 374 bp, Arabidopsis thaliana landsberg
ggggtgctgcgagagcatagcggccagcacgtcgttggtttctgccggtgagcacaggtagctgggggcgccgggcttgatggcctagaccgcgggggctatgctggagtagccggtgaggaacaccaagcgcatctccgagtacagctccagcagcttggagcagaagcaccagagccggagtctgacgtctttttcaggtcgcgcacagagtagtcgggcaggtcttccttggccagggccaggccttcctcggcggacccggagaccaatacgcgcaggccgcagcggctaatggcccgcgccattacacggctgaaagtggcgtagtcgcccaccagcagcaggtggggttgatcttcgcctatgaacag

SEQ ID NO: 66858 - DNA, 562 bp, Arabidopsis thaliana landsberg
aaaaaaaaaactggtctgtagcagacgcgattagattttggatacacattcatttaacgcaaactcaaccaccatgctcgttctttgggtttcattcagtaatgaagcaattgtaaaacttgtgactgttcttgtatcgtggaaatatgtctatttacttatataatcaacacattcttcttcactatgggttcctcaagtgatctgtgcttttttccaatggttttgaggtcacattatctagctgagtgcctttttctcagctactgtctcattttgcctcgtaatctaggtttcgctcgtggaagggaaagtctctagtatcgactgtcccaatgattatgaatattcaggggacattaatgtaaactcttgttgactataacatgttttagtggacacttatttactcaaacacttgtgaagaggccttatttcttttgtgatacatttaggaataacagactgagttggctgtagccacacaaacacgcggatcactgtaacaactgacaagaagggtgacttcatattggaacttcccttgaagaacgaattaact

SEQ ID NO: 66859 - DNA, 581 bp, Arabidopsis thaliana landsberg
ttttgggacaccaccaggattacatgggcggttttatgttttgcacccaatagtgatgaaggactgtaatgatgacaacttgttttctaatcaactgaaggatcaaaagtgactaaggtattgtctcttgtcaagataggattgggttaagttacttttgagaccacaaagaggagcctttgtgcattgttatcttggtcacttggattaagggtgtctccttgttcttatgtagcatggtgacgtgagagagattgaagcaacccactatttatttataatgagggtgagagactaacacatagaacgctttatctttggggtgggttttaccattataacataggtgcgatactgattattagtgtgttagcgtggtagcttgtagctgatttcacattgtttaatctcaaggagctttgactttgaatgataggtcatattatattcgcagagaaattaacatttgacataaccttaatcctaagaaggtggaagtattgttttgatgagaaatgccaaactgagagcttaattgaacgaactgggtaattctaaaggcttagtgagaaccaaacttg

SEQ ID NO: 66860 - DNA, 1983 bp, Arabidopsis thaliana landsberg
  unsure (1)..(1983): unsure at all n locations
tagacgaagtgcgaggagaagtagaaataaaacataatctgataaattctttctgatctgttttccacttttgtgactaatgggtcataggcaatacgttttttaaaaacaaaaccatgtaataacccaaactaatgaaaaaacagtaaacaacctaaaaaaagaagcattcagcattctctctataagcattttggccatatatagccttcactgatctaaagtgacaacacatgaggacgtgcgtgcgtggaggagcttcaaaatccctgactaagaagacaaggttttcaaaccagttcacctttagactcaaatggagtctgtcccaagcaatggttggcttaagtttgttggtgattccgctgagcttacacgctctaagcaaggttgatgccggttatacgccgttgcagcatcaacataatgtgtttccatctccccattcttttcatcttcttcgtctatttcaactgctgtctacaccacaaaaacacttatgtagatttaaaaaaacaaagaatcccctgaatctatccatcatttcctcaggaaagttgataagtacctgtatagggaaatgtttaaatgatgggaggaagcggatcttgcagtattcgttataagctatagtgatcaatatgagaggtactgtagcaattgctgcagatggctttgatttaagtccaaaaagacccaccattgtgatttgcattagtattattgagacaaatatataatgatgaatgaatggccagaatcgaccgcaagtatcatatgtagtctcgtaaacatcctccatctgacagaaaccagggttaatataatgcaaaagtagtatgtgtgaaagaggttataagagaatctggacctgattgaagtagacaatgtatccaaggcagaaataaccaactaggaaagggagcatcaatggcgcaaccaccgcataaatcataccgatcattatcgataaggaaactgtggggataactctaaaatatggaaatgaaaagaggtaaggagttctctcttttcctcttccataagtgtatgatcttatgatatcaaatagtataagtcccaattgaagaatctccaaagaaaatccagacagcccatctgtcaagatgtatgtcataaaaaactctgcctatatatagaaaagaaagtgaaatataagttactattttgagaataaatttggttttggattgagatagatttgaagagtgtataataggccttaacctgggctgaaacagcagcagcaaggtgactaggaatgtctctaggatgagtgagatattctcctatttcatcaagcaaggaaccagagataagactcaagaagaaaacatttcccattagaaaatagaagaccatgttgcaagcttttatctcctctttactgttggaaatagagccgccgagataggccagtccaagcatagcgaaaggaataatgtacatgaaacctttgagtatagcacttgggaggtaacctgtcacaactgagctaagccctggtctgttgcaaataacaaacttatcttattgttttggaatcaagagaaaaacaataatatgctacgttatgagaaaagtaatagtcaaggagaagagaaaccttacatgaattcaatagccatggctggaggaaaccatttcttaagcttctcatactttgcaattccctggacagctgtgaccggaatagcaaagaagattgtaagaagtgctgctgcaaggatgactccgatcttgttgagaggcaaaatcttttgtggaatagcaagatttctccaggatacatctcttggttcaggagccatttcagttatcagttctagaggatttgagtgctgctgtgtttgagctgccaacgcggcatttcttcgggatttgaaggtgacaaacgcanacaggtaactcttcattgaaaattacgtctatgtaagaaaaaaacacatatatttgtttaac

SEQ ID NO: 66861 - DNA, 1353 bp, Arabidopsis thaliana landsberg
ttctgaactatacaagattgatagaatatcatttgaaagctttcatattataacttttaaggaacccttgtagtcacacgtttgatttgatataaatacacatgtatacaacgtataccaccaaaaaacaaaataaaaaatgaaagcaaagttgtgggtgattgcttctcttttggctctctctttgttgttttcactcaagacgatctcagctgatcaaccatataaatttcgaaaaatcagtgagtatcatcaatatttgtcatccggtttgtttcatctatattaacgtatgctaaagccaaattaaggaatctgtcttcgattttaacaactacatataaactcaatggaaggacctcatgttccgtactttattttttgtagaagacgaaataagagaaatgatccatattcacaagacaaggaagattcaaacaccagggagtgtgacaacgcctgcgggccaaggttcaccatccagtgtaggttccccgcacgccggttgatatggttagacggatcagccaatcacccaatgcatattcgtacatcgtttttgtttctttttgttctttaagatttgacattaaatattgtatgattaattatttatgcaccccaaatgtaaaaggacagtccaaatccagggaaaaatcaggatttttgtttgacttgtacatattttgtttgaaatgctgacaaatagagtatcttagctttatcgtcaataaatgaaaacatagtaaacttacggaagtataaaatagtttagtatcctttgacccaatatagcgtgtataacatagctatttcttgacttatatgattatatcagttattatattatatatgtagaatatgtttatttcgaaagtcttctgacgcgctacgtgaaaacttgatcaataagttatgattaaaccaaagttatatatttgattgatatatatctatactcatgtacaatataaggtatcatccagaaaatgaaggtcaagttctgtttgattgcttcccttttgattctctctttcgcgatttcgtcatacgtcgtctcatacaaatccagtaagtattattgatgtttgtatatcatcctctttcctaaatatgctaaatgagaagctatgtaattataaaagaaagttagataacatttagctactttttgttttttacatgtatgcatgatcagttcaattttttgatacctaatgaaaattgtatagaagaagaaacaatagcagaaacgattcacattcgaaaggtaatgaagatcagagtacctcgtagtaagtcaccacccgatcgaaaatgggtaaggtgactgcccaaccgcaagtccaaatt

SEQ ID NO: 66862 - DNA, 878 bp, Arabidopsis thaliana landsberg
tgtggccaaaatattgaaaaaatatagactgtttttttaaagcaaaaattaagttagagtagttaaaatcaaccaaaaaatttttaagataagaatttttttttttaagcaataatataagtactttgttttggtaattaaaaaagacccccggatttctttgatccggcttaagcctctaaaaaatgcttaaaatgtatgttaacaaaaatgcaaaagccttaagatatccataattgatgtaaagaaagctcttatgcaaaaagtgtcacgctcaatatttaccttttttgtgtgttttaatcttatatctttactctattaagaccagaacactctgtttgcttgaataacaaacaatttaacaataaccaaatattttgtcatttcgacatatgtaaggaacgtgagttggtttatactctataaggaaaagagttaccaatgaacaataatttcctaattaaaaattagtaaacgttaaaagtatttttttgtcattccgacatggcctcgtttttttcctcgaaaatttagaaataatcatattatttttacttacaaaatacatatatatatatatatatatagatatatataactatagttagaacaactatattgtcgtgaataggtaaatttgggaatcgtgatgatatataatttggatccgtagattgtaggtgatgcatttttgtacctaatctttaattccaaaataagtggatagctctatatgaaatttggccctactttatttgacatgaccttttaaatatttgaaaagacatgagacaatttattttattttataaccgtgatataaaaacaattgtttgtaagaccattacatacaacatttactaaatatgagtctc

SEQ ID NO: 66863 - DNA, 578 bp, Arabidopsis thaliana landsberg
agcatgcactgctaaacaaaagtgatcacggagagctaatcacaaccgtttatttagcatttaggtccacttgcaagttacaacttaaaactttggttggtcactaaattattatgggtcctgtgattatgactcttcatcatctaaactccgttaataaacgttacctttaaacccaattagcgtcaggaccacgtcattctgtcatcttatttgtcctttgatattttgcagtagaataaatatcttaatttggttgaatgtcaagccaacattgtaattgtaaccaaaggcaatgagaatcaaacgatgatgtgagtatgtgacatgggaactagaaaagcaagttcctcctttatgggcccattaaggcccaactaacacgtggttacgtcaccattattagttgaacacgtggatcctacgatttttacacttctcttgactcgtagccacgtgtacgttaatgaatcagctaacaactaacgtccgcctcacgggtttgttttgattctttttattaaggctttggttttgtgaacaccggttctaaattgtccgtaattttttttttcttt

SEQ ID NO: 66864 - DNA, 515 bp, Arabidopsis thaliana landsberg
gatctcgacaaatatcgtagaatctgtgtttttacttccgaataacacgagttagagatccgtttggaagatgatagggttttctcggattaagttcttcgaagaaagttaggttttagggtttatagatcaattttgattgcttccaagtttttgtgtctgatcttaacctgtgtcattgttataatataattttttttcatttcaggctggtgatgctttgattcagttctatcacaatttcatcactgactttgagacgaagatcaatcttctgaagcttgcgcattttgctgtggtggtctctcgacagtactctgagaaagaagctgcagttagctatcttgaaagcgtgattgagaaacttagagctactaaagggcctaggatttctgcaccaatcgtttatattgtaacacaaatagctgccttcgagcttgatcaatgggatcacaaagagttcgccaaaattttggacgatggaaagagcctctctttgaagtttgactgacatt

SEQ ID NO: 66865 - DNA, 654 bp, Arabidopsis thaliana landsberg
ttctcttttttttcgatttgttttcttctttttgtcaaaattgaatggaaattaattaaactgaagaaattaattagatatttttacactagtgatgacgagttgacgacaatataatttaggtaactagagaggatcaagcttgttataaatttataatatctaacatcaaaactaaagccactgaaaaaaatgataataatcaaagcatgtcatatcctaaattacatgatgatggcaaaaataagaaatatccgacgatagtgatgacgacaatagaattttgcaattgtctagagaaaaatcatctaatataaattcaagccattggcaaaaaaatgataaacgtaatatattcaggatcctttgttgcatatcatacatgccaaggcaaaaggaatatgtttccaattccataggggatatggcccaaaatttggcccgcttatgaatatgttgtacttgttccaggaatggaaactaaataatttagtttaaaatctttttctagcgtacatgataaccaagaacgcacatatgaatatactatatagggagtagggaccccacacatataccatgaagtttgttgacattaacgtttgaagaataaaagaattggaatttcaatacaaatgaatcatttttgggaca

SEQ ID NO: 66866 - DNA, 670 bp, Arabidopsis thaliana landsberg
ctcatcgcctgttccccaatcctgtcgcactgtccgcctggccccgtgccggcgcgctggactttaacgcggcccggcgcggaccgtcgcgaccggacgggggcggggccggatttgctagcctgcgttccgatcttttgaaacccggaaccgaaccgatgaacccgctcgttaagtacaagctggacgctggcgtcgccaccctgcagctcgacgacggcaaacgcaatgcgctgtcgccggcgatgttcgaggcgatcaacgccgcgctcgaccgcgccgaggcggatcgcgcgatcgtcattttcaccggtcgcgaggaagtgttctcggccggcttcgatctcaaggtcatgaagggcggcggcgtcgaagcgctgaagatgctgcgtgccggatacgcgttgaccgcgcgcgtgctggcccatccgtatccggtgatcgtcgcctgcaatggccacgtgctggcgatgggcgtgttcctgatgctgtcggctgactacatcatcggcacgcggggcgacttcaaggtggcggccaacgaggtcgcgctgggtctgacgatgccgcgcgtcgccgcggctatgctgcgacatcgcctgcaaccggccgcttatcagaccgccgtgacgctgtcgcgctacttcccggtcgatgccgcgcgcgaagc

SEQ ID NO: 66867 - DNA, 534 bp, Arabidopsis thaliana landsberg
  unsure (1)..(534): unsure at all n locations
aggcaaacgtaaggaatgttttaccacatgtacaattctatgatataggattttatcatacagtcatatgcacacaagaagtcatttcctagttgtacaatttataagtctattacgtggaactgatgagagtgagcatataagtgtagttgaagcatccaagtttacaaagggtccattaaccaaaaaagcaaagcaaaccaaacacggttagctaaaaagaaaattgtactttaggaaagaagtgggtgattctagtgggtcgcaccaacgcatttcgtttgatatgttttgttttaaattcttacagtcatttagagactagagagatcgtgttgaactagagctatatagtatcatttgcagtatttttttagttaannnnnnnnnnnnnnnnnnnnnnnnnnnnnnnnnnnnnnnnnnnnnnnnnnttttcaacacgggggtttgaacatgttaactgttttgatttttcaaatctaatgaaagttaaaatatcctttgattttaatctattttaggattctataactg

SEQ ID NO: 66868 - DNA, 1451 bp, Arabidopsis thaliana landsberg
ctcgaaactttaaagcttcgtccacttttcccaatttccttaatttatgtaagaatgcaattatatgcaatcacactcggtatagaccctttagccctctgtctctctaggagactgtatgcttcatcaaattttccagccgaaccataacccataatcatcgtgttgtaagcataagtgcaaggaacccgtctattcttctctagatgctcaaacatctctacagcttcatccaatctgtttgccttgcacagaactcctatcatgctggtataagtgacttcatcaggctttaaaccattcgcttcaatctcatgaaaaaatttccatgccatatcaaccttgcccactttaccaaagctatcaatacatacattataaagaacaatgtcggcatcaagagagctgctcttcatctcatcaagtaaagatagagcagaatcaactcgaccctctttggcaaatccccgaatcaatgttgtaaacagatgaacggtcggttcatatcctaactcctgcatttgctgaaagagtgtcaacatcatatcagaatgattaactgccgagaaagcaccgataagagttgtgtaagctgaaaaagcaggtcggaacttgaacttcctcatcatctgcacaacatcataaccttccctaagcttattagccttaacgcagcccaaaaccatctcaatacaagtgttaacagaagggccaaatcctgcaacactcatttctccaagaatctggtccaaagcatcaaaatttctacaacgagccatcaccaaaagcaaggagttgtatgattcaggacaatgaggcagctcggttcttctctcataccaacggaaatactcaatagcccgattaacatctttcagcctccgtaaaaccccaatgacaaattctggttgtggtttaaaacttagagcagatagagtattctcagctgaaggtccccatggaccagtctccaaaacattgcaaatatcattaacagtttgcctattaccctcaaatgtatatggtttctcatgattttcgccattatcagataaagatgataagttcttacaaactgtgacaacacgagatgattttgtatctgtatggaatataattcctgcagtgataagacaaaaataacgcaaatcaggatcaaactaatgagcggataaacaaaaaaaaaaaaaacattttgttctagcgaatcccaccatagaatagttcatatgggagttatcaacctccaggctacaatactatgaagaaacgaccagaattcagctcaaaatcgagcaaattaaacactgaaaattttcagaaactgaaatgcgcatacacagattacctggtcttaatagcatccgcatcttcctgattttcctgttccaaatcaccgatttgtctcaaaatttaacacgatcgaagaaagatattaccttaaaagatcc

SEQ ID NO: 66869 - DNA, 2156 bp, Arabidopsis thaliana landsberg
ttacagatccaaattcgccaacatacacaacaactcgacaccaagcagcaacgtcacgacgatcgataataagatatatgaccactgacatgcttactttgctagggttctcttgctcgagctttctttctttgctgcaacgacgctacaagtgttttataaaaatacacacgagcttaccatggttatcacagatggtactccgcaccctcttcgtgggatactcgcaatgtttgatgacttttctcgtcggacgtcagggctgaatataaatgtgatgaagtcttctttatttgcagcgggaagaggaaaacaactactccaacaagaagcctaaagtgttggtcttgcagtttgtgaactaccaatccgttatctaggactgcctctcactaccaaagctctagttatccgttatacacctttacagattgaacctttttatacatgatctcatagttttaatcaatttacatttcatcaaaaaagaaaatgggcataaattttctatcatagttaaatcgcacatgatacacattaattacagctgcaacacacctccaatactttcactttgaaaagccttttcaacaagcgggttagaaaaatcgatagtatattagagaaacttttgaaagcatagcagatattactatattagtaattataaccgaaatgattcatgaacaatacgtttgtcgtacctagtgaaaatgataaggcatcaagtggccagtaactaattagataggaagcatagtagttagagattggaaaacgtgttttggactattttgtgagtaagagtttttggctagaggagagtttaagatctctacattgattgattgagtaacaaagatatttttatctttaacgttccaacatcattattttgttttttgtacgaacgtaattaacaaacacatcaccagacatttcttgtttatataaacattctgaaaacatacaaagaaacactgagattaagtaaaaaataaacgaatgttgcaacagtaaaaaaaactgaaatgcaaagaagcagtacttacaaaggtcattaaaaccaaaataacgcgctatgatgaactcaataaatgaccaatatggtgttggcttagtggtaaatctctcaagtggagggatctcttctcccaggtaatgaatttaatctggtatagatcttgcatttgggagatgtatagctcttctagtttgaagttccatatattcaaaaaaaaataaaaattaactcaataaatgtagacagccacaaatttaatatcatttgatttaatttattttaattaggtttgatttaatttaatttattttagttagattagatctcactaaatttacttaatctattttatttttttgtcatcaatctagtttttattaatatcatttttatcgctatgctgttcatttgcatgttgtggatttcgcgaccaatcgtaatgctaatcgttgatgatcgctgaaaattctagcaactgaaaattgtgatcattggtcactggcgacagtcattaccattaatcgttgaactatcaacatgcaaacgaaaaaatttggttgctacggctagtttatgttgccaataatatacaaacgaacatgcctatagggatgagtcattccttgacaacaaccaatactataatataatttttaatataattttttttatgaagtttcaaataccataatatttaaaattttaaaatatttgaactctgtaaaacatttaaattatttttaataattaaaatctaaaaaagaaaaatattaataatatttgagttctatatatacatattataagaaccatttaaaacaaactgttaatgtgacttgaattctaaattttttaaataaaaatataattaaaacaaaaaaataacaaaatattgtttaatatcaaaagacattgttatattataggatgaatttgaatcgatattaatatgtgacaatatattacggataaaattttagaactaacaatcaaatataattatataatattaaataataaataaaacaaatataacttaaaaaataaattttatagttataaaaaatcaatcagcggtacacctactattaaatattcttgttgtaaaagaacgtacgtggagccaaattat

SEQ ID NO: 66870 - DNA, 585 bp, Arabidopsis thaliana landsberg
  unsure (1)..(585): unsure at all n locations
taaaacaacaaagaaagtataagagcaatctcttagcacttaggtttctgatcaaagagacgtgttcttttcggttcttggtaaccttcttcatcatctttagattcctcaactttgttgataccatcagatccagcttctttaagttcattgatatgtgctataatcaagaacacacaaacaaactcttcatgtcaatattttgatccaagcctcttccatagacataattatgagacttttaagaaaacagtgcaaatacagagtaaaggtctcgacttaccttcgaactcaagttcaatatggtccaacatacttgaaggtnnnnnnnnnnnnnnnnnnnnnnnnnnnnnnnnnnnagatccaaagtagaagaaaccagatattaaatttcaggagtctttaaaacatagtcatcctaaaccaaaatccaatcacaaaagttaattcatagacaggaattaacctcagctgatgtatcaacagattctttaagagtttccaatgcaggttcttcagatagagacaaagaaatagtgttgttatcagacactgtactggttttctgaccactggtctcagctg

SEQ ID NO: 66871 - DNA, 466 bp, Arabidopsis thaliana landsberg
attgccgtctcaagatcatataccatcaaaattgatcagttatgaatattgttcagcacatgcatgctttagcttgacatcagtctttggagatcacttaacacacgtggaaaattctcatgcaaaactaaagttagcatcaaattttattttgtatacatagggcaataaaaatcttgtagaaggcaaataagattctttctttgtatgttgaaaagcaaatacgcgatatcttattatactaattccaaagtttatctgtttaattttcatactcttttttcttttcccgttgtaaaaagagtatgaaacttgatgaacagagaaattttggaaacaaagatatcttaatctcttttggaatggatctatacagcttatataacattctttatctttagtatcaatctagtttaacgtaatagacgcactattttgtggatatctataagttacacttattcaa

SEQ ID NO: 66872 - DNA, 646 bp, Arabidopsis thaliana landsberg
atatgcaataatcagaagaagaacctaaattaaaaaaaaaaattacaagaaaaaaaaagagaaatcattgacgaagaagactgtaaccaggataaaaacaaatgtgccgatcagatctccaatcatcacgcgtctgttaataatctgaatagtcaacgctaaaagatgtcttgagtctgtctgaccagtgaagtaaactactactacttgtcaataagaggcggcaagcacatcggacggtccttgttttccctgttaattataaacggtcaccatctctttagacataatatatactactagtagtggagtgtttttgttaattaaagtgattaaacaccaattctaggtgttaaccaaaagataaaacgatacagtaaatatattcttgtgaattctatagtatcataatattattccttttttatttcacttttgataactataaaatctttggcaaactaaaatatcattagattattcctttttaaatagctaaggtataatttctgatttagctttgctatcacaatgttcaatttgtctaaagatccgttacctctctatgcgagagaagctgtgagagagtttcccacaagtaactaggagatcgtaattcttgtctgaaaaacaacctttttttatt

SEQ ID NO: 66873 - DNA, 513 bp, Arabidopsis thaliana landsberg
agccattcctattggtgagacgttaattgatttcttaacgcattggttctttttttattgattagtgcaacagctcagagtgtgcagactatgattgtgggacgtctgctcgctggaattggaattggaatctcatcagcgattgtaccactttacatatctgaggttgtttaaatactgattttcattatttttgcacttttagcataagatgttagatttgtttatatgttatgtctctgaagcgtttgatgatggttgtcagatatcaccaactgaaatccgtggagcactcggatctgtgaaccagttgttcatctgtataggaatacttgcagccttgatagctggattaccccttgcagcaaaccctctatggtatgtaacatcccttttttattcatcatcttttattttgggttgcatactgtgataagttttgatatcgtggtcttctaggtggaggacgatgtttggtgttgcagttatcccttccgttctattggccatagg

SEQ ID NO: 66874 - DNA, 308 bp, Arabidopsis thaliana landsberg
ttcgaaaacagatgaactgctgggtggttacggagattatctgcttcatctggagtaacaacggcggagaaactatggaagactgtgtggtaaacatggacgattcgagattcttcggcgaactcggtgctataccaatggtagtgcgtcgggaaaatagaaggcatagatccaccatcgatacggaaaatgaaagtcttcgcggcctgagaagctgcgaaagagataaacggaaaagagaggaagagaagaagaacgatggtggaggaagccattgaaggagtggagcgagtgaagtgagtgggggg

SEQ ID NO: 66875 - DNA, 429 bp, Arabidopsis thaliana landsberg
tttgcaccgaaccaaaccaagcaaaacttagccatgtgaatttaaaccgttcccaactgaaccaaacgaagctggaccaaacatctacacgcaacccataaactttactacaacctgtatggtacgaggaggttcggtttaactaacattataacggtaaattcttaagcattgcttaatatcatatgcaatatacaatgatctagcctaagttaactaattcttgtaatattaaaacaaacaatctgcctaataattaaacttaaccttatatgaaggccactgtctgatggagacgcaaagatgccatgcacacatcaattacatgtgggacaactgataaactgagaaccatggtgtaacctatctcaacaatgttcatgcaatgtgcaaggccaatataacgctatggatatagatgaaaattac

SEQ ID NO: 66876 - DNA, 604 bp, Arabidopsis thaliana landsberg
agtgtacttgcagatattgattcggtggtggccccagagtccccactctgtgctgaaagtgtgaatgtgcctcctgagatggttaacgtgagctgcatgaacttattcaggaagatgctcgtcttcttgagtgcttgtgcaaaatccttagtaagaagggttatgttcgtcttatattcctttgggatgatctgttcataatcagggaatatgccactcacaagccgtgaggttatatagatattatcgacactcaaagcgcattgattctcgctcacatacataattatgtctcctgaggtgagttctgcgacccgagcaagctcaagtgcgttcttaaatggaatgagtatcggatcggtaagagaaatgtttttttgtggaaccgtcttctccataagtcgaaacgagtcagtggtcacaaatgtgagagaatgttcttttttttggtatatatagacactttcaagctcaggtttgattgaggattgagaagctgtggacgcagtcgttttactcccagtgcgaataatgatccttggagagtgatagggttccctgcttgttttgggattttgggaactcatcagcaggatggtcttga

SEQ ID NO: 66877 - DNA, 325 bp, Arabidopsis thaliana landsberg
gcataaaaataaaaattgaattacgaacggtatctcattcagacatgtagtttatgtgtaaaactcaaaatcttcggctttcaaggatctatataaaatgtctaacatgatacacgatatatgtgtgcatcgcattaggaataatcataacttaaatcagatagctatacggaatatatacagatagagcctatctctcagaaatactaggttggcattaagtttctgaaccagagtcattttgggataccgtcgtcgtgaaacttatttcacaacggctctccggaatatcagatgatatcgtgctcggcaactggggacgaca

SEQ ID NO: 66878 - DNA, 1631 bp, Arabidopsis thaliana landsberg
  unsure (1)..(1631): unsure at all n locations
agaacgcatcgctgcttataacagcatccaaaattatcagctcagaaggtagattccctggagcaagcttaagttggagctgcttagcagctgttacttgtccgaactccagtaaggacagaacagctctttccaactctgcaggttctatactttcttcccacttcgataaggatatttccaaacccgtgctctcctcttgaagctggaactcgcttttgatgtttataagagatgaagaatcttcaaagtcagtattcctatctgaagaatccacaaaatgtcttatttgtgggacatttccttttgctctcctcttgggcttagtgctagcaccaaatattgaagtgctcgtgtcttggttcctttgatttccttggccagcggccctggcgtcatgtttttctccaattctatttttcgttgctgaagaaatatggctgtccatttttgttatgatacttgcagttcgatctataagatttgaactatatccattcaccatgtcttttccgatactactcggactaaatgctccgacatttttcacatgtgattctgcttctacagccagtaaccataccctagtctcgatttctcggagaagatgcaaaggataaaccctggtattggtaaaataaaagtcataaacctagtaaaaatgattacatattgtggtgcaagatcacttacgggtgcgacagagttgttagcccacttagccactgaagggatagcagtaacagctcatagatctctcttgcaggaagatctttctccaccacttctgcatgcctaaggaaaaataaacctgcctgcaaaagaannnnnnnnnnnnnnnnnngtatcaataacaggctttcacataaactggttacaagtgaggcaaacagaaaagtcacctgtaaagcagggaaagagtatctgatgaacagagtttggcagtgaccccacaatgcgattctctcttctggaacatcccaaaggaattctttccattctgcaaccatggattctgcctacaggtaaagcagatacatatatttattaagattgggcattcaaggaagctagtcttcgggctcaataaagaagcagataatttttaaatacaaagaaaacgtaaatatcacatatttcctacacaactgcaatctaagaacctctacaaagcaattcacatgtgacagtgtataaccaacatgcagtgaaagagaactcgtcagcaagagacaaagaaaaacagcgtgggaaattacccagaaatacctaaactggtcaatggtctcaagaccatgattttcttaaagttgctaggccttcagaatccaaattgccagaaactttctggcagttcaagtataagataagcgtcaagaagttttcttacctgtgtttcagtaacatgatgtacagaggatgtccaagtggcaccaatggtttcaagttgcttggcccagtttcttgcttgctcccattgcctgttcttttctaaagctgtcagaagagagccatcatcaagggactcatttcctaagtcaagatcattctcccggagtgatggctcagccaagttaactttccaataaagacgccgataatatgttgccgcagatcccccatcaccaaaa

SEQ ID NO: 66879 - DNA, 913 bp, Arabidopsis thaliana landsberg
ggagaatgagttcgagctaaggttcacataccttaaactcaccaatgctactaaatcccttcaggttttaccctttagaagttgtttccctgcaatgcaatcacttgcacgttgggcaaaccagagagctcaaccggaaccttaccagacatattctgcttgctcaaatcaagagctgttaacttaaacagattgcctacactagctggtatctcaccagaaaatccattcccactcaaattcaaaaaactaaggttacttaagttgctgatactaaccggaactgccccggaaaaccgatttccactcagatccagctcagacagacttgtcaacgccatcaattccaccggaaaactcccatttaagttgttttcacctaagtttagcctctcaagctgctgcagattcaccatagacgaaggaacataacctgagaagctgtttctgcctaaagataaaacctttaaagccttcatgtagccaagaaactctggaatctgaccttttaaactatttccttcgaaatctaaaacatctaacgaaccacattgcttaatctcaacaggaatctcaccagtaagagagttattagccaatttcagttcctctaatctcttcaagttaccaatatccggcggaatctcaccggaaaacaagtttccagaaacatcaagattctttagtgacaaaatattagtcaaccacaacggaaaacgaccggagattcgattttcctggagatccaagacctgtaaaccggtacgacagttcgccgtcgtctcaggccgtacgatatcggagaaagcattgaaccctaactgaacaatcctaagcgatgtgttgcagaagagagaaaacggcacagtaccggaaaaaatgttattggagagcgagagaacctccagtttcg

SEQ ID NO: 66880 - DNA, 536 bp, Arabidopsis thaliana landsberg
  unsure (1)..(536): unsure at all n locations
gaccgccaaaggatgnnnnnnnnnnnnnnnnnnnnnnnnnnnnnnnnnnnnnnnnnnnnnnnnnnnnnnnnnnnnnnnnnnntaagatgaggaaaagaaaaagnnnnnnnnnnnnnnnnnnnnnngcttttctcgccgtttagccagaacgatatctatcttgcccaggccaatccatccgcgccttttccggttgcgatcacgtcctgcaccttccagcccactagatcgatcgccgccacacgcccggtcgagttgcaggagacgtaagccaccttgccatccgggcgcatcagcacttcctgcggggcgctcggcacatccagcgtccgcgccaccttcatggtcttcaaatcgaccaccgccaccttggactccttcggaatcgccaccagcagccaccgcccatctcgtgtcgatgcggtgccatagccgagtccgggcagttccacccagctcttcaccttattggtcgccgtatcgatgacagcaagccggggctgtgnnnnnnnnnnnnnnnnnnnatcgagtcgtcg

SEQ ID NO: 66881 - DNA, 2330 bp, Arabidopsis thaliana landsberg
  unsure (1)..(2330): unsure at all n locations
ttaccctgaggctttctcttatcaagaacaggaaactataggttgtttcaccttttataattttgttgattcccagggaactggtcctgttcaagttcgatatgctgacggggagagagaacgcataggtaatcaacttccacacagagtatctaatgtggctgtcattgtctagtgttcatagccaagaccatacgctgcataagttcagattacaaaaattaagaaaatgtgggaaatgatatgaactttatggatgttgatccttttctttccctgttttctttgccttactatcaagtgatatagttctcttcttctgaaggcaccctagagtttaagctttttgttggttcactaaacaagcaagccactgaaaaagaagttgaggaggtatgtctcgtatcttactttttgaagttgttacttatgtcagattaacggaacagggaagagttctaaacttggatattattgtgtcccctgttacctgagttgantaatttaaatgactctttgataaattttgttagtcttaccaaaaggtgagtggctagaaaatctgtgtcaataatgcaagcgcttgtacattctacttactttgtaatctcttcttccaattgatccaactgtttgactgtcataatagattaaattaataaatgtgaacggctaccttcccagttcaagttatgtgtttcaatttctcattaatcttttaacaaactgttttattgttattgctttaacagatctttttacaatttggtcatgtggaagatgtctatctcatgcgggatgaatatagacagagtcgtggtatgttttgtaatttgtactagattctataaattatttgttgcgtgatgatgttgagatggtgaaactgtgtttttcactttgtaggatgtgggtttgttaaatattcaagcaaagagacggcaatggcagctatcgatggtctcaacggaacttataccatgagagtaagctgtgaatcacataagtatctcagtttctctcattatcaccctttggacctgttttgtttactggcctctatcctttccccagggttgcaatcagccattgattgttcggtttgctgagccaaagaggcctaaacctggcgagtcaaggtaatgccttgggtactatattttgattaatcctaatactcttatcaagtaaattgtatataccttcattctttgttctgtctgagttatatttgtggagaatcttttggacatggtggagagttgggaaccctgttccttctccagttattactggaatgtgaagcattgctttctagatatccttaagtagtttctgtttccagggacatggcacctcctgttggacttggttcagggcctcgttttcaagcttcaggaccaaggtaactggtgtgaaaggagatcatgattatgctcattaggtaattatatatgttgacttaccccggtctcctcatctctatttgttaggcctacctctaactttggtgactctagtggggatgtaagccacacaaatccttggcgtccagctacttcacgaaacgtaggcccacctagtaacactgggatccgtggtgccggtagtgacttttcccctaaaccaggtcaagcaacattgccttcaaatcaggtgagaacaggttgatgatcatgtatatcatcttaaatctgcacattcatataagtaagcgcatagagtttgcatgtattgtgcgagacaaataaaaagaaagtacttcatatactgcacacatgggcttatgacaggtgaaaagaagcatgaagttctgacctttcaacttttcatataatgcaacaaacacgatgtgtgttgctcaaatgatatggccttaatttgcagtttgtcagttactgaggcaattttttttttgaataatttctagccctgatgtgagctttttaaaatgtaacattctatattgttagggtggcccgttaggtggttatggtgttcctccccttaaccctctcccagtccctggagtttcatcttctgccacattgcaacaggtactttagctatatttttccaattaagcaaatctgaaaatgttgtgatgattaacttggattttcaattgtttctattccatagcaaaatcgggcagctggccagcatataacaccattaaaaaaacctcttcacagtccacagggtctccctctccccctccgtccgcaaactaatttccctggggcccaggcacccttgcagaatccttatgcttatagcagccagttgcctacctctcagctgccaccacagcaaaacatcgagtcgtc

SEQ ID NO: 66882 - DNA, 1180 bp, Arabidopsis thaliana landsberg
atacgtcagttatatctgagacattcaccgccatgtattctagctcctgtcagccctgagccaaagcgattaatcctctttgtgagactaagccttcttcgtcctccattccttgttcatctgcaccgcgttcaatcctcagccgcttcaactgcttacagtactgtgcaaggacctctagacccctatctccgattacattccttgtctgaagaaaaacaacaagtgttgtcagtcttatatagatgtaaagactaaagagaaccaatattgcattcatatcccttatctccccaaatatttcgtgaaaaaataggaacacaatttagtactaaggacgcattcccaagtatgtagtaaagacagcaaagttaaacgtttacctcgagaacttccaaattaggacacttttggataagcgtacaatggtcttcagtttctagcaatgcataaagcaaatccagctttcggatttgggccgcgaatggaaatagtattggcatttcattaggtcccatgtaagagagaccaagccgacatagttttcggggaaaaaccagattcatgtacttctcaggcattccaatatcctcattcaaggagccaccacaaaattcttcaagattagctgcagccttaaagaacccaactagttccaaaatctcaaagtcaccgaccttcacagataccagagagcggcaatttctagctatggtttccaagtctttgggactgattttggcaaactccgtcatgtagaagtttaaaacctcaagagatgtgttgtgctgagcaagctcatgaagccacttaccatccttttcactaaaagaactctcttccattaacaaagtttttattttcctggacaagacaacagacagttgcatgaataaagtgagaaacaactcaagatatttggatttcccgctaaaactgaatatgaagaacagcagcagccgaatcaaggattcaaaaaccaaataatacacataaactctggcagactgaagatgtcagaaatcaatctttttgctatttatgcataaacaaagtgaatgttccccaaagagggaaaaaattggttgtagataaaatccggaccaaagtttatacttccccaattgagaaataaaagaagataattgcaatttctgctttaatagcaagcataacagtg

SEQ ID NO: 66883 - DNA, 633 bp, Arabidopsis thaliana landsberg
aaaactcgagactaaaaatctttatatacaaacctgttttttgggtcatatcatattggctccttcaggactctaacagttgttggacaatctgttctctggccagccagagagtagtaagccaatatatgagccggatgctccatctctcttatctctccttgttgattcacttccgggactcttcttgatggaatcagctcgatgttccagtacggtctagccatctgcattagatcttgtcccgtcatcgatgctctgtaaccttgtacccacaagtatctcagtgaaggcaattttgtaaccgctgcagcgattgctcgctcactgaagcaacaacctctcatctctagcttctgtagatttggacagcctcttgagaattccattaaaccttcatctgattcacctacgtaacccagcagcatccatctcacgtttggactgtactgtccgatgtagcttaagcccaagtcggttaagccgccttgtctcagatagaatgcaaatcgtctgagtttcttgcatccaatcaaaagagatcggactccgttgtccagtggcagatctgtaatcctttcttcccggtcgagtaagacaaggcggaagtcacagaggtttttcagatatgtg

SEQ ID NO: 66884 - DNA, 529 bp, Arabidopsis thaliana landsberg
caacatcccaaaatttagtatgatatggtttttctttaatttcaacttttctcatcagattcttgggtaaatcatagagaaaaatgtataaaagagttgtattttgaggttccacgataacctctccggttagagtataacgtatattatgaggtaccaagataacctcattgtttctagttgtacctgctaccctcaaactagtgctcttgactatatccatttgagaaggatgcactaccaaagtcttctccgaccacatattcttctctacatcttccataacccataggttcatcgtacattctcttttaagatcggaaagatttaaaagagctacttttccatagtattctatagggttagatttaaaccaacggatatcttcaggtgcttggagaatactgatttcctcagaactaaagtcgaaagtcacaagcataggatcaaacttctgtacccaagcgaggtaatgcatacgcccgttgatacttatatatttgtgtataggaagatggggagatgggca

SEQ ID NO: 66885 - DNA, 561 bp, Arabidopsis thaliana landsberg
gatattaacggacacaaatgctcaaggagcaatgaaaagactaattggtaattaaaaataaaataaaaactaataagtaaattagagtgatacaaaacagcaaaaatgagagaaaagagtaaaacaatatgcgtagaattgagcgtcggtacatggtgacaagtggcatgggaacatacggcacaacacaatcggcctgcgtcgatatgagtagatagagtcatgtgatgttttaatctgcacttaccaagagaccgtcttggaatggtaaacgacagtaaaagcaaacgatgagtcatcaacatcaattttacttacactcattctatttcacattcacacacccacgaaacttctgacactggttgacgtttttcaaatcatttagcgacggtgatcacgagacaagattggaactcttgtgaacaggttcaggtacttcttatggtggcaattaaaacttaaggtaattttattggcttactacttggaacaacaattattagatcttaaaaatttggtttaagaaaacggattcataataggtattcataccttttt

SEQ ID NO: 66886 - DNA, 322 bp, Arabidopsis thaliana landsberg
cgctttttttaaggatttgacgacggaagagccgtatcttggtttcgtcccttgcaggcgatcggagattattgaaatagcctgtctattcaagatagacgcgtgttcacaaaataccgactcaattcatcctatttcatcagatctgggatgtgatatcgcacccaaggatgaactggatatcgtcagatccaataagaattcattgttggacaagcacgcattttttcgagttatttcatgtattccatgagacgagatgttggggggattcacgttacgccactagtcataagatagatttggagcaaaggcagatcta

SEQ ID NO: 66887 - DNA, 379 bp, Arabidopsis thaliana landsberg
  unsure (1)..(379): unsure at all n locations
caagcacatcagggcgcagacgcagaccaccaaagggctggcacaagaacacagagtcacggccaaagggcacccgtggtcaaccgggcggcagagccccaagcaccncnccggaccagcaaccaccagacaagaatactgttgcccaccaaattgcgctcatgagaggagggggaagtaagaagagcagcgagcgggggatccttagagagatcatagcaaccaactcgaacacaagcacagtggcagcaaaagtcgagcaacctaaggaaatattgatctgagaaaccagccaaagcagatagatgcgaccatgctgcttgaaacgtctccggacatgcgtgaacgacggaatgacaccgagcaaaggaagaacaca

SEQ ID NO: 66888 - DNA, 522 bp, Arabidopsis thaliana landsberg
gctttcagatgaaaaaacatcctgctgtacagcccatcaaaccaaccccattcaacatatgtatgagcccctcgctattccacttactctgcatcagcgcagagcagaaaaaatcaccttctcagagaagacatagggaactgttgtcctttttcaggacagcaggatccagtcttcgaagagaacggctattttttcctgctccaagcgattccattcgactactcctgtgctcccattacccctcattccttcgttgccagcagaaacttcagtaacgcatcaaaatccttctgctcaattgtattcctgaactgatccggcatcagcgtatacttagacggcacccgctctttaatatccgacttggccacagaaaactcctgcccgcccggattcgcaaacaccaatactgcacccttgttccggcggtacaggccgctgagcaccttaccattcttaaagtagtgttatactgttcgaaagactgagaaatatatctgttcggagccaaaatcttct

SEQ ID NO: 66889 - DNA, 2472 bp, Arabidopsis thaliana landsberg
agagaactgcttgcatccaaatgataaaaaagaaagaaagtaaagtgcactctagacaagaccaccaatattttaaaagggccataaagaacggcttgtgtggtttatttatgccaatgattggcatttctattcataaaacaactactttttggaaacattaaaaaaatggcaagttttcgtttgagtgatagttgagatgcattgagcttggagggagctgaaaagttcctgaaaagtctttctccaactcctcctcctaagattgagtctgattttagtgagtcggttgccgtcagagattactccttcaaaccgaggtttgggaagatttttttgaagaatgttctacggtgaaatatgagtttgacctcttcttctctgatcactctgatccctctttgataatcatgacttctttatttcaatttccttttgttataaagtttaaattgaattcatcattctctctacttttcaacatatttcttcaaaacactcggagagcaaaatttatgagagaaagatgggaagaaccaccagggttttcaagatctttcttgacaacatacatgaaagtatcacctcatggagacttctaacaaaaggcaatttgagagttgacccacctgacattagtttttttttataatttcatataaggttaattacaatgattattagatgttttggtacaaaatttccaagttgaccacatgacataccatcatttcctttctttggccctttcatatttaagtaggtgagtactactcaccgtgtgggtttgattcatactttttaatttttaaagtttaccatttttttattttttatttacaaactacattagattattatacttcttcatgttgttaatttttttttttactaacttttctattttagtgacaagattaggatgacgaagttaagttattttagagagagctcaaaaacaaaaacaaaagatattaagatccttcgatacacccacccacaaattcacaaccacattgtaggcctaccacattgttactacgttaataaagttgagaaaaacacagttcaaaaaagatgttaagatcctctcatattttctttgctagataaaaaattttctgattcgtccatgtactcttttatatcatcggaagcattaagcccagtcaaggtttggattcggttatgaataatgaccattacgtaaacaaaaattcattaaatgcttacatgcattcagatatgaacaacaaccagaacatattgtatcaacaataaccagcaagtgatttaaaatggagtagaaatatgtttttaaagaattatacttctgctttagctccttaaagaatcatacttctgcttccaattttattcagactaaaacatctttataatgtaactaatattcagctatgaaaatgctccagtacgtagttgataagcttatatatttatttttattttcttataatgataaaaatggagtttgattcttcaacatgcaatagtatttgttcatgtttatgtaagtagtaagcaatactccttatccaccacacccttctttttgcaatctctttcctgcttcctctttgtactcatgactcggaacaatagaagtgcacattaacacgtcatagacaggtgaatgatgcgaagttctagatttctctaacaatagaagtgctaattcatcccgatgcacattaattttcgatcctgtgtctaggtcattctctattttgctttgtatcacaaataaatgaaatgagttaatcggaagcacattgtggtgaatcttaaaagatactaggtcggaacaatgggacaaaagtagaagcttggtatgattatatgaacgaccatttaagacttgttggggagttttatatatacgatatatcaaacaaatgaatgaaatagaacagaaatattgaattagacatagaagtaagaagagtgattggcgttgttgtctctggagagaatggaacgtgcctcaatgaccgaacgaggagcttccatatccttctcttgtagtgagttcccttgtagcctctgcatttctgatgcgaacgtgtcctcaattatctgcacaagtgatcacaaactcagtttcaacaccaaacacattctctaattatggtttagtgtttaaggtttttagttttaccccaagagcattagtagagcctttgtaccctacttcgttttcctttcttccttcaagaaacttcaataccacttgtgccattctatcccagaaaaggcggcacgaagccacaaatatctgacttgtgaagacatcttgcagatttgagactgagtccgtgatttgtaagcataaggtcttcatacgttcgcggacttcgacttctctctaattggctttaatctcttctaagaatctcttcagccttgtgcttttgtttgatggcgtctgaaacatccacacacacagagaga

SEQ ID NO: 66890 - DNA, 571 bp, Arabidopsis thaliana landsberg
catacatttggaataaacatgtccatgagctgacagaaaatggagccttaagtatccccgtatggatgaggcaattatactccaactacacatataaaggacacaattggttggagtttttttcatccctgtataacgacacataatcatgatcacatgcaacacaataattaggaatcctacttccacaactctatctatggtctgcattcagaattctgaaaactataaccaactatactggtctaaacatctatgacagggacagtttttacaaacctattgatgggacacacgaattatggatagtgaacatgcatggcctaacctaataatttattagtttaacatcacaaaataattattagcgtaacagctctttggttaaaactaatatgagcaacatttatcacggccattagataggttttagaagaactcattcaagggttcaagaaataatgatcttaattaacactcgtagacaatcaaactctagcaaccacgatctatactgacacgcgagctaacaaatcctgcctcaactatgaaagaaaactcagatcgtata

SEQ ID NO: 66891 - DNA, 387 bp, Arabidopsis thaliana landsberg
cgagcttgtgaacggtgagaggacaaggctatcatggcgcaagctttatgaaaggagggtttgttctatttgctattgtaaaaatcatatgtttgtcccattctcttactctctgctatacaaagttgcctggggcgttgcgaaatcttttgaacttctttctcttctcctaaaaattatgagatgtctacaagtgtagaacatcaattcggagactaatgtattatactatgcatatcttaatgtaatgaatgaacctctgacgtgatactgatataatgactacgatttatgttcgtggatgtgactactgaacttaagacagctggtgcctcacaaggtccaatgttacatgaagtgggaaatatatgcctactaggtgaacag

SEQ ID NO: 66892 - DNA, 946 bp, Arabidopsis thaliana landsberg
atttctctctctctctctctctctctctcttaaaaatcataacctattttcaaatttgttttttcctgctttatataatgatctcgcttataaagttcaaaacttttgtttggtttaattgagattttgacttgcttagacgaagtcatgttgcaatgaaatgaataaagttatatcggggttaatggtttgacaggttcgatgttaaggattatatcacaggatttggttgtccacaatggaagaagactcatgaggctgctgagaaaactgctgtggttgtcacgacgctcttgaaaaatggagctacttgtgttggcaagactataatggatgagctgggttttgggtatctctccactcctaccattatgcatatgaaatgacctttcggtagttggtctaaagaaagtttgtgttttgaatgtgattttacaggattattggagaaaacaagcactatggaactcctattaatccattcatgccagataatgttcctggaggatgttccagtggctcagcagtttctgttggggctgaactcgttgacttttcacttggtattgttaatctcttcgttttctcttggtaatgtgtttcttggattacgtttggttctttatgctaatcaaaagatgcttgatttgcagggattgataccgctggtggtgttagagtcccagcagccttttgtggtattcttggttttcgaccatctcaggggactgtttcttcagttggagttttgcccaattctcagagcctagagactgttggtacgttacattcccctcccttttagtgtttttagtgtagtttcaatggtacatgctgctctaggtgtttgccttcctgattattcctctaaatgattccttctgtaggatggtttgcctctgagctatcagtttgtgctagaaaacaaacttcaaaatctagtcag

SEQ ID NO: 66893 - DNA, 847 bp, Arabidopsis thaliana landsberg
gaattcttcttgcagattgtttaccctaatatgctaattaagaattcgatttaatatggatatgagtacctgatttaactctcgaggttgttgggcaaagaagatttgtaatcgccccattgctccatattggtcgcaaactctgcttatgatcggtttttgagtgtatatgagcatttaagaaagatatgaaatgtgaaagagcagggagagagatagagcagaggcaagacgacacacacagaggagaagagatcccgggaaaaaataataacccgtgcgacctcctctccaaaacccacaaaatcttttttttattgaggatcagttttttgacctgccatgcaagcgcacctgacatggcaaaggtcggatgacagagatgcaatcaggaagctattagctatccacaaaacatcttctacaccctaatctcaattcaatccaacacacacacatccgtctgcaacagattcgtctcctagtaatccagaaatgatgcctcaacttgatcaattcacagaatcttgcgtatgaagaagccgcgaaggacgatccagatctagatctgataatcaagaacaatattcgcgattacataacaaggttatggaaaacgaccataagaaaagctcacggtacagggaggaaagactttacctatagaaaacgcagatctgcgtcagatctaacgatgtaagcgaagatccgtcgtcaacgatggaatacagatcagatctacaaattcgttgagaattcggatcggatttgcagatcgggaggatctctacggtgattagaagcgagaaagaacaaaatcgtcgccatataagctagatctaaagaa

SEQ ID NO: 66894 - DNA, 997 bp, Arabidopsis thaliana landsberg
acctctataatgagagctctaccattttgagcttacagatctattagcacaaaccttgcctatttggttcaactccatgggctaccgagaatcatttctaatatggtcgctccaatattccaccccacttgaagcatcctgaagacggaaagcccacggttgcaagagtttaataaaaccaaattagatataaatcaaacttgaaatttatatataaaatcatcaaatagaactaatttgaagtagtaacaccacagagttgtatgatatcaaacaatgatcaatgcataaactgaaactgacttattaaatttgaaagatcccatcagaatgcaaaagtctaaaaaaaactactgtacgaaatgatacaacaacagagtatatatcaatcgaaactgcaggctcgaatcgagtccaaacgccatcatatcaaaaatcagagaccttcgatactcgtattacttctccaggagctagctactctagccatagctcttgctaatgaatgcagccgtgataaatccaaatcgtaaaacccatacgagagactaaatactacagcgctattttctagaataggtcaaaaattcactactgatatttctttacgtaatcataaaactgggtacaatttcttccaatgagaattcttacagaaaaagtacaaacatcaaacaacagtagatagataaagtggagaatataacaaactgccatggaaccgttcgattagacaatttaaggtcctacgaatactttggtagaagtactttgtgaataatgtattataacagtcaatttgaaaatgaggcaactatttccatgctcaaaaataaaggccgattcgagattgtaataaatatttggtgtcaggtttgttatatgatgcaaataaagagaataacggagaatttaaactcaaaattgaaggtaccttggttggaggatgttggattaaagatttggccagcttgtctccagatccgctgatcttaag

SEQ ID NO: 66895 - DNA, 1667 bp, Arabidopsis thaliana landsberg
cttcttctctcttcttcaccctctcatctctctagctccatagagaattgacggattcatcattcatcacctcatcaaaagctcagtaacgcagatctgacgaacctcgaggccggttcatgatctaagatcagatctggaatcgaaaacaacgaatatatacataactacaaagaattcaatcgaattaaacgaatcaattatcagatccagctacgagaagccataatttaccagatcttcaaccgatcttcggagctcaaccgcgacgatccgtcttctgacgaggaatcaaccggagcctctggatctcttcgtataagacgccgatctgtagatcggaaggagatcagtgacgatcttcatcggaaaacctccgagaggactatatagaagagagatctagagaaaacgatgaacaaaaattgaatgaatcaatgaataaagcgggtatgagaacttaattaggtcgacgcgttgttatatatagagggttgggagtaatggacggacgagattaattgattaacgtttagatcaacggtctaagatttatattgttggagagattacgtgtttagtggcgtttttaatgtgaggcggttgttttacacaaaagaaattacaaagtaaaggcgttttgggaaagggacagctaatatgggttgttgttggtgttttaccgattcattgcacgttttctcattgacaaatggcatcttcgtagcaagttccttcacgactcttccatattttcttggtcttttctttaattaaaaaaacaatatttaaaaggaacaacaaattggcccaccttctagattaaatcttccactttgattttgtcgtagtcgagaaataatgggccaaaacgtaaatgggctaatacaaagcccaagatcagacgcgacagctgctcggaagcatattttgtacatagcccaagatacacacaaagacagagtaaacgaaatgaagattatcatcacgactaatctattagttctctagaagtctccatggggattatcagcattcctgcttccactacctctaatctcagcataacccggaggtagttttgggggatgaataacaggcaagttgctggaagatccggggacaacagatggtcggaatgaccaattgattgtgctgatacctgtagatggagatggatttgaagggaatgggttatggtgtcttagatatataggcaatgtttccttatcgcctagctgctgctgctgctgcttatcgagttgttgcttttcatagtccatagcattaggttttgctggctcgcttatcatctccgctgggttcatgacactggcagttccaaacagccaaggctgtctgaattttggctgcttatcttctttgcctttcggttgttggtaggtatgatcgaaagtttcgattggtttcgcagagggcttgtctttttccacgaaactaggttcaggtggatccacggctctagcagttgttgagcgggttgtgaagattgtggttgtggaaaatgctttctctggtggcacagctggtgtgtagttagatggaagtagatcgtcccaatcctctagccgttctttatagcctttgcgtagagataaatcagaaagtccggttattttacatatctctgctgtgtctttggtgtt

SEQ ID NO: 66896 - DNA, 1056 bp, Arabidopsis thaliana landsberg
tacactcataggtagctagtcaaatccaaactcaaaattagaaagaaaatatagtggcaaaaatgtaaataatactacatgattttatcttttataatgtacaaatggcgcggcattgcgttatgtaaatattttcttcaaactttttacttgctttataattactttgatgaataatgtattaagtcaatacatttttagataaaaacaattacttaagatatattggacgaatcatcttgtatcatcttttatcacgtgcaacttaattggtaatccaatccattgggcacggtaggaattgttttgtatccaaacatcactcaagcatttgtttgagattgatgagtgcatgtaaggtaaaaatatatccgttggttgttttcttcattacgtgagaagaatacggttaaaattcaactcatcatcatacaaaacggcatttaacaaataactagaatatgtgttattttttcaaagtttaaaattctaatttatggttactagattacatcttaaatatgatatgcatggtaacttatatgttttcactgatttatttcttgagatagaatgtggtttcttaaacctcgaacttcaaaatggtactcttaattaaagaacatcaatgtcaatgattatttaactccaaaaccagcgacgaaacactagctaggtgagagaggaagctacctagaggaatctcatcgttttttactcaaattactaaaactagccgattggtaaacaaactgtagaattctttattgtagtatagaaatcaaattacaatttgatatttcattttttttcatttcaatgaccatccaaaccattaacattaactgtgttccactaaattttgaaaagtggtctggagtttgtgaaccagatgctccccatagacaactcttttgaaaacttgggatgttccttttcctgggtacttctctttgaagatatccaacggctccaccgaagcgtcgaagttcgtctgaacaagataattgaaaacatgattccaaagccgaatgaggaaaacagacaaagaatgtt

SEQ ID NO: 66897 - DNA, 208 bp, Arabidopsis thaliana landsberg
cacagaacgcccgacccatcattgatgaggcactcaaaagtcgacatgcatctaggtcaaggattaccccgaatacgtgaggagactatatatcttgaaagcgaccaataagacccggatcccaatgcgaacaaccttgacataggtgcaataaagaccttctacagtggtgggggattgaacgtcttattacttccattcgccgaca

SEQ ID NO: 66898 - DNA, 531 bp, Arabidopsis thaliana landsberg
gccaatataaacatttcctgttttaaatttttttatgaaatataactcataatgttaacgaagtgaattattaggtgattgagaccataaatggaccgcacgtatagtagtgcccttccacacatgtaacgtaatcttctcctcaaccaaaaagtctaaattcatattatatatacacgaagactttcttacatcaaagaagcacaatctgaaaatcatcgaatccaaaatagttgaagtcgtcatggcgcagaggatcacaacattggttctgctaatagagatattgtttctggtgagttgtgtgactcatatcactacgacagcagcgtataacgatggagataagattcacgtcgccggaaaagtaatgtgtcaagattgttctctgaactacgacgaatggatcaacggttctgaacccatcaaaggtgtccattaatagttccaataatatacttttatatatatatatatatatatatatatatatatatatgtgaatttctgttacaaaatgaaataaagagt

SEQ ID NO: 66899 - DNA, 613 bp, Arabidopsis thaliana landsberg
  unsure (1)..(613): unsure at all n locations
ttacattttaatataaaaaaaatgttctacataggagtttttaacctagtggattgaatttgtatttttttaataatttattatatttagttttacacaacattttttttacaatggtttaattttttatcatgagaggtcacatctagatgtgattcttcacatttaaaataaaatggattaatgaaaaaattagattaagaagtagctatgtgagataattttctttgtagatgtttgattgtgttgatcaaaagagtctcttctctcttataccttaaaatcatatttataggatttaatctcaaccaaattacgggattatgttgtgactacttagtcttctgataagtcttatgcggattagatttggcataactagttccctagaacatgttatcaaaacaagtgtgtttggtttgttagcttaatgatgtttttcattttgttttaaaagtagcgcatgactcgtctcgtctcatcactaaccatctttatgtgttttgtgcaaatgccaaaatgtaaacacatttcttacgcttaccaatagttatcttctttttttttttgggcctttttttttatcngatcacgtaacacattattattgact

SEQ ID NO: 66900 - DNA, 487 bp, Arabidopsis thaliana landsberg
ggtcgcaaaaggccgagaaaagaaaagtaggggcttcttatccaacaaagaacggaacctgagccattactacaattaaagacgaacctattgcaaaccaaaagaaaatagagaaaagattaattatattttgcacataagggctggaagataaaggaagataatcagaaaaaaaaaaggaatcctgatttactttaacaggatttctgggagaagcaacaaagaatacacaagggcaaaaggaagacggtgtgccacacaatacagaatataaggccaaacgagacaaccacggataactatctctaactctaaccaggcgactttaaaggagatgaaaggaaaaggacaagatgagattttaaataagggattagaaaaatagaatgaaaatggaggggtaaaccctcataagcaccataaaaccacaaggctttattaaaacaaagaaggaaaggaatatcagataaaattaacaaaaaatagc

SEQ ID NO: 66901 - DNA, 577 bp, Arabidopsis thaliana landsberg
cagaatcaaatggttattggtccacttttgcagcattttccatcaaaattcaactctatcaaatcaccttacccagcataataaggattgtggtattgttattgatccaaatgatatcataaagaatagtctccttaactaattaaaatatacatcacaaactataaaaaaaacttacaagaatcaaatcctttgtacgcgggccatgttcatgggttaaggattctacttggtttgtcatctcaatattgtcaatttagtatataaaatggaaggttgcttctcttccaagaaacatatagaattgttgacacaggaaacatcaaatataaaaaagagcagaacaactgagtgaagaaaacacacacacagcgtcctctcgccgcaacccaatttgctttagttacaaacattccttcctcctaaaagcaacctttcttggttacattacgatctaatactttggttttgaaaaaaagtgatttaaaagaattccttttccaattgatttgactatcgacgacacatagtgtagttatcgagttcttacagccaattataaaaatgaaattagatc

SEQ ID NO: 66902 - DNA, 184 bp, Arabidopsis thaliana landsberg
tagcttttccattttcttccgttgaatctttctgtctcattaggtctgctgaaattgtagtcactgcgcgctcagcttcctcatatggcggaccttcgccctgcacaacgaatgctctttccatgacaactataaaaacacctagactaccaaacctcgaccactcctcggcctgaccgacgaa

SEQ ID NO: 66903 - DNA, 381 bp, Arabidopsis thaliana landsberg
cttctaccagcttcataaggggagccgggttaaaaaagtgcattccggctacactttgcggtccgggtacggcttctgctatttccgatacagagagcgaagaggtatttgtggcaaatatggtttgcagggtattgatctctgccagtcggtgaaaaagatccagcttggcctgtttttgttctatgatggcttcaatgaccagctccgcagtacaatcagcgatctccgttgtgcactgcagccggcttaatgcggtttgcctttcgtcagcactgatccgtttcttttcgaccagcttttccaggttcttctctatggcttcacggcccttccggatcattgcatcgctcacatcaaacattatagtcctgaaacccg

SEQ ID NO: 66904 - DNA, 205 bp, Arabidopsis thaliana landsberg
cttatagcatttgtctaccaaatgaccaagcttgttgcagaaagaacacttaggtttcttgtatgaaccttgagccatattaacttgagaatcaataacaggagaagcttgaacttgaaaggcagcagtcacatttgctaagggagtacttccaactagacgaagactaacatcttgatcaagcatattgtatatctcagttaag

SEQ ID NO: 66905 - DNA, 344 bp, Arabidopsis thaliana landsberg
cgcagtatcaaattacaatcatactttttgtaacttttttacgaaccattattattagatcagattctcaccctgaggaattgattcaagaaattgaatttccatcacgagtgtgtaatccaaacggcaaatcaaaaagcttcaagcttttggaacatatagggacatgtaaatatacaccacttatcaatctgtatgaaaaaccctttggaactggtggataaagatttaagataatattattgcaaacgttttaaattgtaagaatacatggatttttcacaaatggaaacctaaggtccttcccccccttcatttaatgggggagaaattttttttttaaa

SEQ ID NO: 66906 - DNA, 545 bp, Arabidopsis thaliana landsberg
cagatggggcggttcgtaagcatgggaccatgaaaaatgatactaactaagagacgccatcgcactatctagttaccgacaaccaaaataaaataaaccagcaaaagaaagatcaaaagtggagtgacaaaaggaccactgacaaaagctagcagctgtcctttcacgtaacaatccgattataaaaaatttgcgtgaaggaagcataaagagccaagggtcagacagattcaaacgacgacggaggcagcagccacacgtacagcctcgggcaagcataaaaagagatgggctctatcctataagtttcccacgtggcaaagtgtgacacaaacagatctctttagagaaaaaaagatgctctctagaaaacccttgctctttgagtctctctatgtggtaagaaaacagagcaactagagctctcttctcctctgctcgtacaacggtataacgatctcgaggatcacaagagaacaggaggtgtattcgaagaatctaccgatggctgaagaccttaatcaaaagatcttgggctcaaactc

SEQ ID NO: 66907 - DNA, 977 bp, Arabidopsis thaliana landsberg
agatgttggtagcttactgcaggcatgcgtctaattcaatattatgtacatgcaaaccattttattactttgatctgcatcgacgttcacgttcgcatagtagagcttttaatattctacagatttgattttcttaagtctattataaattggttcatgaagctagcccttgtctctccaggaagaaactcttttaaatgccatgaatgaagagcttcccaagatacaagaacaagtttattacggccagatagaatcccatactaaggttttggacaagttgctttcggaaagtggtcttagccgttataatccacaggtagggagttttactggcagcatattttgtaatttgcttatgtgtttgtttattactaattccaagaagtgtctgcctctcgtaattgcattgtttgtagattattagtggaggaaagaacaaaccaaggtttgtgtcgctagcttcatctaccaggaaaggggaatctatgttgaatgatgttaactacttgcattctcctgaaagtaagtaaccatgcatttatatagtcaacagcgtctttcccacatcccaaatgtgttatcttcttatgcaaaatcacttgatatatatcttctcttatgacaattccagcttcagaggatgtgaagtatgtgactcatctccttgctgctgatgttgcaacgaagaaaggaatgaaattgttacatgaaggagtccgttacctggttagttgatgaattaatagctttctatctcgttctttacacacccttttcctcgaccctcagttggatccacacatgttattgatgctcttgtatattcatttagattggaggttccaaaagtgctcgtcttggagtcttatttagtagcagccagaatgctgacccacatagccttctatttataaagtttttcgaaaaaactgcttcatcgtttaggtacgtgagtttttgttttacttgtgata

SEQ ID NO: 66908 - DNA, 619 bp, Arabidopsis thaliana landsberg
  unsure (1)..(619): unsure at all n locations
aaaaggcggcacgtttgccgtcgctatccacacattcgctcgctcatccgacttatttccgacgatcatcccacgagtcggctccggggccgaacgggatcgaccggcgttgcgaaggttttggctccaaggttcgcgaggctgcgaatcgccaccatcactgattaaaagccacggatcactgccgcccttataaagccaaggctccatgacacggccaagaggagtaaatccccgctccgtgtccttggatagctccgacaagcgcgtcactttcggcatgcaacccaagcggctacagtctnnnnnnnnnnnnnnnnnnnnnncgcttaccggcgcgggtaattcagcgctaggagcgctgccctcccctccctctaacctattcatgcttgccgaatcatcgaccaaaacttgaatcggcggaggttcatggtgcgaggtagcggctactcgtcgtttctggaaaaagcagagaatagtggcgtcacccacccatacggcaaagcctgcggcaaccctcgcgccggccagctcgatgatccagcatcacagcagcgcaagaggtgaccgtgctatatacgactgataataccgcactcatatattctacttacgt

SEQ ID NO: 66909 - DNA, 459 bp, Arabidopsis thaliana landsberg
  unsure (1)..(459): unsure at all n locations
tattcatgtatcctttcctagatttcacttttactctgtataatttgttcctccttaattatttggttatctatnngggtacgnnacatgctaatagtctatatcatatatacctttgggtccttttactaatactaggtaaaaacttctagttgtataatgcttaaaattacaatggggttatgatgatattgttattttataatcgcattagaattgcaaacaaaaattgcttatgctaggataaacattttaagtgagaagactatccctttttttatatctatatttagattcggaattttcttactaacgaaaaatatatagatggagaactatgacaatacacttttgcttacaatgacattatgggtatttacctaattgaatgatacaaaatgagatggagttgtatgaatttatagcaactggctttctgctttttttttttttttttaa

SEQ ID NO: 66910 - DNA, 609 bp, Arabidopsis thaliana landsberg
tttatcagttaatcatctccaagaaactgactaccagtactaatgaaactaaagtcttcatgcaaatttcacctcataccaaaaaagtgtgctcattatcagtatcaaccctactttcgctcaatagaatatgaaacccagagaagatttaagaaacaacttgtccaaattagaaaatcaatctccttaagcaactccagctagtgaaatttatgcgaattcaaatcacaagacctgacacccatcgattttgagcttcgaatttcaaaatccaaagctcaataatcagtgcgcagattccccagaaccaaatttcaaactcacaaacttcgcacctaatccaaaaaactttcctaccgaataaaaaacgaaaattgcaggacgaacgattaaaaaagctcaaattatttgaaaattcgatgagaacaaatcagaattaaaaaaaaaaaaaaagagaagattgaaagagcttacctacacaaatccaaaatcactcggaagccatcgccgggacttgaagaagaaattacagagagaaattagagaaatccggtaagagatcggaatatgaacagatcagagcttcttcgggtttttgagcgatcgaag

SEQ ID NO: 66911 - DNA, 677 bp, Arabidopsis thaliana landsberg
ggatcctatattttcataaagatgactttcattaaatgacgtgtcgtagtccgagttaaatcttgtattgttttgcaataataatatttgtcatatagttgtcaatctaagtaaatagagtttgaattacgaaaacattattcgtaattcctaaccattggactaaaaaacaccagacataatataccatttagatattcatagatttcagtaaaaattgtaagtttgagtcattttcagactatgaacaatgcttagtcctttagataagaattgaatgttttatattcgggaaaaatgaaagaccaccggtaaaatatctaaataattgttatttaaggggtacgtttcattattcatctaattatttatcttgaaaaccatttttggtcaaactcaaaaccaaaaccattatgaagttatcgtctcatttatttatgtgaccaaaaataataactgaatcttagttgttagaaaaattggtctttgtagtttcatacaaaaaatcaagaaaagagatttgtcgtgcaattataaaaatacgttacaattatataaagctttttcaaattccagtatataattttcttctcaatttatccttaagggaaatgaaaagttggccatgtggaagtccatttaaaattccacccaaatttttagagttttttttttat

SEQ ID NO: 66912 - DNA, 188 bp, Arabidopsis thaliana landsberg
gaaaggcgaatgttccctcctcagagtacgaaccggtctctaaagcatctgatccttcgggacccacacttgcggatgacatatataagaagttgtttggggtcaatagcctttctgggacagggcatatcgatgatagagagatctgtgatttttggggagccaaaccttaatgggtctcttgatat

SEQ ID NO: 66913 - DNA, 621 bp, Arabidopsis thaliana landsberg
cgaagactattgtcgatatatgacttgtttatgtgccaaatacatgatttatttctattttttaatctcttattgattttagatatattttcctttatttatttatttttgtctttttaataacgttgactattttttccccatattgagagcccaattctgacaagtggttgtcagtttgtcacactatttgtcgtatgaaacgtatgttgcgagatattttatttgaatggatatggagttttttcattttatttttttctttccatttattatcaattgacaatttttatttataaattaaatataatacaaaccagttgaatataatcttaatggtactgtgaaaaccatgtctgcgtaagatctcttgaataataaaattgacatgaatatatatatttgtaaattagtcagaatatttatagacatatttaccaaagaacatcataatgaaaaataattatcctgttttattgtcacgatttagatttagacaatgcagtactaacaaacaaaacaaagacactgcatatatgtcggcaaagccagtgattttgtctcttcttcaaatttcatgttaaccatatgccacattgcttctatgataaacaacaaaca

SEQ ID NO: 66914 - DNA, 587 bp, Arabidopsis thaliana landsberg
aatgtttgaaacacgtgatttaaggttctgttatagttgattttcattaagatgatcgtttgttctatatctaaacgcacttgagcattaaaacgtgacaaaatcatcgttctcaaattctagatctagtacatttaagtttgccacccatattttgaagctcaagattatagacatttacacgtctaaagttaaagaacatctcaaacctcctctaattgccactccgtttttcttaaaaagcacggtgtgaagaagaacaggtcataggctttttttccttttttggataagattaaaaagggaagaaaaaaaaaccattgactgattatcttcttgacttgttcaacccgaaatatggccttctcagatgctgtcaaatgtgtagagattatagggctgataggaattacacgtgtgtacattgttggcattggattttgtaggtgttgattgcccaaagttagaaaccagctatgtccaagtagtgttggaggccgaaccaccaggaacaaaactatatagttcactagaaaatctaatctaagttaaaccagatttattttgggcttttatcaaactgaagg

SEQ ID NO: 66915 - DNA, 1913 bp, Arabidopsis thaliana landsberg
caatttttcacgattacttttcgttaacttcttccacacgttagggtctctactttctacatctttaaaagctctttcaaggacaaaacttgacacatactctttgtctctaaatcactaaatagcatacattctcttagttaaaatcccagaaaattccaataaacctgattgtctcgatcttgccatcgactcttttctcgactttctaacattcgaagcctcgattcgatgcataatgacccaataacacatggtcccaagcgtcgtgagcattatcgttgcaccaaacaccgtcacgccaaccgctagccaccgctcttcttcaccaaccaccacaaacgctaacgccaaaaatgccacagatatcaaaacgcaagctaaccacatcaacttgtttatcacagccatcatattcttctttgccttgtgttcaatcgcaaccactgaagtctgaaccaccacaaccgctaaagatataaaaagagcgattgaatcgaatatgaagaagatcgcaaacgcgggtctatccgcgatgttcgcttctccgagagattgtcctggtaagagcgaactcaattcgtctgcatattgccccgggacagtgaaaatggcggcgaaagcgacggttgcaattagaaccgccacgactgtggttgagttaatcgcattgtcaagaccttctacgtgcattttgttaatgcgtttggcgattccttgaacgcgttttcttgtctctcgagcgtgttctagctggtgatgaacttcatgtttgatgtcgctcaccgtttgtttgagctcacgcgccgcgtttggcctagtagtgttgttgatagctttagccgagggaaggccgcgggttttgagaaccgcggcgatcgcaggatggccggttttctcagccgtgtcaagcggcgtttctcctgctctgtttatcgcttttgtgcttgggcttgtctcgttgttatctagaagtaattccactatctgcaatcacattaaaatctccctaagttacaatatcaaagatttatccaattatagtcattacatttaatttgcaacatataaatttcgttaaatgtcaaaacgtaatgtctatgtttgcatgtacattttacaaaagtaatttttatgttttaccatttaaaatagtaaaattttcatttgaaattttgttttattggagatgattgacgaaccttaatgcgacctttcctagtagcaacatgtagcgcagtgttccctttagaatcagccatattcaacgaagaccgatgtcccttcattaactcaaccaccacatcaatgctttgtcctttcaccgccatgtgaagtggcgtctgaccctttttatcagtcctcgttgccgtgtccggttccaccgccacaatcgcttttaccacttccgcgtgaccattcctagccgccgagtgcaatgctgttttcccgttgctttttgcgatcgcggctaggctactccctgctgcttctagtagatactctacgacctctacgtgtccctgagctgccgccgtgtgtagagccgtcgtgtttgataagtccaccgtcattgatagctccggatgttcttccattagtactctcaaaacatctataaaaatagatttcaaatttcatcaatgtatcacacatgtaaataaatatagaatattatcatcagtgtttctttaattctttccattcaattctttaaatcaaccaaagattaacactttaaccatatttttgtgtaattttttcttcccaattcttaagaacaaacaaagataggtagttttaagttcagttcttaatatcaagcaaacattgaaattttcatcattttggatagaagaaaaccgacaaaattcatacctaattcgccttctttaccagcaatgtggaaagga

SEQ ID NO: 66916 - DNA, 1220 bp, Arabidopsis thaliana landsberg
attatagttatgtatcagctctgcatctggatgctttcatctctccaagtagtttcatagcctcatcagtttcaccatttctacaaaagcagttcatcaatgtggtataaccaacagtgtcgagtttcaacccggttttcttcacctcgtcaaaagtttgtttagcttcctgaatctttcccactttacaaaacccattcattagagctgagtaattgtacacatttgggttgcacccattcttcttcatgaagtctaaaatcttcttggctctctcaacttcccctgcacgacagaatccgttgatcataacattgaaagtcacagggtctggcgaaatcccttctttcgagatcatatcctcgaacaattccaccgcttctttcgatctcgagtgtgcaaacagacagtccataagggttgagtaagtgatcgaattgggatacgaaatcccagaccttttcatctcctccacaactagaaacgcaaaattgatatccccattcttgcagtggtgcttcactagaatattgaaaatgcaagtatttggctgcaatccaagattgtgtttggcatacaagagtagtttccgggacaaattaacctcccctgaatcaataaggagattcaaacaagtactaatggcattgagagaaggcttgacacgagcaatcacttgaatcaagttaaacatctccataactttatcatgcaaatcagacctggagaaatgtctcatcaggttaagaaacaaactttcttggaacctgcaagtctcatacttcatctgatgaagaatggcatcaacagctagaaacttcttgtgcctaacgagattatctaaaagaacagagtatgtagcattgttatggttaaaacctttctgctgagaagctttgttgaagatatcaagcacaccctgaggatctctctctcgtttcatcaaactgacagcagattcgtgagagataaacttggttttggggtttgtttccacaggtgagatagaggattctggtggtgggcttggtttcttcttcttctccgagaagcaaatgggagatacccatgatcgtgaagacgatgagaaccggcgatgttcattgattatcgaagttgtgaagcgcattgtatctcctctgtaatcaagagaagaagacagtaaaattaagttaagaagagtaaagctacttcctttaaacttaaagcgatccattggc

SEQ ID NO: 66917 - DNA, 159 bp, Arabidopsis thaliana landsberg
ggcgcatttcagtaacaggattatatggtcctggaaatatgggtatccgacccttatggcactaaccggaaaggtacaacccgtaaacccggcgtggggcgtggagggttttgacccttttgttccgggaggaatagcctctatcatatgcgcaggacg

SEQ ID NO: 66918 - DNA, 273 bp, Arabidopsis thaliana landsberg
gacccgggacacgattttatgagttagtgcgttaaaaccatactttatataataggagtgctaccaaaaaaaaaaagtaaatttatactatattttttaattatctttaatacttttttatccattttatttattcaaaaacaatccttaattccaaatagattgaacttaactccaagttatctcaccaagttacatcagaaagctactctatcatacttatcaacaaaccaattgaatccaaaacataaaccaaaccaaaaaccataacaa

SEQ ID NO: 66919 - DNA, 307 bp, Arabidopsis thaliana landsberg
tacagagatatttgtttgtattattgccggtcaagcgaaaaagaatttatgtatcgaatagaccgattttatttctgtcatattttaaagaataacccacgaccttatgtgggacgaatactacctatggcagcctacacacagctttcaactcatactatgcataccctaactgggtcaacccactatcactgaccaatctaacataatgtccgaatactactcatgcatctctacaaactactgtgttcaaacaatacgaaaaaacaatgacccctaagcgcctatactacattcctaaagatat

SEQ ID NO: 66920 - DNA, 383 bp, Arabidopsis thaliana landsberg
  unsure (1)..(383): unsure at all n locations
acggncactcaggccaatggcataaacttcctttccgtattttctttttccgcgaaacaaaaattcaaaagctgccgtgccaatttttgtacccccaattaaaccaacacccattattggaacaacttctatggagttgttctcggagcggatcctgtattttaattagtactcattaccagcaggcacttaacacttataataccatctatcctttaacttcatnnnnnnnnnnnnnnnnnnnnnnnnnnnnnnnnnnnnnnnnnnnnnnnnactgagctgatcatgatgtgcctgatagatactctcattgtttacccaatttcacatcgtaccatacataccggtacggcacaacatacaaacttaacctcctgatctct

SEQ ID NO: 66921 - DNA, 455 bp, Arabidopsis thaliana landsberg
actgcaatcgaaatgagttattctattattcgggcccaaatttcatttttttccatcaaccgggggccgaacacgagggaattgagtcctaacaaggaacaaccccaaaccgcccatataaaaaaattgcctcattaaagaaagcaaaagctttgcggcatctctcttacaaacaaaagtcgacataaagactgaataattgcatcaggcgatactatatactatgcaaacaaagagagtcccacccaggatgtggaatccaccacggtatatatccaaagtctaaacaatacgtattgatatctgccaattgatatttttgtctgatatccgaactaagagcggagaatctaaacggttaattaagacctcgatccaatcctcccgaattaatagagttgaactagtgatccggcactcactctcaagactactagacgtctagcgattaccat

SEQ ID NO: 66922 - DNA, 134 bp, Arabidopsis thaliana landsberg
tcaattgattttgttgctaaaaacatggcatattcactttagaaaattatgccatttctatcccagttttttttcatcttaatcacataaaactggttactggcatgtattgctctgggtattgactatacata

SEQ ID NO: 66923 - DNA, 248 bp, Arabidopsis thaliana landsberg
gagttgtctgtttgttttatagccggcacggggaaaaaggatatgggtcctgccaaagcaggtttgattattgtttaatgttcaatattactccccgacgggggttgtgacaaatcttacctctcggaactacttcaaagttattaactcatgagaatctatccttgaatggttgtacccgctgttacaaacaaaactacactagcgtcatgctactacggttacagcatatgtaactgatgctttca

SEQ ID NO: 66924 - DNA, 581 bp, Arabidopsis thaliana landsberg
aggaaatgaagcaaatggattcctgaaagacgtttgagattttgtgctttcgtgtgacttgtcagctggcgggaaaccgctttcctacgtggagacacacagaggatttgtctccgttcattattcgtaaatcatcataacgttacatttcttactaaaccgaatttcaaaatttcttaatctcaaaattagaaatcataaataggttacacaaaaacttaaagagacagaagtagtattatcaaaagaaacatgtaaaaactattcaacagttttatgccagacataattcatgagttaatagatttcctaagtcaatgatagggtctttgaaattcaatttattgcatatatctatacattaatgttgatacggtcatcacaattcacaactagacattctcgcgagaaattattttctacctcttattaaaataggggtttggtatatcatgagaaccgggaaaacaacacaaaaactaggaccaacaactttttcaagatataggccaattgttgaaaatagattatgatgatgatttggtaaaagtgcatgaaaaactaaacaagtaaagctttgg

SEQ ID NO: 66925 - DNA, 1960 bp, Arabidopsis thaliana landsberg
gttattctagaacagattttaaagaatttgacctgtttgtttatttcaggtactcaaccatgttggcagaaaatttagtggagccttataaacagggccaaaatactccttcaaaacctctactagctatcgaatcaaaaagtgatgaggagagggcagaacagatacctccagagataaattcttgtgagcaccttattacctaacacagcattagtgtttactgtaagcaagtgagctgaatcctaacaattctcttgatgcggtagctgcaggtcttgaatcaggaagtcctgaactcgatgaggattatgatctaaaatctgaggatgagaccgtgagtttcactttatcatcttttaatttttattttaccacttatcggcagttactgtgtatcactccttgaatctagctgcacatcaaaggtagatggagaatagcttgatttttttgttaaggaaatcgttttctttgtcatgacaccaccctgcaccccaatatacaggctatactctagttttgaatagtttttgtggagattgaattggttattgtttatttattagttatttacctctgatcttttgaggagttatattttccatatctcattttaaacccacgattacacttaggaagatgatgaagatactattgaggaggatgaaaaacacttcaccaaacgtgaaagacaggaagagttggaagctttgcaaaatgaagtggatctaccagttgaggagctgctcagacgttatacctctggaagaggttggcataaatctacactcgctattgattgacctttttgctcacgttatcaatttttactttgaattatacaagctgtattcttaagaaatatcaactatttgaattgcatcctcttttgtgtaagagttttattttgatccctcagttagccgagaaaccagcccagtaaaagatgaaaatgaggacaatctgacctcagttagccgagtaaccagcccagtaaaagatgaaaatcaggacaatctggcctcagtaggtcaagatcatggagagggtgagtggtgtcaagttcctataatgtattgaaagcaatacaactgctctttgacttcctcgtcccattttacatttgtagcagacaagaacaatcttgcagcttctgaagaaactgaagggaacccaagtgttcgtcgttctgtaagttgtatgtctttttaaaatcccattgtctgatttgtcatcgaaattctggctcaaatgtaaaatatatatccttcatttgcagaatgatagctatggtcatttggcaatatccgagacccattcacatgaccttgagccaggcatgacgactgcatctgtgaagtccagaaaggaagatcatacctatgattttaacgatgaacaggtaactggatctgaccttaaccatgttcttctctgcaattagcgtaaagtctctgattctgactgcaattgatggacttactgtgtcacattgtaatatgtgcaggaagatgttgactttgttcttgccaatggtgaggaaaaggtcagtcatttcatcaaatgccagagatcgttatttaggacttttctcttttaacttgattctcttagccttggctcttttcgaagaaaatttttgaacacgcatttgtactaaaatttttatatctgctcttttggtgtaggatgatgaggcgacattggctgtcgaagaggaactggcgaaagcagataatgaagatcatgtcgaagaggtgacaaacctattaattattcggttttcttgagatatgataaaagttgttaccttcagagtttacaaacagaaatttccccttctaccgcagattgccctgctgcaaaaagagagtgaaatgcctattgaagtactacttgcaaggtataaggaggtatgccttttagtctcctgtgtgcctgtgttctatagtatttt

SEQ ID NO: 66926 - DNA, 130 bp, Arabidopsis thaliana landsberg
gtaagtttcttatgctttttactgcattttcctttgggggaatcgctgtttcattagccgcaatttatgaagactgtactctagataatatagtatgtctattacacaatgcttctagtcctgaaccata

SEQ ID NO: 66927 - DNA, 583 bp, Arabidopsis thaliana landsberg
gatggggcacgttgcttcccaatgtctcggtttatgacaatttgcgtggcacgtattcggtctttcatttgcggttcaaagaaaatgaatttcgtcgcttgttagatgaagtggtcggtttctttccactattaggtgaaagaatcaaacaggcttcgggaactatgagtggcggccaacggcagatgctggccgtcggccgtgctttgatggccgagccccgggtacttttactcgatgagccatcggcagggcttgcgccgattatcgtggaagagctgtacgagatacttggcaaggtcaaagccagccgccggtgcaccttgattctcgcagagcagaacgcgagctatgccgtgcagtttggcggagattgtattgttctggctgaagggcgggtcgcgctatcaggcgcgatgcagactgtgcttgcagatgaacagctgcgaactgcctatttgggcctttaagaggaatgatcatgcccaagctctcggatgatgtcgtaattgtcggtgtgggtgaaacgcctgttggaaggatgcccgggtatcactcggtccaattgcaggcttgggccatt

SEQ ID NO: 66928 - DNA, 336 bp, Arabidopsis thaliana landsberg
  unsure (1)..(336): unsure at all n locations
nnnnnnnnnnnnnnnnnnnnnnnnnnnnnnnnnnnnnnnnnnnnnnnnnnnnnnnnnnnnnnnnnnnnnnnnnnnnnnnnnnnnnnnnnnnnatcggtggcccaagaataaaggactagatcctcatcatcttgactcggtcctgattgctatacttcggaagagttaacacctgactgcgcgcggacacttattgaaagaatccctcgcggttgcaccatcaaccgaccttgaacttatgtgaagggttcgacagtgagcatacctctcgtgaccctcaagatgttgaaccatgtccgagccgggtaaagccagactaaactctctttgaacccc

SEQ ID NO: 66929 - DNA, 1446 bp, Arabidopsis thaliana landsberg
  unsure (1)..(1446): unsure at all n locations
aaaaaatggttttttccaagtcccccaggtcctagggattaaaacctattgtaccaaataagattaaataaaaatctggcacaattttaaaaaggaatttaaaaagaccataatattttattttatttcactcaaaaaaaaaaaaaaaaaaaaaaaaattatgttctttttcatcatcaagaacagaatatatgaggttgaataaatggtaaatgacgttggggatgtgtaaaagacccaccatcgatcaaatcgaccgacttagcaggtaacctccacaagcgtgtgagtgtttcaatactcttaacacgcgctttcattatcacgttggctactcttctttctaaaaatcactataattaacacacaacaatcttaaatatattttacatgatcaattaaaatatttttggttcggtagaactactattcaaacaatacatacatactttaaaagattggtacgaatcaaaatctattggtagtaaacaattcgtaaatagagatcaactttatctcagtgttcttattgataagcttatcttaatggtcttgtaggtatagttgtaatggagtgattagggtatagcgagtgagaaacacgggcaaggagaagtgcgtggagaaagagggaaagtgaggcacgccttctcttctttggtgtttgggtgggcgacagagaatgtcttcacttggccgcccgcttacactttttcccccatttccttaattgtttgctatcaaaaaattaatgcaacacctttaacttttgcaaaaatatactatagtatatagtattaaatattcacttatctttctctcgtcacatcaaacataatggattagtccgtggatttgatcatttgacttactcctcattattctctacttttcttcgattcttctatatatcttccgtggagttttcgtagtcacaaatttgctattttgtgaactcaattcatactactccacaattaaaaaaaaacacaaattgattaagaaatctaaatcacgaaattacaagaaagtgtacttgttgttgtttatatgaaaatataaacaacaaacatacacataacctgtatgtatgcattttaacaacctaatcctatatatggtcaaactcataagtacccatcataactcataattaccttaaaacaggctgatagttttcaatcataatcagcatataaatcatatactaccaattaaactgctatgtgaattctaacacatcctctaactatctatagattatgtgtgtaattttttttcgtgacatcatgtttaccaaaagaaaagtgtcatcatgtttctgggtaagtcgagtcgtaaatttgctgaagaataagactatgcgacgctccttcgggtcaattttggttctttgtttatatggtcaacttattattatagtaacatntttatagtgaaataatt

SEQ ID NO: 66930 - DNA, 2153 bp, Arabidopsis thaliana landsberg
agtgttaaaaacaaatccaactaaaatgttatcggaagctaaattttttgtttgggataaaatgtaattttattttaccaaaatggaacatagttaattacaaaagtttataagggtaatgagttttaaaaaggtaaaattaaaatgctaattagttagttgaaagttgaactaataaataaaacaactatgagataagctaggaatgtgcaaaccattgagccaaccagctactacaacctttacgataacaacgagcaagcagagtgtcccagagacccatctatctcctacaaaaattggtcgtccaaactgttttttttttttgttacacaaacgtatctctatgtaaaaaattgtaataagcccaaaatttaatcatatgaagcccatcttaagcccaaatcctataaccaaatttggatttattttgcgtgacgagctgtaaaaccttagaaaacccttctttcgctgttgttgccggagaaaatggtgatgatgttgaagaagacagtgaagaaaggtttaatcggcggaatgagcttcgctaaagacgccggaaaaatcaattggtttcccggtcatatggctgcagctactcgcgccattcgtaaccgcctcaagctctccgatctcgttatcgaagttcgcgatgctcgtgtctgtaaacactcactcacactatctctctttatattcaatccctttatcatcgtggaaggaataatctgaattgtcgttgtctttgtttttgggtatttttgcagattcctctgtcatcggcgaacgaagatctacaatcccaaatgtcagctaagagacgtatcattgctctgaataagaaagatttagcaaaccctaatgttctcaatgtaattcgtttttttgtgtgaacctttgtctttctttaacctcttgttagtctctgtgaggttgagtttctgaatttttatgcaatttatagaaatggactcgtcatttcgaatccagcaagcaagattgtattgccattaatgctcatagcagaagctctgtcatgaaggttagatgatcctctttacatttaggttggtgtgttaaaaccagttatagtttcttcacacatataatttgatgaggattttctactactgcgcattgaaaagttaccttctttgcataatttttcgtatgtagctgcttgatctcgtggagttgaagctcaaagaagtgattgctagggagcctactttacttgtaatggtggttggtgtccccaatgttggaaaatctgcgctcattaactcgatccatcaaattgcagcagctcgttttccgggtaagatattggtgtctcagcttatcagcagtgttgagtacacatttcacagatatagtccggactgtgaatccgatttctccaaacttaaacttacaagttaattatttcatgaacagaatgatgaatgaaatgtaacgtggcttatttcgttattgtatgcattatgtgcatagtgcaggagagattaaagagagctacggttggtccattgcctggtgtaacacaagatattgctggtttcaaggtaatctttatttgaaaatcctcttttttccgtatgcctgttaattgtttgtggatttgcttcagcatgatttttgaacacatgatgaaaatgttctgtggtacagattgctcatcgacctagtatatatgttctagactcccctggtgtgttggttccaagtatccctgatatcgaaaccggtttgaagcttgctctttcaggttcttatctatatctttatctcctttctcttctttcttcttggtgctagatcgtgtaaacccgtacactagatttagttcatcaaatgatgatacagtttaggtcttataatctcagttcttagtttttctctaatatagggccgtatttcttacagcatatgatctctctagctaattgttatgcgtttgacattctaagggtccgttaaagattcagtagtgggtgaagagcggattgcacaatactttctagctattctaaacattcgagggactcctcttcattggaagtacttagttgagggaataaacgaagggcctcatgcagactgcatcgataagccaagctataacttaaaggatcttcgacaccagagaacca

SEQ ID NO: 66931 - DNA, 592 bp, Arabidopsis thaliana landsberg
gacacacgattacggaaattatccagtaaggtttatatataggtgtactcttaatatttagtaacttttatagtcatagatagctgccttccttagccagaaatatcaggtttgaattgattcagcgtaaaaaaaaaaaagaattgattaagtgtaatagtaagaataaattaaccaaaaaaaagcgtaatagtaagaaactctaatacaatgtagttatgcataagggtcgatatttggcttgttttgctattttatttacgtcatttagctcccaaacagtcaccgaaaagcttatttagtctcttaggcgattcctgcatactcctaaaaggttatgttaaagagtttaattatgatattaattaacgcctataatttttcaaggaaattgaactaccttctatattcacttagcgagtttataaccgtttttttgggatctatatatttggatgttttacgctctactaccagagatgaaagctaataatacaacatctatatattaaaccccatttttttcggggaattctattcatttcaagaaaaattttatgcgccctaacttcatatctttttgggatttgct

SEQ ID NO: 66932 - DNA, 528 bp, Arabidopsis thaliana landsberg
  unsure (1)..(528): unsure at all n locations
tagataattncgaatattgaggtattatctatctcaatgacttgtcaattaatttttcccgatttaagtgaatctctttcatttgttaagactgggaaactaataagaatcaaacccataaaaaaagttattaagtttaagatgtgactgtaattactacttaatattcttctcagtttgcatgtggtcttccatcatctattgcattgtgcggttgttggtataaccaacagatcgagtaaaacttagctttacttatttgcattaggagaatcgtacattattctctttactattctaatatcgttcattcattttatttttttttgtttctgcttcttcatttgttttgtaaatttgtaattgaattatattgctgcaaaatccttagcttgagaaataataggttaacttttggttacttgactattatgtgacccattgcttgatctcaaccttttattgagccattttaatgatctattcaccggctggcctccaatcatataatattggactttgctgata

SEQ ID NO: 66933 - DNA, 539 bp, Arabidopsis thaliana landsberg
attagtctttgttaatacctaagtctctctaatgtattctctatatatactgtaattatcattctaatgagaatcaagcctcctattctatatggtatcagagctaacgatctatacctaaacctaaacactaagccgctttttctttgtttctttcttcttccttaattttttttttttttttttttcgtttctcttcgtgtcacaatggcttctgacactgttgctgttcccgagtcctccactcttctccatgtcaacatggccaatgtcacgaaacttacgtccaacaactttcttatgtggagacgccaagtccaagccttactcaatggctacaaccttgccggctacatcgatggatctactcatgctccatcatcgaccattatggagaatggtgctgtcactaccaatcctgcatacactttttggacgaggcaagatcaactcataattaatgactcatttaacagttaacagtcacaattcgtgaactcataattaatgactcatttttcttgtattggtaaaggtta

SEQ ID NO: 66934 - DNA, 1598 bp, Arabidopsis thaliana landsberg
aatgcacaggatcagtacgcaatatactttacttgaagaaattatagcattattacatatatttacacctaagtatgtgggtgtgagcactatgttttgtccatgtgtgtccccttgttaacaataaagcaaaatcttttaccagtttctgcaatatagtccccctaatcggactaagagaattcaaggaacacaaggaatgagctgtaaagaagttaagcgcaagagaaactacctgtggaacatgcttcagcttgtgcttcatcctatcagtccactctggggatgagtctgaccagggaccattccactcaacttcattagcccatggatttcgaatctgaacaagtctgtgcccatcaacctctctcacctgaagaaagacagtacgtaaatatattaaattgggttctcatactcaggatatggcaaatgcaaccaaagcaaaagggaatacctgtaagacggagtaagcatgcccttgcacaatgccactggaagatacatgaacatcagatcctgatggacttccagcaccaagtaagaacccctcttgtttaaaacgtaacaattgagaccacaatctgccacttgcaagatctatttgtgcttgagcactccgcaagtcaatctcctcaccagctcctccagttaggtcgacaagagcatcctgaaccagtcccccctccagtgcctcataagaaccatggagcttggcatatgctttctccaccatggagacccagagttcattgagctttctgctagtagcaaaagctggtttaccaggtgattcacatggaatccagtcatcgataacaacaggaacccactcaccctgcaaggggaaagcaatcaaacttcaaacctctgattgtacacaaatcatagaagaacctgcacgatgctacaatcaagagaacaatgcagtgccgtgaaagaatgtttgagacaggaacctgaatacaaaaacgaacagtgtagatcccttcctcgttgtattcaggagtaatgatcacttcagatattcgtgaaacctctgtcaaaactgcaacggcgcttaagaaccaacaatcccccaaacgcccctataaaacaagttaacccaatcgcaagaataaatctctgggatcattttgaattgacatgcatacaagacggtcaggaaaaagtaactgaacagaaaaagtaagtgatcaaacctggcaaacatctgaaggatttgcatccccagagaacaggcagggacgggaatcactaccgttttctttcacaatggagtcaggtctcatccattcagaaacaacctgaaattatgacactcaaaaggttagagttcccatcaagttgttagttttacttgatctatgtgaaggcagattttgtgtccagatatataatcacttaaaatgatatttaactaaaaacagaaaaaatgagaaaaatttaacaatccatacctgcaattttgatgggggattttggtgtatccacaaataaagagcgatcatttggaggaaattcctggtcagtaaattgcttatccacctcggtgcagagagagcttctttgaccagccaactcaactgaacggcatt

SEQ ID NO: 66935 - DNA, 477 bp, Arabidopsis thaliana landsberg
gtatacaacagacctgctcaccacaagcctttatatgggttcatatcaaaaatgttgtgttttccgactcaggatctgcagccgctaccatgactgtaagccagcactcaaatggcggtgtggtcagcaacagctcgagcggttgtgaaggttacaacagcggaacattaaatcttaccggacaggcatgctcaatggtcaactgggtatattcaacggactggggcgcaacttatactgccgtatccccggtgtataccggaagctttttgcagtactttaacctgaccgatactaccatgattgcagcagtggttcaaagcggaagctgagtcaaccgatacttccggtgcgggaaccattaccatttatcctaaagcacaatgcctgtgttgtgagcgactccgtttgtgcgaatggcagcagtcacttcatcaatacttcaaccattaccaaagggttcatcactttgaacac

SEQ ID NO: 66936 - DNA, 114 bp, Arabidopsis thaliana landsberg
cccggtgaaatctttagaattaccactgcttagctatcattactcctcagaccaccaaatgaaacaggaagagcccgttctcctctctgtgaaacacggtccccatatggaact

SEQ ID NO: 66937 - DNA, 451 bp, Arabidopsis thaliana landsberg
tgggactttataaagaaaacataatcaataaatataaccataattttataatgtttgcctcattactttccaattgttttttttttttttaattacagattccgtttactggggtactaaaaagaaacaaaaaaacctgtcaattcataacatttctacctaccaaactagcaacactttttactggtttcttcttaataattatagagtcacatagcttaaacctttttcttttcttcttgaaactcgttataaagagtaaaaagataaaagtaaaagtacagggcaaaagggtaaaaagtggaaagtaataaggcccaaaaaaaacaaaattaagacacggtcttatcccaaatctcctttcggcgtcgacgttgtttttattctacaatatcccggaaaaaggttttgatgaattcttactaactaaaactaaaattgtgcctttggc

SEQ ID NO: 66938 - DNA, 706 bp, Arabidopsis thaliana landsberg
tcagtattccatggaagattacgccaacgcagagagccgagtcagcaaaccaagggaagctttgtcctgttcctatccgctacaaaaacattccattcaaacatcaatcaagcctttttcaggtattggcataagctaaaaaccaaaacaaaaaaaactcgagtggtaaaccataaaataaagcactttcactagttgcattagagtcaatcgaattgcaacgaagaatgcctgattatggacacggaaaaagtacctggaaccaagcggcaagagagggtacgaacatcaaagctgcaaggagatgcaatattagtaaaccgtgcctgtggttgaagatgtctgcttgcgtctcaacaaatgacttttcagacaagtctcctgacacgggatcctctctgcttgagggatgtcgcgttttacgctcggcttcatttttctggtcgagtgattcctttctctttgatgccatcataatacttccatgaaacaaaaacatgaaaactaccatcagctttgattgcctcctactgatttctgattgatgattttcctatttatctgagtttgaatttttctggatcaaatattggtttatagggggtaaaaccatttatgtttgatgtagttttgaggcatcttcctatctcacatgacaagacttgaaaagacagaaagcttgcttacttaccagcactgggagtta

SEQ ID NO: 66939 - DNA, 714 bp, Arabidopsis thaliana landsberg
ttcgccggatattttacttgtctattcacagtcttcaaaaactataattactatgtatatatttcacattttcttatttttcaacttataattttgcatatgagctttagaataaataaaacaaatttaatgatgtagatgttttcctttgatacttggacaagagacttttaagaagtttaatttaatttgttctagaatgtagtttaggaccaatgtcctggaaacaaaattatggtgccgccattttccgcaaagtgataattattgagtattgacccaaataaaattattaaccgttataaaataaaaaatactacagtctaaacaacattagaccatacaagtttaaatattttatcaaacggcaatttcaacctaatggggacgtcccacaatgaatcaccacaatttctcaatatcaacttgctcgatgtaaaaaagaaaagattgttcgatgtaggcttgtctacaaattatatatactcaggaacttagaatttgaaacagtactattttcattagattaattatatataattttatattgtcaaagtggcaataccgatcaactatttccaatagattaattatatataatttttaggattgatttttttaaaatattcctgtcatgatttccacaaacattatcagaagaaatacaattatagatagttgatcggtatctttttaatttaaatataaattata

SEQ ID NO: 66940 - DNA, 525 bp, Arabidopsis thaliana landsberg
gatatcaaaactatactcattctgtttgtttctgttattatttataagttctaattcctattgctctgttgttgggacaggggaagaggacaaagtacttctcttgaattacctctctcattggcgtttccttgtacatctcttgaatttttgttttattttttgactgcaaatcatcatggtactgaataacttatctgttgtctggagatttttaattgttatgtgtctttgtcgagaattttggtttagtaaattcactagtatatgacctcggagaatgtattgatgatgtattcaaaccaagagacttgtatgatatgggagaatgtattgatgatgatccagttgaggatattgatattagttagagatgttgtgcaagacgtttgagtatgtgatagcttgtaaaacttggattttggatttaagttttgctttttcctttttttttattctgttttatgtttcatattatataaatgtacaatttaagaagacaaatggttttattttaatgaatat

SEQ ID NO: 66941 - DNA, 568 bp, Arabidopsis thaliana landsberg
accatggcaatcaaatgtcattaaaggaaactcccacgctttaattttagggaaagagaacggtagcactctaaattgaggcacatttaaagcaacaagattgatcaaaaaaaagtagaagctaatttgatcaatcttttttttttactttttttttttttactttgtcgcggaatggttgttttattatattttcgtttctattacaatcatagagaagtttttagaattaaatagttgcataattagaagtcaaaataggttggataaaaaataatctttctacaactttttactacttgtgatgaaaagtgggtataaatagcttcatttattccactacaatattaatattttgaataaattttaaagccttttttttttgtgaaagaataagtggaataaaataattgttctattcagtttgttttgtttaactattttcttttcatgtttattcctgtactgtttaattatttattgtagacccttaagttgatatgcactcctattattgatatattaatatttgatttacattcagtcatccttagtttggacgtggggg

SEQ ID NO: 66942 - DNA, 639 bp, Arabidopsis thaliana landsberg
ctactggttaatttcggcggcgacttgcgagtgcgcggccccttgcggaacaacagcagctggcacattggcatcgaaaacccagaactaggaaaatctcctgcagccgcgctatcgcttaataacggcgctatggccaccagcggcgatgcgcggcgcttcctgctaaaagatggtatccgttatagtcacatacttaaccccatcaccggctggccagtgacaggcgcccctcggtcagccaccgtactcgcaactgactgcgtacgcgctggcatgctggcaactctctcactgttggccggcccagaagcggaacaatttctgcaacaacagacagacattcgctactggttaatttggcaataacacggcattgcaacaccgtggctcacaacaacaaacgtcgctcagacaccacataccaaggtcgcgcttaacctggctgcttagacatcaaatcactttcgagcacgctgttgtcgcgcagcagccgctcaaaatgtttgcggctcaaacgcacctgcatcagcaaattgccatcttcgtcggtcttttcatcaagcacctcgcctgcttgatgcagcccggcacgcaagcgtccggcactcggtggcagtgttagccagcgctccacta

SEQ ID NO: 66943 - DNA, 481 bp, Arabidopsis thaliana landsberg
  unsure (1)..(481): unsure at all n locations
gggcaaaagcactgggggtatctgcttttatagattcttttatgcctttgcttttactaaggctcggttcccgctatgcgtgggggataggtggattgannnnnnnnnnnnnnnnnnnnnnnnnnnnnnnnnnnnnnnttaattttttactagcgtcccaaaaaacacggattcatttatgaattgcatttagaatcccactctcgttcgtagaacaaaaaaagtcgctgttacaagatttgaacccgatgacctcaaggtggtgagacttgccagcctccaagactgttcttcccggcgccggaacgtgataaattggacttgactcttttatacgctgactatttgactgtgcccgttttgggtatgtgcccaaatcgaataccctacttgcgcaccttgttttaagggccggttcagtcacagagaaaaagggtcctattttagggcgcttatatgctcaccagcctgatcctgttga

SEQ ID NO: 66944 - DNA, 917 bp, Arabidopsis thaliana landsberg
gtgggaacgtagagaaacttgcgcaattgaaaggaatgaatagcaagattattggagcggttaaagcgattgaaaagctgccaagtgagatctcaaccgcaaggaacatagctgtcgataattgaatggtttttcctttgtaggctgaccaagaggctcctctatatagggaggatcactagaaccgcaaggatcgcaagaggatcaaagctgtatatgagttttcattttttctaaatcaacctgtttcttctgaaaaaaagatagagagtaatgagttagagaagtgcttgaatggtcgatcacaacatctgctgagaattaaacaccaatgtagaagaaacgaaggagattattctaccgcctaaacaaagagtcttcagccatcttttttttttttttttttttttttggtcaacctgtcttcagccatcttaatacattctttagtgcctctcgtgtaaaacaatgtcagttcatcgaaaaacaagaccgggttaatctacgaatctggctaatagacaatcgctagttctattctgaacagtgaacacctttaagataccaatctggaactttaagatttcttgtataaatttataggacttcaagaaattgaactggttcaaggtttaagaattgagatgaacctgaacctaagattacaggggagtatttcactgtgtccatactaaatcattaagcaatgctgaatacttaaagaggtcaagcgactagatcgacctcatcgcgttgagggtaaactacatcgagcctcatcatactgttgtactgatcaggtaccggtgcaccaccttgcacacacatctctataaccgcaggagccttcccgtaaaacctcttcaagctattatcaagaacagaaccatcagtaggatcccgaacatgccacacat

SEQ ID NO: 66945 - DNA, 301 bp, Arabidopsis thaliana landsberg
ctttaccttatgattgcatagtgcatatatgagtacctataactgtatattttagtagtctgagaatgtataaggatatggtgattatgaaactttctcatgtagtgagcactttctcatgtatatgctttaatctttttgttttagttaaaacgtcactaactttgaaatcatttgatttacctggggtctttagaggccgaaagaagacctctgccatttaagtccaaacacaggaataacaaactactctggtctccaaagacaatatatgggcgagatgatcagattgaaagaggat

SEQ ID NO: 66946 - DNA, 506 bp, Arabidopsis thaliana landsberg
cacaacgatcttggattcatcatccctcgtgatcagctgtgctacttcatgcatacgttccggctttcctacactggtgccgccgaacttcataactttcataatatcctgcgatttttaataatgggaagcaaaggtaaaaaaagtcaatggtccatagtcaatggtcaatagtcaaaaagctaacagcccccgacggtacgttggggctaaaggctaagagccagtttcccccctacttccgcaagatcagctaccacgctgtcgggaagcgggattccttcactcctacgtactgcttcggcctcgcgctcggggtcgccggggatcagcactttttcgtggccgggtgcgggctgtgccgaccggaaacgcgagatccagttatccatatgggtcttgaattcatctgccggcctgaaagcatctatgcgcatggcgccgaaaaaatggcccaggccctttgcccgcatattttccggcatgggtacataggcaggaaaagg

SEQ ID NO: 66947 - DNA, 371 bp, Arabidopsis thaliana landsberg
aggaagaagctcaaacgaggttacccaggcctgtcaatgagagcaagagaccgacggagaaacacgggggacaacaacaaaaaacaacaagggccccaaaaccgaccgagagactgctccaagaaagcgaaccgaaccgaagaaagagaaggacgtcgctgatgaagaggaataaagcaccacgcaatagatcaatgcgtccggcgggatgcagtcgccgcccacaaagaaagaaccagagtaaaaagcctaagggacaagtcacaatgcactgacgtaagagacgacggcgggcaaccggaagctaataaaaacaaggccgggcttccataaggcccaacaaggcccaaaaagcaagactggggacccgc

SEQ ID NO: 66948 - DNA, 2028 bp, Arabidopsis thaliana landsberg
ctgcatatgtaccaaaatggcagaagcagaagctggaatagaacctgtttacatattatacattaatgtaactcctccaacaaaacagaagagttaatacttagcaaaaagagagaagagtttcagacaaacctgaacataagacaatactacaataatccctaacaagccaacaaaatttgctagaagaatgttgagaataaatgggagagagtcgtcgatggtttatagatcagaggaaaacctgaacagagtaaaaccaaaaaaagaagttaagatgaagaacaagacacatgattcaaagagtttccttgtgtctaacctattaagtattcttccacttggtgtctgatcaaagaactgtgtaggtgcatttataagcttactgattaatgcattatgaacatgcactgctgcttttaatcctccaaatgcaaatgagaatgccctcaccaaggttaatattaagttaatgatgcaaaagatacagagaaccatctgcaagattagtagttattattaaactagaaaaacacagagacataagagttacgtttcgtggttttatgcgcgagtttaataccaaataaaacgaggttgagtaatgcgatactccttttcctgtcttgtcaacccaatatgatagccacaaatcatttccattacgagacgcttgcattaaaaccgctgaaaccaatattacaatagtgatgaaccaaccagaaaacacagcatagttcctgcataaacagataacaatcacttacttatacatataggcaacaaaaaaaaaacatggttaagcaaattttgtttacctataaaccatcatttcaactcgaccctcttttcgttcctctaatttgacgatatccgccgcagcttcactaatttcatctacaccatcttccttgatagatagagtctcttttcttttggtcaagtgatttggtgatgacatatcaaattcattggttaaagaaaatgttggagaaatggatttgggcatatcagtaacacttcctgaccaattcacttttcctttgtccatcacaacaatcatatctgcacaagatatcgcctgtcatagtagaaacagcttgacggtatgagaaaaaaataaattgagatagataaatatttaacgtgtagagagatttgagacctgaatgttgtgagtgcacataacacgagtctttttgttcaacagaggacccagaagtgctctttgcaatatccaacatcctacttgtgaatccactgcactcagtacatcatcaagaaggtacatgtctgaaccatgataaacagccctattgataaagcacacacaaaatcatcagaaacacaacactcaagtctatggaaggtgaaagagcataggagatatatagcaaacctggccaaagcaaaccgagctctctgtcctccggataagtttactcctttatcacctatacacgccatgtctcctccgaccataagtgaaatatccacatctagtgcacaagcactcaatgtctcgaaatacctagtttaacaaagtcaccactagctttgtctatcagttacactagatcataactttaagagttgacgaagcaaagttactaaaccttttggagtcaaaaggcttcccgaataaaatattttcacgtacagttccagacaaaatccatgggaccttgaaggtgagtggggtacatgtaagacttctcatagtggaaaccaaaaagaaagtatttaaccagtttacaaacctgtggtacatatgccacagagccatttaatagtatagatccatgaacacaccgcatttcgcctagaagtgaattcaacaaagatgttttacctgaaccaacctgaaaattaagcaaacaaaaagagattaagaaacacctaatcataatttaatcgaactatgctgctctaacggtggggacgattcgtatacctccccgataactgcaacaaaagatccctttggcactcttaggcttacttgttttattgtcaagtgtataatcc

SEQ ID NO: 66949 - DNA, 698 bp, Arabidopsis thaliana landsberg
aacgtcttatggtttagctctcaaatttctccttcgattccatcttcctccggcttcaagtcgccggatcttcttgatttccgattcacttggctttcctcttctcttccttttaacacacgacgacgcttcatagttttttgtcgtgattcaggtaaacaaatatcgaaaactagtttcctaaatttgttgattcagatcgatcttttaaccctcattatcgttttcaatagcttctatggattcgattttctgagtattgttgcttgattttgtaggaagaggtatgtaattcaggattttccggtgattttggtgggaacgtttggagaaatttcgagcttagtagtattcgtaggaaagttttcttcttttatgatttgtagtttttgtggattaatggttgaaggtgagaaatggggcttcgatggatttgaaaagattttgtatcttcgtggaaatgagatcgttggagattgcagcaagtcatctcattcgtattcacgggtttgcttaggtactttggagatattgagagttttggttgtttagtctttgataaaaaggttgtttagtttgttttcgagcttagagatggatgaagaggctacttcgtggattaggagggctaagttttctcaaacggtttcttaccgtttgaattcttcaaagttagcttctctttcttttatgataaa

SEQ ID NO: 66950 - DNA, 505 bp, Arabidopsis thaliana landsberg
  unsure (1)..(505): unsure at all n locations
gaaaattatgatgaattcttatcatcccaaggccagatattgatctatgacacttggaaggccacatatctgtacttgttaggctaaagacaaaccaaaccttttcaattgcctcaaaccataaagagaaaaagaaaaatgagtaagaaaatttaatctttgccttctttttttcaaaaaatctgtcaatcttgatggttcagtatgataaaatgcgcaaatttaggatgatatgtttgttgtattattacttttctttcatgttctatatgtagtaaaaaggcatttgagagagagcccaaaatttacaacaatacatcaatttgcagttattgggcctaacaggcccactcgctactacaattattagacaggcttggcttgccctggatacataaaagcaggcacacaaaaacgcanatgaaactagtttagttaatatacaatacacctattacaaaataatacacactggagacctaaagtcacaaagcatttgtctcat

SEQ ID NO: 66951 - DNA, 1757 bp, Arabidopsis thaliana landsberg
acgcttttgatcccttcagatgctactttatcagggatcctgtcaatagcttatatgccattcctcgcagaagctgtagatctttgactcgtagctactcctaacaagtggattcttgctgaactggaacagacttaacctgagccagcccgtgagagattgtatgtagtcacgttgggccttgaccaagttgcagaaagagtgatgccattgttggacctcgagctcaagctgaagagttgattgtcggtgaagctcagatgttggttcagtggaggggatggtgttaaggtacttaagctgctgcacaatatgggtttgaacctggtggctctcgtacatactcctccacatacacattagcctacattacattcatacaagaaccttgttcacattgaccaacataagatactttaggttaatgaagcaatgggaatgcacaaaacaaaccctttaacaagctcgacaagctgagggtaaagctcggtctctctgagcttgatgatctcgttagaggcgctttggatggcttgtgaagatactgagagctgagattctaacttctcgacgtctttcttagccttctcagtcttgacatactcagctctcttcatctcaagcctcctcacttgctccactttcttctcatgatccatctttatgctctctgcatactgcaacaaaacccacattcaaaaaacaacaaaaactcactcaatacttggcaagatatttgtgccagtgtacataacacattattcatcagaattaagtacacacgtgggtctcttacactatctgctcacgcttggacccaccacaagcctttaatgcccacatgaatcaaccaaattcccaaaaacaaaacatttatccatatttggatgaaatctaagcaagcaatttcaatattcaaacttcaaactgaatataaacaacattttcaaactctttccacaaaacttaacatatgaagatacatcaaagactaattgttttgttcaaagattgcaactttatgaatgaaatgaagtcaaaaagtgaataccttgacctcttgataaagtttcttctcccaagcatagagtctgtccactgtagatgaatggctaccaacaatgcaatttcctccaattactcctcctgcgtttctgtattcactcaacttagaaggagcaaatccccttgtccaaaacgacgtcggattcagattacattcgtagttactactactgtacattttccctgaagaaacaaacacaaaacactaatcaaaatcaatcaaagaagagaagacaagagcttgattgttgttacctgatttggaatgaccagaaaagtcagtgatagaggttgagatttcaaggagagaagagagaggtgcaccagaatctgcagctttaaggaaatattcatcgacttctttaataatctccattagatctttaccattcctcgacaccacaactgctagctcacttccagtcgtcgtcgtcgtcattgtatctttagagaatccactcacaacagacgaagcttgaggagtagctgtcgtcggagccgtcgtcacagcagcatcagagccagttcctgttgcggttcttgtcgcggtggttgtctcttcctcccattcttcctcagaggaagaaggaggcggcggtataaacggatcccagaagtcccatgtagaagaggcggaggaggaggaggtggtgcggcggaggaggatgaataacagaggaagtagtggtggt

SEQ ID NO: 66952 - DNA, 499 bp, Arabidopsis thaliana landsberg
agggcgcctaccaaagcaatgctcacattacttgctatccaacaattacctcaatcaggacatggttgatttaggggataatctaactgttagaaaactaagaaaattttaaactactatcttattttacaaaaaataacactatcgttacctactacctcacctgtgaatcatggatcaggctggcttcggatggaggtttttcatcaataagaacattgttttcacactgtaaccaggaaaaatattaatttcacaaacggtgtaaatgcaatcctggttaaaaaaccgcaaaaaataagacagttttaatatatgttatcccacaaaaaacatagttactaaccacggagttatcttcagaaacggattttgctggaggggcaacattagttgtaactccgttagcggactacaaagcaatataacacaatatttataatacaacaaacacacacaccagataaaaccacattatatcgttgatgataaaataaca

SEQ ID NO: 66953 - DNA, 352 bp, Arabidopsis thaliana landsberg
gtgtatttcgtacacaagggatctgtaaacagatgtgtaccctatgggtgtatttaacatacagggatggcacacaatggcaaccaaccaattctagcgatagggacgggtcattcaaactcataacacagcactcttgttcctcacgagtctcacaccctgactcttactctctccaaactacaatatcgaatatactttcgatggcaaaccagggtaacatacggaaacagtacccgatataaaaggcaatgagcatatattgaaggatttttcacaatatctaacccccgccatctatgacgataactcttgtagactgaatggtaatcttgataatacatcaaacgta

SEQ ID NO: 66954 - DNA, 2012 bp, Arabidopsis thaliana landsberg
catatccagttatccactcatcactcgttatacccacacacaaaaaagattctctaggcatgtccgaaatgaaaatgaaatattcataaaaatcaataaacttgtgagttttcttattaaaatccgaccaaaataaccttaaaggaaaacacaaagtcgcctcaaaagtctcatgaacaagatttaagggttgtccgattcttacttcacttttgtttttttttcaaaacaaagggtttcttagtgtaaacataactaaatgacatgtattattggaatagtattgtttattacaaaattactacacttaatatacatgcaagctataaaataaaattaaaaaaatacatgcaataggacatgtcgcattaatactatacaccggctttccgtatgttagttggatctcagttatggaacgtaaacatatcttaaataattcaatatccaaccaataataaaaataatacatatccggatatgatagcatatgtgaattatttatatcaacatttaatgcatccaattttctgaataaaatatttgatatttctcaagccaaatactaaacctaattttgtttgcagcaatactttaattatgattatcagattcttagaacttgtaagttgcaacaccttttatacttaaaagtaaatattatcaataatgatgaattgtggcataatttgattagatatacaatttcggaagaaacttcaaaatgtatttttcatttttaatctttttgttatgagaaatatcttcttttttttttgtatgttatgagaaattttataaactaaaataaacagggatgtgaagcatcagtgctgctagctggatcagccagtggaccaggagaacaatcatcaatcccaaatctgacactacgtcaacaagcctttgtcgtcattaataaccttcgtgccctcgtccaaaagaagtgcggtcaagtcgtctcttgctcagatatcctcgctctcgccgctcgcgattccgtcgtcctagtaaccacatctatcactttttcgtctataactcaatcacatttagtttcaactaaccttggattatgacttgcggttacatgcaataatacaaaccattagtctacaagtcacactaattctctaacatgataattatttttgtgtgtcaatgtagtcaggagggccagactatgctgtcccacttggccgacgtgactctctagcgttcgcgagccaggaaacgacgttaaataacttaccactaccgttcttcaacgcgagtcagctcatcgccgacttcgccaacagaaacctcaacatcaccgacttagtagcactttccggtggtcacaccatcggaatcgcgcattgtccgtctttcacagaccgactctacccgaaccaagacccaaccatgaaccagttcttcgccaacagcctcaaacgcacttgtcccaccgcaaactcgagcaacacgcaagtgaatgacataaggagtcctgacgtgttcgacaacaagtactacgttgatctcatgaaccgacaagggctattcacttctgaccaggatctcttcgtggataagaggacacgtggcattgtggaaagctttgcgatcgaccagcagctgttttttgattattttactgtggcgatgatcaagatgggtcagatgagtgtcttaactggaacacaaggagagattcgttccaattgttcagccagaaacacccaaagtttcatgtccgttttggaagaaggcatagaggaagctatttccatgatctaaataaccataaatctcgacctttcctttgtcaactctgtttttatttagttcatgcacttgtggttgggttgtcgaatgcgtaaaactatctgataaataagaacgtcgcttcatcttaattaacttcatccaataccatgcactccttgattatttatgtgccaatcgagttactaaaatttaacgggctaaaagagaatttaaattaggcccactagttacaataacct

SEQ ID NO: 66955 - DNA, 693 bp, Arabidopsis thaliana landsberg
ttcagatgttgataaagacgtgacatacatagttgtctcagtaatctaatcaaggactcctcatgtttttaacttcttcttctataaagttgcatgagatttatatctggagaacatatattgctctaattatgtggtcttattatcatcaatatatgcctttttctacatatgaatatatgatcgacatgtatagatattttttgttgttcaaaaaaaaaaaaatgtatagatatttttttcattttccaaaaggattgaatttcgaaatggtgtagccaccttagaggtatacaacaataaataattttcccgacttgtaacaaatgtttggaacaaaagtgtcaattagaatcaaagtaaccatcagatgccttttataaatttctttatctatgattattttttaaccaaattcagacacttctatattactaaaagccaaacttgatatctatttcaacaaaaaaaaatttttttagtctgctgtgactcagtatatctaattgttttcacatcattcataaacttttactagtccattgtaaaatacagtatattagaaattgttttcctatctatatatgcttaggtttaagaaaacaactttggccatgaatatttgagtttttaagtggttttggattatagattttgccaaaaggaaaaaatattgatttaaaattacaaaaa

SEQ ID NO: 66956 - DNA, 375 bp, Arabidopsis thaliana landsberg
gaatgtaacacaaatcaggacaaaacaagacatagatagacaatagtgactcaaagaagaaaaacggaccaacaaggagacctaagacatacgaccaaaatggacccaataaggcaaatactcaaagaaaagagcaacacactcacccacgcacccgaaagtgcgggagcgagaaaacaccgtgacgttgggggtaacagccgcagagccaaaaataccatccgaaccgtccgagaacacaagagcgacggctgggagagggacacgggacacaaggaaaccaacgacccgaggagagggatacagaaacctggacaagagcgctgacagcagaacacaaaaagagggaagccaagaacaacccacaaaaccccc

SEQ ID NO: 66957 - DNA, 512 bp, Arabidopsis thaliana landsberg
ctctcacacgcacacttgtcaatacgttcaaggaaggccaccgagtccgccaccggctcctcccccaaagccgtctccaccgaggagtccaccgccaccacctccgagtccaccaccgcctccacctaaccctagtccggctcccgcgccgatcccagccccaatcccaagcccaccaagaccagctcctccaccaaggccaagccctaagccatcaccgctgccaccgcctccgaggaaagatttttcatccttgaattgggtatcttcggagataagtttcctagcaccgacattggcacaaacaagtgcaatgagaaggagcacaagcaagttagtgaacgtgcctttcatgttttgctttgttggttcaaattctttttgtttatggtgaatccctgagctgtgttacaagaccatatatataggctgttatgtatacacacacatacgtaatgtaagtgtgcaataaatgcagataaaactttggatataggaccttgagtacaatg

SEQ ID NO: 66958 - DNA, 170 bp, Arabidopsis thaliana landsberg
  unsure (1)..(170): unsure at all n locations
taaagaaccttatgtgggatccgacagtgtgatggttggggatggagccttcttgcccatctttcatgtgtggatcgtaccacatctaccaagctcatcatggtangtttaccaaattaaatgannagttcttggtttgtccctttcaaataactaagtcnntcttctct

SEQ ID NO: 66959 - DNA, 521 bp, Arabidopsis thaliana landsberg
cacctctgacaaagttcaacagtcacgtaactggatttctgcaatacttccctgttacgaagcaatcaccaaaaaatgtagttagaacacagtgattaatttgtaagagaagtacataagtagaagaaaaatgaacttcccaattgctactagaccaatgtcaaaatataacactgcactgcatagacgagtgcaatatagttgagatgaaacacttacctccttgcaaagacggtagagacgcagaggattgagtactttcttcatcaagtctcagcaagatgaatgcagaggattgaatactctaaatctgtcctaagatctttcctcaagaagattttatataatttgccaagctttttcaaaggctggtctaagcagaagattgaatatatcatgttgccccagtacaacacaagataatatatgcagaaacttgaattcttcttttttcttagcagagaaacttgaatctcagagattattggatatcatttcaagtattttataacgtcgtccca

SEQ ID NO: 66960 - DNA, 584 bp, Arabidopsis thaliana landsberg
  unsure (1)..(584): unsure at all n locations
aggcggacattaccccttactctgtttttttatgtacacagnntagctacgggcactttgctagtgacgttgtncntattatccgtccaaccnnngttactgaagctcttttgcttnnctgttcaatatatcaatgacntnngaagctaactttgcgttcggttaaatcccgatcacgttcaatcgnnatggtcggcacagtattgatcggtnncctaatgatcgattncctgcacgtcactttcgtggtataccctnncaccggtggctctttataaaaacctcgcgacattaaccttggcgttactcggctgtggttcttgggtgtcattgggnnnnnnnnnnnnnnnnnnnnnnnnnnnnnnnnnnnnnnnnnnnnnnnnnnnnnnnnnnnnnnnnnnnnnnnnnnnnnnnnnnnnnnnnnnnnnnnnnnnnnnnnnnnnnnnnnnnnnnnnnnnnnnnnnnnnnnnnnnnnnnnnnnnnnnnnnnnnnnnnnnnnnnnnnnnnnnnnnnnnnnnnnnnnnnnnnnnnnnnnnnnnnnnnnnnnnnnnnnnnnnnnnnnnnnnnnnnnnnnnnnnnnnnnn

SEQ ID NO: 66961 - DNA, 521 bp, Arabidopsis thaliana landsberg
attttctgggagattttcttttcttttatctgtttctctctcttacttttccttcattttccactcggcgtcttgcgaactacgcaagtttcttagttactactatttcgttacctttttttggcattttgatcgaaagccttttctcgagattaacgctctccgcccttttttccattttataccaattaaatgttgtgtttcgtgaaacgcgaactattctctggtaatttctcttgattttggctatgtgttcttcgttgatcgtaattttctcgcttgttctgtgaaaattttcttggctgtttgtttgtggtttcgtttcagtgtggtttatttctctgttcaatcgctgccccttcaatttttagatcagaatcttaagttgcttttgcttggtatcctcaatttttttgtgagtattgttcaagatctgtgacggaaactgagatctgtctgttggtgtttttttgccttttcaggtaggtgggtttgttcgaaatgggaagactattcgtgat

SEQ ID NO: 66962 - DNA, 582 bp, Arabidopsis thaliana landsberg
  unsure (1)..(582): unsure at all n locations
aatccgtgtccgactatatcctgaatatttgtttggcctgatgaggcaaattaggccctaatcaactttattacaaacattaaagtgagaaatgattatttttacgtgtgtttcaggcagaaagtgcaatttctgctcttaattgcagtggtgttgtcttgggagagctcccaataaggtaagctcacgaataagaaattttttgtttttgtttctgtggtcttctctttgtcctttttgtgttaaatttcctagtatattagaaatctaattacctatttatgaagaaaaatgtaacaacttgagtgctcttaaggttgatcataaaagtatactgatcactgtgggattaatatttgcctttctctatgtgtgtgaagggtaagcccgtcaaagacgccagtgaggctacaccactctgatttaaactaaagctaatagcaatccgatgaaagagatctattcatattgagacaaagaaatcaaaagtcattttaagatacttgaagcttttgtttatataaagaccttcttgatctcaagctgccgatataantttttggaaccttagtaactatgcta

SEQ ID NO: 66963 - DNA, 580 bp, Arabidopsis thaliana landsberg
ttggtcacgcatagtgagtcctcttgagccaccaccatcacttaagtaccctgatgattgatataaaacctcaggtgattctacgattgtaatcaaaatccaattctaagagaaaagagcaagtcatgtaccatcacttgttgaagttagctgctcaaggagatctagttgtgtgcgtactgatgaagaagacgaagaacctacaaggaaacgaattcgatggtaatcagaactcaaaagatgaaactttcacatttctacatagaaatcacgcaaaaagatcgaaacttttttctcaattcctaagttcagtgaagacccaatttggcaaattccactaaaaaccaagaatgaacaagcataaatcgggtcatgtaccggagaaagaagacgaagaagtatcgttgttgttgttgttgtcgtcagtgacgccgatttcacttcgctcggagcggacacgtgttgctggaggagaagagagttgcagaaggagatgatggctctgtttggatcgagaggaagaagatgggtttgaaattgggtgaagagaagtggagaagaagttcaaggccatcacatg

SEQ ID NO: 66964 - DNA, 380 bp, Arabidopsis thaliana landsberg
  unsure (1)..(380): unsure at all n locations
cgcgcgatcctcgnaaacacctggtcgccgcgtttcagttcctgcggcgaaatnnnnnnnnnnnnnnnnnnnnnnnnnnnnnnnnncgactgcttgatgaaacgcgagccgggcgggatgacggcttcggaaatgccggcgcgggtcggtttgaacaggtcgtacagatcgtgcatgcgcggagacacgcggcacagctggttgttggcaaacgtggtcacctgctcgcgcgtgcccagcacgccgagaatggagccgacccagatcatctggtcggccggctgagccatgcgcgccttggtgccactcttgagcgccagtgacaacggggcgtcatgcatgcgtccgatctagtgcacgcgcatgccgatcagcgggct

SEQ ID NO: 66965 - DNA, 498 bp, Arabidopsis thaliana landsberg
gacttggccatgccaacgggcgatccatgcatcgtgtcacttgaactcagcgagcaggaccgcgtcaccacgctcgtctgcaacctgacgttcgcgtcgaagcaagcgcgtgaagacgcagtctccaccggcatgaccgacggcatggagcacagctacacccgcctcgacgacatgctcaaaactgcaaagtgaaggaacccggtgtcagcgttgattttctacaggcctcgcgcaattgaagtccactctgaccctgaggtttcggccgtactcattcgcgcatcgattcatggcttctgtgacgccgcatatgccgcgacattgatcattccggcaaggtcagttgcgaggcttccgcgcgcatgggcgcggaaccggggtcggtacgccggccgagccggaacaggatcagctcgcgcgcaatgtaagtgggagagcggccggccagtggcgggacaatgccgatgccgggaatggtctggcctttcagttgcg

SEQ ID NO: 66966 - DNA, 447 bp, Arabidopsis thaliana landsberg
gaatgtgggggtcatgcgcgagttcttaaaaacagcatgagatgtctggttcatacgataagccagatatttctccgctctcacagtttttcaaattgagatcttcagttttttttctctctcagcctaaacagaacaaaaaagcgttaaaagtttctaagttcatcaatggagaaatcaatggagaaaagcgtgagctctgctgcttctggtaaatcttcttcaattccttctatctgattatcacttcccatttcagttttcgtaatgtttttctgattcgaaaatttctgaacaggtaattcaataaactcgaagctgaggtatcctctcagcatcggctcttagaatccaagggaagggggaagccatcctggattcctggattttcatctggcttcttactattgcccagaaaggtacctatttgatttcaaataatgatcc

SEQ ID NO: 66967 - DNA, 544 bp, Arabidopsis thaliana landsberg
accccggaaaaggattaaaaccggaaagaaaggaatacgaaagcagtgctaaagatatttatcaagatgatctatttgatggtgtgagtgggattcttcaattggtttggaaattcatgtaaagtcttgtaaatacaaaaaacggagagtgatgtatatactcttgtaatctatcgcgtcctgtatcataacctcctcaagactgaaattgtaagtgattgtagattgtatgtaatattaactaccattgatccttttattgtatgtagaaagtagaaacactatttgccattgaaatcctctttaaacactctctgtatatctatccctttatatatatttcaattggagaatcagaaatatattttttgaattctgaatgtccacattcttagtagtgagtaagagatattatgctttggatctatgttatgatttcaagagtaacaaatgggttccaattttgataaaagaaaactctgtccttgttgcacatatatatcaacgggtcggagggaaactaaaggactcacgggtccatatc

SEQ ID NO: 66968 - DNA, 363 bp, Arabidopsis thaliana landsberg
atctattggatcagaatctttaatgtcattgagactccggtccatataaaaaagaacagatttctttttgcgataaattaagatttgatctaacagagtatttgatgagccaagtatatagtatatatagggataagaggaaaaggtttcaattataagacaaacacgtatctaatcacgaaaccgtgttccttaaaagccttaccgcagaagcataatcagataataatggataagcctctgactttcaatattgagagccgaccaaagaatctcaaagtgatggtctctgtcattgtcaagagaaatgtcaacattacgaaagtgagatcgaaatttcagatgtaactaaagatcaatttc

SEQ ID NO: 66969 - DNA, 158 bp, Arabidopsis thaliana landsberg
aaatgccatgaatcccaatcccatggtgtctacctcaaattcttttagactttgatacatctccactttcattgtgagaagaagtttgatcttctcctcctttaccacatcccctggttaacacattattattcttcttatcacacttcacaaacatt

SEQ ID NO: 66970 - DNA, 502 bp, Arabidopsis thaliana landsberg
ggcttgctcctcctccgacgccgaagcatgtataaaacgacaccgttcacgttaaaaccacgtgatcgtttcttttcttataatctgatctcttttgggcccccattaatctgattttgaatttccatatataagaattaatggtgatcaacaggatattcaagatggggagacttttccctgcgatgagcagggaagaaagattttgaaagaagatcccaaggtttcttgcatacaaaccaagtctatttatacttatgaaaataaatacatgcaaccactatttttaaagtattgggtgaaaactataagatatgaagagttttgggtttaatggtggaagtaaaagctgtctcttaagagagatttcacgtcataactagaaaagacagcgtgctcttcctgtgttaatcgttagttacgggaacaagaagttaaagaacagctaattattttggtaattgcttccttctttattttatttttgggttcaaaagttggt

SEQ ID NO: 66971 - DNA, 144 bp, Arabidopsis thaliana landsberg
ctacatcgggacctactggaagctatatgttgcgatacaagaacgcggtgtaaagaacgccatgcgcgctctgtatcatggacttgaacattgtttgcaagtaatctttcttggtatgtttctcttcaatcccgagaaatcggt

SEQ ID NO: 66972 - DNA, 1462 bp, Arabidopsis thaliana landsberg
taacccaaattagaagtcgagttgttttaaaatccatatataaaatttaatctttttttttttaagatttttttttttttttttctttcaaagggcgattcacaggcgatcttcttcttcaaccaaccgttctctttctacctttgatttcggccgacgctggcttctccggcgtcggtcggctttatctctttttattttctgttctagtttcttgttttttcacatcgacgtcctagatcgatgtggagattacaaaggttaattatcctcctcctttaccgagtgagatattttccgatcacaatccgacgatatcatcggagcagtgtcggcgtcatcctgctaaggctttgtctaagcggcttccagatttccaagtttgtaaccgatcgatcgcaccataatcgagtttttgactatgcaatcaacatctccatcttgaaccggttttctcaaaacaaaatttggaatccgagaattctaaatttcgagattggagacgatggagagaagttatggctggatcgtattcatcagcggcgcttaataatctacttgacggttatggattattatctctctggtcgtaaacaatttacaatttcacgagagtttaatgctctcttcatgtctacgccgacttggaaggatattactatttgattcaacactcattatgtcaaggcatcgacacatgatatgggacaaggatatgggagttccttgtgtgtgataggcaacgtagtctccttgacggccacgggcacacatcttttccggcaacggacaacaatttacggtgaagtcggtgctctatttttctcggcggtgatgcggatggacgatactattcggatgcgaaccagaagatcaaatcaccaacacgtttgggtttacggtacaatcacaaaaaactatatctctttcttcatgagagttccaaaatctagggtcttgcgatgtaacggatggatcgcggactttgtctttcgaaagcgtaaaagatgggtcatcgacataaaagagatatttcctaagctagaaagtcatacaagattgaaggataagacaaaagcaactaagcatatgattcggatcacggcgcttcaacttttttgctctttcgttataaaaacatttgattgtatttttatccttatgtgtaacattacagtctttggttcatattaataaagttatgatttggaggaaaaaaaaaaaaatttaatttttttttttttttttttgaacaacccgactgtaagatattataagaattcagaaatgagcatctagaaaaattacagtaagaaaacatgtactaattaagtgaaaataagactaaaaagaaagagtcaaagagattctgaaatccaaacagaaagggacaaagagaagacatgaaaaccccttcgccgcatactacgtgcgcttcacgcattggttactctgtctctca

SEQ ID NO: 66973 - DNA, 604 bp, Arabidopsis thaliana landsberg
  unsure (1)..(604): unsure at all n locations
tcttagcctcccgtgggttgccgtcctcatgtggcgcgcacgcaggagaaacaaaatcaatcaatgaagcccgccctccaccgctccattaccttctggtccggcttgctggtgatggggtttgtttgctttgcgtggcgagactcggtggagaacccgcgcatgtggcagcacgagctaagcgcagaaagcgagttgcgagtcgccagctacgggggtgcccttcacggcatccgcaaaagatggacgaaccagaatgaattgaggctgattccagcccggtctaacgagtgggcccacggcaacgcggtccgatcttcgatcagcacctagccaaactcggccaaggcactcgcgcgggactggttccccgccccatgggcaggagaccgtgatgccgagttcaaaaaagtctcggtaggagccatccccgccgccatcctgatcgttttcacgggtatcatcgttccccactggctcatcctcctcacggtcgccgctgtggatggggtcagttctcgcatttcaacatcccgtgcccagcttgtgaaaatacgagaactgactgactccatccaatccagacatncaagatgggcacgcg

SEQ ID NO: 66974 - DNA, 507 bp, Arabidopsis thaliana landsberg
acaaagttggatggaaagaagattcattccaatttataccatctgagtcgggagggaaacgattctcttattaatctcattcattcacgatcaattcttttcatctttcaagagattaacacatactgcaattggttatcacttaaaacaagttggacgaacaactactgcgtttgatctacactacaaacatattacccctctccaactaattaatctgtattaaagaggatgaaaagatgcctaaatgtctcttctttggtcatctaccttacgcgaaataccaccgaatgaaacgcctaatattcttccattctcatcctacatgatgaaattggaacgaactattgctttcatcgaaagttgtttctcgaatcgtgcacccatcgaaatcgcacatgaggcgtgttgaatatgcatctacgcttatattggaaagaccacactactactgcaggttgccagcacattgacgtgacctttaatgattgaatccgcaaggagtgt

SEQ ID NO: 66975 - DNA, 313 bp, Arabidopsis thaliana landsberg
aaaacaccttttttttattcgattacaaatgagtctctcaccaaccaataaagataatgataaacacaatgatatatatcattgttttcaatttttgaaagatgaaaataaaatttaaaatatgaaaatctctattaaagtaaatcgtactatattcttagaaactttaatgtttgatataattaaaagatcatagtttccagattggatctggacttagttgaccaaaaattgccaaaaaaaaaaagaaactcttaagagacaatttatccagttcactagtaaactgataagtgataacggagttggttgg

SEQ ID NO: 66976 - DNA, 354 bp, Arabidopsis thaliana landsberg
  unsure (1)..(354): unsure at all n locations
ggaaaaccttgacgggccgggaaacgtcgcttctcctagaaggagagagctgagctactccagtcggagactgatctgatccttggggctttttctaatgacattgagactctaagaacgggatnnnncaagaggcgctgggacgtaaacatgataatcgaggaagggcgcagcggcagaaccctgaaaatgttcttggagctgacaggaacgagggatgggatggtaggttaggtcaaacggtagtgtaggtagatagcccaaggcacagagatcgattcctggtggcccaaaatgatagttacagacagtgagttaatcggcccagaacgaaaagggaatcggccataacaa

SEQ ID NO: 66977 - DNA, 104 bp, Arabidopsis thaliana landsberg
  unsure (1)..(104): unsure at all n locations
ggtaaatttnagagaaagaacaaggggggagaaaaaagcaaaaaagaagacaagttaaaggaagaaggtggttaagaagggagaaggaagaggaaaagggggga

SEQ ID NO: 66978 - DNA, 259 bp, Arabidopsis thaliana landsberg
aaagaaagatcaacttcacaaagaaccatggaagctgagaaagaaacagaacaagaaggaaactcgacagtaatgaaacttccggtgttaccaactaaacgcgaacactcacagccactctatgacatcaccaattcacagttccatatcagcttcggttccctttagctgggaagaaaagacaggtatgcattaacaactcgcttgccgagacactcgttcataactatgaacaaaaatggtgagaatactgtagttg

SEQ ID NO: 66979 - DNA, 1363 bp, Arabidopsis thaliana landsberg
aatagtatctgtcttgaatctaagactgttatagattatttagtaaatatatcatgtttccttaaatgatcattaatatattatttatgatcataaaaattcttatattttcacaaaagaattgaaagaataagtcctccgtaagtcttaattactctttacgtagaagtaaagccggtaattatattgaaacggtctttaactttttaaacagaagattgaacaaactcgcatttatagatatcgcaatctcttgagtcaaattatttatttgattaacattcccttatttagtccatgattcatggtcgcaagtccaaatttccatgaataaactttgaccaagtcacaaaaactagtatttgctaaagacttctacgtaagattatttacataggtacgaaatggaagcaatacaatggtagctctttagtcttacaccatccaggtgtaagtaagaattttaaagtttccacctatccttatatattagatgattataaccattttgctggagcatcctactggttgattagttctgctgcaaatctttattctacgagaatggtacaagctgtgcccattaaaatacaataaagaaacatagaacattcagaatctcggacatcatatatatatataaacccatcacaatggacaagagtttacacccaaaaccataatgcaacaaaagggcactgctactgatatcagtttttagaccatacactttcaagtttaaaggcaagaaggaaacataataaacttaatatgatatagcaaattagatgtatgtcgatatttactaaccttccaagccacatgtgctaagcatagactacatctctagatgattcactggtaaagctaggcttcagagactccaagtaaccatcgtctttctcaacagtcttctgtttcatgtttctactctcctcaaacgaggaatctccttcaagattacttaagacctccttctttctcttcctcttgaacgtgtacttgatgcaccgatttttactcagtgctaaaactggagtttcttcgcacaaaggagatgcagaaacctccatattctcacagctctctttttcttccttccttgcctctgtttcgctaatctccagctttctgtcattttcatgttccctcggaggagatgttttcaaggatataagagtgccgacatccttctgagaagagtttggagacactattggggcttctccatctttaacagaagatatggagtcagtagcatcagcacaaccagacatttctaagctctctacaattttacaagacgaaacttcgtgaagacatactccatcattcacatctcctacttctacagaggaagaca

SEQ ID NO: 66980 - DNA, 582 bp, Arabidopsis thaliana landsberg
  unsure (1)..(582): unsure at all n locations
ggtcctaccaacctatcatctgaccactccataggtgcatcgagggtctaatgggtgaagaattcctgaagtcccaatgccttcgattcagcctggtccccactttgccacagattactcaagttgccatctaccatcctcttattgatccatcttgcgctgccatccagtgcaattgctcatccattcatctggacccagtcttgccttttagactctgcagtggaactcaactctacagctcaaccatgaccctgcagtcaaatccaaccatgacttcagtgcctgtccagagggctcagggtcctttgttatctcaccctacagactcctatgacttcccagctgtctcccaactctggcttgtcaagtgtttgccaccttaactcttggtagctagcctgtaatatatagatatagggatagaggtagatagagatatgttacatatgacttatgttgttagtaagttataaacttatgtttaatgtatcagctaagagttagtaattatgttggaatggcctgtttgccttggccagngtcattaaggaaagcggagctatctgacagatgactacc

SEQ ID NO: 66981 - DNA, 361 bp, Arabidopsis thaliana landsberg
  unsure (1)..(361): unsure at all n locations
tttatcatattggatatcgnaaagggtttaccaagaggaagtgagttcaatgctatattgtagggggtatacatattgagtaaatattgtcatttcataaccttgaagcatcctattacggcaaattctgtaccttaagtgttcattatatatgttgttagactgtacggatttcctgctaccatggtatcaaaacgggataatgtcttcttaaattacttgtggacagaactctttatgatacaaggcacaatttcttcacaaaagcactgattaccaccctcaaacatatgtgtagacatatgcggtaaacaggtgtctacagttatacttaatatgcttctgcaacaacgataccaac

SEQ ID NO: 66982 - DNA, 428 bp, Arabidopsis thaliana landsberg
cgcccgagattagaccaaaggtggaccaacctggctaaggagctctcggcaaaatattaattaatgtttggggattctattttatcaccattttatgtatcatggggggggtgtatgtatgtacgtcaataggcattaacaacttgacgctattataccataaataaatattttttgtttaatcatctattcaacagattgtttgtaaatgatttgaagatcacgcactagcaagaatgagaagcgcaacgtattttagtttttatttatgataaaaagaagcactacgtagttaaactagctagcaccaatcaatgatccataaactgttccaaaaacataaaatgcataactttcaatccgttgtaatcatatgaaccgtcaaactatgaatccggtctgagtcgaatgaaagacctgaaatgatc

SEQ ID NO: 66983 - DNA, 243 bp, Arabidopsis thaliana landsberg
ttttttttacggcatggcaacggacgccacttacgatagaagtattcgtggggttactgaagtgaaacttctgagttccatatctggtacatgggttgcagaacgtggaattgaactactatgtagatctaatcatcccgttgtatcctcagtcagctcatgtggctagagtcggtccggcatgttatactgattgtgtcgtaggttctgaatccctacattggggcagaatttgattccatt

SEQ ID NO: 66984 - DNA, 529 bp, Arabidopsis thaliana landsberg
  unsure (1)..(529): unsure at all n locations
aatatgaacagcggcaaacccctccagagcccaataaatcatttcgcctacccgctgccccccgggnnnnnnnnnnnnnnnnnnnnnnnnnnnnnnnnnnnnnnnnnnnnnnnnnnnnnnnnnnnnnnnnnnnnnnnnnnnnnnnnnnnnnnnnnnnnnnnnnnnnnnnnnnnnnnnnnnnnnnnnnnnnnnnnnnnnnnnnnnnnnnnnnnnnnnnnnnnnnnnnnnnnnnnnnnnnnnnnnnnnnnnnnnnnnnnnnnnnnnnnnnnnnnnnnnnnnnnnnnnnnnnnnnnnnnnnnnnnnnnnnnnnnnnnnnnnnnnnnnnnnnnnnnnnnnnnnnnnnnnnnnnnnnnnnnnnnnnnnnnnnnnnnnnnnnnnnnnnnnnnnnnnnnnnnnnnnnnnnnnnnnnnnnnnnnnnnnnnnnnnnnnnnnnnnnnnnnnnnnnnnnnnnnnnnnnnnnnnnnnnnnnnnnnnnnnnngtcatgcaaatagcgcatattctgtctaggcaaaaaattatgaatgattc

SEQ ID NO: 66985 - DNA, 735 bp, Arabidopsis thaliana landsberg
acatctgtcaaaacaacattaacaagaggtaacttattcatttacaaattactcatttgatctaattaatatgttttactagtacttgtttttaacataacatatggttgcttgataattttctataaccatcttgtaatcctgttgttatagaatatatagccactagctagctagaccatatagtgatttgaatactatttaatggacccgtattatctaccaacccacttggactaaaatttagcttctatatacatcatgcatgtgtgttttgtttatacaaatatataaaaggttcctatagcaaaattgattgattagtggtatatggatcaatgaatccatggttgataatcagtcatcgtatagatttattttgactcatatatcataagagaaacaaatataatgaattcatcatctaaacatatcactttcattcaaagcatggtttgaaagcaatttacacactctgtaattggttaatgatattcttatatatatatacatacatatatatatatataacttggtgcgatatattataaaagtgattacaatttaacatgtggtggatgaatttataatatataggaattactacaaatgctcaagtgaaggttgctcggtgaagaagagggtagagagagatggtgacgatgcagcttatgtaattacaacatatgaaggagtccataaccatgagcctctctctcatgtctattacaatga

SEQ ID NO: 66986 - DNA, 773 bp, Arabidopsis thaliana landsberg
cgcttctgatttaattggaaaggaaagagtatataattcgtatttgttcactttgttgctataagaaagttttcttacttgtttggacgtgatggtatctgtgattttactcttgagcacccttcgatttctcggtttcatgcaggtgattgattatcttattgttcatacttcatatcatagtgttattactttcaatttggattacattgttttgtattgaatcttgccagttattcagtacaagagaagtggagctgcgtatatatttgatcttggaagcacgcatggaacgactgttaacaagaataaggtgttttatttgtggctttgacatttttattctcttgattgagctttgatgaactgacttatagtattttactatcggtgtgttatgttttttgcaggtggataaaaaggtttttgcggatttgaatgttggtgatgtcattcgctttggcgggtgagtgtatatctttgttaagctcatggtgattattttggtagcttttgctttgattttcctgagctcttttttttgttttttatgcagttcgactcgattatacattttccaaggaccctcggacttaatgccaccagtaagatacacatttcactttacatatcctaattcttggtctagagcattttattggcattaatttttttatgcccctgtattctacttgtggtattgatttttaggagaaagatttacaattaattagagaagcaaagatgagaatggaaatgtcagaacgagaagc

SEQ ID NO: 66987 - DNA, 1109 bp, Arabidopsis thaliana landsberg
atctgttcgtgttgcggacctaagtgtctcacgtttccaggatctttttaattattttttctgaacgaccttttttctataatttggacatgaaggatgatgttgaggaaattacttggcaaacatatagtggagaactgactccaaagcaagaaaaaactaaggagaaagtactgaaacggttggagaaggttagtatttttgttcccaatcattttttttcgatgcaaaatcatatatttagctggtacttcttagtgacctgagtctctatatttttctttttttccgtctttctttctccattcggatgctcattataatttatagactattccaactttcctttattcattgtagatgtttttagactacgtccactttgcttcatctttatagggatgtttacttctgtgtagatcggccatatgaagaaggaagtagcagctattcgagccaaagacatttctcagggtggattgacacaaggacaacaaacgcagatcgctaggaatgagcagagaacggctgaggtaaccactttgttaatctgaagtgtcctaactacaatcttagttttggctgcaaaactctttatctgattagactttccatttcaattaactctatgatagcttctggaagaacttgagaacttggaagagacactgaatgacagcatccgggaaagtttgggtgccaaaacagggagaaaacccacccacggaaagaagaaaggatttgtagaagatgaggaagacttgtcgaggtaatctttctcgtgtctcagctattttttctcttagggatctcgtagtattcttacctgtgtttcagttaaaggctgcttcaagtgttcaacctctatatctacatcttcatgcaaaactatagcttgtgtctgttgtttctgattctcataaggaaaattatgttattttcagtgatgaagatgacttctatgaccggacccagaagaaaccatcaacaaagaaaggcagcgaaaaccaaactgtagaaactgttgattcacttctagataagagagacaatgtcttgaaagaaaaaaaagcaaagaatgaacagcttttaacagagaagagtaagat

SEQ ID NO: 66988 - DNA, 112 bp, Arabidopsis thaliana landsberg
aaaaaaaaggggacgcaaaagaaaaaaaactcaatggccaaaaggccaagggaaagaaaacaaaacaacaacctaaatagaaaatgaagaacatacaaaagccggaaccaat

SEQ ID NO: 66989 - DNA, 300 bp, Arabidopsis thaliana landsberg
gaggggtatcgttgttgcttgcatattgcaaataaatgtagactactactagttcacgtcctcattcctattttgtgtttgttgtacaggtctagttttcttctccatatttcaactgagcctatatagagcatatacgtgcagtttccattattatttggtggatcttccattggtttcactgaggctaatactgctggaagatggctaataaccatcaatatcctggcattcaggtaggcgtaaatactgagtgtgttctttttttcatatatctgttctattttgcaccctctttat

SEQ ID NO: 66990 - DNA, 302 bp, Arabidopsis thaliana landsberg
agtgatttttaatgccccgacagattaaaaaaggatttgtgtccgaaagaatttttctattctgattagtagtataagacaagatgtttgatcttgtaataaatcattttaattatgaatcaattgcaagttaaccatttatgtatcagacagaggatttttaagaatttcatttttggtaaattttctcaatataagatcgcagtagtaattgatgaatatctgcatcttcggagacatcagatctgaattaaatctacacacctatcattgccagatccaatcaacctactttcctgagg

SEQ ID NO: 66991 - DNA, 913 bp, Arabidopsis thaliana landsberg
tgcacgccagactccagtgtcagctccatcttctgctgaaacgttccctgcatagcctgtcattgcggttttcacccaaccgggacaaaaacagtttgcatatatcttctctccctctggtctctcggatagttctttagctagtactcttgtgtatgcgttcaccgccattttggagacagagtagtctgtgaaggaatgtggccaacctccagattcccatgttccttcttccacttgtttcaaaaactctgatactgttttgtcaacgatttcttcagttagagagtccacatccataagcttggctctcacgtcttcattctcaagtttctgttgaagagaactaggtcaaaattcgttgctgccataatttttaaggaagatgaatcgagttagagagatatatagatatatgtacactgtgtcggccttttaatctaccgagcgttgaagtgacattgacaatacgagctccttgacaagcatgtctcattagtggaatcatggcgttgattatgttcttggtgccatagtagttggtagatataaccatatgcgagaattcaacagagttatctgatccaacattgtagtttactcctgcattattaatctgcatgacaaaaatatttcacatcataactcatcaagagaaaagcctttagtatcaaagtctttcaaatgaaaagctcatttggttatgtgaattaatgaacaaaaggaaccaaacttactaaaacatcaataaatccatatttttctttaatccattcgcaaaactcttggattgaggaagagtccaagatatcgaggcggtggaaatcaacattgaatccaccttcttgaaggatcttggcggcttcgacgcctacattctcgtctcttgatgttagaataactgttagtccat

SEQ ID NO: 66992 - DNA, 334 bp, Arabidopsis thaliana landsberg
ctttaaacttctgtgttttgtttgaatagtttcgttatgttgaagactttgtaatctgggctttattttttgatttgtagcccatgtttgatcgactcttatgacctcttaaaactttagatctggtttttttctctctctcttttttaagatgttggatctacgcgatgttgtcaaattccgattttgcccttataccaatcttattatttaccgagggtcatggccttttggaatatgcccaatgtttaatcatttgttaatattatagggggctttgtttgggtaacagttattttcctttttatgttatgaatcaaataagaaggaagtg

SEQ ID NO: 66993 - DNA, 1890 bp, Arabidopsis thaliana landsberg
aggtcggtgtgtatatagatccttctatataatgtttcaatttaactattgagtgtctagtcttttccgtataagtttccgctacttccgttgcatatatgaagaaatcttgccttaagtttccaattctgataacgggtggtgcttttttacggttttcagacggacaaggtttcggttctcgacaagaccatagagtatatgaaaaaccttcaacttcaacttcaggtctatatttaactttattcactatttttatttcacactttattcagtgttcttcttccatatatttgaattattgaggcttgaggttttaagtgtttatctaatagtctgagtttttttttggttaatttaactagttgacataaactgttcttggtattcgatctgactcgccaacttatgagatatggattattgttttacaatatgggtttcaaattgatcaaacaaatatagccactttttggtgtttagtgacgaaaaaaatggaatgatatatagtaggcagtagataacctagatggtgaagtctatagaatttctttaatatttcgaattcatctcttttcatgtgattatttagtgccaactaaatgttttatattttatagaactatgtacccattttgatcattcgaatatgtatatgtgctatttatattcagaaactaagttgtaatcaaagttgatgttataattgcagatgatgtcaacagtgggggtgaatccttattttcttccggcgacattaggatttggaatgcacaaccacatgctgacggcaatggcttcggctcacggcctaaatccggcgaatcacatgatgccatcgccgctaattccggcgttaaattggccattaccaccgtttactaatatttcattcccacattcatctagtcaatctctatttcttacaacatcatcaccagcttcttctcctcagtctcttcacggtttggttccttatttcccaagtttcttggatttttcttcccatgcgatgagaagactatgataagtaagtagctcgataaaagtttatgtgaaatgatcgttgactaattaagagagaaaagagttccaaattaggacagtttgtgtgaaccatttgtgtcatatactttttttttcgggtggttttgtatattaataataatcaataagttaaaactttttgtataaattcttgcatgtaacaattttttcatttatctgatattttgtaaaatatattgagacatgcttataagagcattgaacgtaggaacaagatttccctgattcttaagcgtctcaaacgtttacacttggttacatgcatcccaactagctttatcttcagcatctcaaattcaggaccagtgggtcatacactatgataatgttaatgtacaaaaagtaacattaacttacctgtgcacactgcatgttacttagaagttaggatgtggctctgccaaatatagggccggatgtatgagaaaagatcaaaagaaggaatgaggaagcttgtcttcgagaattattaatcactttcttacacatcaatgattgatttgcgttttgtgtttacacatcgcttttccacagttgatatattcatttttttgtggaagattcaaaatgttttctgttttaaagatgtgacttgtgagtaataatctcttttcttttgttttctgagctaggtgaatacacacacaagtaatattacgtccgaaactcgagacacaattcatatttatatataaaaaaagaaaaattctacacgcacagacacaggcgcacatttatatacgtattattttacaaatacatatccttttgtctcaataaggcttggctttagtgaaaaacaatgtcagaaaggcatagttt

SEQ ID NO: 66994 - DNA, 325 bp, Arabidopsis thaliana landsberg
  unsure (1)..(325): unsure at all n locations
ggagaacaaacagagaaagggggaaggcccgcagggtgattcaggatgagggggcaaaagagcaaggggggagggggcgccacggaccagggggcgaggggnananacctctcggagggcaggcatggagagaacaagaacggtgggaagacagagagcgacaggagactgagtgacgctcctgaagcacataggaaccaggtgaaagccagtggaccgagagagcgaggaagagggaatgagaaacgaccactaagcggcaaaggaaagagcatagtctgggaggcgaaagaggggagaaagagaggcagccgcggaaacaaga

SEQ ID NO: 66995 - DNA, 330 bp, Arabidopsis thaliana landsberg
gacaggagcctcggacttagaaactttaggtacatcgaggagatcaaggaagctctcgagagggagtgtcctggtgttgacttttgttctgacattctcgtgttgtccgcacgataaggcatcgaagcagtaagtttaaaggataataatcgtgccgttttctctgtctggtgacaaaactgcatgctgtttttttccttttttgacaaaactgtgtggggttggtgtaggtaggaggaccttatattcctttgctgacaggaaggggagatggacttaaaatacttgacggttatgctcgagtcatatcttcccgaccacatcgagagt

SEQ ID NO: 66996 - DNA, 175 bp, Arabidopsis thaliana landsberg
tacacactccttagcggatttcgacttccatgacgcaccggcctgctgtgcttaatcgaccaacaccgcatggttttttatggggaggtcataagcgtctataccgtaaaatagattttggacgaaatgcaaaagacatatattggtgaatcgtaaccctcacattacgaccctt

SEQ ID NO: 66997 - DNA, 550 bp, Arabidopsis thaliana landsberg
cgtccattttacagactagtcacatgcatctcaactcttccatggacacaaaatagtattgtcacttgactgaaagatggagacaaactataaaactctttcatgttgtaaaaaaatagagaagataaaacaacataattcactacctcattgataaagatatcaatctgaagagatataacaaagaggagatgggtgtaatggactgcaagtacttctctaactttttatccactaagattgtgagtgcccagatgagagtgatgtttgggattttgagaggtctagagcctgaagaggcgaccgagaagaatgatcaactgatcaaaccagtctccatatcagagatgaaggcagtgtttgagatggctcatgcactagaccagatgttataaccgagagttctttttctgataatattttggtagctctccatgctctactgcatacaaggatcacattgcctcaaatcaaatcggaatgataaacggttatgacagggtataatgggggaccctctgttgagaaaatatgaagaagttggggcatg

SEQ ID NO: 66998 - DNA, 431 bp, Arabidopsis thaliana landsberg
ccacatgtttcaaagcaagagtgaaacaaaatgattattccattgatagatagctccagcattgtcacaagagagggatgataaatcggtaaggacacaccacgctcctttgtgagagacgtgatcaaacaaaagtcaaatgcaatgtccaacatatatctatattcatgacgagtgcgccattaatgtttgcttctttcaagacatgatattggatgagaacctaaatacatgatgatagcagataacacttgtggggaataatcatatcgcttgccgaatatagttccatcattaccacttatagaacatttcagataccctcaaatacatgttgaaatatattacatcaggaccggatagggatgaacacacaatcttatcttcaatgacctatgcataatgctcgttgatggtaaattataaaagaa

SEQ ID NO: 66999 - DNA, 294 bp, Arabidopsis thaliana landsberg
ggattagaaacggagcacagccgtctcgctttgtccgggatctctgacgggagggagcattttggttccccctcctgtctgcgtttcgtctctctttctcggctgggagagtactctcactatggggaagaccaagcttttccaacgaagatcacaaggtctgtgatgctcccattgagacgcctcttaccttgtcacaaagctctgtatgccctactataatgtgtcttcgtatctggctacaactttttggagtatagtcgggaactaaatctttgcaatgagagaatcgat

SEQ ID NO: 67000 - DNA, 298 bp, Arabidopsis thaliana landsberg
aagctctgttagtgtagaaacacttgtgttgaattggggattgtttcttttggagtgatttaggggagggacgtttctcatcgacaaaaggatcaaccacaccgggcctacgtatcctggtcacgctgagccccacaagaccgcatctaacacaaatgccatccacagaggacttgacacctctcttcgaggcagagtaccacacatggctttgcccgctatgctaaaaacagaagaaccatgcccccgcaacatgaaaccactaaccatattgtcttataatccaaaaacaatattc

SEQ ID NO: 67001 - DNA, 695 bp, Arabidopsis thaliana landsberg
ataatttttttgaagtttatttgattgactttgctttgtcaaatgatcatatatataagttacttaaaatatttttataattttgtattatggtcttaaatatttcggtccataatggtagccttttctttcttttttaggcgatggagattaaaagttggcacgggtgattgcagtcccataaaaggcaaaaacttaaagtcaacaaaacaataataaaaaccatttgagaaataaattatatataaaaaaaaaaatgctagtcagcttactcttgcaactgggaagaaattttcatcccctcttgcaccaacttaaaagtctgtctatgtcatatattgatgataatacactaaatatacacacatggataaactgatcagattaatatttgaaatttacagaaaacaaaattatttaaacgaatacccattacccaatatataccatttaagagctatatatatggatatgtaaatgattctgaaatgaccatttctgttggaaaacaaaccttgctaaagtctgccagatatttttgtatttttacgcgcttattgacttctgtgagttcgatttgaattatacactaactatctttgtctttattaaagaagtgagtactgagtaatacccaaataatgagaaagtatatatatgcatcaatactatttaactataactaactgtttttt

SEQ ID NO: 67002 - DNA, 2322 bp, Arabidopsis thaliana landsberg
cggtgcttactgcttgcttagcaaacgactcttcggtcgataatgacaccatctttacgtgcgatcgtattattggtcctttaactatcgacggggaaaattaacaaaacgaattaattatggacgcgtccaactattggattttcttggattctcatccaaaagagctttcactcttttaggccgtgaaatctaacggtcgaacgtcagacaaactttgcgactcactctcaccatcacagtcacatcacagggcagttggatacgctgttcttgttctgtatttcgaagaagtttcgtttgccacttctttttatgtcggtaaaatattaattaaaactggaatttcgtattgctcttcttgtgctagatgagatgtgaatcaaatgaagcatggggatattaatattattgtgagaacgtcaaaaataccttttgaaaattcttaccttctaatttgttaaagacggaatgtcattatctgtaattttctttttataagtctaaatctaaaatcatgatacaaatgaataaatacaaagatgttaatagatatcattttgtaaagtatataataatttagtacatagatctttcaaatggtaatatttctaatttatttattcaatccaaatgaaaataaacaatcaaatcaaacaaacaaagattacgtttatataacactgttcactatatatgtgtttgctctttcgagtcaagcaaccattttaacatatccctttttaagaaatcatcaatgaaatattaaagaaaaacctaagagcttttttagatatatcaaaagggtaagatccgaaaatgtaaggataatatctgtggtatgagcagtagtagtattttcatcattgctgtaagcgaaattagtagtggtcgacaaagaaaaagattaaatagtaaagagtggatggccacttgggacgagtcggagtcaaatatacgacgacagttggagaaacttgacatctaccttggcccgttcttacttcttaactcttaaaaatatcttagtgggtttctgccttcagggataatttttattatgaaatccttcattttaatccggtgacataaataagatactagatcatttgaaagataaataatgcatgtatcataataataaaatagtgtttattgcgtttttggcgatactcatacaatggattaatttgttttgtggtaggatattatttaatatgagtaaaatacttaacaatttgattattttaagaaaataatttaatgtcattttcttgtaacatcttatcaactagagatttataaatttttgtctcaagccgtttttaaaaattatgtgagattttactttttctaaaaacaattcaatgatatgatttctcttgtttttacttgattgtccttatataaaccaaccaaaaaatactatactttaatacttgttaagtaatattaaatatccatcttagatattttacaactcttttttggtaaagatattttacaaccttttcttttctttttgcaaaaggtttaaccacgctttacatccaatgcagtttgtaatctataaaagaacatataaacttatactccgtaaagtaattagttatgaattcgctcaaaaccttattcttgtttgtctaaaattaacataaacacaatataccggtaaaaataaacatacatgcaaagctaaaagacgtggccataacgtgtgattgggaaaccatcggaaacaaaaataaggaattataacgaatggccatactaggttgactaataagagaattattatttgacgtatataagataataaagacaattatgggataaaattaagagacataagtgtggacacgtgaagcttagtgtacgtgtcaatattcaatacgacataaacaacaaaaaaaaggtttattctctactcttgttttgtttatacaagaggatgcatctactgccccaaaacaatcctggccgttcatgtctctattcttagatccaacggtatgtatcagctatctcattgtcccctctcatagctttctatataaaccgaaagaaagaataatagagtcagagctaagacttaagagcgtgacaacaatatcacactcagataaatatcaagagatagagagagtaacagtgatatagtctagaaaatggcgtcgtggatgaaagcggtgctaatctctactggcgtcgtagccacggctatgcatctaaaggttattgttcctgtggctatggatttcttacaaaatccgattattttgagctcttttctcacgtggctgaaaccgccgaatctttacg

SEQ ID NO: 67003 - DNA, 583 bp, Arabidopsis thaliana landsberg
  unsure (1)..(583): unsure at all n locations
ccttgttcgtctgttgggtcaggcgatcggccaattgctggggattctgcccaagtgcggcggccatttgcggccatcgctccttcgatgcctgcatctccttggggttggcccacagggtggtgactggggtactcaccgccaacggctcgccattgcggtcggtgatcaagccacggtgtgcaggaatggcaatgtgccgcaaactgcgcgcatcgccctggcccttcaggaagtcgcgatcgaccacctgcaggtcgatgatgcgccagcagatagcaccgaccatcagcgccagcaggccgaggactacgcggaagcgccaggggtagagtgcgccctcgagtttcatcatggcgccaccatccgcacttcgtcagcagcgggtacccgcatcttcaactgttcggtggccagggtctcgatccgactggaggcggtccaggtactttgctcgagaatcagccgcccccactcggcctgtgccttgtcgcgctcgttcagctcgccgtacagcgtattgnnnnnnnnnnnnnnnnnnnncgcgctatatgacaccgcgatggccgaaatatgacagcga

SEQ ID NO: 67004 - DNA, 177 bp, Arabidopsis thaliana landsberg
accggcggtgagagaaatccgcagattctctatatgatcatccgatctgctacgggcctccaccacatgtgacttctacgtgacgaggcaagtgcatctccgcaaatcccctcccctctggggatacacccatgcctctaaatattataagccatcagaggccgtatggtttagtat

SEQ ID NO: 67005 - DNA, 613 bp, Arabidopsis thaliana landsberg
  unsure (1)..(613): unsure at all n locations
ttatattttctccagagaaaagaaagattctaacgacttgtggatttcgcaccatcaaaatctgggatgccggtactggacagtgtatcgcgactggagagaatcatgtgctcttttcttacgtgcccttggtgatagctctagatatcccttcagctccgtatgaccacgttatgaacagtcatggtctatatggttggccaaggtcgatcgacttttccttggatggttccaaatttgtatctgcaagtgcaaactctacaacttccagtcttaagctatggaatatggacactggtgactatgagtcattacatcaagcgatcccagattgtgccacatccatcgcattttcaccagatggtacaacaatttcgtcgacatttagagatggcacgttgatgtactgggatactacaacgcaaaaactccttggttcctatggtagcgatacatacgatgtgtcatattcgacatattcaccagatggtacttatctcacgtttggctgtgtggatggatctgttcggttgtatcatttaccaactggaaagttcaaagaaatgaacgagacacatgnaaaggcagtgtcacttgtgacaatgtcagcaga

SEQ ID NO: 67006 - DNA, 295 bp, Arabidopsis thaliana landsberg
cggacatggaacacacataccgcgctcacactctttttcaaatctttagcaaagacaaagaacgacgcgcttactgggggaacatccgctaccttaaaccacaccctgactccctccagagaccggtcaataaaaaatatcacaagatagagtggacgaacaaaacacagtcaacaacggagaacccgaccaacgaaaccgaggccgagcaaatccaaaccaatgaaggcaaaaaaacaaagggcggaatcagcactaggccagacaacaaaggaataactacaggggtaaaaaa

SEQ ID NO: 67007 - DNA, 1364 bp, Arabidopsis thaliana landsberg
  unsure (1)..(1364): unsure at all n locations
actttacgctgcagtagatgatgatgatgatgatgaacgttcttctcttgtccccataggcctgttacccgaagatgtttaggagcaaagacagttgtccgagtttacctactgtaagcttctttgtactacaaaaatttactcgttgatcttcttctcctttagttttcgcttgcagcatcattataacttaaaaatgaaataaaaagtcgttgcacttctacattttgcctaagcttcatcgtagatcctatttagacatgaatttccaaaaacaaatctttgaggatataaaatctgcagagaaaggctacagatacaagggaaatcttaaaagaaaaagggaagaggacaacaaaagcctcccctctttatacaggaaatttggataaaaaccaaaaacacagtaaaaaccgcattgttgtgttggttttacactggtcaatgaaaggcttgtgtcgagacaccaagctgatggagaacactggttggggaagatgaggaagaagatctcagggcttcggccaatggtccgcccatgttgtgatgatggtggttggaacctccaccgctccaccagctcatgttttgctgatctctcccattgttgttgctccgggctccctcttcgttgcctgtggacagcttcagagagacgtctgaggaagagttcccgggcatggagatggagagacaagtggctgagctcatggggcttgaactattgtcagcttcttggagcgaagaacgaggccaatcgtcaaagaagggcctcaggatgtgtcctccatctgatctgttgttactgaatccgatgtgggactcgtatggcctcttgttgttcatgttgttgttttcttgcttcatctccgaacaactgttaacagaatccacatctcattggtgaaaacaaagcacaaaagcaataatttgtcaaaagagaaaccacatttaggcttcaacaacaaagttgcagacagtagtagcctttatattagtttataggctttaaaagtaccttttaatgtgggttttataagaattgattaagcagtaaatagaaatagaattataaagtgagtgttttgtatatcatgtgttgtgtgtggataggggaggtgggtgcagaagaatctaaaagctttaacttttctgcaagatatgagacatatatgggtcagctttcactaaggtcctaccatttctctctctttctattttctctgtttaaaagtctcacacctagcttcaaattatagattctatcagatccaatgttatcattatctctccacacaatangataaaagaaagaaagatattttcacaatgaaatcaaactcataattcaacatacaaacaaa

SEQ ID NO: 67008 - DNA, 628 bp, Arabidopsis thaliana landsberg
  unsure (1)..(628): unsure at all n locations
caaaaattaggccgaaaaattgagagagtgaacatcgttttcgtctctgaatctgacaactgtgttccgtaccagcaaattcgaagatccccagataaatacatatatatagaaattataattcatcgaagcaagcacaagcaatcgatttccacaaaaagcaaaaaagtgaatctgaaacgaaccgtcgggtaattcgtcggaggaagccaaaggaaatgagcgacggatcttagagaaaagatctagattctcatcggaatctctagagaagccattttgagagatgttgttgctgttgttgttattgcctctacgaaactgagagatcgccggaatattcctcccaccggcaagagattctctgagattcctattcattgtcggaggaaagagagagagagcaaaagcgagaatcgaggcactatgtgggaagagttagcttacaatttacggcattagagaagaagaaagagagagagattcagatctactagtactaactagtagtaatgtataatttgtgtcacttccaagttggtgaggatattgtaaccatctaatgttatcacgatgcatgttcatctntcatcaatcatanctcttttctttntttagatataaatta

SEQ ID NO: 67009 - DNA, 448 bp, Arabidopsis thaliana landsberg
atgctcttgactttttttttttgggcattacaggttcgagattttggaggaatttctcattgggttggatactgcaattaggctgcttaaattaaaggattcgtcaactacatacgctaatatatgtcccaagatcgagtatcttactaatcggtaaaggtattgactttcacgcttcttggtttaacggattctgttgaatcttgagagcttaaaggattaaactttttgatgcatatgatcaatcgtgtgtgtgtgtgtgttgtttgattgtatttgcttaatgttgttcgggtctacaggatcttcttgtatgatcattcggctcagatgaagcatatttatccggaagctattgaactaaagaaagttttgaagtttgttgaaaacacttggtgtatgaaacctagtcttcatattaaaataaataccgatgcaattgtaggtg

SEQ ID NO: 67010 - DNA, 444 bp, Arabidopsis thaliana landsberg
ctttctctgtttctttgataatctcttggatggcttcttggttgaagaaggcatttgtactctatgcattttttcttcaaattctttgatcaagtataggggaacatgggcttcttgtaaccaatacttttcatttctatcttgggttttctcgacctccattatattcttcatgacgcgtgatggcagatgcttttgatttccaaagaaaactccgtagctaaccttgttatcactaagctttttgtcacatatccgagcgtttctaaaaatggcaacatctgtctctgggcctttgacattctggagattttggtctggccgcacaagttctctccatcttaaattcatatccagatatcttacctgacataaacggttgactgggtcttagaaatacagttaatatacctacacaatctaaaaactattaacatagaacat

SEQ ID NO: 67011 - DNA, 514 bp, Arabidopsis thaliana landsberg
ttttgggaggaccgatttttttatttttatttttggttccagacaggaaaaaaggaattgttcttgacttgggatttgttttggtttaggaggtcaatgtttttatattcattaccgaaggaaagatttgagaaatagaagcccaatgggtttagatatgatttatgaaaattgtcttcggaaaagcccaatgattaactgggcttcatggtatgaagactttctcagttctgattattgcttgttgggttttgttaaacaattccttttactggaatggggaaaaacaaaattcctataaaggtaccttttctgtttcatataattcatatttattttaaaataaaatatttttaaattttgttcctttcataagaagtatcgtttcacattttaaagcgaaatttataaattggaagaaaaaattattgtttaaaccaagagattttaaaatactttaaaaaagtctgtaaaatgtgtgaatactgattgaagccgacaaacttgctcaaaa

SEQ ID NO: 67012 - DNA, 406 bp, Arabidopsis thaliana landsberg
  unsure (1)..(406): unsure at all n locations
ttttctttatcttctatcaattcttcactataatgaatctagaaagttgccagagacttcacttttatgtagaacctgtagaatcaaatcacatgttgttttttgttttggtaatattgataaggtttggtttccatgttatcctttacttaaaagcttagaaatggcgtcatgagttcaaggtagatgagctttctgaagattctattaaagcagctactgacactggaaaagcctatgtacatggttttctagatgttaaaggtcggccagtggttattgtagctcctgcaaagcacatccccggngcaagttagacaccagttttcttgttaaatttcagcaatgcagatttactatagctgangatttgtgaaatgtctgacgttttgcagctgcttgatcc

SEQ ID NO: 67013 - DNA, 690 bp, Arabidopsis thaliana landsberg
tccttttcctattggtcttgttcagtctaggagcagggttggccctgcatcgctttctgcgttcaacattggtctcagctaactgcggcgatccgggacaacgaactgcgggtcgactatttgggtttcccgggaccggttgccgttcatatcatgtacgtgatctccgcagcgcttgctggcgcgggcggcacattcatggcgacagttgtggggcaagtggatccagattctatggtgaactggtatctctccggggagttggtcttcgttgccgtattcagtggcgccggtagtgtaatcgcgccgctcgtcgggtcgatactgttcgttctcgcgcgcggctatgcactcgaaatcgcgcccgacggttggcagatgataatgggcggtgtgttgcttggtacaattatgctacttccaggcggggtatggtcgttgctctcgcgattccctcgctcggttgggaggtgaatggatgacccccgttctacaaactcgcggacttgaaaagcggtttggcgccgtatccgctgcctcagacataaacgtacgcctcgatcctctaaaggtggttggtttgataggcgcaaacggggcgggcaagacaacttttatcaacatggtgaccgggtatctgacgcccaattctggaaccatccacttcgaaggccgtgacatcacgggcat

SEQ ID NO: 67014 - DNA, 634 bp, Arabidopsis thaliana landsberg
tcacttatccctcaagaacaatcccatttcacctatcatgttttctcttcacacttcttctttctatatatattttatatgaatgatttttgccaccttatataatcttttttatttttgttttaaccttatgttagcttcatttcttaagtccacacgcatgctccatatttgaatgtacgtattaacagaagtagaattttattttctctagagatttttgacctgtttttttttttactcttggtgaatttattcattattcatataggtttttgaaaactctttgaccgacaagggtataatttcacaccaagttgtgttttgatttctattctaatgaatatgggattattatatattataaattaatagtgataagattattgaagatttctagcatataggtagagaggtttcgtcctaatcatgtatacaaaactatttaatgtgattatagtgttgtctatcagatttttgggatgcagagagatcgtggattcatcaacaatttgttatgttttttcgagagttagtttttggtgtgaataataaaatcaactttttgtaatgatcatgtaaacgatctaaaatggttaaataatatttaagacatagattctaaaataatggt

SEQ ID NO: 67015 - DNA, 302 bp, Arabidopsis thaliana landsberg
caaactagccgcacaggaaggtgcggctggatcacctacattacaagaacagctattgctcctgggttatataggtcagacacagcttcacacccaaaatgaaagaacctacggctgaatttaactagaatgtggcagccttatttaactacttgacagcgaattaataccaaacccatgactcttattattctaagtcggaacaagttgataggaaccccttttacacccccaagtccctaccctgttgcagcacggaagcgtaacccggctacagagagatggggttaatattacttttc

SEQ ID NO: 67016 - DNA, 712 bp, Arabidopsis thaliana landsberg
gagatttttcagaataccgcggtttcgtagctgctattcaccgtttgaagttgaaatggtacaatgttatctttgcagtttgtgtaatatatataaggcaaacaacttaattattgtaagacattgtttataatccatcatcaaagaatgaagatagagaaaccattgcaaattgaactaagagaacatcttataggttttggcttgaaggatgatctgtctcgctccacctattggtgcttacaccgcgattaggactccaactattatcgagatctgtaaatcatcaaatatgttcaagagttaactttttaattagcattatgttataacatagtcgatacatatttgtttggaagaaaaggtaggctcatttacccaagatgcaatccaatgaaagctccaacgttttggttgtttcatgaccaaccatataatgcatggcaactgccagaaaacaaaacaaaatattattttgttatactgaaactgttctatactaacataacattcatatatatactcatgcataaacttagttttaggtataaacttacgaagtaggacgttgaggagaaaacaagaccgccgaaaaaatggaatacatactgctataaatcccaccaacgctacaaaaacaacaacacatatatatacatgtaacatgttacatatagtaaccgctatctaattaaagaacttaactacgtac

SEQ ID NO: 67017 - DNA, 516 bp, Arabidopsis thaliana landsberg
ttataagctttgctgtgttacaaacttatatattcgatgagagaaggaattagattcatgaaaatattaatcattttaaggttagtagtacttattggctgttcttgcaaaaccaatggtaaagtatgtgatgaaaccattataactttttgattcaagcatctgagtgttctatcagagggttagagccaatctaagttaagaactatatttggggtctcatcacattaccattggtttcaaaagaacagagagaagtcctattcaccgtatacagattggtcttttcaagaatctaactcactctctgatcaactatctagccttgaaatacaggcatgtttgtctgtacctggtgttcatgttggtctcacccaaatcagcactgggccgctcttatcatttttctcttctactctatataaagtgacctgatcagctttctagagcaaatgcctatgactactctactatctattcacgtttgtgaaaggagctacaaagccatcaataaga

SEQ ID NO: 67018 - DNA, 1325 bp, Arabidopsis thaliana landsberg
tcgactctagaggatcccctcattatctgcatatgattctgtatagaagcagagttgcttattaagaagaatcgttgttttcttgttattctaacatttcttttgaagtgtatatgtcctaaacaccacgaagcttcgaatctgaaacgttttcatgcaaggctttgtagcatgtactatacgaagaaaacatttccataaagaggtaaatactcttgagaataacataagcttacttcagtcatggacaatgtaattgttacaataaacattgacaacttcctctgctgcatgctaataagctcacttcatagttaggcacttagtgaaatggagacaagcgacgatagcttgaatttcttcatctttgtggagtctcgtggctgaaacagaacctcagtgctcgacctgacagtcacttctttcgactctgcccctgaactgccttcacttctgtagtccctatacgaatacagaacctgcaacctcgaaggagctgcaacccaaatcattttttttattaattacatagctcatttgtaaatgtaaacacaatcgcgaacgcaaacaaataatcaaggtctaaagagaatttacctaatccaaacatgcttgttttctgaatagagacacggtcgacttttgaccttttgatatttcttaaagccagggtatcttcctgctttcctttaaactcgaggaattcccctaacacaattttgctacttttaagctccactctgcagcataatcaacttttaatgaaaactctttgaacagaactacttcatcaagggttcaagagatgagatgtatgaccaactcagacaatttttaaattgaacgtcaataaagatgagatgtatgacctatcccacgttggtgctgtgccaaggatgaaattaagtttttgatgcgaagattcctgcatctcttttccggtgctgaatgcgcctttaacccaaccagaaattttactttttgatactggttttagctgttgccaatcttcataggtaattacctcactcgggaatgcatgaattgtactggaaaaaaacaaaaagaaaacatatatttatgcaccagtaggaaaataaagaatgtctttacagaccaagatagccacgcccatgcacgcactacaagatgtcctgtacttcaaattgattgcttttttgtctacctcttgcaagcaggaagatactgacggtagcaaggataacgataacataccgaaaacttggattgggaatgacaactttgcaagacacatttccttttagtaaagtaactcccctctgttcaagatatgattcaagaac

SEQ ID NO: 67019 - DNA, 389 bp, Arabidopsis thaliana landsberg
aaaacatggacacaaactcatattttaaagttttgaaaatataaaaaaaccatctatagtatccagtgcaaaatcataccagcaaaagatatcaaacaaaccaatgctagcatcaaatcaagattttataaatgaatagatttaaacacgcacatccaaatccctaaccaaagcatggatcggtttagactcattggctaaaaatgaatcccctatatatatagaaagtaacatggcttaaaactcactaacccctatcttctggtgacctatagctacaaacaaacatgactttcactaccaagctcataccctccttaattatatgtcctgtaactattttgcctatacaatcttcagaaccttgttactactaacactcaacttac

SEQ ID NO: 67020 - DNA, 575 bp, Arabidopsis thaliana landsberg
tggccactgtactcttcctcgtataaatgtatccgaaagtaaaaccaaaaattactctttattagtaataatttagtttaatacatgattgatcactaaatcatctcaagaaaagttcaacttcatgatgcaccagatataactcacaagcagaagaaaaatccaagtcggtttcatcaccgaataaataccaaccacgattcattactaataataacatcctggttttacaatcgcacttgcacttctcactaacgtaggctgttttgagttgttccaccaccgtgttgtcagaccaccaaaaaccgtatctaatcttttgaatcttgtatcgaaattccaccaactcattcattgtagttgacatcaactgctttataacagaagacaagatctcgaaacccttttgttttgttttgcctccaagacagattagaatcaccccgtagacatattttgcttctttgatacctttttccgcagcttcagctaaatattcgagtcctcggtcttgagtttatctcgaaaatagttgatgaatcctttctgaaacaacgctttcgggtttctactct

SEQ ID NO: 67021 - DNA, 396 bp, Arabidopsis thaliana landsberg
tgactagattagttccatacagagaaagaccggcggtaccttgcgcagctcaaatatatctttcttgagatttgacagtggctgctgaatttcaaacacaacgaaccagacacttttatcaaacttttctgaaattataactacaaaggcttcataaaaatatgagaagataaaaaatcttcagggtataaatgaaacatgtttcttcacaataacatatttagaacactagcctcgatatcactagacaagcaatagcaattagcaagttaaaaacaagggaaaacatgtgaaaaaataacctagatatcactatggctagtgtccagaattagtaatccatgaagcctttacataactgttttaacatgagactaggaatatctaatgaggtga

SEQ ID NO: 67022 - DNA, 555 bp, Arabidopsis thaliana landsberg
  unsure (1)..(555): unsure at all n locations
attcaggaacngcagcccgacattattgtttcaaaatggtgtatgcgttttcgcactaaaagtcttaatttgggtaaacatgaccttatgctgaatccagtagatgaaaagtggcaaaacatgaagatttttcaaccttggtggaaaaagagcctcaatatccccgtatcgctcaatgatatttctgcatgaatcattatttaaataatccgattccgaaaagtcaaatttttttgtaaataacttctttaaaacgggagttcgatcaggtatttcaagattgaaagttttttctagtagtacctttgagtaaataagagtatcaaagttgtcttgttcatcgggctctaagatatctacctgtatgttgtttagataaattaagataagggtcattgaggttaacctttgttgtccgtcgataatatggttcacaccgtctttttcataaagcacaaatgggcctaaatagtatacagtgtaattgctagcatcgatacgtgtatgctcaacatcataattttgcaaaacgatctttccagatctacaagtagc

SEQ ID NO: 67023 - DNA, 508 bp, Arabidopsis thaliana landsberg
gcgaaggccgtcatcgccgtggcggccagcgcacagtttacttttggccggcggaccgcatcgtcggggtaatcgacgatcagccacgcgaacagcaccatcccgacggtgttgacggcatcggtgaccccgatcatcgacacgtcggggcggcaaagaccgtactggccgcccgtgacggcggtgatgattccgaacaccccaccgatcaggaaatacaggctgaccaccgcattgaactgccagccgttgtggccgacaccatcgacttcggcccagggcaaaaacagcgtcacgatcagcagggcaccgcccacgccgacgatgagacgttggtacgtcggggttgatatggccatgactgccccttccgaagcccggcgacgagccgacacgcccatcgccataacaatcgttattcctgttcgcagcagaataactggcgttatggcaggatgtcaacgatgccttcaacgtcttctcccgacgccgcggcgggcccccggga

SEQ ID NO: 67024 - DNA, 313 bp, Arabidopsis thaliana landsberg
gctgcatgcgagagatctccttctactgccccgcattcctctgctaccacgatgtatttctcggacgaattgccttattgcatctcccaccgagccagggaaggggatcgagatgtattcacctgccttctacactgcttgtaccttgggtggaattctcagctgtggtcttactcacatgaccgtgactcctctcgatctcgtcaagtgcaatatgcaggtatgtaacctttagatccgcggtctttcgtttgctttctgagctcatgtttgtggatctgagttcctgtgttgtttaagcagtgagatctgt

SEQ ID NO: 67025 - DNA, 614 bp, Arabidopsis thaliana landsberg
  unsure (1)..(614): unsure at all n locations
atggagttggtctttgtcttgttacatgactgggatttaggatctgttgttttgcccttatctagtaatagtaagtaggtttcaggttccagggtagattgggaatcctgctttctaatttgcgccccctggtgttggacgtcgggatagcacacggcagagtctagttagggcgatgacacactggtgtgtgtgggagggaaacagtcaggtgctctgaactgtaaggtgcagggcagtgctggacttttatgaagaggagcatgaagtgtcagcagcgactgacacaggacccagggattaagtccctaggaggtgaggttcaggggtaggaaacagaaatctttgcagagggttgggggttaagaactaagtcccagggagccctcagagagtggagcagggttcccatggagacttgccagcgaggcagatttgactgtggtgcctgngggaggctggcagctcaagggtagcgagggtaggtgggtgagggggcccccacagcgcaacgctacagtgtgctatccctcagtgtctgagcctgcgctccttggtggagatctttccacctgcccttcatgcttaccctttatgcgtctgaccgtaaacac

SEQ ID NO: 67026 - DNA, 166 bp, Arabidopsis thaliana landsberg
tgcagtacctgaccacaaggggggagggccaacgggagaaactgacaccttgctcacactccggacagtctacgccgagccatgctttccagcgatgcacccccatacggcctaggcgagaaaagggggcacattgcgctgacaaccttggacggctctacgaaca

SEQ ID NO: 67027 - DNA, 697 bp, Arabidopsis thaliana landsberg
aaaaaacaaaaactagaagaaagtgaatcccaagtacctgagcaggaaactgtttcccagaagagcggaaagcattaggctcaatgtttattgcaccatcagagcaagcctgaaacacaccatgtagctctctcttctcgaattcaaacaaaaacaacatcattccagctttaacatgtttaacaaatcctcctagcccaattggcaaaccgaaaagctttcggctaaggcattccttcctggttgagttattggacatgaaaatagcaccatactccggctctcctccagaagaagcaccattaaattcctccatcatcctccgatttttaggcattgctgttacagaaaactaaaataacaactttccttcatttgttgaactaagacagagcaaactgaataatgtaaacagtaaaaccccaaattccaatttaaaaaaagttttagaacaagtaagcaaataaagcaacaaataccgaagaaaagaaagaagttagtgacgctattgaacatccacagataaatcaaaacggcgacgtaactaatctctcaagcatattcacagataattaaacagtagccatgaacattaaatggagaatttttaagaaaagcaatgcagaagaaccaatcaaacctgggaaaaaaaatcacggctgggagtttcctggtttttaaattcgacttctatcac

SEQ ID NO: 67028 - DNA, 643 bp, Arabidopsis thaliana landsberg
ctctccagtgatacaaaagggatggttcatcacaattcaagaacttgttcatttctcaggaaagattgggtcaatgaaagagtgatacataggatcagatctccaaagaagagccatgtgaagatgagaaggagtgagtcgatgaatctcttcaacaagccagatagtagcttcagctttagtaggatgaatgatagaatccaacctctgttcttcagaatcagtgccgaatcgtgattgatcccatcgttgtaagagaacattcgtgaggtaatgtagaggctgaccataaagctgtttcattgaaatgcttaatccaacccagcttgtgaacggaatcaacgagccacgattcgtcgggattggtacttgcttgatgtagtcttgatacatctgtgctcttctgagcaacgaacctgactcaaaaaatttcagagcatttgtgtaaaaatcaaaacttttgaatcaaaatggtgagaaaggaaagaaacaagggaccattgaaatcgtgtaccttcatcagcgacgtctctgtgagaagtatcgagcggtgaaaagccatcgctgatctcagcatggacgtcagatgaaccggaaccacctgacggtcgagaggcactcggacagagctttgcatggtcac

SEQ ID NO: 67029 - DNA, 553 bp, Arabidopsis thaliana landsberg
attcagaaacggttatgtttttctccacacactctatagtactcattctcgacggcaatcaaatttaacagttggtaaaatggttaaagcaaaacatgcttgcaaactagagatttttttttcgatcaaaaattagagatttatgtatgtaacaattatagaataaatactagcatatatgtatgtacgtacatgaaagtcagcctaattctctaataaatatgggaatcttatgtgttataaacttataatcttatgtgttataaaatctcaattataattttctaacattacgggggggattaaacctttcaacccattcgtttaagtaaccagtacattcatgatacatcagacaattaaaataaaataaaactatatacgtaaaacttaaagcccaagtagttgaaatgtcagctttacggctatgtgagagtgggagtgtccttctactgaaggttgatcatgaagaatgtatttcagctaggaatatcatatgaccatgagtccctgatatgatcctagaagggatagtgcctagttgtgggggtag

SEQ ID NO: 67030 - DNA, 582 bp, Arabidopsis thaliana landsberg
acattcacagcgatattacgttttgagggctatattgattgtaatttctacctaactatgcaatacacttgtgtatcactaataaatgttaagaaatattatgaaagctacttagctgcaaacaaaacctgacaatattctggccacagtcgttaggagtataggaatctgggtgatgcgtcatagaaaagattcgagaaatcacagtcacaatagttattaaatttactaaaacggccgtaagagacaattcttattaaagagaataaatgagggggatcggctgtcaattaaattctggcacggaacagtggtacgactcaacgatgctgtaatgagaaaatttgaaaaatacaagagattatctctattgaattttatacaatgacggcggtgtaaaatgatataatacacatgagtcattgacgatattctgacatatatagagataacggcgataggtatcaactgaatttggtaggaatgttgacaatatctattattcatacgatgatggcgttgagtgatattagcctcttgggaataactctctccctctttgccaaataaatgttacattgt

SEQ ID NO: 67031 - DNA, 595 bp, Arabidopsis thaliana landsberg
  unsure (1)..(595): unsure at all n locations
ttaagactcacaaacggagactgacaacactctgtttttantttcattcgaacacgtaatcaatccatgtgaccctggtcgcatttattccattatttatgaaattcataaaacgttaactatcttttagatacaaccaagcttaccaaaagcaatgaagcaagtgagtcattacagtactaccatagaaacaaatgtgcatctctgacatgagaattgccacgcggaatatattttctatacaacttttatagatttatccaattacttgattcatccatgtggactgggcgcacttattctattatttatgacattaacaaagtttgaaaaaaaattacatacaatgtatttaccaaaattgtgacgaaatgatcatagtattatcatagaaacacatacacggctttgacataagaattgccacgcggcctatattttctataaatacgactgactatgaccaattagactatacaacttttttctttattatgcaatgaaaaagatataattgaaaaaataattgtttggataataaagaaactttccctctttgccctagatttagaaaatataatttcatacttgcctc

SEQ ID NO: 67032 - DNA, 596 bp, Arabidopsis thaliana landsberg
aattaaatatccatattaaatttaatttatgcaaaaattaaaataagtcataatttatgcattttactatttaacgtgcatgtatattttacacatacatatgcatattaataaattatttatttaataccatatttatttcgaattatatgacatgttttagtacatttctcattgaaccatggaatattctatactttgtcccattggtttgttaaacaaaaaattatttattttcaataaaccgtggaaatttcggatttttgactcaatatcttttttttttattctggagtcaaacgctgataatatataataccagacataaatcactttacccaaagatagagttgaactactgaccttgagtgtccgctctcaaatccactatatcaccatctacatggtaataagaaggggactaatatttgtctatttaggaaaaagaaactatgattttaatttgaagatcaatttaatttgatgacttcttttcttgtcctagaattgtacatttgagtatttatcgtagatggctcgcaaatcacatttttttcatgccaaaaaaactattaacaaaatcggcgggtttttaa

SEQ ID NO: 67033 - DNA, 2157 bp, Arabidopsis thaliana landsberg
cctgaactggtttatatagtgtaattgcttttttcagggtcctcgactgttctgaaacaagctttgaacccagggagctgcttcttttgctcttgagatcaacgttcttactctctcctaatattcttttcccatgaacagtctctgttttcgtcctatagcaaggcctggctgtcacaagcatatatactttacagtcacaaatttataatcaaccaacgctaaatcacgaaatcgaaggtttacgtcgtggatatgaaatattaatggaacagagcctccactatgtacctcggcaggctagttccttctctcaaatagagtaaatcatttacatattcgtcaaacagtgagaccgcagcaattatatagttaagtcccattctgaaagagtcctcctgaataaataatcaaacgattaaaggatagagacctcctaaccgaccataaattatcagtgcctacccatagcgatcattcaagatacatgtcttaagaattttcatggcagatacttaaattacaaaatctatggctaagccgcagtttaactaacataaagtatctaagctagccagaactattgtcgaagcagcagtaactatctcgcaaatagttaaaaatcacaaccagaggagctcaagaattaagcagtttcctttctaatcctttcgacatagaatctaatgaagcctcaaaaccaaagaacatcaacataaccaaatctgtaagctataaaaccacttaatggactataagtaaaggctgtgaacctgatgaacgatgactccactgtacagtccaagaaagaagctggataaaactgaagctattacagctcccgcgacagccagtggccatagcaatatggcaagacctgcaaatggaacacagacactctctaggaatgggccctctctaccaacaaggtcttccaatagcctcttccatcctttgagtaacatgtatgggcttttgtaaacagcgacagctgttattagaagaacatctaccatcacacctatgagactagcaaggagacaactaggtagccgagacaacctggtaagaaaatgagattacgccatcactgtaaactgtaaaaaaaaattgttcttctttatctctaacgaagagagcgattcagattcttactttatctctaagggttcaacatcggccgaaaccatttctcttaactcatccatgtaggagaagtaagaatggaagcagaaatctgtgaagtctgtaaccacagtacaactccctttaatagtggagaacgaaccatcaacaaagcaatggtagcatttgctagtaacagactctcctacagcctcgaatgtagccataagaggcgtgaaaaacccgtaggcgattccaccgaagagacttcctactataccagcaactggccagaggagcaaaggcagtggaaataataccaatgccaaggtcttcaaaaccagccctattctcttggttctagaggttacaaaaacaagatatttagtggaaattaaaaggagatgaaacaagaaacaaagtatttcaaatttgatgggtatacaccttgccaaacagtagtaggtccaaatgaaatgtgctggccaaaggccaatgatgacacatgaattgccaaccaaaattatagcagatgatattggaccaataatcagggctgagaaccaaaacgaaacaagagggagaacgttacaccgtacataacttacagtgctttactaaaatactcaataagttttgtgtaaataaacatcattactcattattaatatgaattcaaatagcttcagtagcctcctaaagtattccatttaccaaaatctaaccttaagagtgcagaaaatcagattcgagtttacacgactctggagctctaacaaactcaagagctaataagcaaagctaacatctccattcttatggatggagagaagaaagaagagaagattcatacccttggtgacgccaaggagcaccaagcggaagaagttaggaagaaaagagacaaaactgcacagtttctcaaagaatgctttgggaacttacatttatttttttcttgccactcagtgagccgagaataaaccgacagaaataagccgaaagtggcggatagcggctgcacagggcact

SEQ ID NO: 67034 - DNA, 811 bp, Arabidopsis thaliana landsberg
  unsure (1)..(811): unsure at all n locations
attctgatgtaaacgaacatttgatagtgtgagtgccaaaattattggtgtatatttttgaaatgtaacgctttttattatattgttgttataacttatataacaatacataagcaaaattagcaccaaaaataaaaaaacagagcaagaaagttacactacaaattaataaacgagacgaactttattttatcgatttctacaatgttctaattttactatactgtagtaggaatagaaggaagatggtagaacagtttctcttctaagcaaacttccacgaaattaaagaaagacaaattttatatttgaaggaccacagacaaaacgcaaaggaccacttcataagaaacatttgaaaatagaaacaaaaacacattgcatcaggatgcttagcattgttttcgttttaatgcatgtccacgacatcccctgatcatgggaataaaatcaatgagctaaacagtaatttataataagctggtttttttttgtcgtcaacagcaattttttaacgtgagaaaaagagattagaatctttaacaaaaaaaagtattagatttagtagatgctcatgttttctgtcccagaaaactattcttctccacttgtttcaagctccatttcaaaagatttaattccttagtataaaagttaaaataatccatattttactttttttggtctataaaagtccccggcccaaagtttttggtgccaaccatttgcttgaaggagaacaaaaagnaatcaaaggtgggtttcttggtgaatccagtttgtttttggcattaacccaaaaaaaaaaaaa

SEQ ID NO: 67035 - DNA, 339 bp, Arabidopsis thaliana landsberg
gtatgacacgtacgagtcacaaacactagttaaactaaaacagcatacttgtaagatatgaagtaagtcttctcagtatatatactatggtgtatattagttacagaatcatacatttccttgctgcgtctagttgctcaatatgtcagctttgaatcgggggatctatcaggcatcataacggctactcaagtgaacgtctttccctagtatcctgatcgggtccaagtgataacttcgatatgctttggatcttattgctgatggctttgaattagctcacaaactcccatgttctatgaaaggcaaccgctcactcgtctacatgacagcctccct

SEQ ID NO: 67036 - DNA, 1142 bp, Arabidopsis thaliana landsberg
tttcttcttctccagttagcgaaactgacatgtatgtatatgtatctccatgtacaacatgagcaacattctgcaaatgtgtaaacagagttgtggcaactatattagctggatcactaggcattgctgttcattgggtcgccacacaatcaggaaaagctgaggtttttgtgattggatgctctgtttttctctttggtaataatggccaaaaccctaacaagaatcagtctttattgcaaataacaaaaaagaaggatccatctttaaatttctcttgtgggtttgattcttgcagccttcgcagctacttactcgcggtttgtgccgtcattcaaagccagattcgactatggagcaatgatctttatcctcacatttagccttgtctcagtaggcggttaccgagtagataagcttgttgaattggctcagcaaagagtatcaactattgcaataggaacatctatttgcattatcattactgtcttcttctgtccgatttgggcaggatctcagcttcaccgtcttattgaacgtaacctcgaaaaacttgctgattcgttagacggtaagggaataaggaaaccaaaattgttatgacagattcagcattatagctagagtgctgactgttactaaaactgcaggctgtgtagcagagtactttaaggagaacgaagtctcaacgaatcgaaatgaagatgaaaacactaacatgaaattgcaaggattcaaatgtgtactcaactctaagggaacagaggaagccatggtaacttaaatagattatctatggggataaagaaaagttcatttatctttttgatttgcagccgcttattcggttttcgggtttttctttctctcaggcgaatctagcgagatgggaacctgcacatggaagctttaactttcggcatccatggaagctatacgtaaagataggggctgctatgcgcagatgtgcttattgccttgagaatctcagtatctgcatcaactatgaaacagaggtaaccttttagattttatcatagttttgaagaagactaactttcagagactgtgaaactaaaagtggtgtcttctgcttctacaggcaccagaccaggtcaagaaccattttcgggaggcatggt

SEQ ID NO: 67037 - DNA, 130 bp, Arabidopsis thaliana landsberg
ggggcccagaggcccgccaaagaaaaagggctgctgacacataccaggccagaaacgctttataattttttcagaaagagagggagccacggaagacgagagctacgcagtaggaggaccagatggagaa

SEQ ID NO: 67038 - DNA, 1338 bp, Arabidopsis thaliana landsberg
atgcaaagtacaaagaacatacgatagtctcaatatagttatgcgatgtttatttaggattcttagacactcatgttaacatttagactacgaatttggaccgtagaacatgactgagttaagtcttacagaaatctatgaacttacttttgaagatgccaaaggacaaaatgttcaaagagaatatgtgtcccatatatataacggtatttaaaaaagaaaaaagaagatattttaaactttggaccgtctccatcaagggctggtgggtggtaatggatcggaggttgccgctctctttctctatcaaaatcttgctttagtaccaaaaccttattcgcctctcttttctcccgaagcttttgcaacaatttaagtctctctatctcactcggggttattaaaagacatagactatgattgagaaggacagagagagagagagacaaagtagtatagattattaggacacggttgtacactttttcatgtgtcttcttctctctttttcttattcttattcatcatcatcaccgtctgatcttctttattaaccctactctctttctcttctcccatcctctctctcaatatctctgactcttgggatccgatctctttccggtggctatacatcccgatgataactgtcaaatcttttccatatgcataacatctccttttagggttctatctatctctttctttagttctgatcgtactttatagtgcatatcgtgaagtattcgatctttccaagtacaagggaaagattcaatagaacctagctagtcacatacaataactcaattccggagctttttgaaggggttgagttgaatcagcctgtttttgagttttttttttttgaggtatagaccctaacttcctttgaagattctactccatctttgatcctcttctgtatctctatgaattggatatatttactatctttattttcttgataattgttgattttttaaaattataattaacatcattatcctactcaatgttgctgatggtacaagctaagcaatgtataatccttaatagactcgatcgtggtctaggtttttccttaagatttgttttttttcgattggtgattatagaatgatcctatagatatttctcatattttcctttgactctatttacggatacttaaaatgcaattatcagttaatctaacatattaattttatgggaaaaaaattttttttttttttaaaaaaaaagagggggggggaatttttattatttttttttttaaaaaaaaaaaaaaaaaatttttttttttttttttttttaaaaaaaaaaaaaaaagcgatt

SEQ ID NO: 67039 - DNA, 274 bp, Arabidopsis thaliana landsberg
agtgtgaagaaacaccagctgaaaaagctgccttggtcttcaatatacacgaactgtgttcgctttaacggcggacaaggtaaatcgtagggcacctgctaccacacagcctatagctattgctgaggaaaggacacccagctggatgttcctaggggctggacataacgttgatgctgtatccaaggcttggggaacaaatgagtgaaaccaagtggttggagccaggaaaacttcccactgaacaaggagtataagatggtgagatttctct

SEQ ID NO: 67040 - DNA, 1316 bp, Arabidopsis thaliana landsberg
  unsure (1)..(1316): unsure at all n locations
atgtcctttgccgacagtgtctgtgtggtccgtcttagtcgtacactcgtacagagacctgtacctttcattttttcactttgtttatttttaggaatctctaactcctactactactactcttatactattattattatccacacatatctatttcataactggtaataacataaatattttagatcttttttttcgatttcactaagaaaagagtacaaacattatgtataaataaaaattaaatatattaaaaagaaactagtaacgtatgaataaataaagtagggtccaataggaggagccattgacttggaagcatatgagacagttgagaggcccaacagcccatcgccagctggatttcccctaaaagtcacgtgacctctctccccatctttcttcactatctccttccttcccacgtgaccttcctctctctctgtccctcgtacttcttcttcttcttcttcttcttcttcttcttcttcctcctccttcctcgatagagccttctccgattatgctctgtgtcctcattgttatctccggtacaatcatttctcttccccgatccttttctattccacgaatttcacatctttcgcatttgatcgtctttatattttatcttgttgattcaatcatacggatctgccggagtaaatgccgttgctctcggtcattgaatttgatatctgtaatgtgggtttttattggttttggtgattatgaggtttcattagtgctctcttgttaaagtttgcattttggagatttgagtttggctctttgatgtgagaatgtacattgaactttttgtgttgttgaatgatgaattgtaccttttgtgcggattttttgaggttactctcttgatattaaattctgtgggccaataacgaattgatgacataaagtttttttactacagagaacagaacagagtcttcttattttgctcattttaaccaatgtcaaacaaaaacctcgttttaatccatgttacactttcagctaacttctctgtctaacaaaggttaacatgtctttctctcatttagtgcagaaacaagagcagatgggtctaattctacaccaatcaaagctttgttctcgatttagaaagcctcttttggggtaaagagatggtgagaaaataagttatacaaattatctggaagatggaagagagacgagatgatgaatcaagccctacacaccagggatcagaacttgcggaaagggtgaagttgctttcttttgaatctcaaggtgaagctttgagtaagactcccctanngagtgtgacagga

SEQ ID NO: 67041 - DNA, 743 bp, Arabidopsis thaliana landsberg
cttgaagaagtctctgtcggagctcgggtataactttatgaactccctgtgttactttcatgtgtctcaactaagaaagtagcatccaaaatagggaacaaaaaaatcaacaacttcatgagtgattcgctaacactgtcatttttactattggtgcagccatgttgtaaattctctggcggaaaacgttcaccctggaatatccgaccgcagtcttcataaaacatcatgcttgacgcatttattgcaagaatctcttggtggaaattcaaaactcactatcctgtgcaacatttttccgagcgacaagtaattttcttcatcttgttatcatttattagttaaatataaacataacagcctgatggtaccaagtattaatattcaatcaatataatttgtatagagagataaggagtgcaaatctcaggtcttgctgagagaacaaagctcataacacttgagcatcttaatgacaggatgcccactatatgtactgatagagtttgtttgtgtaacacagagacacaaaaagaacaatgagcacccttagatttggtgaacgggctaaagccatgggaaacaaaccaatgataaatgagatctcagaagaagatgtgaatgatttgagtgaccagattcgtctgctaaaggtctcttcttccaccacaccgttcccattttttgtcttttggttgtcgaatttggatgtcatttaaatatcatttaccacttttttgcag

SEQ ID NO: 67042 - DNA, 412 bp, Arabidopsis thaliana landsberg
aaacactcgaaaacattggtctttaagccaaagtagaaccatcttagcatataacagtttctcgactatgtaggactacaactgcaagattagacggctcagccgtgtactgtaacctaccgaaccagacttgacgcccggaacggtttatgtaccaacccgggttttctggttctaatatcgctaaaccgaaatttcttcatatatgcaatcaatctgaacgaactaaatttattggtttaattttggttggagaaaaaaacactcgtgaaagacaaatgttaagatgctggatcttacaagacagaacaggaagcaagatgtctttagggaggacttacggttaatagttcttaaagaaaaactcaaaggagcccgtgcgtaaacaacatagcgtgctcatatgaatccc

SEQ ID NO: 67043 - DNA, 602 bp, Arabidopsis thaliana landsberg
gctgcactccccaaacgcccagcaaaagcacgacgcagatggcgacgagcatttgtttatagaattttgtctggctcaggttcattgggagttgacgtcacgcgttcacctggacttgggcgagttcacgccgattaaaaaccatgatgccgattgcgccaaaaattcctccaaatacgatcacaatctggaaaactgccagccccaactgtgtccaggtaatgctccgtccactgctcaaggaatcaattggcgaaaaatcctgcaccatgttcactcctttcaggatcactttgaaaaccgggataaaaacaacatccagccaaggcgcaaccgattgaccggtcaccgtgctttttccggcaaccgttccgtcatctatgacccctttcaaagtccccgcggacaaaccaacaatcaatgccgtcacggcaaaaaacgtcgccacggggaaggaaagaaaactggcggcgcacaaaccaatggcggccatcaaggacaaccagcaaaggataatgccgaggccacgagcgaaattcacagcgaaaccgccttcgcgataaagcacttccatgccttcatcgagagggaacaacagcgcg

SEQ ID NO: 67044 - DNA, 604 bp, Arabidopsis thaliana landsberg
  unsure (1)..(604): unsure at all n locations
ttttgcccagcttgcggcgcatccgcaataatgataccttgacagccgacacggtcatccttttagctgccgctatatcgctgacagcatccatgtaaaaataccgctgaacaaaaataattcttttttcttttggcaggcctgccagaaaatcnnnnnnnnnnnnnnnnnnnnnnnnnctctcaatcccttccagctctgcctgcccctggaccgcgccggataactctccaatttcatccagcgaggtggtatattgatccccagctcgtttctgccgcttttggtcgcggaccatgttcaaggctccattgcgcgtgacgcgccccaggtaggccaagaggctctgcggccgcttcggcggaatcgtgttccaggctttcagccaagtatcgttcaggcactcctcaacgtcctcctnnnnnnnnnnnnnnnnnnnnnnnnnnnnnnnnnnnnnnnnnnnnnnnnnnnnnnnnnnnnnnnnnnnnnnnnnnnnnnnnnnnnnnnnnnnnnnnnnnnnnnnnnnnnnnnnnnnnnnnnnnnnnnnnnnnnnnnttactttttgcttttcgaggccctcatctcctttaccctaatagacacc

SEQ ID NO: 67045 - DNA, 768 bp, Arabidopsis thaliana landsberg
taaggccttattatataaagtgcttatcatgatgtaatcagaaacaactatgtaaaatgcgaataaacaaagcacaaagatttacatgacgaataaaaatgcccatatgaatattacaatatatagtaattttagttgagaatataattactttttatcacgaatatttataggctttaccgcttcagggttccaatgggaaatgtgggacacattgtacattactacattcgttttaaaatgtacaaaacattttcacttgagtgatttgaaatttggtttggtataatttttttgataaaagtatagggaattaatggatccaatcatccaagtaaaagaaattatatatgtatgaccgtaagtccttatctaacccaagagatttaagtataatatagagtatattatataaaaccaaactgtgcttttacacccccattagccccctaatgattaagtatgagtgcattggaatttaactatcaatcaaattaacgtggagccctctaagatttgatttcatttttatatctattctacaaattaaatgggtcctctattctaatctattttttattattcgtttgactgaaaccatatggacaaatcttaatctttcctggaaaaaaaaataacaaaagaaaagttttgaagcggaatatgaaaaggcataaaatggttttattattaaaaataaaaagtcacgatctgtttttccgctgccaaagatttttcccaaatttaaaaatactgttgcactagaaa

SEQ ID NO: 67046 - DNA, 536 bp, Arabidopsis thaliana landsberg
ttgttttctccagaagatcagtcattacttcacttgcggattttccatgagttttttggctttttgaaactttgaaagcagagatcatcaagatgcatagtgctatatccttggacaccatagacgcctggcttggaaacagcgccacaactttaacagcattgataagataaaatttcacaggaagaaagacccttctggcttccgttgcagatatgttttccttcaccgagcaagaccaagcctcagcagcaaatctcagggagtccttgatcagtgatattagctttaagataatttctcctacatctaccttagataccaatgtctgcttgtctagttgaagcaatgtaatcacacccttccaagatgtattaagaatggccacaagatttccaccatctcttgcagcaagcatacccaattcactcagagatttaacttccagcgtaatcatgctcaccaaattacccacagcgttgccttcctccattcttgcctttcctacatgtgcactcggcttcatttcacttacc

SEQ ID NO: 67047 - DNA, 1944 bp, Arabidopsis thaliana landsberg
actcaaccggtgactttgtggttgggtagatattgacctagtaaaacaaagggaggccataatatgttgataatatgggctaacactgttaactaatcattgcaagttgcgaaagcttactgattttgtgtcgattgacattcgagatacagatgccccgacaatcttgaacgagacctgtaaaccagaagatagatttgaacaacaaccaagtccaaaagatttcaaaaggaagccaaagacatacataccttggcatagtcataggcttgccagcagaacggttcctccaactcagctgctgggagatccttgttcattttctgcaccaagaaatcctccacgttcaccacattctcagcgctctcatcctcactctcttcatcatccccatccccttttcttctgctctgcaatggactaaacttgattgtcccagggaaagttgcctcaaggcttttcccagaaagactacgtccgctgcccagaatcctccactcaacagagtgttctgtggttaaaacagtcccagctgacggagtcccatcaaatgccactatccgtctccgtggaaagggcatagtaatagtgcaaaattccattgacagaggagccttgtaaccttccatgaggtgcaccttgaagaggaatgcaccctcgtcttctgaaaccattgatagctgatagaaccctttcactggtggtccgagtccacaacctgcctggtatcgcatgagaacaaagttacccaagggaggctggaaaacaatgttctgcttgtcaatcccatgtgctggaacttgggcacatggatggaaagatatagcttcgatatgggctgtactcagccctgctagaggaaacgacacatcaggcagcccttctagctctgcccgacagtttatctgtcccgcaacagatacattatcaggaatctcatcgcggtcgtacattgcagcgctaacggactcatgaattgtgaacaatagcctttgctttcctttgtacaggtatggcttccatgctggttgcttaagttcttggggagggaggatcagcagaggaaaaaccattcgctttcatagcagatatattagacaagctgaggtctaatggggtacctgcagaagtgatcaaaagatttcagggtttgatagcacatcaatcaggaaacaaagtctaccaggtaacagaatataccatatatgaaagagggaaaatactaaccaaacggcatagcagtagcaataaagtttctaagtaaatctctatccagtaatcttgaccctgctttgggagcatccgatgctgtggctccagttattgcagctccagacgggttagatgatgcaacaggtgcagctacaggtttagccctcgatgagataccaatgcttccagttagtgaatcaaacaaccccccaactgatggtgacgcacttacaacaacctcaggttccactgtatcaccagaaatgatgtcaccaaatgcatgagccaccataaaagccctacaacatgagtgacaagacaagtgcatccatcaaggagttgaacatcactcttaaatcaaaagcattgcccttaaggagctataagtaccctgtaatggatgaaatgttaagcaagagagatgataaactcaaatcttcaccaacagctggtccacaatcagatctcctacaaagcttgacgtaatccttcatctcctttggctcaaccaaaggcaagacgaggatagagtaaagcgctttggtatgcagagcaataggccagagaatgttcctttcatcatcatcatcatcatcttcttcggttaagcaaaggctgataatatgacgagtgatgggatcatcaacccaagaatccgctcctttggtggattgagcaacacgtatacaatatccacgagtagagccttccctaattcggattcgaaattca

SEQ ID NO: 67048 - DNA, 820 bp, Arabidopsis thaliana landsberg
atctaaaatattttacattttaacatgtttcgtattgatatctaaaaacaaccaattatcgtgtagaacaaagcagtctaattagtctacttggatatcaatcaacacacaagattgtgtgcaaaaatctgtggtttttttcttttcacatccacttctctctttaagctttttaatgcaacaactatatccttagtccctatatgcatatcatttcctaatttccggctgatagcttaattcgatttaagatttataaatcttgagaatcttggcttaaataccttcagctgcccacctcacaaactttctagaaaagaaaataaattggcctctaaattggtagcagatttgtaagacatattatacaaacagaagttgcttcaaaattattttgataatcttcatcagttggatcaagtatcatttctctatctatttcatgtttttaaatgaaaaccttacggagcatttgaagctaaggcttgcacatgtttaaggtagagagacttcagaactctctgtttttcccatggaaattttgtctcatagagactggatcggatttgccctcttaacaaaaacacattggatctcataattgttcatcgatcccttgataactcacttaagcttttttttgttggttaatggttactacttctgatatatccatggaacttatccacaaaaaagcttatcgactttctcagtagtcagtagggatcttgtttcttcggagtttcatatcaccaaaaacataaaatgtgttacatatttttcattgtttttgcctttttggtaacatggctcagactgt

SEQ ID NO: 67049 - DNA, 1471 bp, Arabidopsis thaliana landsberg
  unsure (1)..(1471): unsure at all n locations
caaaccccactcactaattatttagcctctctttttttgttttgtttttaataattgtcccttaatgggatgtgtagcaatagttgaaacacacattagcctaacattaacattctagaacacaccaaaaattaaaaaatctcaactaacaaagttggataagtcacatttannnnnnnnnnnnnnnnnnnnnnnnnnnnnnnnnnnnnnnnnnntagactctctcttttttgggttgattatatatgtttagatttcaaagaagcatttgaaactatttacatttgacaatagaggtcgtacattttaataaaggttgtcacaaataccaaaatctaatcagatctgtgaagtaaataacgcgatttttcttttgcatcagcattaatcacgcattgtgtttatcatcgaaatgactaattgactatataagtcatctaaatatattaatagatttgttatgtcattcaaagttcaataccaattatggtaacaaaatagattagaaaagggatattataattcgagaaaaggggacttggccaatagaatgcattattctttgctactttctgcaaaatattttctttatcgcattgcatagattaaattattttatacgttcattacttgccattttgcccactgatcatgcatgcgattgctaatatctaaggtgataataattttgttaggtgacttttgtgaattcgacaaatatatccttcatgcgaaaggaaaaaaataacatggtggataataaatttgataagagccatattaatgaattacaaaaagagaaactgttcgttgacaaaaaaaaatgtcccacactgaaaaggaatccaaatatgaaagatgcaacacagaaatcatgattttctacgagtgtgtgtaataggtaagagctatctttacttagaaggaccagctcactttatctgtcttctttgcattccctaaaaaaacgaaatgactccttttgtaaattgccgtaagacaaaatccaatgaatgataataaatgattacagcacgtcacttagtaagaaacctttagaatgatgaatgtctacgtatacttatgatatcatcaaatcaactaattcactagctaaagctaatccttttatttatgtagtagtttagactaaataaataattatgtatcgaccttcataaattaaaaccaaaaaagtatgtatggctccctaataaaaaaaccagacaacagaaattacaccaaaatgtttcaagtttgatgttctgtctaaccattactatttagtttaatactacaaagcaatcaatttttaatgtaagaaaaaaacatagtatataataattcatctctgacaatgtgagattttattatttgagagtagtttatagcagcacataacatttcacatgttcttggaattcaaaattctatatgatttaaatactttttacgtttaccagaataaata

SEQ ID NO: 67050 - DNA, 112 bp, Arabidopsis thaliana landsberg
atccatccccaatgtccattgaacccgctcggaataacccctcttttgctggatttttaccaatattttcaaaaaaagctatctacttccaggaattttccgcccaagctat

SEQ ID NO: 67051 - DNA, 424 bp, Arabidopsis thaliana landsberg
  unsure (1)..(424): unsure at all n locations
cttgcatgcctgcggagttcttcgctggcccctggcagcgcctggagcaaaaagccacccgcggtcccgatggtgtttttcggcttgacaaaaaccgacaggccaacagctgacgggatctgtactgacttggccaggtagtacgtcaagtcttcagctatttccccggacannnnnnnnnnnnnnnnnnnnnnaggctgctttaagcccacgtacttggatacctgccaccagcccttgccgacagccctcttaacgtcgatgcgaccgacttatctggccggcaaggacacgtggttattttggccattccccttaacagtcaaatcttacttgtccgtaaccacggatgccccaaccgggccatcgcccatgaggcgcaaagtcagtgactggtcaccctttaattttgccccggctaaaa

SEQ ID NO: 67052 - DNA, 1100 bp, Arabidopsis thaliana landsberg
atctttctacgttcttgaatgaatattcaaaaacattaacccatagacatttttcagttgagtctttacctgaaccgtgattgtactgctctaaaatgctcaatccagattcggtcattattacatggtcgccagtgaataatgccttgagggacttatggaacatgcacactgatccctgcaaatttgtacgaagctcttatcccaagatcatgatggaattctttttaacaaaaattgaacatttgtttttatgtatgttcttgcagttggacaaacttacttgtgaatgaccaggagtgtgtataagttcgacatcttcatagatactccatggtccacttccttccagctttaactccacatcagaggtcgaaggttcaacctaacaaaaaaaaaattcccttaatggtcgatcagagatgggtttagtaacaaaattgtttgcgtggctagtttactttttacttttatccaacctcataatctttttctattttctacagagcatataagcagcccaaggttcttgtaactatgtaagcaagctttttcatttttcacgaaatctagatgttgaaaaaacctatcaagaatgtgcagagaggtgtgaaaaattcaaggacatacatcatcagaatgcagaattctggtagacttgaatctgtctgcccatttcttgtgatctgcaacatcatccctgaacaatgaaatcgcttatcctgattaacagagattacaagagaaaacacggattttctcctttaggtgttatcaattctacctgtgtgtcaaaaacatgtagcgaacaccacccttcatctcgatctttccagcaagtttctccacgtacctaggactgcagcaaacagcaaaaccttggtttaatcagttgtgtagagttaatagccacaacgaagtatatcaagaaatacattgcatcaacaatgtataagatactaaacaacaaagaaaataagaattcatgatgcctcctcccaagggtatatacctatcaacaagtatatttccctcacgatgaaggatcaggtaagaagttgctccatacgatttcttggaatgaaatccacaatgaaaaa

SEQ ID NO: 67053 - DNA, 1743 bp, Arabidopsis thaliana landsberg
  unsure (1)..(1743): unsure at all n locations
aatgaaagcttaagggattaaaaagtacaggaagtgtgtctttgtccactacaagtgaaaaggtctcttgagcttcccctatgtcagcaggtggagtttgagtgcgaatagagcccgtcggacaagatagtaaggcctgaaagaatcaagaaaccatgagtaatcaggacaacctcagaaattttactcactaaaatatttttcttcataagaaatttctcagtctatgacatcctagcagacatttccacaaaatttgtctatctgttttataaggtaacaataaaagctatcaaagacaaaaaaacaaggagattcaaaaacatcctcaatgaaatgtcatcagatattaaatagaaagaaaactaaaatcgacgtagttaaggcacctgaagagcattcagtctttcctccttacaagttggttgctttgtaaccgcagacatgttgtccactcgagtgaataaatcctgtgaagataaatcagagaaaagctgtttacgaattggctgaaaaaaatgtaaagggaaagtaaaatcctgctctcacagctgcattggcctgctaacaaacaactataacatgaacattctaacttcttgttctcatataatgactgtgatcaaatcagattatattctaatgttagtatatccttcttcgagatcaatcctaaggcatcaacttcccaatacccaaaatgaaaaccccccaactactttaccctaccaaccaatagacccaaaatgcttaaatcaattcatcaatttcaaaggaccaccaaaagggtccacaagacaggggaaagagcagaaaaatttaggagctttacagatttcagagaagaaaagcttaccggaaccatccaacgacatgtatcacaatcaatacaagtattgtctgcaaaaaaatccattgaaagatagacagagagagggcgttaatgatctctctttgttttcaatttgcaataaaaagtaaccagactttatttaccaacaaatatatctccttcgacgttctgagttcgtcttctaggattctcatggcttgtcacttgagctgctttgatagatccaaacactctccttcctgataaagccgtcgagctaaaacaggaagctttcgatgaaaagatcgcttcttttgaacggaattgatacgagagcgaagaaaccgcagagaaagaagctgaagccatgagaatggtgattgatcctcgtctcttctcttctctttttgtgagctttgatgagtgtagtaactcatcttgaacttcgcccctatgaaaattatttgactattaaaaaatctatatttgactacttgtggacccagctaaaatccggtttacatacggttaagcttgattaaatcgttcaatcctgattggacacgtgtaagcttcttctcattcgtgccgggtcctgtcctcctttgtagatcgtctctctcaatctttcaaaacgagaacccggttttttagcggttaagcctaatttggtctggtttgtttttccttaaaccgtgagtctcgaatnnnnnnnnnnnnnnnnnnnnnnnnncttctttctcattcgtgccaggtcctctccagtgtatgtagatcaatctctctcttccatctctcaatctctcaaaaacaccaattccaatcctgtttccttggatcagagatacgaatctgaatcacaatctcgagatcttcagtggtttccaacggtgattgatgtttcacgtgga

SEQ ID NO: 67054 - DNA, 161 bp, Arabidopsis thaliana landsberg
  unsure (1)..(161): unsure at all n locations
gaacgagaaaaanngaannngannaanncaacnnaaaaaacnnngaaacaaanagaaaannacaaaaaggaaaccagnncaggggagcaacaaagaacaannaaacaagnccgcgaacgggnnnnccaacaagcnnaacaaggagcaaaaggaacccaaaa

SEQ ID NO: 67055 - DNA, 1031 bp, Arabidopsis thaliana landsberg
tatttattttcatatcaagaatcaaaaaaaaaacggttagttacgttaaacacctgaaaataattgtaagagttctaataaaagaaaagaagaccaaaaatagagatgatgaatgatgttgttttgactcgttgagcagagaggatgatacggaataccaccaaactttgaatccatttcctttctctcatatgtatgttcctgcaaattaacacacaacatttcctttcgatcatttcaagtttttttcttaggaaaaaatggcgacaagtgaagaacctagtacggatgcctccataatatgttatgcgccaagcatgatcaccaccaatggtgtttggcaaggcgataatcctctcgacttttcgctacctctctttgttcttcagctaactttggttgttgtcgtcactcgtttcttcgtctttatcctcaaaccctttcgccaacctcgtgttatctccgagatccttgtaagtaaccataaattctcaatttttttcattcgtggcggaaaagtttttttaactcaaaaccaattggcaaaaagtgaaataatacatatcacttcggatgagaggtttctaacattttaaaatgtatattttgatcttaaattatagggcggaattgttcttggaccatcggtgctagggcgctccacataatttgcacacactattttccctcaaagaagtgtgatggtacttgaaacaatggctaatgtgggtttactttacttcctattcttggtgggtgtagagatggacattatggttgtacgtaagacagggaagcgagccctaaccatcgctattggtggtatggttttaccattcctcattggtgctgccttctctttctctatgcatagatcagaagaccacttagggcaaggcacctatatacttttccttggtgttgcactctccgttactgcattcccggttcttgcaagaattcttgctgagctcaagctcatcaataccgagattgggcggatatcgatgtctgcagctttagttaacgac

SEQ ID NO: 67056 - DNA, 1948 bp, Arabidopsis thaliana landsberg
atacacgctttttttcctagttcttacatcaaaccatacaaaatactcatatagatctcttttgattgctaaaactaatgcacgaagcatgcaagccgccaaccctacacgtaaagtatatcttaagtattctctaatgacttaaatttaacaaaaaaaaaattggtaagcaattacatattaacgacgtaactcatagtttaatgtttgattttttttttttaatgttcatattcaattaccatttaccaaacatacgtaagataaatgtagataaattgacgtatcgatgataaaaacttttcaagtgaaccaaaaacgtgtagtttattcaaatggaagattgttttgttggtcaagaggttagaaatcgaatttcagcccaacattattaaaaactggtttggttctgtttaattaggtcattgtagacgttgacacgttgtagtcttgtaggatgacaataaaatcctttttatacaagttttggagagtagtctaggttatgtaccacggttaaatatacaaatatatattcttgtgtgtatagaacttgtgtcttagagtttaaagtttgaatctgatatagaaaaaatctcttgtcaacgaaatgcaatctttcaacttcgatcataagaattcgaccgctggccaatcccaccacgtcatcttgatttttagtcaaccattggtatgtatataaaacaatctcctttatgtgcaaaccaaacttttcaaaattctaattttcacactcttgcttcactaattgaattcaatagttttcattttttatttctatcttgtatttgttttttttgtcctctgcacaatcgccaagacgtgaaacctcacatgggttatgccaagatgggactttataaaacgaagtccaaacgttcaattgctaactatcatcatatcataatcatcaatattttcatcctctcttcaatcacatcttcttccatggcttcttcttcttctccatcttccattgatttttcgactgcaattctaataagagttgatcaatcgggcaaaggagacttcagtaagattcaagaagcaattgaatctatccctcccaatctaaacaactctcaactctatttcatttgggttaagcctggaatttaccggtacatataaaatattttgttagattttctatatttaagtcgtcttaaggtttattaggtttttagaccttaatggtttagggtttagattttgttgatatttatcagctgggtattaggtactaggcttttttgacctactaatatatttatgattttttttcctaaatagtatatgttattgatgattagtttattctatgcttttaaagtatatagttttgagaattagcgatttcattgataacagagaaaaagtggtgatacctgcggagaaaccctacataacattgagtgggacacaagcttccaacacttttctcatatggagcgatggcgaagacattttggaatcacccactctcactatctttgcatccgattttgtatgccgatttctcactattcaggtcaatcttcatcatacatcgtatacattcattttataaaataccaattcaaagtagatcaccaaaatatcataagtaagtgaatcattattaattaacaaaaaaagaaagttactaatattgatgtgtttcgttttattgtaagtagaataagtttggaacggcgggacgtgcggttgcactgagggtggcggcggataaggcagcgttctacggatgcgtgataacgtcgtaccaagacactctccttgacgacaatggaaaccattacttcaagaactgctatattgaaggagccaccgatttcatttgtggaagcgcttcttctctatatgaagtaagtactaataactcattttacataatttgtaccaattaaaaatacacttcacataa

SEQ ID NO: 67057 - DNA, 650 bp, Arabidopsis thaliana landsberg
tataactgatcatcataaatgtattacaataacagcatatcaagacttgacggttatcagccaaaatcattaaattttggaattagatgttaataatatacaagtgtcatgtcgatctcttgtttacatatccaaacatctctatgtgtgacgtgagttactacttactagaatatggagtaagataatatgggcttcctaaaaggcctatacagaaacaaagcccaacaacctaaaacccagtgtgaacgtgaaggacttgaaatattccaaagttgagtgactgatgaaacctttcacgtgacagtgacttgattttattcgtatacgggcaaagttcttccattactgcaaaaactcttctattaatgaccaacttttcataaaagaaagtaccacgtgtctgtcattagattggtaggtacatggagactacactaaagtcattcacatgggattctttgacccattaggagccaaataaaaatcttctctttttagtcttttttttccatcttaattaaaataccgagatcacgctttcttttttagtacgaggggatcagcatcttaattaggatcacgaattaaaatcacatattttatacaaattgcgacttaaccggaatacctttagaccggataaattc

SEQ ID NO: 67058 - DNA, 727 bp, Arabidopsis thaliana landsberg
aaaataattaagacagagaggctaaaagagatgatgagttatataagaagtttgactaaataagtttgcagctttgactatcccaccttctcccaccgactgccaacccatccgtcaatatttctatcttcatttcctcacaaatatttattcaatctcttcattttcaaatatatagttttctagtactcgtagtatggtctaaagactttaaaactaaataaaatggtaggaagtaaatgcaaattacttgaatttgtaaactatattcatactttcgcaatgttagattagtctgaattcaaatgtgattaaatacgtttgtatatattacgttatcaaatataggttcaaattgtagggattgtccataactattgcgtatatatgttcaaaattatattatatgttgtatttgtataccatagacgttatgacatttgtaagttgtaatgtatcttaaattaatgttttgacacccggtttaaactattatggacgtctttaacgtaaaaaaactgactttcttggggtttgaaaattagtctgctttacaaaataatcttgcttatataatttttaatgataattagattaaagagtttgataaaaaaaaatatatatattaaaaggaaatgtatatttggttttacccaaagataatctgaaggttaaagtttaccaataataatcggtattagaaaacacagttcaattaacaaaaatt

SEQ ID NO: 67059 - DNA, 520 bp, Arabidopsis thaliana landsberg
  unsure (1)..(520): unsure at all n locations
aggggcaccggaggtgccggtatatacaataatcaatcagatccaagtgtccttaattgcacttttaccttatatcaaaccagtaatacgactactaataatacaggggacgcaggtatgtacaacctcaactgttcaccggtcattactcagtgtcgttttaccggcaatgtatctaccggcctgggcggtggtgggatgtttaattttgggggcgcacctaccataacaagttgcattttttccggaaatagcgcactccacacttcaggctccggtgctggtttgtttagcttcgccgcatcggcgccggtggtcaccaactgcattttctcggggaactacgtaaccggcattgctggcggtgcggccctggggattaattcagcgaccgcaaccttaannnnnnnnnnnnnnnnnnnnnattacagtacttcctatgcggccgctatttatagctataatgccaacgcagctattaatatccaaaacaccattatttggggcaataagcggggat

SEQ ID NO: 67060 - DNA, 375 bp, Arabidopsis thaliana landsberg
agaaaaagagaaggatattgaacaggatcataatgaaaaatatatgatataattataaattttatttttgttataaagactttaaaaaaaaaggaagggatgacattcaataaagcgatggctttcataaaaaatgggaagaggactacgctatgggtacttgaaaattagagttcttgctattgaaaaattcaaagggaacatgaaggtcaaggaaaagatgaaatattgttacgacacttgaagatgcaaagggaacatcaacatgaataacgtaaactaatctagaagatcatgagagaataatgaatgtaagtggttttatatgggagagaggactcggtgagaacgactatgaagaataatgataaaggt

SEQ ID NO: 67061 - DNA, 415 bp, Arabidopsis thaliana landsberg
  unsure (1)..(415): unsure at all n locations
ccttgtgaatcgatggttgcttcattttcatattttaggtggggtcctggagactttataccgataggaagcgtgctccttcatttaggcgatgtcgttctctccttatgggaagagaacaacactagggatactgcataattnnnnnnnnnnnnnnnnnnnnnnnnnnnnnnnnnnnnnnnnnnnnnnnnnnnnnnnnnnnnngtatccacatatgatnnnnnnnnnnnnnnnnnnnnnnnnnnnnnnnnnnnnnnnnnnnnnnnnnnnnnnnnnnnnnnnnctttccgtggctctatctaagacagttgatccaggtgagacacatatgtggaatgatcgtaatgctttcagcttaactaaccttgaatatgctaatgctcatcacaaaactattctattcacattgacggca

SEQ ID NO: 67062 - DNA, 649 bp, Arabidopsis thaliana landsberg
ttggtttccgtatagcgcggcgccggttcggtgaaatgctggtcggcgatcagatcggcgagcttgacgcgatcgttggtttccagcgccggcaggcgcttgtcgtcgtcgtcgtcgtccttgccgctcggcgtgtcgaagctctgcgcgtagaccgccatgaaaccgggttcgatcagcgtcgaaccgctggcgcggaacgaatgcgcaccgcgcccgcccgccggcgcatcgccggcccgcagttcgaccgtcacggtatcgaacagcgcctgttccatctggctcgccaccgtgcgcttccagatcagttcgttcaacttggcctgatccggcgcgaggaatttgccgatgtccttgggcaagcgcgcggccgctgtcgggcgcaccgcttcatgcgcttcctgcgcgttcttggatttggtcttgtagaaacgcggttccggcggcaacgccttggcgccgaactgctgcgggatgacctggcgaatttcggtcaatgcgtcctgcgcgagattgaccgagtcgggtcgcatgtaggtgatcagaccgaccgtctcgccgccgagatcgatgccttcataaagctgctgcgcggcgcgcatcgtgcggttggctgcgaacccgagtttgcgattggcttcctgct

SEQ ID NO: 67063 - DNA, 447 bp, Arabidopsis thaliana landsberg
atattcttttattcattctcttgaattaacttctaatagtttaccattgttattcgaatttatcttgattatatagttaatatttgtgagatatatcctaggtaaatatacctgaatgtccaaaaactaggtctaaagagctcaatatttttatacattaaacttagatttcaacttttatgtataacttttaaccttggatcaaccactaggccattgtcgatttatttttgactattaaaaatcagactattgtatttcatttaacatgtttttgtttctttttgaatttttgcattcatttaagatgttgtggtctctcaagtccatatataacgattagaaactacaaatttataattttgtagctccgaaataaatatcctgcattatgtatcagctagaaaagatctaaatcagtggtaataatcgactaaagcaaagggg

SEQ ID NO: 67064 - DNA, 550 bp, Arabidopsis thaliana landsberg
agtcgttttctttgttaccacaagaccaaacaattcaccaataaaaacaagtgagttcgactatttggggctaggaagaatatatatgacaaacgtgtgaaaatttctcggaaacttcagaaaaagctactttcttttagtttttttgtcttcaaatgccgaacattattcagtaaacagaacacagcaatattaacgaaacttcccaaaataagaagcatctaatatacactttataaccaaacttgtaaattgtaaaatgaactttttaaccattaaagtgattggttattaaaaaaaaaatcaccacatacatgataaaagcttttttttactgcaaggtgactgtatttcactggttgtgtcatatcatacaaaattttaatgcactcttctctgtttcactgagaacttgtgaattcaagtgattaaattcacagttacaacttcatttgcatagccaatctttacagtttttcaccaatcaacaccatcttaaagtaaagcaagcttcatcgaaataaagttcttgttttagctgggacttatt

SEQ ID NO: 67065 - DNA, 525 bp, Arabidopsis thaliana landsberg
gcactatattcccaaatcaaaactcaaaactagaatctgctataaaatctcaccaatgtatcattttctttagtcttcttcataatagctttaaaagcgattttgaaagcattacatccatcagtagcaaacttagtgattccagattcaatctctccatgatcttcaccatctgaattctcatcattatcttcttcttcaatctcttcgtaatttggtcccatgttagcatcagagaagatcttctcacgaattgttacttctggttgtttcttcgattcatcatcttcttcttcatcgtcatcggaattgtaatctcgtgctctcttctgaaatagcttttgattcttcattgtaaccttaaacctatcggaagtagaaggttttgatttttgctttttgttcctcgccgctttagtacctttcttaacgccgactcttctctttctagagcctctatctgccatcgccatgtgaccttcttctccggtagacatggcttcgtcgagaactttgggttatcac

SEQ ID NO: 67066 - DNA, 742 bp, Arabidopsis thaliana landsberg
tcgtgaacatgctatccaagtcagggacaaacaggtttcacggttcagcctgggagttcattcgcaacaatgcattctacgcgcgcaacagtttctcggacttctgctcaacggggcgatgtgctcctggcacgccgaacaccacgccggcaaagccaggacactatacgcagaaccagtttggcgcgtctcttggcggccccatcattaaggaccgcgtcttcttcgaaggcgcctatgaagggtggcgctactcaaaacccacgttgacaacgactcttgtcccgacagcggaggagatgtcgggcgacttttcaaatgccgcgacctccttctatcaacacaaattctacaatccctattcgacgagttgcgttggagggaaatgcaccgtgcaacagttccaatgcgatgccaatggcaacccgctttcggccccgaacaaccagcaggcaccaggcaccccgggcctcaaaatccctgcatccatgctgaacgcaacgatgctcacttatttgaagacgtattactccacgcccaattcccccggaaccatagcgtcaggctacaacttcgtcgagaaccggccgcagatagaccataacaactcctatcaggctcgactcgattttcatctgacagacaagacctttggcttcggtcgcatcactcagatgtgggtgtatgactcccagcctgtcgcaggaaccatcttgtccaacatcttgaactatcatgccta

SEQ ID NO: 67067 - DNA, 709 bp, Arabidopsis thaliana landsberg
gtaaatggcgaccatttgaagcaactaagaactatgggaatattttaaataaataatagaaaaaataggatgtattttatagagaattgtatgagtttataatttttagttaactgtggacgatttatcaaaacgattttaatgttgtaaagaaaatggaaaaatcagccagtatatgcagtggattccactccaaaatccaaaagaaagagaatctgttgttttacgctggtccaaataaaacgaaatgaaaaagcaattcttttcccttaagaaaattcaacttcaatggttaacttttaaaagaactaaatatatccctttgaaattcttgctttaaaaatcactactagtcacagccgtggtagtgcacgttggatgaaaatgatatactatggatttaattttctaaatatttttcctcataaggttagtttttaaataaataaaattttaagaagaaaaggaagaactaatggagtgggacaaagaaacgagggagtaggaactaggaagataagtcaaataaatagccaaaaaaaaaagagaaagattacgtaattgatgcagaagtatggaatattgtgttgtgtgtgacaggtcgtggcctcgatactttaagcctttttgaaacaagaattagtccagagaaaaagatatatacgttaccaacaactttctgctttctaaagatttttcaatatttaat

SEQ ID NO: 67068 - DNA, 221 bp, Arabidopsis thaliana landsberg
ccctaaactcctaaacgcctaaagccctaaagccctaaacgcctaaactcctaaattcctaaagccctattatcgcctaaaccctgaaaccgctaaacgcctaagggcctaacaccctaaaggtcgaaacacctcaacacctaaacctctgaacacgtaaagcccaagacctctgaacccggaaagccctaaacgcctaaaccgctaagaccctaaactcc

SEQ ID NO: 67069 - DNA, 1054 bp, Arabidopsis thaliana landsberg
agtactacagctgataaaattggaggagtattgcgtttcatcgagaactcagacataaggttagaccttgtgttctttaactgtctggtagatgcgtacgggaggatggaaaagtttgcagagatgaaaggtgttcttgaactaatggaaaagaagggattcaaacctgataagattacatacaggacaatggttaaggcttatagaattagtggcatgactacccatgtaaaggaacttcatggtgtggttgagtctgttggtgaagcccaagttgtggtgaagaagccagatttttagtggaggaatagagctcaattttgctagtatatatctttctagtatccatctccttgttctaatgataaaatgtagttagtataagagtaaatacattttcagttggattacaaatatatgtaacacaaacggaaaaacaaaaaaaaataatacaagttatgtatttactcttgtttgtgatgtgttatcagtctgtatgtgctgaagcagctagatatgagagttgaagactgtacgcttctttcagtttagtcaaaacttcggcgatagacggtcttccagatgcatctcttcccacacatcttatagcaatcgaagcagcttttttcatgctcgctggatcaaatgtctccttcaagatatcatccacaatctcaaaagctcctgcttgtaagtttggcctagcctgcatttaagtattctgatcttttaagacactgtgtactcagatacttgagagatgagaaactaagataatattctatgttactctcacccataagaccaagttaaacgaatctggtgatcctgagtgacttaagggttctcttccacagataagctccaacagaaccacaccaaagctatagacatcacttttctctgtcagctgcagggtagagtaatatctggaatgaaaaagtgtgagtaatgattagctaatgaagctgttaatccatcacgaataaggagagatattgtagaagagtttactcggggtcaaggtagcctgcggtgcctttaacaacagtag

SEQ ID NO: 67070 - DNA, 472 bp, Arabidopsis thaliana landsberg
  unsure (1)..(472): unsure at all n locations
gagtttggggaaaaagagtaatcattgtccatgatcaattatgcatttaaaatgttagtaaaatctttgccagggcctggcaaatgccgttctgagtcacagtggtgatgcgttcacatcagaagcagcaacgctagnnnnnnnnnnnnnnnnnnggcatcggtggaaaggagacacaaatgtgtttgtcagcaaacttctccaaagcaaaaagaaatcaggatttcctgttggaggcttgtgtggcaggtgatgtctagcatctcacagccctagctgacaggccttcgcacaagccagaaaatagaatctgacaacgaatcattaggggtcagcctaagctatgggggctgacatttgtcccttaatgctaaatccaaagtttagaggtcactaaactcaactctaaatgtatgaaatggcttcatgatctgagtgtgtagacacacattctacagggttctctaccacg

SEQ ID NO: 67071 - DNA, 1831 bp, Arabidopsis thaliana landsberg
  unsure (1)..(1831): unsure at all n locations
tataaaaaaaaaaaaaacactacaaaatagttntgtgtcattaggcaataataggcaccaaacaagatcttctgattatatatagttccgcgcaatgttgacttgcttgctttttcccctgattatttttctcttttataataccatactcgccgagtttatcaaacaacataagaaccatgtaatttgcaatgtgacaaaacaactcatcatatttcaaagaaaaagcctaagatccatcatgatatgaatctcaaattattatattctataatgtttggtcaactattattaggtccaaaacaatgcatttatttctcttttacgtctaagtttattactctaaaacaaaacaataactatgagctcgttttgattaactcagacgtttaagagacatgaaattattgttagttttggcattttctccgtacaatttatcacagtcacaggtcatggctacacaaaaagaatgatgggctatactgttttacttatattttcatactactttcgagcccattaatggcccaaaacataagccacactatttaggcctggcctgaataagcgtcatcattcatagtttaatacctacaaacggttatcttatatgaatttatgggtcccttttctttttttttacacttgactttttttagacttacgaagttatatgattcaacatcttcttctggtcataaccgtaattttccaaaattaagctacaggtacagctaaaaagtgtactacagttttctttttctaaaaatagtagagaaattctttcttgaatttttagaaacaagattgacgataagccctggattctattagtttctatgtgggcaaaaaaggccacattttctatggaaataaaatgctaagggaaagcgaaaagaaacaaaaaacagagaaaagttacctaaccgaactagatctgagaaagagttcctgcgttttttcatccatctgggctatcaaaaccaaacagcaatctccgtgaaaatgatgattaaaccgatgatcatgggcggtaatggcttgattgtagtgtacatacaaagaacaatccaggcttgggtcgcttaccgattcccctttgacttggcttccttctttgctgctctccagaccacacttgaacagaaatatccagattggtctgagctctatcaagtctctcctttcacggcttcacaactttttgccttctttagatttccaagaccctagtgatgtgatcgtacagtattcttctaagttcttgagtttattgcagctaaacttgagcaaccatcgatgttactttcccctgtttagtgaaatcaagaggaaactctgaggtctacgatacttttttaatcaagaatcttcttcctctctgtaatttaacattgggctgtaataggaagtctataaaaccaaaattacctggggaagtgaggcgaggaaggatcgtcaggtgaagacatatgagcagaagcagcagcaccacgaaaccttggctgatcctcgtcatttaaatgtggcgcttcaccacctggtccaagagacccatactcattgtgttcagatggtgaattgtaaacattattatggccatatggataaaacatcatgacagatggaacgttgtgtccctctgaagaagtcacactgttttgcttcatccccggtggtaatcggtacataccataagcaatatttccagaagcatcttgtgaagtgtttgagcgaattggaccgttttgagaatgatgagcagaataggaggacgattcatgtctgtacaacgacccccaatgcctatcaaatcgggcttgccttg

SEQ ID NO: 67072 - DNA, 507 bp, Arabidopsis thaliana landsberg
gtccttttccttccggttgagcttcaggtcataggtatggggtttggtgtccgagatggtctcaccgccccggtacagggggttgcggatgtttcctttgcgggatccgacggtacctttctgtcggtgcacattgttggaagatccctgcacatcactgcgatccttgacattgggcgtgccctgatggctagctgccaggtgtgccttgaccgacaggtaaatcacgtggtcattgggctttataccaaagatctcgttgggcaggttaaccggtcgtcccgtttgtgttccttcgctatttaaaacgtgcagttgcatatcaattctgaattaaaacgattgaaccattatgaccccggacagatccgctgaccaggatataactcttttcagggaatatttttacgatgcgcagtccttttaccttcacgcggtcgccacccatgcggccggccatgcgcatgcccttgaacaccttggaagggtaaggagacccgcgcacgg

SEQ ID NO: 67073 - DNA, 759 bp, Arabidopsis thaliana landsberg
ttcaccaaatatacccaattgaatttctactagtacctaaaatcatagttacgagggctaatggacttctcataagacttatcttacgcatcatttggatcctctaatatttcgcacactattaagtccctagacgaatcgaaccaaggaaatgcgtaattacctttttaagaagaattaatgcacctaacggatattgccgctcaacatagagtggttaatgttcttttttgccaacttgtatttccatttactgaagaaataaatttgacacaactaaatctttgaaaattacaatattttataaagatttacagtttttgggttttataaaataaataagatttgacaaagatagttatgaaaagaaggatgaaatacggatgtcttttcatgaagatttataaagagtactaataacttcatatcttatgattagaaatctaactttgaggcccttgtgtaccttcgaatatagctagtttatagtgacgggacccttagcataaccaaaatcactgacaagccatagcattccacgtggttaagtccatctacactctcattatcatcttccctccggttcgggttcacgatactggtttagcaactaaattatcaaactatcaccagtttcgtagaatttattcacactaaaaccaattatacgttaaatcattcgttagtcttgtaaacttttgttattacttattaaacgccatggcgatgttgggtccactaaacagcgcagccaatcac

SEQ ID NO: 67074 - DNA, 579 bp, Arabidopsis thaliana landsberg
aatttatcttttataacaaaaaaacaataaatttagctgaccaaatatatgttacgttttgtatttaccatcatgaagcacatagttaaatcacaaaaatttatgattatatcatttgataccgtgattcacgagagtcatatacaccttcgatcactctcaaccggacggcaaaatttgtggtcatacacgtgattatatatattagaagaaaaaaatgaaagaattttcttttgttaattgtaattgcatattccgtattaacttttctctgaagttagacaagccattaccatcagatttaaagcaattgatcgtttgaaacaaatagtggcgccagtgctaaaactaataaatacattgagactcgaagcccagacttggttaactcatatatacgcagatatatacgttgaataaataactatgatggacaaattttagtgaattgtgtaagattatacatattgtaactgttgaagtttggtttgcactataggtgtatagataattgacattgaagattcatatacagagacagtgaccatttcacttaactacccactttctttttttctc

SEQ ID NO: 67075 - DNA, 544 bp, Arabidopsis thaliana landsberg
aaggacatccatccagaccggatgccggcccctggccggccagtcggacatcagcccaggaagtttcaccttcccggtcgccaggcggtatacgccgccgacgacccgcaacttccccgctgccaccgcgtcatggacgatggccgaacgttccggcaaggcggccatgctgtcgcgtacgttctgcgcggtggccgcttccagcagattcccgggcttgcccctgaccttgtcgaccgaaggtactatggccgccaccatcgactggatcatgcccgggtacgtggcggcctgcgtcgccactttgacagccgcgtcgaccgcgccgcatttctcgtgcccaaggaccagaatcaccggcacaccaagcaccgctatgccatattccaggctgcccagcacatcgtcattgacgaaattgcccgccacgcgcgcgacgaacaggtcgccccgcccgctgtcgaaagcatattcgggcgcgacgcgcgagtccgcacagctgagtatggcggcatagggggttctgcccgccgctgagcgcccc

SEQ ID NO: 67076 - DNA, 579 bp, Arabidopsis thaliana landsberg
  unsure (1)..(579): unsure at all n locations
taggtgcacaatgtgctggggtatacacaggaacaggcggaaaaacttcaactttcggggatactgcatccggatgatgcaggaaatgtttccagggagatagcacaatggctgaagaacccgggcatttctttttcagggtatgtgatacgtgtaaaaaacaggaacggcggatggttatggctcgaggctacggtaaccaatatgctgcacgacaaaacctttaacggtatcctggtcaacttccatgatatcaccaaacgaaaaatagcggaagaaaaagtagtgcaggccaaccggctctatgttttcatcagtcatatcaaccagaccatcgttcatgccaccaaccagcaatcggtttttaaagcggcctgccgcatagccgtagagctgggtggattcaaagcggcctgatagggttgttcgatcccgacagcaaggagataaatatggtggaagaagcaggcatcctgcctgaggatatgcctgtttgcgccggtccttatgaaacgctngtaccgcanacgcatgctttacgcanaggcgtttaccggtgcaacaaatatccagacaatc

SEQ ID NO: 67077 - DNA, 720 bp, Arabidopsis thaliana landsberg
atggacctttgtatcgttcaattcctttttatcaataaacataatacactgccacatacttttctatattttattttagattgacaaatgacaactgtgagcaataaatagagttggtccatccatatatatttaattattatatagtatattgtaggcctacttttttattttatttatttgccaaatattcaatatttatttggatctctctttatcattgctgacacaaaacgagcgatccacaagtctagaatatgcccttttgaacaattttttaattttatttttataaagaaccgacagaaaatgaatcttgccgtattaatttccatttatcgatatatttattttattagttagctgaaataaaatttaatttcgtatttcaaccaatctttaaaatgattgggttaacacatatgtatgtatgttaaatatgtaattgattttattttcttgtcaaatactttttggaagttaactttgtggattagttttgcttaatgacagagttagtctagggggcaacctgctaatgtggtttagatataactgaaactctgttatttaacttgcaaatatatgaatttatccctctggaaaataaaacttaaaaaatagcttgaatgtatttggtcaaccaaaattcaaatttgtaccttgtttaagttatccaaaatacatataagtgtatgtatataactatacatatgcact

SEQ ID NO: 67078 - DNA, 369 bp, Arabidopsis thaliana landsberg
atacatatattttgtcaggatatttatatgaaagagagaagatagtgatatgggacatggtttgataatggcgtagggttagaagggctaagcataatggcactgatactattaacagttaaattcgcaaattagatgagcatatcttcgaatcttcattgacttacttgcatatacttgctatctttagtttgatgatgaaatttcttagttaaaactaaaacggtttaatattgctcatttcaatacgacgtctttatagaaaaaagttatgttttaaagctattctttttagaaatactctaatttaacatttggggcgcagtgacgtacacccctgaattacacaaactgcaagtaaaatttgac

SEQ ID NO: 67079 - DNA, 369 bp, Arabidopsis thaliana landsberg
ctacgtgtgttttttacaaacccacctttccatggattacaacccttaggctcccgaaaatctcgactattttcctaaccacgccactccttcatctccatacctagatgtcccaaatcccggttatgccatcccccactgccccaagaatcattattccaacctctatcctcccatccctcaccagagcaacctccccaagtggtatctgttgctgcctcttttatacaactaggctgggcttaccaaggattgtcgatctttctatactctccagaacctagtactatcttgttgtggtgccctgacttatctcatgcattaacctatacctggcccgagtacttctaactgtcattaaccctttct

SEQ ID NO: 67080 - DNA, 457 bp, Arabidopsis thaliana landsberg
  unsure (1)..(457): unsure at all n locations
ccgaagacttcctagtacccacgaaaaaagaccagccgtgtggagcagaggaacaacaacgtcaagggctcgtgaacgaaaagaagacaaaggggctgctaaggggcgaaaagaccgctcccacaccgatagaacaacggggggngagcaggaacacgcaagacaagcacaccgaaaaggcgaaagagcggcagagatggcatagaaccaacagctcattattggacggattctaccgatctaatgcccgaaccaagagcaatcaggacttaacaaaacggttcagatcgaacggcacacgagcggatcgaatgaccatgacagggttgtaccaaagatgggtttactcggatgaaaagaaaagaggagtcaagtaatgccacaagagaagggctggcgattacttatccggtcagatacgtggacgagaaagaaggactgaatggaacgacattga

SEQ ID NO: 67081 - DNA, 2404 bp, Arabidopsis thaliana landsberg
tgaagtttataagatcacagactaatgagaaagtctttgctagagcaaatctctttagaatagctatctgaagcagaaagggcttcaatagctcggagaataatttcaaggacggggtacctgaaaacatacacaagggttcattgtacatactacatagtaaagcataacacttgtttttttttgcaagaatagaaatgccattcactaacacttgatgatctttaagatgagtttctgttcttccatacctttctggaattctttctttagtcaacttgctcatttcaaatgaaagaagattgatcaagagactcgtcaaacccagattcattagtggaggaatcaatagctgctcaacctcaggttgaccttctatgatacctaacaatagccctacactctatggtaaaatagaaatgaattagcaaattaagaaaaaccatgataaactaaaacttacaggaaatggtggagggacatgaataggcataaagtagagaatttcagaaaattcattaactcagagttcattaaataaaattcaccacttcgatcaacctttcaacaatcaagtcgtccagtgcaagaatgactaagttacaagaacaaatttcagaagttaccttttcaataagatgaggattcaaggtattttccgcaatccacaaaatatggcgaagtatatcatcagactccaaacaatgggcccaggaagtacacccagcgccagagagtcctgtggtgagtatcctattggagatacatgtcggatagttagataacccagccaactaatcaagcatgaatctacatttgaggtaacaaatttattgttttacctgcaaacttcacttaggcattgggtatcatcaagaaacaactgccccacaagtgtattgacgattccggctgtagactctatatgtttcaacagaccttcatggcaagcaaggttcccaataatcccgagacagatttcctagcaagccccaaaacgaaaaagaaatgtaaaaattaaagtcaattcaagaagacaacaatagttagaaatgacttagacttatcatacatacactgagttacttactcgaatacggggagattttgaaaccataaggtttgcgtgaagcacttctaaaattaggttctgtacctgcaaagccaaagcattacaacttcaggtctcaactccactacatggattcaatagatagagcactgtagtacatttccaaaaccactatacggaaccaagctgctcttttatctacatggaaaccaattagttctttttcaacaactctgccccaaatttcctattggtctaaactcaactttaaaccaacgttactacttggcaattcaaaatccagagtaaagaatatataaaggcattacttcaaagtataaatccatttaccattagctcagcatgagttctactggcggcaagatcccacaaaacacaaccatgatcttcccatgccgatgacccgtcttgcattcccggcgctggacatgaactaaccgtctcccccacctcataagtggattcatcatgattatctccaatgtccatgctctctggatcaccattggaagtctcaacaaccccatttccagatatagctactacaccttgaaccacattatccgtaatcatatgatcattatgtcgttcgtcacttcccgaatcaattggaaggagtttccttatcagtgaaataagatagctaggatcaactgtagtcgaaatgtcaaacaactgcacaacacagaaaataagaaacatcactctctacacaaataaaaatcacaactttaaatctaaaaactactcttaaatagccaactaaaaacccctaattgcacaaagtaccattgacgctcaatttcctacaatgaaactacctcaacaacaacgaagagtgagcaaattaagctcaaaatttacctcatcaggcggaggaggaggatgatgtgagggaaactcgttttcactttcttctcttcttccagtaaaattttcttcttcttcttcaagtattcctcgctgtttcgtcgcttcatcgtcttccattttaatctctctggttttttaatttctcctttgcccttatttctcttcttctctcgccagaaaattcgaaacaccgctttacttgttttacaaaatagtccttgtactaaatcatgtcttgttttcacacctacataatttacttctcttataaagtaccttaatcttttcaatagacgattacacccccattttgaatgaaccacaaaaatctgccaactgttaaataagtctcggtgacaggtggcagattattcacaggtgaaaagatcgtgggtaagaaaagcctcagccacaaaattaacggtcaactaccataaa

SEQ ID NO: 67082 - DNA, 421 bp, Arabidopsis thaliana landsberg
ttgtcgatgatcggcttgggcgtgccggccggggccaccaggccatagcgcagcgccacctcgaagtttgggagcgtttccgcgaccgccggcatttccggcagcagcgaggaccgcttcaggctggtgacgccgagaccccgcagcctgccgccctgaacgttgccgatggccgccgggatcggcgcgaagctcatcggaatgtggccgccaatgagatcgttcatcgccggacccgagcccttgtagggcacgtgggttagcttgatgccggccgcgctggcgaacagcttctgcgcgagatgattggccgtgccggcgccgggcgagccgtatgtcagcgggttcggggatttcttcgcatagtcgatgaactcggcgaccgtctttgccggcaccgacggatgcacgagcagaacgc

SEQ ID NO: 67083 - DNA, 592 bp, Arabidopsis thaliana landsberg
  unsure (1)..(592): unsure at all n locations
tatgtatgagacattatcatcataaagggtactcctatatactctacatatgctaattctgaattgtaaacacaaaaccatgccttttgtgttaacatggaagtcaaaggctaagctaaaactacactgcctgcacagaccataacaagctaagacttcaaacacaaaaaaataaaaaaacataacaaaaaacaatggatcatttggtttacttagttgagaaattgaccttcctgttctgataatcatctcttctaggccatgagtttttgtagttagaatggtagccatatgagtcaactctttccttattttgcctaccccaaccatcacccgttcgttttgcgtcccagtttctttgatttccctcacaccctctacgtctttgccaatcacctgcatttgccccatattctctcaaagctgcattgtcattttgcctaccccaaccatcactggctcgtttcacatcccaatntatttgctttgtctcactcactctacatgtntgccaaccgcctgcatttaccccagattctttgaaagctacattgtcaggcacaaacccacctttccatggattacaaccctt

SEQ ID NO: 67084 - DNA, 707 bp, Arabidopsis thaliana landsberg
ggttgccttcctgatgtctcgacatataaggatgtaattgaaggtatgtgtatggctgaaaaggtagattattcttacaagttcctggatgagatgagtaataaaggttacccgcctgatatagtcacatacaattgctttcttagagtattgtgtgagaatagaaagaccgatgaagcacttaaactttatggaagaatggtagagtcgcgttgtgctcctagcgtccaaacatacaacatgctgatatctatgtttttcgaaatggatgatcctgatggagcattcaatacatggaatgaaatggataaaagagactgtgttcaggacgttgaaacatactgtgctatgatcaatgggcttttcgactgtcacagagctaaagaggcgtgttttctactggaagaggttgtgaacaaaggactcaaactgccatatcgagtgtttgactctttcttgatgcgtctatcggaagttggtaacctcaaggcaattcataaggtttctgaacatatgaaaaagttttacaaccatagtatggctaggcgttttgcactcagtgagaagagaaagagtacaaaactcagagggaagtaatgtgaactgaaaactgttggaccatatcatcatactaaaacaaagaaccattttcagcggtgcgatgattctgttgcctagagaggagctcttcgtgactatgatccctg

SEQ ID NO: 67085 - DNA, 335 bp, Arabidopsis thaliana landsberg
aaccactatcaatgcttccatatacaactcattcaatatatgcatcatgaagggacaaactaatctatccgatgttatcatatagttgtgggccaaacagataggcccggtccatgcacgttactttgatgcctccaggcgcgcggacctcactacggaacatcagagtaataataacctggaccaaaccctctgctcctaacactgaaagcctccataactcaccactcagatatatccacgcggataattacacctcacttaaagatctcaaactccaaaaaccaaacacatcgtttgcgtactgaggagagacaagggtgtgatcgtcattt

SEQ ID NO: 67086 - DNA, 321 bp, Arabidopsis thaliana landsberg
gttcatacagtggagctgccttttggtctgcgttggatcgatttgggttaaaaaggataaaattgttttttacatgctaatggctggagttgctgcttcaaggcttggcttgaggatgtttgatcttgccgtcatccaacaaatgcaggtatgtttacattgtctttagcttaatttgttacagcacacgtgttctttaaagacttattatgagaacctttgggcatgattttggtcatgtgttaagatcttggttcacaatcccacccttgaatggttgggggtgttcaaaactcacttgattcgggttttgacttgatg

SEQ ID NO: 67087 - DNA, 1239 bp, Arabidopsis thaliana landsberg
aaagaatttatcatggttgcttctgagcttcgtccggatcatggtgtcaatcgtactgttagtatacttgcggggactagcttcttcttattgatttttttatacagatatcttgagagatgcattttggaaggaaggtgcttaactagttggattgttttgctttcttggacagatcattgagaagctttctcctaccagtccatctggagcggcaaggctcaagatgttaaaggaaattgcgcaggagtacagtttgaattgggattcttctgccacggaagcagagttcatgaagagccatgaagacctactggtaccatctctgaacccagtttttcaaattttgtgggaaagttagtcggtaacaaccacattcttcggtctcctaattcagatgtgaactttgatagaagttagttatgtcacgaggtaaaaatgtggtttccctaaatggaaagagcatgacaatgaattggaaatttgagaactacttgtaggaaagtggtgcctaacatttctatatgcgtccacggattcttacgttttcttgtaggtattcaatagagcaaaaggaacgatatatatatatacccaaatgacgagttttgttcaatatagcttctgatcttctgtagatttgaatgattttgcaaatgttttgtaaaccttttatatgaaatgagtccgtttataaagttgatagtttgatttcaatgtcatatgtagggtggagctaagcaaatacatcgtcaagatggtatctctgaatctcgaccgtcccaacaaggctacggtcagtcttcggtttctagggaagttgaaagtctgcctgcagaggccacacagagattccaaaagcttcaagctcaaaacccagtgagcaaaagcatgccatcatctaagctgacttcagcttctcaagctcctcctgatactagacggaatcagactgatgtaatggagatagctcgagctgccctagctagcgctgatcgtgcaacagcagctgctcgtgctgctgcgcaactagtgaatgtctcttatggggctactacacccacagtagcagcagaagggaagcccttaaacttaatgtagttgccacgtcgtcatttgtgaataaagcaactgtatttgcttcatacacagaagaaggatacgatgtttctttggtacttcatagttggaaaatgagtagctaagagtatggtagatatgccgagtgtgtgacttagg

SEQ ID NO: 67088 - DNA, 478 bp, Arabidopsis thaliana landsberg
agatggcctggggcatggccggtttcgcttgtcgtggtcgagcggaacacgacggccacgtcgttatgggtttctttttacgctttttgcgccacgtacacatagcggcgattggcctgggattcgccggcgaaggcgtctttcagattgttctcggtcttggagcctttgaggtctgccatggcatcgttccttctctctgtgggctttgaaaacattcgacggacggtgggaccgcccatgtctgccgacaaggtgccaatcccggacccaggagtcaatactttagaactattctaaagaagaactttcgtgatgcgaaactaccggcgcttgaggcggacgatcacatccacgctcgcgaccttggcgcctgaaggcggcgcgggcacgcccgcgaccgccatggcatcggcatcgatgcccatgagcgtaccgtcatcctcgcaatagaaatgatgatgatccccgtattggt

SEQ ID NO: 67089 - DNA, 553 bp, Arabidopsis thaliana landsberg
actagatgtctctgacttacaagagacttgataggaacactcatggagcatattcaagaacttcaatccgctttacgtagacgcagaggaaatctctcttccgttcagtccgagatccgaagttacattagctttcacaagaaatccaagaccgaagcagcgagacaagttaaatcccttgcaaggagacaaacaaagaaaaaagcttgggttatcaaacaatccggtggtcttgatgaacattcttctatggtctccaatattctaaggcaatcaaacgcatcgacgatctctattttacagtcactcttgcagtttctttctacttccggtgagaacaacgagaagaaaaatggtgaaattggatgtgtagataactcgatgatccgttctttctttggaagaatcatcggtaggaagatggtgaaggagattgatgcgcaaacaatcctcgggagattagctatggttaatgtgagccttgaggcaattaaggatgagttaagttacttatctagacgacttattcaacatagagcgtctctcttgaaca

SEQ ID NO: 67090 - DNA, 636 bp, Arabidopsis thaliana landsberg
ccaagcctgtttcccatgtactgtaccgcaagcttggtcgaggatggacttaaagtgttcgcctatatgcctgagatataatacttatacatggtctactatggtttctggttatgctacaagaggacgcgttgaagaggcaattaaagtcttcaatttgtttcttagagagaaggaggaaggaagtgatagtgactatgtcttcaccgcggttctcagctcgctggctgcaaccatatacgtaggactaggcaggcaaatccattgcatcacaattaaaaatgggttgcttgggtttgtagctttgagtaatgcgcttgttacaatgtattcaaagtgtgagagcttgaatgaggcatgcaagatgtttgactcgtctggtgacagaaattcgattacatggtcagcaatggtcactggttattctcagaatggggaatcacttgaagcagtaaagcttttctctagaatgttttctgctggaatcaagcccagtgaatacacgattgttggggttcttaatgcatgcagtgacatttgctatctagaagaaaggaagcaacttcattctttcttgttaaagttggggatttgaaagacatttatttgcaactactgctttggttgacatgtatg

SEQ ID NO: 67091 - DNA, 593 bp, Arabidopsis thaliana landsberg
  unsure (1)..(593): unsure at all n locations
caaacatatcatttatggtgttacatcaagttatgacagagtatgattgaggccagaaagtattttatgggtctaatggannnnnnnnnnnnnnnnnnnnnnnnnnnnaaggcgtaagaggcccatttatgtgatttctttgaagtcgctttgtttgcaagttgcgactactcagtttcttctccggcgaagaagaggataacgaaaagaaaacacatagctatgaacggagcttcgctctgcaactccgttttgcttcattctcattctctctctcgttttcagtcatcctcttcttcttgttctgtatatctgatttcttctgcgcgtactacgtctaagtatatctcaatttctcatagaattcgacagagctttcgagaagttattgaaaaaaggagtaatgggttttgttcattcgctgtaaacaagcgtagaagtggcgattccgttattgtggagtcagacgatgatgatgaagaagatgatgaagattggggtgaatttgatgaagaagatgaaggagaagaagaagatgaagatgtaggagagctcttaccaactggtaaagatgaagaaatgggtagagaaaa

SEQ ID NO: 67092 - DNA, 188 bp, Arabidopsis thaliana landsberg
  unsure (1)..(188): unsure at all n locations
ccaccgcacagaccacccccaaccgcccgggactnnnnnnnnnnnnnnnnnnnagaaccgcatcaagggcaagggcaagagtcaccaccagatcacaccacgcagcactntgnctcgccagcagagagcccgagagaaacaagaaccttgatagccccgaaacagaactactatagaacaggcgagaa

SEQ ID NO: 67093 - DNA, 400 bp, Arabidopsis thaliana landsberg
tgaagtttcagcgcatcgcgacaggggtacaaagaaaaagaacacaaaccgcacgaaatcggaccacctttatttatgccgaaagcacaaaacgggggaaggctgtaacaaaaaggaaaacgaccacagtctatacaagacgcaaaaacgccaaacacggcaaatgcgtgcacaaacaacattgcgacagcggagccgtcatcaaacactctcagaggaccaatgacagaactgggagacaacgaaaaaccctcaaaaacacaaaaacgaccactaaggaaaacgaacgcgaagaaggcagagaacaacacgagacacagagaaaagccgccagaacacaacgagacgaggtaggaacgaaaaaacgagtcaggcatgcacgacgacgaaaaaagggaac

SEQ ID NO: 67094 - DNA, 635 bp, Arabidopsis thaliana landsberg
  unsure (1)..(635): unsure at all n locations
tttagactaatctagtggattgcctactaggctactacattaattgaccataatttatggaagttttgtttcgcaaaatggctttccccacataaagaggcccatccgccccatgtaagtgaatttatatttttgcgtaatatgaaaagacataggcccatgtaagtgaatttatttcttgggtagtatgaataagcaaaagataaatgggtcaggcccatataatgagtaacagcaaagtcatcgtctctctgaatgtcactttaccattaagagaaacaaaaaccaaagttcaaatcaaggtttaattgaaatgcgacaattcgtgcacatgcgatcaaagtcaatcagtatgttagtgttctcttgaaacgtgttggatgttgtaattgccatcgtctttaggttgcatgcattccgtaagatgtggaatgccgcttttttctctggtttttctcttcctttaaacccaatccactcaaaagctttcagactccgatacaaacttagaggaacaaaatccngttgcttccacttttctcttaaaagggtgcagcagcatcttttttggttgaacctgagaactcgcagtttagagctacgcattagtataaaagaaaaagcatcgagagcgc

SEQ ID NO: 67095 - DNA, 308 bp, Arabidopsis thaliana landsberg
  unsure (1)..(308): unsure at all n locations
agaccattgatccacacatccaacttgttctctctgcttcacacgttcccaccactcttgtgcttcacctcttaggtagcaagaggctagatccctccaaaactcaactgnnnnnnnnnnnnnnnnnnnnnnnnnnnnnnncatatttctccagttatatgctttaaccgggtctgtcccaccattgaaagtctctatatctaaatctctcatgaacctcaacatctcccaataactaggtattttcattggtactggcttgactaccgcgacttcttttggatcactaaccacaaaaatatttttga

SEQ ID NO: 67096 - DNA, 578 bp, Arabidopsis thaliana landsberg
tggttgtattacttgaatcagtacactcaaagtcctcaggttctttctcaatggccttgattccagaatgcaacggtgggcgacccatttaatctgctcaaatcttcagccagagcccaaggcacttcaatgctcacaatcttcctggcagaatataaagtagatacagccggagcatatacccttcacagatagaggccaaactcaatcattactggcaaaaaaaaacaaattaaatttaaaaaatcttattttaaaacagataatagatgcatttcaagagctaataagatagaaagtggcgtaacttttcacatcatacattacagagataatcaaaatctacaacgctgtctctgaatgaaaccactttgattcaaacaaataaaccacaagcaaagaattctataatggtcagaaaccatgctgatcatttagtaactatatagagtaacctcttccatagtagtaacatatgttgcagatttcccaaatcacatttagatggtgaatagctaagcaactattttcaacaacttgagcccccaaaaaaacgaattcctaccgatccctaaata

SEQ ID NO: 67097 - DNA, 153 bp, Arabidopsis thaliana landsberg
atttttttaagaatatattactctctcttttattatggtgtggggaataaacctaatctggagttgatgaacctcactaaactctggtcagtttttaccatcatgattaaattctgaaatcaaactggtttggtgttcataaatggcaaaaga

SEQ ID NO: 67098 - DNA, 257 bp, Arabidopsis thaliana landsberg
ttaccgcacaagtctaaaaggatcatgcacatacgtgtatgcacactctgtccttacttctccatgtgcctattgcaaaatgaggacagactatctcttggctggtatccaggagacacgcaatcaccacccacaggtaccacaattgaatagcgctactggtctatacattgaaacggatggtggcttaaccagttggggcggggtttatcatgtaatccctaaataagaaactcgagtataatctatgcgccaaa

SEQ ID NO: 67099 - DNA, 548 bp, Arabidopsis thaliana landsberg
  unsure (1)..(548): unsure at all n locations
gtcgaaggcttgcagcttcagcgtgtcggtgatggcggcgttgctgccggtgttgtagtcgcggttctctttatcggttgcggtggcgtccaggtgccgccgttctcgtacagcgcggtgcgctcgcaggccatcgtgcggtcggcgtacagcggcacctggctgacgctgccatcgggcaggtcgacggcggcgggcagggcgaagctgcggtagtcgtccatttgcgcctgccgcggcatcggtgcggcggccgcgaaggaggccttnnnnnnnnnnnnnnnnnnnnncggcgcggaggccttggcgaagcgcggttcgccggcgatcagggtgagctgcacgccacgccagtcgcggccgctgcggttggcaatgctggcgcgcgattcgaagcgcatgcggcatgcgtcgccgggctgcagcgtggccacgtaggcggcacgccagcccagccctgcggtgggatagctgagcagggcgcgggcatggtcgctgcgtgcggcattcacgcccaggtcgaggctggagccggttgggaagctggc

SEQ ID NO: 67100 - DNA, 518 bp, Arabidopsis thaliana landsberg
tgataatagttgatttcgagttttattttcgatacttccaatcaaattctccttgctccatttttatttttttactgtgagaacatatataagtatatattggaattacgtatccgagaggtttttgcatatttcgtttatttattttcgatatccacactactgtattattaaaaaatttgaaaaattcaactagggctgttcatcttctctagaattattacgatattcatgtcgatgtccacactattattaaaattttgtaaaacgagaggatatggatggatcatccaagtttcgtttatgactctttgttcatttacaaacgtttagttttccacttaagttttgaaaagagttaattcccaatatattcggcacagtttttcaagtgtattcatctgtttttttttttttttggctggctatatggtccaaattttgatttgcaatatgagattgcacacagagaacaatctttcattatgattaattattgtgcaagtgacagactccaa

SEQ ID NO: 67101 - DNA, 250 bp, Arabidopsis thaliana landsberg
cgagctgcggcattgacggataaggagactatgaaccttggaaagccgaagcacaacccaagaggtggggtggaaggaaaccaacaagacatagaggatgaggaacgaaaagtgggtcgacaggaacataaagaaagttatggcgagaaaaatgatgggaaagaaacacttgaaactgatagatgacgatatgaaatgcttgacgaaaatgagggagggaaagtaggatgaggcagtagaaagataccag

SEQ ID NO: 67102 - DNA, 472 bp, Arabidopsis thaliana landsberg
acgctggaacggaccaccgtgcaacgcctagtcggccgccggctagccgcgctgtccgcaatttcagccttggcgagctcatcagcatcggggtcggcgcggtcgtccaccctagctgaccacaattcgatccagcacgccctccacggaaccgacggccagctggacgacttgctcgccgtcgccctgccgtggctgggctcacaggtgctcatcgaagacacccaccagcggccggtggcctggcacccccataagccgcgaccaccgaccctgaccgtgctgatcaccggcggtcggctggcccggctggcggcgcggctggcccccggcgagcccgagatcgtccggctcggcaccccctaggtcgggacccggctggacatgcggatcggggtggccaagccgttgggctacgtatcagtggacggcttcgactgcagacgaaccaaggtcgcgatggccaagaact

SEQ ID NO: 67103 - DNA, 579 bp, Arabidopsis thaliana landsberg
gtttggtgatccaattaccaaaaagaaatatactgtataaaaaattgttgattgatactattttaatttataattaagactaaacctttttgcatatatccaaatctgaatatcggaaacaaatagcatagtttaactgtttatttgtttaataatgtgtaatgtaccaaagctgagataggctgcctcccaaggcaaggtagcaatacaatcgtgttcatgtcccaagcatcatctatactcgttgctccactaacaacccactttatattaataatcaaattgaatcaatatcaaattatcaaaaaaataatcaatccaattattttcgcacaatctatcaaacaaataaaatattcaccccataaaattttacattgctgtttggatattgaaaataaaaaatcgtcccacgtgagatatcccacaaaggtcccaacatcaccacagaaagtctctgatcattacaatatccttaagattagatttatatagacattttcttataatatctttctgggcaaatgctctgtattctactgacacatttgtatcgtgttcttctttttatatttatac

SEQ ID NO: 67104 - DNA, 549 bp, Arabidopsis thaliana landsberg
  unsure (1)..(549): unsure at all n locations
ccaccagctggttgctcaccatttgggcgtccatcattagctttatgctcttggtggaaagtgtccgggggttgggcagcatgtccatgtgtttgaccctgaactccacatcggccccttcaaaacgtttttcaaaccgccctttgatcagcacataaatgttctcgttcatcaggtgcttgaacttcaaatattcttcgccaaacacggtaaacctggccgacccgttgaaatcttccacctcgaactggccgaaaccattcccgtttttcgagatcctgtgctctgcctnnnnnnnnnnnnnnnnnnnnnataattccttgccgggcgatttcaattgctcattgttcacatcgctgatattgtaccgcacaaaatatttgatgtcgcgctcaaactggttcaaaggatgacccgaaataaagagtcccaccacctgtttttcgaggttgagcttttgcagcaatggccattcttcggttttgggcacatcgggttctttgagctctacggccgtatcatcgccaaacaaactggcctgtaaactat

SEQ ID NO: 67105 - DNA, 498 bp, Arabidopsis thaliana landsberg
tctcgtgggccatgtgcctccagtggcgctctgcggttcgcgttcagaacgcagtgcatgccctgcggggggaggtgcagcgcaaacgaacgaccggtgccttccgaggcgccggcgatgacggcccagggaccgtagcgttctgcgaatgtcatgggcaattcgaccccgatgtttgcggacagtgtcagccgatcacgtagccgccgtcgaccggcagcgcgacgccggtgatgtacgaggcctcgtcgctggcgagaaacaaggccgcgttcgccaactcgctggccagtccccagcgatccatcggcacgccgaacggcggtttggcatcgggcggcggcagcggatgttcgaccgaggccttgaccaggccggtccaggtcatgcccgggcagatcgaattgatgcggatgttctgctgcgcgtaatcgagcgccgcggtcttggtcaattgcaccacgccggccttggcggcgccgtaaatgctgtgatgct

SEQ ID NO: 67106 - DNA, 524 bp, Arabidopsis thaliana landsberg
tggcaagggatcttcagttgaagactgctgaattttgttttgcaataattgtcttgtgtactttattatcttgcaacaatgtcgctttccaattatgtttcttgtctattaagcacttggcttgtttctagattcctcccggcctcaaatattgtgtctttaccgtttatgttattcactctttttttttgcatcgtgaaaaatcattatttaacgaactatacttttaattttctggttacttcctgtcgcgagccgattaatctcctttttttttcgattcatctttgaggtcttctgctatactaggtcgagaacatgaaatccacctttaggcctttctctatatcatatctctctacctatgtgatctaagagccggaacattgtgtaactgtggaaaacatcttgctaaattacacatggtcttataagttgtagacaagtgctgaacgatctacatttattatgaccggaataaatccatctttatcgttgattaggaaggcaaactttcattttaa

SEQ ID NO: 67107 - DNA, 527 bp, Arabidopsis thaliana landsberg
tatttcttttatgacttttgagctacatatatcatctatttattcattcattcccagcattattgctaactactatgtattcttgtagacgatatactaattttattgacctcattaatttgattaaaatcttgccagacaataaccaaagataaacatgcatagtcaacaaagagaaatacgatcatgaaaaagatactaacgcctgtaaaaaatctttaaaatcaaaacaaaatcaatgagtattttatttggtgaatctacagacacgtttagtagcaaacaactatttgattttttcagaatatattatttttcttcaattctttcctcttccagatatgaaatcatgcaagaagaatattgtacaactacaaactataaattgaaaaaagagttccaaaattaataatctagagtctggaaggctagaacaaaaataaagttcgggtgaaaaggatttaaatatgaatccatcattcaaaatgacgatttcagaaaatttaagtttcatcttaaaacaccta

SEQ ID NO: 67108 - DNA, 446 bp, Arabidopsis thaliana landsberg
ctttttcaagactaaatatttattcttaccatgttcctaggtcgacaagatggaagaagttgcacagggcagagtgtggaccggtaaggatgctcattctcgtggtctaatagatgctgtcggtgggctgtcccgagctatagccattgctaagcagaaagctaatattcctcttaataagaaggttggcctctcaactctcttttacttcagtgaactcatctttgtaacaaatctttaaaacttgagaaggcattaagtagatgatatatgatttttggcttttgcttgtggtaaatacaggtaactcttgttgagctttcaagaccttctacatcactaccagatatcttaagcggtataggaagctcggtgattggagttgacagaacattaaaaggactgctcgacgaattaacaatcaccgagggagttcaagctcgtat

SEQ ID NO: 67109 - DNA, 465 bp, Arabidopsis thaliana landsberg
aaaaccaaagcagaaaggatgaggggggggaaagatacagtacgtggcgtcataactttggcgacagctaatgtgaaaacagccaaaagctacggagagcgacactcctcgacgacgtccatgtctctttagattgggattgcattgttaattatcatatttatcaattgattagttaagtcttaagtctcatcacacaagtttatacattaatctatacagtgtttaacactacaaaactccccaaaatcacgtgtttcatatcatacgtacatttgtctaccggctttattaacagtattaaaacagaatttgatcattatctagttgaatagactatgtactattatagagactcttataaattatgaaactcctaatcaattaagaatagtgaatttgaaacatatcactcgaaactagggtattaggtgggatgacgatctttttcttattaatatcacg

SEQ ID NO: 67110 - DNA, 778 bp, Arabidopsis thaliana landsberg
ttgcatgactttattcagtttcgaccgagcactctattacacatacgtacttaaatattatacatgatcatgcatgcatcacattatttaaatcacaacaactcacataaattcatcacatgcaataacccgtaacacaactggtcctttgaaaactgtttcttaaacttttaatccaaagcaagcatcaagagcttcgccgatcgtcaagtaaactttgccaccgattctgtcgacgaactttgcttgattcagcttgtggattacttgccatttcgggttaacgatcactagctgcaaaaaatatattcaaaatgatatatatctctgttgccataattcttaagttttaataaatgagaaagggcgattaaaatataacgtagatgaatgtaacttaattacctcaacaccagttttgattaatttgttatgcagttccagcaaagcagtaatccccgatgtatcgacgttgatcaaatctgtcaataaatacgagaaaggttaaacacaagaaaagtattacagatatatatatatataatttcaaatctttattgttccttattgtggctatattttcgaaaatcaaccccaaaaaaaaaaactctatataatgagttattttcatattaccgattattgttaaaaatgatgtggtacactatatactttaaaaacaattccattattgcatatggttccacttacttgacatatcaaggactacaaagaggatctttctgttggcattgctctttggggtttcttcttcttc

SEQ ID NO: 67111 - DNA, 398 bp, Arabidopsis thaliana landsberg
tggggctgagatcatcaaaaccgatctatttgatatctatctgttatatgatcttagctgtttgaagatgtcttataatgggactgctcaggctggcttagctgcagcctaacctgtgcatgggattcataaactgcatctactagctcatgatgtcccaatccatttgtgttcgacgttccataagcctgtatgcaagaccattaccacaacacacttttgtaactacgtacgatctcaataattaattattgagatttgtctagtttcaactaggagattaatttgatttaaaggatttgttagctgcaacttgaagtaatgaagtttgtgtttctattttaccttcttgtataagtcgacattttcttgatgaatcctttggtacttttctcgac

SEQ ID NO: 67112 - DNA, 374 bp, Arabidopsis thaliana landsberg
acatggatttttttaacaagtaaattaaaataggatagtttgatttcgttacaagttcagcatggacctatcaagctccacgctctatgatggacgtatgcttattcgaatgaccatccgaaacagaaattttcacgaattgaccacctttattcgttacgggattcacccatatacgtgaatggtaatgactggtttaaattgtaatgtctattccagttttcagtatgtacattttgcttcttgtcattcttagtatattttctttgtgaaagaacaaaatgcactaatcaactattcattttgtagttaagaatttttgctgactctataaattacttttaggtctctttttacttttctgatgtggggat

SEQ ID NO: 67113 - DNA, 1545 bp, Arabidopsis thaliana landsberg
tgttatgtaatccaaccaaaagctataaaaaatagaatcttaccgatgaagccaatgaaccacgcagcgggaatcacttaaaattaactcggtctaacttcctaaccaaacttttaaacagaccgacccaaaccggaccaagattctagtgtccacgcctcaacatcatcttctccgatcaactatgatgctcaccccaccaaactttactttctattcagacaagacatctcgatagcttatttctatggtctgatcacacgatagtgtattctgatatcatcactctaccaaagagataccaaattatggaaggaggatctatcactcccggtgaagataaaccggagatccaatctccaattccaccaaatcagatcttcatactctctggacaaagcaatatggcaggacgcggcggcgtcttcaaagaccaccacaacaatcgctgggtgtgggataaaatcctcccaccggaatgcgcaccaaactcatcgatcctccgcctgtccgcagatctccggtgggaagaagcacacgagccactacacgttgacattgacacaggtaaagtgtgtggagtaggtccaggaatggcgttcgctaacgcggtgaagaatcgcctggaaacagattcggctgtgatcgggttggtgccgtgcgcttccggtggaacggcgataaaagagtgggagcgtggaagccacttgtacgagaggatggtcaagagaacggaggagagtaggaaatgcggcggagagatcaaggcggtgttgtggtatcaaggagagagtgacgtgttggacatccatgacgccgagagctacgggaacaatatggatcgtttgattaagaacctccgtcatgatctcaaccttccttctcttcccattattcaggtctctctatcctttgtgcgattttagcttccaatgtcacatctacataggttgtgacgttgtgttattggtgaaagagttaagttgcagattatgtaattttaggcttttacaatgtacatatcagttgttgcaagtgattttgtcttttagaaatcggtaggtcagatttccattggttaatcttgatggttttgattgaagcaggtggcaatagcatcgggaggaggatacatagataaggtgagagaagcacagttgggactgaaactgtcgaatgtggtctgtgtagatgctaagggattgccgctaaagtccgacaatcttcacttaaccaccgaggctcaagtccagcttggtctctccttagctcaagcttacctttccaacttctgctagacaatcaagtaagttcgtgataaggttcatgaatctttctgaatgtgtgtggtggactagttatatggatatcacaaaactttgtaataatggattggtaaaacattgatgttcatagtgaagaacaattagtttgctctagatactggtggattctgaaatcgatctaaaatattattagcagctctgttttagtccttcgttcattataacctctaggatcaattgaagctacgaataatgatat

SEQ ID NO: 67114 - DNA, 593 bp, Arabidopsis thaliana landsberg
gatcaaggagacgtcttatttatgatatccttcgttcttttttgcaagcacggcgttagggccaacggtaagggtgccatctatcatccgcgtcagatgcacacccaggaacggcatcgacggatcaggtatcgggtagatcaggtgattgacgatcctgttgtgttccggcggcaataaatagtactcaccgcggaaaggacatattgtgaaaccaggctcgactccaagcatgcgcaccacgcggtccgccatcaaccccgagcatgagatcagatatttagcggtgtaagtgtcgcgatttgtttgaattacaaccgattcaggcagctcggcaagcccaaccacttcggtctcgtattcaatggtgccccctttcttttgaaactctttagccatctgtgcagttacttgcgcatagctgacgataccgctcgacgggacgaatatgccaccaagccctacaatattcggctctcgttcgcggagttctccagcagatagccaatggcgctcaagtccgtttgctgcagtacgctcccatagcgctcgcatgcgctccatttgcagttcattcgtagcaactagtagct

SEQ ID NO: 67115 - DNA, 136 bp, Arabidopsis thaliana landsberg
  unsure (1)..(136): unsure at all n locations
cctaaacttcccaatggaanatcattttactaccgcaagnacaagcaataccgatgccgtgcttcagcgagccattgattccatcaaccggctggatctgaaaaacctgataccactggtttacaacgaccacatt

SEQ ID NO: 67116 - DNA, 564 bp, Arabidopsis thaliana landsberg
cgccaaaagctataatatagagaaggtcccaagaaagtatcctgctttaaccgtatattctctgtaaaaagtttttagctgtgacgatgagctttttgagtttttaatttatatttttcactttattgtgcttagacagacatgaattacagatcctcctattttatttatatttcaagtaccaactataggtccatgtcaccaaaaaaggttttgtagaacacaaatgtttcagctttttatgcagaaccaacaactttaatatgactaacatttgcacacctatggagcgttatattaacattaagtgagtaagctactgaaaacttgttgaagttcttgatggaaaatgcactcagcacattggataatcaaaatacttagatccaaaacatacaaatgcgttaaaacaaaagtataacttgatatgctcatatacgaaggaccattttatccaaaattctcgaatgtgaatatttcagaatcgattgcatgtgatgaagacaaattttcatattttgcattggaagtatctgtttaagcaactaaatggtataatggagt

SEQ ID NO: 67117 - DNA, 801 bp, Arabidopsis thaliana landsberg
atgcaactttataataaaattaccaacgatgtcagctatggtacggccattagtaaaccggccggttggatttccacgagatggtttgaaatcgatgccattaggaggactgttggctctagacaacgtttgtaagtagttgttatttcctgcgtctactagcgaatcgccgaagacgaatgaagcggctaaggcgctttggtctcctgcgctagctactctagaaaatcttgatccaaagaagaataataccaaaactgggacaaagaaaatagatttcttcattgtcacgaaatggtttctgaaaattgatttttggtttttattgttctttgacaaagaagagtttatatagataactctgctgctagcctgctactagttaagaacgtatgagaagcaacctcatgtgttagatttgaaaccgggttgtttaacaaacaaaatcttttttatggtcaacatgtttcgattttatttcttctttttaaaatttattagaagacagataaagttaggacaccaatactgttgtgttgtgctttatggtttagaaagtttgaaaataaaatacccttgtttcatggtatctactcttaactctattacatcatgtcatcatccttcaaaattattttatatcatgaatcgatttattttatttttctcattaggaaaatactaaccgggtaaaaagaagtatataatacagtcgtaacgccgacaaattatctcaaaacttataagattatttaactagatatcaatttatctcgtactactaccaactaataataagtt

SEQ ID NO: 67118 - DNA, 516 bp, Arabidopsis thaliana landsberg
cttcccacgtgcgaatgaattagtcaacaaaattctttcgtactatatcagatccaagaaaaggaagaagtatctttcctttcactttttgtccaaatacacatatcaaaagcttcccacgtgcgtatgaaatagtcaacaaaattcacacgtacgaaatcagatacaacaaaaagaagtaaaggtggaactgaaacaaatgtaaacaaacccaacttttttgttttgttttgttttttggtctttcaattagaaagaaaccgaaaacaaaacccaatcttcaagaattttacaatttacaaaatccacgtttgatccaaaaaaaacaaaaacaaagagtgaactatcattaataacttccaccaatcctaaacccaaaaacaaaacaaatgaaagatgaatcaaatgcttctcccatctaacagtatgctacctttgaaggctctctttgcccctgttattatcgactcaaaagaatcgatggatcgaaacataaatgaacctctactactccat

SEQ ID NO: 67119 - DNA, 704 bp, Arabidopsis thaliana landsberg
gtggttttagtacatgcatgagttgttgtcatttgtctaccaaaattttagttgttggaaataggataatatcaaatatgaatatcgaatgaactttttttagtataaatgggaaaaatacaaatgcaaaatatctcattactaataaacaaatgaattgttgtaagaaaaagggaaaaataaaatagacaataatctctttaccaatacaaaattggatcgttacaataattttgttttcgctaatccataattatgtacttgcaaaataccaacaaaaaattcgcttatgaaaattatatttttagtggacatatctaagataatcagaaaaataatcaatttcttcaaacacaaatactgtacatctaaatgggaaacatacaaataaaaaatatctaatcagccaatcaccaataaagaagtgactcgttgtcaaaaattagggaacaaaaatatctcattaccaataaataaatggatctttgtaagaaagttaaaaaaaaaaaaaaaagacaaatgaatccaatgttccactaaatcactaattttttttttgtcgaaaaaaataaaaaaaattgtatattatttacttgcaaattgccaaaaagaaaagaaaacttgggattatgaatatcaaattgtatattgggcctatttaagataacaagcccaggcccatctaaatgatatgaaaatgaaat

SEQ ID NO: 67120 - DNA, 465 bp, Arabidopsis thaliana landsberg
atttattacatttcttatcttttcaaatttataactataaagtctatgagatggaaaaaaaaactttattttctatgatatattgcatcaatcataaataaatttgaacattccatctgaaatagagtacatagagaagtgcaaaattaatagcagaatcaacataatgggatctctcaatttctacaaacagaaacgaagacagtgcaatattaacctattacaataaataaatggtccatccaaagctgaagttaagtaaattccctcttgcttttcttttctttttttcgtttttttttttttactttcctttacttttgggctggacccagacactgtggtcccttataaagttgccccgtattgggcctggacttaacccggcgatcaaagaggtaacacgaattaatttttttagcaatgatcgcatttattaatataaaccatataactagcgacata

SEQ ID NO: 67121 - DNA, 505 bp, Arabidopsis thaliana landsberg
atggaaagaacttgtattgatcaatgaggatgaaagtgagtatgatactgagatgtcaggagatgatgaagtagctaaacctttggtctcaaagagagaagtcgaccaccaagtgaaatcgctcctgaacgattttgaggtaaacagttcacttgtcatggccatttgtgcagacttcaaaaggcctcaaatgactctcattttccatgctggtacagggagatgctgatcaaaagaattgggttaatttccagcaacgcgtagacaaagcccctgaacaagttctgaggtgtgattcaaacgcttatgattttctgcatacttttgatcttgattctcccataacatcgatttgtgaaatacgtattgatacagatattcccggagctctggtgcttaacccctttggcccatagcaagcggacgaggctctaaatctgagcttcccagttgcaaatcttgtggtgggcctcgttgttctgaaatttcccggaaatcctttctt

SEQ ID NO: 67122 - DNA, 104 bp, Arabidopsis thaliana landsberg
agtgtaactcttttttactgcaatacgcttttgcacgttcatattttagtatttagaggtttacacttgtaaacgaggctaggtctttcttttgcagaacagtc

SEQ ID NO: 67123 - DNA, 562 bp, Arabidopsis thaliana landsberg
gggaaggaaagatctaactggtgtgagagttattcagagaaacttggtttacgttatgagcttgccttttgacctggcagatgaagatgtaacttaaacagccttaacttatctccttggcactcacatttgctttgaaaagagataacctttttcatatcattaatctgggttgttatgtatgcagatgtttcagcgaagagaatactttggtcaatatgggaaagtcgtcaaagtagcaatgtctcggactgcagctggggctgtccaacaatttccaaacaatacttgcagtgtgtatgtatccgtatttctttacacattcgaatgattgtatctagttcttgatgaactaatatttgtgattccatatagctaagcacaaccccatttctttctgcggtctatttgacatgtttgcttttaacaaacttcattgagctaacattttcgtttttgtctaaaattgaatttcccagatatattacttactccaaagaggaggaagcgattcgatgtatccgatcagtacatggatttatattggatggtagaaattcga

SEQ ID NO: 67124 - DNA, 501 bp, Arabidopsis thaliana landsberg
  unsure (1)..(501): unsure at all n locations
aanccatggggggnggggacctttaatataggaatgggatcacatacactaggagtccaatgggttccagcacgtagtgatccaagcatctcctcttccttcaacagccggttaaatatagactggaaaaatgaattctcaacagcaactccactggctccattcgtttcttgaaccaactgttgcaatggtgcccacaatgccgacaaattggaaggaacaaatatacccctggaagcacctcgaaccatagcggtcacacgttctacataagcaggtgtatataactggccaccttctagcctagctctcacctaaaaaagattgaaaaaaaaatccataaatataaagttcacattcacttaaacacaatctggaaagctcaagaggagaagcacaattaccaaagttccaagcccaggctctaaaacccattgccccaactcaaaacccaacctgtacctgaccaccaggttcagccacagcaatttggctacacct

SEQ ID NO: 67125 - DNA, 683 bp, Arabidopsis thaliana landsberg
gagtaaagatcaatacggcggcggatgccgcgactgctgcaaaacgcagctggaatgtgtcgcgtcccgccattttattgatatttatttatgtatttgaattgagaagaaattatcaccaggtcatttttcaatgcaggagttaatcacgttatatatagacaagtttttttggttttgaaattgttggtggtgcgcgttttgcgttttctcgttttattttaatgtaatgcaatctgaggtttatcttgttttaaggagattatcttcttttatcttttttaagcataggacaatacttctttgatacataagtatactccaaaaacaaactttatcataaactgtaattatattctgctagatcactactagtatattattaatgtagattaagaaaacaagaaagctaattaagaaatgtgtccataatttttcgtttaaaaaacaattgtcataagttcatcataaccatgaatcaggaaacaacaattactcaagagttcaatataagaaatgctcagcgaccagaaagagaaacagaaatcaaatggctgaaaataagattagcagcaaaaaattatttcattctatatgaacaagatgctcgttcatgtgccggaacttgcagatatcatcgcagaaatcatctgcactgctgtgattgctcttcatccggagaa

SEQ ID NO: 67126 - DNA, 592 bp, Arabidopsis thaliana landsberg
aacagttaaacaaatgattacttaaaccttgtttttataatcattaaatttgtgaactttctttataaataatttttctgcagtatatataactatgaagaatgtgacgcaccaatccatatctcttttctaagctcatcataatcatctgcttctcaagctcattattctcttcttaaaacaaaaacaaaaaatatctcttttaattttcttcatcatcttcttccatcgtataatcatcagctcctaaaccctaattggtttcaggtcagtaatgataacctagcactacgtacttattatctcttcttagtttgattttatttcttcatgagctttttaattgcagtttttttttttttggattgaattcaattcgattattttgagattggtttgttttcattttatatagaacagctctattattattcccaccaaacttgacatcaattcttactgggaaaaccacaaaagtccataagaatgtaaaagaatctttattgatgaaaagacaagattgacttgcgttttaagggaaagaacctgaacccccccattggttttccaaggaccatatctatatgttatg

SEQ ID NO: 67127 - DNA, 1327 bp, Arabidopsis thaliana landsberg
ttgttgctgaacagatcttgtgatgaacggtgacgaagaatcatctatccacgtcttcaactttatttgttagcattccacgtggctttgcatgtcgggaattatttagcttacttccttaaaggattatgtttctcgattgggcttttctcgttgggcctatggttataagtttgttggttttagtttcatatgtatcaagacctgtaatattgagtttttacaacacaagttataaataaaatacaaacactttatgagaaaaaaaaagactattaaagtgtagattatggactaaatcttttaaaaaaaagatagtaggttcttcaaagtgtatcctactaaattacaagggtttgaacgcaaatatttctttgaaaatctcataatccagaaagaaccaacgagagaatgccacatcatccatccgtaatcgtatcctcacaaacaaaatcttcttctgcttcttctcctgcttgccagaatccaaaaccaaaccttcagatcataaatccaaaaccactcatttttctattactgaaatttttcttagagaagaagaagaagaggcaaaatggccacaagcgcatcagctttgctctcaccaaccacattctccactgcaatctcccacaaaaaccctaactccatctcattccatggccttcgtcccctccgtctaggtggctcctcctccgccctacccaaactatcaaccaccgggagaaaatcctcctccactgtcgtgagagctgagctaagcccttccatcgtcataagtctcagcacaggtctctccctcttcctcggccgtttcgtcttcttcaacttccagagagagaacgtagcaaaacagggcttaccggagcagaacggaaaaacccatttcgaagctggagatgatcgtgctaaggagtacgtcagtctcttgaaatcgaacgatccaattggattcaacattgttgatgttcttgcttggggttctattggacacatcgttgcttactacatcttggctacttccagcaatggatacgacccaagcttctttggatgattcgtttcaatgtcaatctctcgtatatgtatatgtatatgtttgacttgtgttgcaagctatctaatctgttctctatctctgtttcttcttctgttgttgttgttgttgtctaagacttgtccctctttttgcaaatgttttatttctccatttacaaatattggtatgcagagttttataagaagaacataatagtatatacactatggaaacagagagatgaaatcacatttttacttgcgctcaagattcgatttagtttgactt

SEQ ID NO: 67128 - DNA, 243 bp, Arabidopsis thaliana landsberg
gttacacttgcgcatccggacctgccgtccgatgcctacccggacgaggcgactgcctcaccatctgttggacttcacatgccccttgcgccgctcacggactagcgacttgcatcggtcattgcccagcgaaagcctggagcactacatctaatgccgtcttgccaacgtgcggttccgcttgtcgtgactatgcacagggcctgacgtgcctcgcgctccgggcaaatcctcaccaatgca

SEQ ID NO: 67129 - DNA, 384 bp, Arabidopsis thaliana landsberg
gcgctcatgaagcggcagccccacagcatgggatcactgcctatcgacaacctgtgcttttactttacaacgcatgtatcctactcaatgcgaccctccactactggacacaccctttcttccctggaagcagggctattcagacctaacccaactacctattgaagaacgcccacaatatatgaactactctacgcgccagtgaaagtggccgttacaacctcaccatggcagcatgcagcctgctctgtttgcggacatatatcacttgtgacgaaaaggccaagaagacatatactcacacatacttgttgtagaacatatacttaaactctaacatgtgcattctctatggcacgatacatgatcatggacaatacactc

SEQ ID NO: 67130 - DNA, 719 bp, Arabidopsis thaliana landsberg
aattggcaggtcgccaatgggcgccgtcccagcacgcctacagccatcgaaaacgaagatggtgtatttcttttatccaaattgacaacctaactgatatcagtacaccggaatcggtgatggccagccgccaggttatcgaaaccgtcaatgcggctatcgacgcactaccggaagatttaagaaccgctatcgtcctgcgtgaaatcgagggccttagctatgacgagatcgcacaaagcatggactgtcccatcgggacggtgcgatcccgaatttttctagcccgcgaagcaattgctgcacagctacgcccaattatggatattgacgccgaccgtcgctggttaggagcaaacaaatgaacattactgcgcaatcaaaggatgcaggacaatctgcttcgtgggaagcgtcggtttccgcctgggtcgacggcgaggaagccgtacgtgccgaagagcttgattcgccctatggtcgtcacgtttgggacacttatcacttgatcggtgacgtgttgcgcaatgacgaactggccatcaagccgtccgatcggttctatgccagggtgtccaatgccattgacgacgagccggctatcgtggcccctcatgcacgacgccatgcgccggtgcgcctgtggttgtccggggttggccgttgccgcatccgtggcatctgtggtgtggtttgcgctccctatttttccacgttgg

SEQ ID NO: 67131 - DNA, 409 bp, Arabidopsis thaliana landsberg
cggtgctggccaccagaaggttcctgcagagggtcctgccggtcttaagcgtggcgtctgtatcacttatgcatgcatcgactgggagcacaccgtcacagttctggaagaccttgcttcttccgtccgcgccagaagaaaggtcaactctggtgtgccgagcgaggaggctaaggtgagcactttggaggaggattaaatcaactggtgtcgtatggattagtccaaactggaaatcggaggaaaaaggaaaaaaaagaaagaaaagataggggtggggttgttgatatcgtggtataacaacccccagagcctatgctggcggttggcttgatccttggcccgatcaaggactaatggattgcgttcaaggggaatgcacaaaattggctgctccaatgaaccatca

SEQ ID NO: 67132 - DNA, 561 bp, Arabidopsis thaliana landsberg
gtaggttagtctccgtgtgattgtcgtttttgatgtgtcttcactgatcagtacacgcaaaaggcaaaactttcctccgtccaaagcggatctctatattacgtttctgtagaaacttaaggtctctctcacacatgtggtgaaaagtgatagttgaagcaatgtttgaaaattaatatctaaagcttctaattgacaaataaaaagtgtcaaaaaggaaaaaataaatttcaagggttgaattttttttatatatatatatatatatatatatatatatcatgcctttgctttagtttgatttatttgacttcttggtatagtttttggtttattccattcacgaaaattaatttgaagagaaatcttttgacttttgctttgaatgtttagatgaatgaaatctagaaaccaaacaacaacttgaaatttaatttggtttaatatagattggtttagttggattccatttccccccctcgcctatttttgtttaggttatatgtggctaaaaaaaaaaatatttgcatccatttgtatttttgggttgatatgtttgat

SEQ ID NO: 67133 - DNA, 2429 bp, Arabidopsis thaliana landsberg
actgcagcatgagcaggaagagcggaaaaaggaagtagaaaaggcaaaagaggaacacttgtcattgatcaaccagttgaattctgcaaaggatttggtgacagaattaggccgggagctaagtagcgagaagaaattttgtgagaatcttagagttcaaatcgaaagtctgcaaaacagtctgtcaaaagctggtgaagacaaagaggcactagaaaccaagctcagagaaaagcttgatttggttgaggggctacaagatcggatcaacttgcttagtttggagctgaaagatagtgaagaaaaagctcaacgttttaatgcatcgttggcaaaaaaggaagcagaattgaaggaactcaactctatttacactcaaactagccgagatcttgctgaagcgaagttagagatcaaacagcagaaggaagaacttacaagaactcagagtgaattagactcgaagaattctgcgattgaggagttaaacacaagaataacaacttcagtggctgagaaagagagttatatccagaagcttgatagtgtttcaaaagattatagtgctttgaaattgacttctgaaacgcaagcagctgcagatgcagagctcatcagcaggaaagagcaggagattcagcagctaaatgaaaatctggatcgtgcgttagatgatgtaaataaaagtaaagacaaagttgctgacttaactgagaagtacgaagactcgaagagaatgctggatatagaactgactacagtaaacaatttgagacatgaacttgaaggaacaaagaaaacactgcaggcatctagagatcgggtctctgacctggaaacgatgcttgaagagtcaagagctttgtgttcaaagttagaatcagagcttgctatagttcacgcagaatggaaggaagctaaggaaagatatgaaaagaacctcgatgctgaaaaacaaaagaatgagattttggctagcgaacttgcagtggagaaagatattctgaggagagttaaagacgagcttgagggagtaactcatgaactcaaagagtcttctgtcaagaaccagagcctccagaaggaacttgtggagatttacaagaaagtggaaaccactaacaagaaattggaagaggagaaaaagacagttttgtcgttgaacaaagaggtgaaaggaatggaaaagcagatcttgatggaaagggaggcgagaaaatcccttgaaactgatctcgaagaagcagtaaagtctttagatgagatgaacaagaacacatcaatactgtcacgagagcttgagaaggtgaatactcatgcttccagcttggaggacgagaaagaagtacttcaaagatcactaggagaggcaaagaatgcatcaaaagaagctaaggaaaatgtggaagatgcacatatcctcgtgatgagcctaggaaaagaaagggaagtgctagagaagaaagtgaagaagctcgaggaggacttgggctctgcaaagggtgagatactgcgcatgaggagccaaccggattctgttaaagctgtgaatagtacagacaacaaagagaagagcgacaacacggttactgtgaagaaagttgtcaggaggagaaagagcagtaccagttcttgaagagagaaggttataatgaccagagcttgcttctctaatcatataacgcagattatttgtagccaatattaaaccttgtgtaaattttgacaagaggcaaaatggttctagagtttcatcattgagataatcccaacagtgatgatagaaagtataaattgagaagataaatgctttgcataggctatttatatccaaattatgtatacataccgaattgttaaaatatgaaattacatttattctacaattaaaacagaaactccctcaaggagttttcagctagcaccaaaaatgtttcacaagaggctgctccatcttcagaaacagtctctctattagataagagactgctttgtttcaaggctggccattagctttccatgttgatgagagatcagccacagcttcaccaactgttagataaagtccactcagacccaatgcctcaatgattttggacttgtgtagcttttccatcacagtccccacaggattcaccagcacaagctatttgaacaagagagtttgacaaaagttagttggtttttctttttgataggtatattgatctttgttttcagtaaaaattataacctgaagagattgcttctcgagtctcctcctaagttcaaacaccgcttcaagcccgcttgtgtctatcgcagacacagctgattccacagaaagaaagtatgagcaaagggacggattgaaaactctagaaaatagcttagacctcacagagacaaagttacctgtcatgtcaagaattatgcatttcaaggtagta

SEQ ID NO: 67134 - DNA, 1869 bp, Arabidopsis thaliana landsberg
gagaaatcgggaatctgaaagtatttgaatatcttgtaccttcactctaatggtttcacagggagaatcccgagagagatgtcgaatctcactctcctccaggggctaaggatgtattcaaatgatcttgaaggtccaattcctgaagaaatgtttgatatgaagctactctcagttcttgatctttccaacaacaaattctcaggtcaaattcctgccttgttctccaagcttgaatcgcttacctacttgagtcttcaaggaaacaaattcaacgggtctatccctgcaagccttaagtcgctttcgcttctcaacacattcgatatctccgacaatcttctcactggaaccatccctggagagctgttagcttctttgaaaaacatgcagctttacctcaacttctcaaacaacttgttgactggaaccatcccaaaggagcttggaaagcttgaaatggttcaagaaatcgacctttcaaacaatctcttttctgggtctattccaagatctttacaggcctgcaaaaatgtgttcacactggatttttcgcagaacaatctctcgggtcatataccagatgaagtcttccaaggcatggatatgatcataagcttgaacctttcaaggaacagtttctctggagaaatccctcagagcttcgggaacatgacgcatttggtctccttggatctctctagtaacaatctcactggtgaaattccagagagtctcgccaatctttcgactctgaaacatctcaaactagcttcaaacaacctcaaaggccatgttcctgaatccggggtgttcaaaaacatcaacgcctctgatctaatgggaaacacagatctctgtggtagcaagaagcctctcaagccatgtacgatcaagcagaagtcgagccacttctcgaagagaaccagagtcatcctgattattcttggatcagccgcggctcttcttcttgtcctgcttcttgttctgattctaacctgttgcaagaaaaaagaaaaaaagattgaaaattcatcagagtcctcattaccggatttggattcagctctgaaactgaagagatttgaaccaaaagagttggagcaagcaacagattcattcaacagtgccaacatcattggctcaagcagcttaagcacagtgtacaaaggtcagctagaagatgggacagtgattgcagtaaaagtattgaatctaaaggaattctctgcagaatcagacaagtggttctacacagaagctaaaacattgagccaactaaaacatcgaaacctggtgaagatcttagggtttgcgtgggaaagcggcaaaacgaaagcttagtgcttccatttatggagaatggaaacttggaggacaccattcacggctctgcagcaccgattgggtcgcttttagaaagaatcgatctttgtgttcatatcgcaagcggaatcgattttcttcattctggatatggttttcccatcgttcattgtgatctgaagccagctaatatactccttgacagtgaccgcgttgctcacgtaagcgattttggaactgctcggattctaggtttccgcgaagatggaagcaccacagcttcaacatcagccttcgagggtacaattggatacttagctccaggtaaattactcacaacacttaattttcaaaaccctaattatgccatcgacttacttgaaatacactcttatttttcatgaacagagtttgcttatatgaggaaagtgacaacaaaagccgatgtattcagcttcgggatcataatgatggagctgatgacgaaacagagaccaacttcgttgaatgatgaagattcacaagacatgactttgcgccaat

SEQ ID NO: 67135 - DNA, 457 bp, Arabidopsis thaliana landsberg
gaactcatttgtacttctctttcacatctctccatgtctttctcttcctctacttctccttattcggaagattcgttacagtcgatgattaagacgtccaaaactaagccattctaactaaaccgaaaccactgatgtggggtttgctggaccccatgtagtgggtattttggtccaaaaaccatttctatgacaaacgaataattctacactttactttgccacaccatgagagcatttttttttccagccacttgtgtcaaaactatacataaatatttggctgacccgttggaacgttacattgaatccaccatgagatacagtttctacaagtattctatttcatccatactatgaccatcctttccgtcccatctattataaaacaaaaccataggatctttctactcaatgacttttcgcacctgaataaaatctatgagccaatgccatc

SEQ ID NO: 67136 - DNA, 1555 bp, Arabidopsis thaliana landsberg
caccagcacatctcttcccgtcattatagcgttaataatcttgacatatcattcaaagaatcaacaaatcgaacatcaaacgaatttctagcaaacgcggacacaagaatcatatttaggattagaaaatacagaaagtcacttacttccttctggttagccctatacttggatataccaaaaacgttaaacctaacatcgtcagcacgagaatcccactcaaatgtctcagaccaattctctatagcactagagccaccagatgatgcaacaggacttcctgatgctgctaatgcttttaacaatgtctttaactcagactttctctcgtataacctatcttgatgctcaatcaaagcacttatctgacctgcaaagagatttcaatcaacagattcaacacgaattcaaaaaaactaaaactttcacttaacccattctggttcctaacaccatcaaggatcagagacaattatctatggctatgaagtctaaaattaacctaaaacctcaatgtatattacataaagcagaaaaaatggagactttgaattattttctaaagttatatatacaccaaaagcaaccgaaacacaaattcgaagaacaaaaacaaaacgaagagtctaaatgctttaaccttgaacatcctttaactcgacgtctaaattctgaagctcctcttgaattgcttcactttccattgattctccggctgaatcaacggcggcgtgtttaccctttcgtcgtcggcgtcgctcccagaagtcggcaacggctcctaagcaagaggtgaagcagaacatattgggccttaaacgggctataataatctaaatgggcttttgtacttggaacctaactaatgatgctcgacgtatgcttaatttaatcataaaaatgttattgagcatatgaataaaactttcatcattgttttagtaagatgttttatattaatatgaatctcgatttttgaaactttatattatgtattactctatattaattttgaaaatttagaatagtggtatatagtatacaaagatacctggtaattttgtaagatgtttttgaggatatattaatcataaattatggttaatttgactgaataaaaggtgattgttttgatcgcgatactggtacataaatacgtaatccaagtattaggcattaagatattctttttttttttgggcaaaaggctttaagatattcatgtttcaaaatgctgcatcacaacgacaagtattcatgaagaaaaaaaactagtacgcgtgaagtattcatcgaaggagaggactagtttatctaaagattattcaaaactatgtggatttgtggatatatatatatattaaaagaattctatagaaattattataaaaaattgttaaatatatatgtttaaaagaagaaaaaaagttataaaaatcattttctgaaagaaagaagaagagtgagtgaggtcaaagtgaactggatgaagcctggagggatcatggattcgttcgatatgtgacatatctccaaatgacctatcggaaaagcg

SEQ ID NO: 67137 - DNA, 447 bp, Arabidopsis thaliana landsberg
ctctagagaagtttagggaagaaggttgataactctgtttttgtcacaagtaaaagagatactgttggaggtggaaatgaggttgtactgaatgctctagcaggatacttgaggtacttggagggtacaagatgagatgactggcaagagtacgtggttattcttaattctggcgtaattgagcttcccaaatgcttccatatgaaagtggttattatggaatgaatctggtatatttgatatcttgttgaaaagtgatgggcgttggttctgatgtagacaagagtccagtgcgagacttcttgatccctagactaggcccggatcatctatttttcaaactttttggacatgtactgatggtgggtataggattcagaagaaaggttaagaattaggcagtgaagtatgaaagatattggattgctaggagaatggctcttatgg

SEQ ID NO: 67138 - DNA, 245 bp, Arabidopsis thaliana landsberg
tccatagattttacagagaaagacgcgaaagcttgatatcttgagttttcaaaagtcttatgctcttggttagttctctaaattcactctcttattttattttttacaaattaatttagttttggtccaaaaacttagttttaggtgttttttcaaccataccaattttttttagttttgcagtgttttataagttagaaagaaaaaaatctgaggtcccacgaaatctactcattatagggttt

SEQ ID NO: 67139 - DNA, 324 bp, Arabidopsis thaliana landsberg
agggttttgagatgattgcaggcccattatttattacagatggcaattttctaaattagttagtttcaagcctgtttattgtattaataacaccacagtgggtgggaggactcggaagtatataatagcgatcctgtggtgagtttaaggacgactgctatttctacctagacataaattaatcgaatccattctataacgcagtttcaattcacaaaaaaccaatttatggtactaacaaacagtcctatataataaaacttagcgatgatggtgcattataactaggtaatgatggagattcttcgattcatttcttttttt

SEQ ID NO: 67140 - DNA, 447 bp, Arabidopsis thaliana landsberg
attgttctttctcgccaaaccattcgtttatcatccaacttttcactggctctcatattctctctttttcccggtgtctcagtgagtccctcgcagcaacaatggcttgatacggatttttcattaagtctggagtctcattctctttggttgcaccaaatctcatcttccttgctgcattatacataaagttgtttcaatgcaacaatacgtaaaaagagggaccgagtagtaattagtaacactatactaaccaggtgtttgacgattgtaatcaagggatctcaagactaatgaagggtcataaggatctcttcttgaaaaaacaactgcagctgaagcaagcccaaacttgtcttttgattcaacaaaatgttgtggaaaatggtgtgattcaaccatctgtatacccgccaagttctttggttcccccttcttttgaacaag

SEQ ID NO: 67141 - DNA, 663 bp, Arabidopsis thaliana landsberg
gtcggaaagtgatatccttttttttgtttgtaaatattttgttttatgatttcgttaatctaatcttttttaggatttaggttaattaggagtttttaattttttaggttttatcgattaatctagaagaatctctatgttgcttctttaatggctctctgacctaatgttagggaatattgttgatgacctaattaatcgattaataatacaaaaaacctttttttttaagacatttattaataaggttggtttggtttggtttgatcatgtgcatcttgtgtcgatgatggttacatttaaaggtcatgatcccacgtgatctttaactgtatttcgctggtgcattaattaacattttattaagatccgattattgtgttttgcaataaatactcaagtataaaaaaagaaattagtgtttaatttgtcaagattagatcttcaagatctttagattaagatctaaacttgacatttagaatattttcagcatagaatatttaagagattctcaaaataaaagatatggtgtcgattataggttttttttttgcgattataggttaagataccacttttggggtcaatcctttttttggggatcctccctaggatccttcgaaggtttttcccctaattccatcaggggaatctttttct

SEQ ID NO: 67142 - DNA, 2603 bp, Arabidopsis thaliana landsberg
accgtcttgtacaacgctaaaggaacttgctttacccttctccgaatctgccaatttttcaaatctccacagttagttcagcaaatggttacagtttcccaactataaatggaagaccaaatgtcaactgattttttctcaacaaagagttgatatcatatgaaccagagcaacattacctcgtccccaaatatggtggcatatgaaccagagctaaaatcttcaattttcatttccgtggttttcgatctgatggttagattagtttctagagatgagataaacctacaaaagtgagaagaggtatcaaggagatgaccaaatgtaaaaattttaaaaaaatcggataaaattgtttggtgagcaaatataccgtgaaactggtggacagtaatgatggcgcaaagtgtcgatctcccaaagagaactttctgtaggtttccagtaaaacgaatatcatcattcatcagttagattacaaagttatttaacaagctaacaacttacagaaggcaaaacaacacattgttcttgaactttcaaaacagttaaaactttactttttgaatttatcgatgaatctagagaaccttggcattcttaatttcttatcaaactaataaatctaattatgctacaaagccgctgttatgaaagtacaaatcaggaaatctgaaagcatacacatcattgttttttgttggatgaatcaagcttctacataggggtgtgattttgtgctaggggcatggaaaggaaaaataaaaaagactgggaatagaatgttaacgacttacttaaggctccagatttcttgggatcactctcctggttgttgaaatagtcaataccaagctttcgctttttgatggtctttggttggctctcattgtgttcaccagcctctgtgttggcttcatcggcattttcaacgatttcctgaacaagagtgacctctttgtaagtccatgcttttatatacattattttgcgtagttgtgagtggtattatacagacgtcattttcatctgttaatatgttctttgcactaacaaagataggccgtacctgcacaagatggttgattgtaggatttcttcgtaaaaggttgtagatcaaagctgttatgaccaacgatcccgcagggggaatggaaagtgacaatctgcttagtttctttgtgaatgaagctgccagatatgctggaagcattgacgacttcaggcatgcgtcaagaagctgcagaaagcgtttcagatatagagggaagaataacatattataaagtaatcagtcattgatcggttactcaaatatggcaatacctgaagaaattttgctcggtgctttgccacaaagacagaaggaaccagtaacgcatacagtttttcataaaagaacggatactccaaaccatgttgggtcatgaggatgaagagactgctaagagccatcacactgacaacacccccaatgtcgtacgattttgttaaaaagtcgctgcaaagtacggtgaaacataagtaagcgcttattgaaggacaatcacatatacagaaatgataaaagctttggtaaatttgcccaccataacattgtaggattagatagatggggaatgactgtcaggtgaatactggcaagaacctggttatcagaagataatatattggtaattcttcatccaatccatattccagacaaatggttagttggaaaagtaaattggtttacctgcttgtacacatcaatgggaagaggcagtctgagaaatgaaatccatgctttagtgaacttcaacttcatcctcttgctaattgttgccggagaaaggagctggagatttaacagaataaataaagaggcaaatgttaggaattccatgcctggaagaaaacctattcacagattacggattcagtatattcagcaaacttgcaactggaaacttacagtgctgtctcctttctcagttttcttctttttatctgtcggcttctcactaatactttcatctgcacaataactcttattagcaaatctaaacacatagggagtcctttccacaaaattggaaaatctcggaaacaatcacctgacccactccacatctcgtgttgagacttctcagcttgtttctcaggaggtgggatttgagataaaacttgatagatcttgcgaacagagagttctaggctacaattcacaatttttatagatcaccaacaacacaataactttaaaaaccagcttaagattacattcaaacagcttggaagaaaaacaacaaatataagatatacaaagaaagatcacacatttactgatactaacctttcttttgaatcactctcagcctcactattttcgatcacagttctataagctaagagtaacacaaaaataaaaacttgcattatgcatcatgacgattaaaaagagagaatgtcaagaaagaataaaacgcaccagacactgatgcttccaatgttttcacaaacttttccatgctgatgtatgtaaaatagctgacacaaaatcgatatctcgagtcaaatctcaaatgaccaaataacagcaagcgaaagacatataaactcga

SEQ ID NO: 67143 - DNA, 683 bp, Arabidopsis thaliana landsberg
cgcttcccactgaaaagcatatgtattttgtcgaataaatatcacattaaaaaaaaaaaatccttaatgtcaacttatctgtgattcgtacgaagaatccttaatgtcaacttaatcacccattatatctactaattgttttcaaaatatatgtctagtaactaaaatttgattatgctaatttttccatatgccaaagagtgtaattccctccaaaaacatgactaagatttttcaccaattctcattttgtgaaggttcatcgaacaatgcgtgtatgcatatttcccgccggaaaacaatattttcatacgttacgttctcaccataaaattctaccatttcccaaaaaaactgacgccaaatttttcttttcgaatacgagtcagaacatcgtttttggctagaaattgagaaaataaatttttgttggcaaagtgcataatcagtaggttgtgcggcaatgcgtttcaaagtagttggaagaacatgttatataacgcttccaaaattatggccactgtctttgaacaaattaatagaagccacaatccttgagccgctatcgtaaagattgtggaagactcttatctcaaaattttgcccattcctagctcatttcacttcataggtgattttcttttaatctcaatcttggcttattaaaaattctttttggccca

SEQ ID NO: 67144 - DNA, 743 bp, Arabidopsis thaliana landsberg
  unsure (1)..(743): unsure at all n locations
gttgaccgcgaccaccagcggctgttcgtaggcgcggcagaccgagaccggaaccggattgaccaaagccccatccaccagcaggcggccgtggcaatcgacaggctcgaaaacgccgggcagcgcataggaagcgcgcatggcggtgatgagcgagccgctcgacagccaaatctcatggccggtgcggatttcggcggcgacggcgacgaacggcttgggcagatcctcgaagcggacgccttccagatcctggcgtagccgtgcatcgagcttcatgccgccgagcaggccgctgccgccgagccggaagtcgagcaggccgaacaggcgccgccgggtcaggctgcgggcgaattcttccagttcgtctaatttgtcggccagatagcagccgccgaccagcgccccgatcgaggtgccggcgatcatggaaatctcgatgccggcttcgtccagggcgcgcaggacgccgatatgcgaccagccacgcgcgcagccgccgncaagggcgagcgcaatgccggttttcccgagcggttcggagattgtgccgcaggccgaagcagggccgttggcctccatcacatgcggtttgccgcgtattgacgcccattcgagcatcaaaatctcccttgtcccacgctcagcctatgccgccgccgtatcgaaatcgtgaatctgtgtggtgggattgaggcagatggttcacgaatgcttccgataggtttcgtccgtatcga

SEQ ID NO: 67145 - DNA, 550 bp, Arabidopsis thaliana landsberg
acgacaataacggacaggtgtatatggatggtgcttttatgaattcacaatgcggcttaacttccccggggacgataggggcagatatatgtcatcttaaccttcacaaaacctttgccattccgcacggaggaggaggtcccggtatggggcccatttgtgctaaagaacatctggctgcttacctgccatcgcatatattcaaagataccagcgaagcgggcctgcaatctctccccggatcgtacggagccgtgagcgcggcgccttatggatcggcatctatattgctcatcagctatgcttatatcaggttgctgggtgccgacggagtgaaagccgcaacagaatatgccattttgaatgccaattatatgagggcaaagctggaaaaatattttaacatattgtatctcggtgccaatggcacatgtgcccacgaatttattgttgatcttcgtccttttaaacctacctcgggccgtgaggcagaagatgtggccaaacgcctgatggattacggctttcatgcgcctacgatgagcttccc

SEQ ID NO: 67146 - DNA, 281 bp, Arabidopsis thaliana landsberg
  unsure (1)..(281): unsure at all n locations
nnnnnnnnnnnnnnnnnnnnnnnnnnnnnnnnnnnnnnnnnnnnnnnnnnnnnnnnnnnnnnnnnnnnnnnnnnnnnnnnnnnnnnnnnnnnnnnnnnnnnnnnnnnnnnnnnnnnnnnnnnnnnnnnnnnnnnnnnnnnacccttttgcccagtttgtcctagtcccacatgaaggcacacaccggctccattcgtatgctaggacctattcattcagccaaaatacaaacctacaacaaagagtgacaggattgccctacttaaaagctaaaacttgct

SEQ ID NO: 67147 - DNA, 3039 bp, Arabidopsis thaliana landsberg
  unsure (1)..(3039): unsure at all n locations
cagaacatatctccctctatacatcctaaaatgttctacatcttcttcttcctcaactgattccctctggaccaccatcttcctgcaacgtaaatagaaggacccattgtatcattgggtaaaaaaactaaaaaccatggatatgtggttaacagaacgaaaaaaagcttaccatagaggtggccttgattttaagacttcagataataggaaaaggcatccacaggcatactgtggtggctgttgaagcgcaacctactcaaatcgttaaagagtacacttgagagatgacaaaaaaatttactatacagtgtgtcgacatcgaaaatttaataacaaaagaatcaagattcctgtataggatcaatgatgcgaatattgtcatcattgtcaatgaaactagagctacaaacgacggggttgatggtttatatgattcatgttaccgacctgcaagactcttttggagaaggcagccacacgcttgatatttatatcatttttcatggctctgagaagaagcccaataaacatttcagcctgcaaattaagaacggcaacttagtaaactcggtcattaagaaaatgctatggttcatgccaggggcagacatcttgatgtttttgtcacaatataagttgctttcacaagattataaataaatgaatgtacttatgccaacattcataaaccaattccgggctctaccaaattgtaagggttattataacccatacataaactaagaataaantgacgtgattggaacatggaaaaacagaaggttcaaagtttagcttgccttggaagaattcattgcggaggggagtagttgtttcgagtacaatgcacggtaaaacctgtcactaacaatcttattcttggatgagatcttgtcaagaagcatcagtgattggactcctacattgaaattcgccgaatgtacctacatattcaaaatcccattttctatatcaattttcggttgtaactatgaaactaaacttctataatgaagctttaaatggttaccagtttgaaaagcactggcgtctgggattcaattatatcatcagcctcgtcagtggaaacatatggaaaagctctgttaactccctgcacttacggagtactaaagcataagttgatctgtgaagtctcaatactttaaaattacatacatcatgtacaccaaaaaaacacatccagactaaccgtcagtagagctgatagaattcttgaatccaactcaataggtgaatcagttgacacttcttgctttgtgtcctttgggttggattttttcttatcagcggctcctttgtcatctgcaccttgtttcctatttgcttctgtagttaaaacctacaagaatgcaaacacacttctgtagtgaatatccaactagtgaaagatttcatgttatgacttatgacaaacgccaccccaaaagaaaacactaaggggtagcagaagtctctgagatcatgaaagtaaggtggaagtggagggactaaattttaagaagatcataaggaaatgttaaatttattgacttcaatgccagttaccttaaacagggcaaaatatacatcaattagacgttttgccacctttggatcctctcctttgtggctcaatcggatctgactcaaaaagttaacctgtgaaatttacaaagattaatgagcattgtttagaaagctaaacatggataagtttatgcttcttttcttttctaaagtcttagtaaaattgtttcccattcaaatcaaagacaatactttagacgacaataagcgtgaatcagtttaaaaagaagagcaagaaaataaagaaaaatggttctcgtgaacataattagagtagaacaatggacatacagcatgatactttgctcgtaacccaagatggggtcggaagagaaaggagtcaacttcatctataaccacagcctgaaaaaaaataacattacatgagccaaagagaagaatccaaacaaccaattaataaacgaaatactgaaactggcataggaaggttgaatagccgtaccttcatgttaggatgatcagccaaaagatttgtcagatgataatcagcattagatgcactcttgttttgaggatcccccaactataatataaagtaatccatggaacaattaaagggatcacaactgagaaatttaaattagatacaaatatttgaatgaacaacaaacaataccttgttcaccaatgacactagcaatttccgctcttgttctgatttgcttgtcaacatgaaatatattgtctgaaaccaaacaagaaaaattttactgaaggaaagatccgaatcacgttaccaagcaaaaaaactcactgtagctaaaagaaaaccacggaccatgccgttatgcatcatccagagaaggattacattgatgatactcaaatctctaatattaaagctcatcaagaatcttacaaaacctggagaccagtgctactaaacaagctagcacgagcagagtggtgataggatatatacctttaaagccttgtccttcagctctggaagcatatctttagatgattcatcaagggctgtgacgaagcgctcatacctacaaagtcagcatgctaagctgttaaacgaatcatcgacccagaacaattacggatagaagacacagatctttgacatagtgtgattaaacacatccctcatggcatgatttgagatctttacctctgtttcaagcaatcctcccagtaccaaaacagcaaaagcgagtaaccatccttattttccggaatgatgtttaaaggtcgctgtaaaagtgacttcagcttgcgatcaggtaataacctgaagaaagaatttaaaaaacctcattcaatgagaaaaagatgcaagactgacacataaatccatagcttcattgtgtgagtaagaaaaatgtgccttatcaaaatttctgatagatccttaagacccttaaatgcaaattttttttccaacctttgatgttcaccttcctgcaatgaaca

SEQ ID NO: 67148 - DNA, 1362 bp, Arabidopsis thaliana landsberg
  unsure (1)..(1362): unsure at all n locations
ggaagaaaggggggaggattccagtctagagcgaacgaaacctttcgttttggtttttgtttataaatagaaagagaggaaggggcttttaatgcattatgaatttcaaacaagatataaaaaaagtgagaaaagaatagttaattcctgaatttcttagaaaagacaaatgttatgcaaatgatgatagattatgttttaatatcacggtgaagagtgcagacaaattagacctatgtgttagtaaaagcatcaatggctttgagaagaaagagagaacaaggcatgctaaaagcaaatgttaggacaagcatttgatttgtactctcttccctcattatgttcctttgcaaagacacatcagaaacatccaaagtgaagatgagtttcatcatcacttgcaggtagcggaatattcgctgacaatcacatcacatgccgtttggattggaaccttttttttattaactcaagtcgagagatctgtgttcctcgatttacatttttggtttctattatcaatacgcatcacatgtttctggaccaagcagggctataaaggctaatactagtaataaacaatggaaccagcctgtgcttttggactttccccatgataatcttactatttgcttattaccaatctttcaactcttcatctactcctcaaatcctttattcagcaacataacatatgaaatcatgttttctgatgcttcatcagattattaaccaagacaaagaatcagaaaaatttcatcttgcaacagaacataaatcactattccagagtgtaaagcaagatgatgaatgatgatgcccttacttactagggggactccatcagttttatgatatcagagactgtgcttgtgtaatagtctggttctatcttgttgcccttatctagtagattagattcacttgtcacccctattttgacaaacccaatcactgtcagttactgtccagatatcgacttgtattggcttgcaaaattcaaaagagtatcaaacagttaatgataatgacctgttaggacgaggagagttttgcagccagcattctgtccaaacaagatatcagtatctagcctatcacctaccatgcacattcttgacgtttccgtcccaaatctgtaacacaagaaatacacctctttagcactctgtcgtatataatgcacactatgaactgagacaggctttcatgtgcacatacttttgtagcagaaagtccatcatgaaagtcgatggtttcccaacaactattggttctctttcagtcgatccacacatggcagcaaccatacacccagcacctagaattatgagtaagaatttagtgctgtgncttccaagc

SEQ ID NO: 67149 - DNA, 621 bp, Arabidopsis thaliana landsberg
taaagctatgactacgttgccatagaaagtgaacctggagaccacaaaaaaaaaaacaccactataaaactgtagagtattaacgacgtgcttaattacaaacctaaggctctaattaatcaaatcattcactgtccacttgactctctcaatgataatttatatgaagctcttaatcttcgccgttattatctcagtggttttattcccagtgttggtctcatctcgaacgataaaatgtgaccagttgagtggaaaatgcatcaacggtgaagaaaaagagatcatgaacatgagattaggtttggatgtgagcagccgtaggattctacaagcatcgagatatataagctacgaagcattgaagaaaaacttaccagataaccgacgtggtgaaccggatcaacgggataacccataccgacgaagttgtgatgtccattcacattgttaccggtttacgaattagatatgaaccctcttcttttttttcttcttaatgtttccgtttattttctctgttttgctgatttggggtggtttggtttctatttttttttttggatcttccgatcaaaatataaattttaatttcattatctttttacgactcatatcatc

SEQ ID NO: 67150 - DNA, 417 bp, Arabidopsis thaliana landsberg
  unsure (1)..(417): unsure at all n locations
caaaaatgaaaatttgaatgaaatagatcttaatgtatttgtcctttgtggattagctaagtgtagtttagtgacacttcggaacatgctaaacacctatctcatctaagtatactatgatataaaatttgctaagataccgatgtaaatgagattatatttattatattatttatatatattatttatatatccatagggatcattgaaccaaaatcaaattcatgatagtctaaaaacccatgaaatgttcatgtactaggttcttatatagtcatgtaatgagaactttgattgcaacttttaagagttcttcatcttaggaaaaataaaatatagaaatcattttcctcttgggtgaccaaactanaagacttttattctttccctttacttttaatttttcattttaaataa

SEQ ID NO: 67151 - DNA, 1961 bp, Arabidopsis thaliana landsberg
  unsure (1)..(1961): unsure at all n locations
agacttgacacacatgaactaataaaatccaatcaatcatatttcatttgttaatggcttaataaattattacatatcaatcacttggacaatggagtatgggacatgcatgtcacgtgtttatggtataagattatgtaatgaattcgaatatgaatagtggaaaaacgataagagtttgagtaatcaattgattaataaaaacactaataattgaggcaaagttaaaaagaaggaaaggacagaacaatcatggaccacatgtagactttgctagtttagttcgtcggtctccatcgttagccattcactctccaatccaacaacaccctcgtcgagtccggtctcaatctgcctattgatgggttcagattagaccacgtgtcaacgttaatagacaaaattagttggacctgcttgcaatgagtgaacacgtgtcgaacagctgaactgcgacatatcttgtgtgctttcccatgcggagatatatatagaccccaccttcagctacagagaatgaaataagccaattatatgtttatgtaattttgtcgaatctgcaccatctctttcggatacatacaaaaataccaaaaactaaattcgggggaataaactatagtttctcatttcaaatctttttttcatgtaaactcaaagcatttgccattcatatatttcacgtatgcttggctaagcttaacgactattgtacatactaggacgtgcacaaatctctaaatggtaccatgattttagttatacttcaatactgtgaatgagggttttaaatgacaagaatatcagaagtttcacggactatatggattaatatagatttgatataaaattccttacttatcaaaattaatcatcgtgtgtctcacaaatctatattgaagctactgtagaaatgttgttagaatgcatgatggtacgtcggcaagtaagacatcacattgtatatgattgaaattacttttagaatgggaaaaaataagtctgaagttactagctctcgtctaaaatgctgaaagaaatacaaaatagcagtgcgtcgttatctaaatggttcttttacgtggactatgacatcttcttctgatcttaccgaacataactgagtaaaaccacacacaaaaagcaatacctattcacctttagtgtatatatattcacacacacacatgctcatcctcaccccccaccttcacttccaaatatattttgaaaaacccaacgaaaaagtattaattttgataactaggtgaataaacgtaatttacgatttaaatcaaagcgggtatacaattttcttaggtaaccaagagagatatgggcaaaggtcggagcttaccgattagtcgaagcgagaggtttcttgggagccatcagcagtccgatgaccatcatgtggacggagaaactacctttgagctggagctcatggaagaggatgtctggtcggtggtcgagcctgacgaaccaaaggaagtagctgcgtggaacgcacgctctctcgaggccagtggaagtgaatggagacggaagggaggacgcgtgagtgacctgaccgttccgagtgatggacagaggaagagacacgtggcgacttctgcgccggtgaaagttcctgactggagcaagatcctaaaggtggagtccgtcaagtcaatgcataataataataacgataatgataatgctgacgtggcggattgtgattgggagagtgcgatggtaccgcctcatgaatacgtggccgcgcgtagncgtaacaggtgacggtggttcgtccgtgtttttgggcgtgggaagaacgttaaaaggacgtgacatgagacgggtcagagacgccgtgtggaccaaaccgggttttatggttaattttacgtaattaatttgatcattaatatttgattgtagtatatgatttgtccatagagttgaagtaattaatt

SEQ ID NO: 67152 - DNA, 190 bp, Arabidopsis thaliana landsberg
cctgattcataaaactcatgccaataacacacactctaccaacaatatcaaccaagagaagcgaagattctacttaggacccaaaaggccaaaactcagtacagaatgcacagataaagcagcaatacttactagcgccagtgacactgaaggagtgctgacttgactgcaacgttcctccagccataaa

SEQ ID NO: 67153 - DNA, 670 bp, Arabidopsis thaliana landsberg
  unsure (1)..(670): unsure at all n locations
anctttgcggtctgcatactattgtgctctgggtacattgcaacaggtgaactcttaggggacgagcggactgctactctgttgtgctagtgcggctagtatggccccgcaatgtactccatagagagccgtcctcggcagtatattcctagctctctcgtgaatcagattgatatattcaggagagaggatgatagggaacaagcttgcaatcatcagccagggtcctgctgactactccttactagtcgatggtatggaagcgcagctttttccttggaacctaggcctccgtaagccaggaacaagagggctcaaaaaggagacacgtgaataatgacggtagggcctaacaatcactctcaggaagtagagctgaaaacactaggttaccaaaccgcaaagctcacgttcaatcagcgcttgacatgggttcacctcggcagaagcgacaacaaaggaaatcatgccaagctgttatcgtcctttcttgggattgatatgtatgtccttcgtgactccaccttcgacactctctctaagcttactagcttagagagtgtcagtggatggaaacatacatcttaccccatacgtactctgatcggagttatccatcttccacgagccacaagccttgattcctactttcccatggatgacaattggc

SEQ ID NO: 67154 - DNA, 1379 bp, Arabidopsis thaliana landsberg
ctccgcaacaccagcaacttctcctcactgggttcttcatctgcactgtatcaacccgcacaaggtaggcgatttcgttgattccggcagatttcttgatggattcaagaagatgctcaattctgtatttcattacaggctgaccatgtcgagtcttcctcaacattttcccctttgcttctttcctcctagattcagcctcttctttcgcttccttcttcgcctgaaacattgcctctctctccttccttactctctccatctcttctcttgtctgcttgtacaaatcctctacaccaattctcttattagatttacccttccgcttatcatcatcatcatcatcacctaccttactagtctctccagtctcattcttatcaggaatgttctgctgcttcaacgacttcctaaacttgctcacatactttgcattcttgtagaactctttttgcttttctgaaagtgagcacaaaagaacactcattcaatctatacttcaagcctaatctgattagaaaacacaaactgtgaaactatacaccattaaaggaactccaaatagttctcttctgatgcctaacgccaacggaaacatcatcaatgaccacatcgaagcatccttatggttaacatcagtctaatcatatatctcaagatagctccttctaaatatcgagtactagcttaagtttgaagcaagaggatgagaagttacaatcaaaaaggaaactttttttcatgttgggtggtgagaagcagggtaacatagtcaataaccacatcgtagcatcctcaacatcagcctaatcttattatagttcctcctaatcctcgagtactagcttaagcctaatctgattagaaaacacaaactgtgaaactatacaccattaaaggaactccaaatagttctcttctgatgcctaacaccaaaggaaacataatcaataaccacatcgaagcattcttattcttaacatcagcctaatcttaaatcttaatatagttcctcctaatcatcgagtactagcttacgttcgaagcaagaggatgagaagttacaatcaaaaaggaaactttttttcaagttgggtagagagaagcagggtaaacatagtcaataatcacatcgtagcattcttaacatcagcctaatcttaaatcttgatatagttcctcctaatcctcgagtactagcttaagttcgaagcaagaggatgacaagttacaatcaaaaaggaaactttttttcaagttgggtagagagaagaatctcttactgatcaaagaagggttatagcgattattttccgatttcatgttggcaaaagtttggagagaaagaccaccgcctcctaatctcctcatgttcttcc

SEQ ID NO: 67155 - DNA, 562 bp, Arabidopsis thaliana landsberg
aaaaattgagatggacattggagatgtttagaagaatatagattcgagcggttgaggcgaatatttttttttgtagattgaaatgtttattatttattattaataaattatcatataatagtgtaaaccaaaaattatagaaaaccccccgctaaaactacatacccattttctagaaataaacttaggttacaacggattgttggctaccccaaaatttggatggtgtaatctgctaatggtttattccgcttcgagtaacatttaagcaaattgttagtataaaatgggtaaaataagtgatactcaaatacatattaaataatggcaactttaaaatattttaaatatttttcatgtttcaaataattttcttacaaaatatatcatttaaattcttaaagaataaacaaattttaacaagaaagtaaacgtgaaccatacttcaattcttagtccaaatgtagttcatacaaatatgacaataatttaacaaaaaataagaaaaagtattcttccggggtaaaaaaatagattcgatcaaactaaggtcttttttggt

SEQ ID NO: 67156 - DNA, 1591 bp, Arabidopsis thaliana landsberg
tcgttatctgcatctcacactaacacggcgacatgagaaagagctcgaaacaaaaatggagggaaccttctcgccgctttgcttacgttcttcttcgaacctctgttacttctccagtaatgtttcaccagattctcaccgttctataggatttacattggttgattcgctccggccaacgaacttggtttccctgcgaacgggaaataaacgttcgtcatcgtcttcactacggctatttctctctccgactagaagcgctctccgtacgccgactatttccgcggaggaggtgaaagatgtcccgatgccgaagattgataagagcggccgattaagcagtcctcgagccgcacgcgagctcgctctgtaagcttcgttttctcactttaagcgtttctgaaatcgtaatcgtttcgttgatttgaaaaaaattggaaattttagctgcaaatgaaaattcgcctttactagaattggaaacgattcagtcatctatgcggcttggtgtgacaagaataagtctcaacttagtgttccattgtctgggttttaaggtttaacctaaaaccctaaacccagaaccttgcctcactcaacagtcaatttttctcgagggtagaagtattaagccattagttctctctttttacttgatttcagccacaaaattgaactttgatatgattatctcctatcaatatgaatgatgtatctaccctctctgatcatgttgctggatgatattgacagtgtaatactttatgccgcatgcttagaaggctctgacccaattcgtctctttgagaagagaataaacgcaagaagaggtaagtatcaaccaaacgtattttttgttatcatgttctgtttccatctgcaacacagtcatgaatgtaggaatctcattgtaacttctgtggatcatttgcttgattcttcgtgatttaactgcttgtgatataacttcaatgcatattgttcggtttgtacagagcctggatacgagtttgacaagagttctttgttggaatacaaccacatgagctttggaggacccccagttaaaacagaaacaaaagaagaagaagatgagcttgtgcgccatgatgaaaaagaatcgaaaatcggtaggtctcttattcttaaaataagttttctcttctgctttactcatatatggcaaagagactcttgtttggatgggctcatgggaatttcccatcttgtaacatgtgaactgttgtttattctccttttcctgcagaagccgaagtgctttcagctcccccaaagctggtgtacagcaaacttgttttacggtaatctataaaatatataatgtgtagtaattgctgctattcggaaataaattgtgaataccaccttattcccactatgtgttactccaaaggtttgcaaagaaactcttggctgcagtagttgataaatgggatagtcatgccgtcatcatcaagaaaaagtccccgccagataggaaggtataaatcgaacatttgaacttcaactccggtcaaatactggatagatgaaaaataatgaaccaccaaacttcaagcctcaatgctga

SEQ ID NO: 67157 - DNA, 2802 bp, Arabidopsis thaliana landsberg
  unsure (1)..(2802): unsure at all n locations
taagcaagtaacttcaaattaaaacattaggtaccaacaattatggtcttgagggtaaaaaagacgataaaaaagcctcagtgacaaatgtcaaaacatgggaaaagaattgtaacactaattaatccacaatcaagtgaaactgaaaaccctaacatggagggaccaacaaatgattggacataactgcaccaatcaaaaacttaattctgagtttattttggcataatttagtttggtgatacgcaactgggtcccattttaatatgacataatttagagtaaattatactatgaataaaaaaaagaccttaccataaaagtcattcgttattattacttatgtttgccattacaagtttatatccatttcctttattttcccggaaatattttttcaacgaccaagcagagaagttacgttacagtattatacaaagaacatttacacacattacccaaggaaggtgcaggctcgggccacttatgggccattgaacttgtacaaatatttatttagcccatgtaagaaatatcgaggagatattttgtttacataaagcccagaaagcccaattagtttggttgataattttttataacaaaaaaaacaaaattccacgtaagcacagaaacagacgactgacacggtggcccgtgaaggcgtgaaccgaatcatcgacggaggaaaccaccaatgatttctccatctcacgtcgtcaaatgtttcatcatcatcttcatcatctttcgtacgacttctttttttttttttttggtttttttttcccttcccaatcgaagtagcgatgccttcgcgatagctctctgcttcatctcgccactcatctcaacctcttgatttgggtctctcttgctcttgctcttgctcttgatctctctcaaggtattttattgttctctgaattgtttccctggatcgaatttgttctagggttttaaggttatagctcgaaatcgccgntgctcgctgttttagcatctccttttcacgttactgtgttcgttggtgctgtgattggtgttgagttgggttataagttccgtgttcttattgaattttgatatgtgcttttgcttgtgtatagtgttaagcaaataggatggaaaagttggtgaaggaaggcccaactctgctgcaactgcacaagtgggaaccttctcaatttcaactcaagctatcagaatttcgcgaggcgtttatttctccgtcgaggcagttgttattactactctcttaccactccgaagctttactgcttcctttggttgcaggtaataacttgtttctttcttattcatatgtgtatgtatatgcgtatcattttattagcgttgttcgctgttatcagggaggtccattggcagtgaggtttcgttaagtggtgataatgaagagttgaatagtccttcatgctctggtgggtcagatccagagaaaattgaatctccttgtggatcaggagttggttctggtgagcctggttttgtagataattgcagttctagttgcaatagtttcccttttatctttgatgcaaagtctgttgcttggggtagttgtggggatacttacaatcggcacaaagatcctttgtttagggaattgttgtttgtatctggaaatcatggtgttacggtccacgctttttgctgtacaaaagatttaagtgacaaagccaaaggcaaaccaaatggtgagctgaggcatggggagtgggttgagtggggaccttctaggcttagtcagaaatcagaaccggaaagagtctcttcttctgatggctcaaagcagtggatgcaatcttttttgattgatttggaaactactgtaattgatggtacaagacagtcgaggttccctgagaagtcagcgtttccgggttctgcagaggttgtttcattcagcatattaaatactgatttacctttctcgaatcttcttttccaagacaactccatacttccgaaggataatatgcctgaggatggtaatgtaaatgacaataattttctcgtagcatctgatccaactgctttggatgaaaaatctcgagctgatatgcccgtaaacaatgtcagtgtaaacagtttgtacaggtgcatcaaagttttctccagcgatgctcattctctgattggatttgttatggagttatcggattgtgcatctacgcctagaaggaatgaaaacgaaagaagcaagggtaagagaaatatctttgttgccaagctgtttagctgggggatagaatgggtctcccttgtgaagtttggtgagtcaagtattggacctacaaatgagtgggcagatttccggctatccgataactttgttatctgcctcagtgtttctggtttgatctttctatatgatgtgaattctggggattttatttctcatggggatatcttacagacatgcggtcgtggattgcattcttcatcagataggcaagaagcaactgcagaagcagatcagctaagtgactttcaaaatcgtgctccatccatgtctaagacttgtattgttggttccacggacagaagaaagtttagaaagcttattgtagcttctcatacaccactcatagctgcagttgacgaaaatggtttggtatatgtattatgtgtcaatgactntgtttccaaggaataccacatggccgcggaacctattcctgatttacttcatcttgngcttggaagtctggttgggtggaaaatcggcggcatggacattggccagaaaaaagtgcaccaccctagttcctctgggtc

SEQ ID NO: 67158 - DNA, 2346 bp, Arabidopsis thaliana landsberg
gctgatggcaatgtcagtgtccttcacagtgacaaggttcattatttcaaaatacagtactaaaggtaataatggcttaatgaaaggggctgaattattcaggaaaaaagatgtatattctttcattcctccaagagctcaggacacctagaataccagaagctatcaaaaattaattttatatgatccaaggaaacttgctaactataacaatgtgataaacgaaacagatatcttttaacccaaaaaaaatatatatatatttatccaaaattgacttaaaatcccactgtactcttattgttgattagtactcctgataaaccatagtaacatatgctacaatatcctcgtgttatctattcctcttcttatttaactatacgtattccctaggaagacaacattcctaatgtaagcaaatatatctagccaacatgatatataatgaaattttccactgacaatactaaatttaattatagcttagagaaatttatttgtacatattcttccagaacacttttcctgtgggggattagtctatgtagaaaggatgtttaagaatgtcctacccgaagtggactttgcgctgaaagcctttccaatacaagattttcaacaaaaggatccacctccgcatcatcatgcgcggatgacacattaccatgcatcaagaaagatgcctttggagtccatgatttaccagaattgacacaagcagcgaaagatgcaagttccagctgataacataacgtatcgcagaggtgttccacacaagatttctgcccagatcattgtgtcctgttagactttcactgtcatcttctaaaaataatagatccaaatagtagtttatgtgaaggaaaaaaaaagttacttcatctgtctggtttccataaagagaagattcttctagccgaagtgcttgcgagtcactagtccaaagtagccgcatcaattttctacgggttgcagttttgcccggcaatagatcccaacccatggaggctactaaagggcgaagtcggggaaacaaagtaagaacctgaaacatatgagcagaagagggattcagatcccaatagaaaaagggaagtcaaatggggtagcagccaatcaacaatactgcagtaagataatgagtacgaagatatgtaactttattctattccacctacatcattagcctcctgaagcttctctttctttacagaagacaaagcagcacacatcacacactcaagaacatgtgatccagaaatacgagcataatgatacatatctctgagacaagaattaattgccctgctcataggagaacttttgtcctctatatttctctcagttttcaagtctacaagatatcgccggaaacattcaagagggagtggaatttgttcattgtcgagagataaatgtagttggctatgtgggaggagcatatcatcttgaataccctgccgaggaaaacgttgtaatcagataacagcttatagtacaagataacttactcaaagccacacatacacatatttcaatatccacatataagcaaacccatcaactcagaccaaccactgaactcaactatcaccagtgtaaatgttcacaaagtatatagaagaaaaatgccaactggctataccagcttcaaattccagtataatcaagattgacaaacacggtctaagttcttaatcgcaacaaatataagctatactacatttacatattagcaggttccgtaaaccactgttctttctcagttcagcaatatgtaccaaaaatagttgtatcttacatgtgaaaccttgtttttaatgagaacgatccattatatcagcttttataaaaaaattaccaacctggatcatctgagcaagatctccacaattcgatgacagagcttctttatacataaacagcaagttctggcgcaccatgtgccaggaatcaccatattcatcctttttctccataactcttgaaaggagagcttttagaacagcactatcataaataagaaaacagaataattgaagtaagttctctattcttaaatatgcaagaaacaaatgctaaggaacaggaagacaaattgaagcaggaaatagaacggaataaactcatgtatttgcggaatgtatataaatcaagcacttactgatagttctctttctctactccataatcaaggtgaagataacgaatgcgatcagctgcaccgcgctcatcaccttcatccaactttgttttcatagcatccaactgtgctaactgaacattcctatgtatcaaagcatacacattgatgttatccagctccggagagccaatacatgg

SEQ ID NO: 67159 - DNA, 2072 bp, Arabidopsis thaliana landsberg
ccttttacctccttaatatcttaaaagcgagaggaaatgttcaacggcgccgtttcactactcttcctctttcttgccgtcgtttcagcgagggcagatccgacattcaacgacgacgttttgggtctcatcgttttcaaggccggactcgacgaccctctctctaagctctcttcttggaactcggaagactacgatccctgcaactgggtcggttgcacatgcgaccctgccaccaatcgggtctcggagctccgccttgacgccttctctctctccggtcacatcggccgtggccttctccgtctccagttcctccacagcttggtcctctccaacaacaacctcaccggaaccctaaaccccgagttccctcacctcggcagcctccaagtcgtcgatttcagtggcaataatctctcgggtcggatcccagacgggttcttcgagcaatgcgggtccttgaggtccgtttccttggctaacaacaaactcacaggttctattcctgtctccctcagctactgttctactctcacccatcttaacctctcaagcaatcaactctctgggaggttgccccgagatatctggttcctcaagagcttaaagtcccttgatttctctcacaatttcctccaaggagatatccccgatggcctcggcggtctctacgatctccgtcatatcaacttatccaggaactggttttccggtgacgttccttccgacatcggacgatgctcttcccttaaatcgcttgacttgagtgagaactacttctccgggaatcttccggattcgatgaaaagcctgggctcttgcagctccatccgtctgcgaggaaactctctgatcggagaaatccctgattggatcggcgacattgccactctcgagattcttgatctctccgccaacaacttcaccggcactgtcccattctccctcggaaatctcgagtttttgaaggatctcaatctatccgcaaacatgctcgctggagagctcccacagactctctccaactgctccaacctaatctccattgatgtcagcaagaattcattcaccggagatgtgcttaagtggatgttcaccggaaactctgaaagttcctcgctttccagatttagcctccacaaaagatcagggaacgacaccattatgcccatcgttggattcctccaaggtctccgggtcctcgatctgtcttcaaacggcttcaccggtgaattaccgtctagcatttggattctcacaagtttgttgcagctcaacatgtccaccaactctctcttcggttccatacccaccggcattggaggattgaaagtcgctgagattcttgatcttagtagtaatcttctcaacggaacccttccttctgagatcggaggagccgtctccctgaaacaacttcatctccacagaaaccgcctctccggccagattccggcaaagatctctaactgttcggctttaaacacaatgtaagtcaactcaatctgttatctttctgttaattcactgtgtgtgttttatcgtctctcagtattaatgtagcagtaatatgcagaaatctatcggagaatgaactatccggtgcgattccggggagcattggcagtctgagcaaccttgagtacattgatctgtcgagaaacaatctctcgggaagtcttcccaaagaaatagagaaactttcgcatctcttgacctttaacatctcccacaacaacatcacaggagagctgccagctggaggtttcttcaacaccatccctctctctgctgtcaccggaaacccatccctttgtggctccgtcgttaaccgctcatgtctctctgtccaccccaaaccaatcgtcctcaaccccaactcctccaatccaacaaatggtcctgctctcacagggcagatcaggaagagcgttctgagcatatctgcgctcattgccattggcgcacgtgccgtcattgccatcggggtggtggctgtaactctgctcaacgtgcacgcccgatctagtgtttcacgtcacgatgcagctgctgctactcgctctgtc

SEQ ID NO: 67160 - DNA, 594 bp, Arabidopsis thaliana landsberg
ccctactcaaaatgacaatgtgaataccattataaaacttaaaatgaagatcatggatggttttgtttcttctcataatgacaatgtatatttctagaactatatgacctgtgtaacatagaaagaaagaatataggaacttgttattcgtatttgattataaaaaaatggtgatttagactttgtcggaatgaacgtcaaatgcttctacaaaaattaaattcagatactctttcttgaaacaaagaagatatttataagtaatctttgtccttagtcaaacagagtcagaggggccggatccttaatctttgtatatacatataatttgtatgcatatatttatatgtatctatattatccaatttcctcatatatatatactaattccttgtatcatttcgttgctcattcgatataaaaaatttctcttttttggtccttacgttacatttatatactgtgtgtatataatactgttactgtatagatttaatgttcaaaaggcacgttgttgtaatgttgaacttgttatatagttttcaaacgctttatttcctgatttcaatgaaattaaagaattttttgaagcct

SEQ ID NO: 67161 - DNA, 369 bp, Arabidopsis thaliana landsberg
ctgcccaccctgggggacgggtaccccaaacatacggtccagcggctgcaagaacaccgcacgctgtgggctgacccttgcgactatgcacctccttgagcatccgcacaacctagctccgccgacgctctgtggacctgattatctcttgacgtaccctaggtactctgcacctgcgcgatgggccaatgggacaaatgtaactctgcacaaaggatcctcactatccaccaaaggaagcgctgtgagggctgaaaacactgggcccagtcccgaaccctaccacgtgaaaacatctgacctagctagacccgctccgagagcgtggcgactccttccaggcgctggacctgactgaaactgcaaaca

SEQ ID NO: 67162 - DNA, 421 bp, Arabidopsis thaliana landsberg
  unsure (1)..(421): unsure at all n locations
ctggaataatggattttgcatttgcatatcacgttcatctttccaaaccaacaaatttgttcgnagggggggggattattattttatgtgtataactgacatttaagatttttgtaagagggggacttaacaacctccggttcacccagcttaaaccaaaaatggatcgaaaaaccagtaagctcagcccaaagatgtaagtctgatcagatcgacaccaacctacaagataaaaggaaagatagaggcaatctaggaagataagttaggtattcaaaaagaaagaaaacatatagattctcgctagagaaataaggaaatcaaaacatatcttaaactaattatatcactttcttataacaagagaagcacccttttgaacgggatatttggggtctaatacacaagatccacccgaaaa

SEQ ID NO: 67163 - DNA, 400 bp, Arabidopsis thaliana landsberg
  unsure (1)..(400): unsure at all n locations
ccgcgctctgggggggggggtaatataccagtaaggtcgcggcactaattcaacagcagcgtcagctcttcgtcgatcgaggtgatgcccacgctgcttttgtaatcgtacagcttcttgttggcgtcttcgagcgcctgcgcggcggtcgccgcctgctcttgcagtacggcgatctgcaggttgttatagactnnnnnnnnnnnnnnnnnnnnnnnnnnnnnnnnnnnnnnnnnnnnnnnnnnnnnnnnnnnnnnnnnnnnnnnnnnnnnnnnnnnnnnnatcatgccggcatcggcgtcggacctggtcttcaggtccttgtccagctttttcagcgcggcttcgaccgggggcacacccggctgcggattttgcgcgattttcagataaacgcgcc

SEQ ID NO: 67164 - DNA, 548 bp, Arabidopsis thaliana landsberg
ttaggtgcgacagcatctttaagtggcatttctccatccttgtgttttgtatccttcttccctaattctctcgggtactgggctgaactgaaatcttaacaccaaccttctgcgcatttccagagccgttcattttcttcgtgctcgatgactgagtaacggcatcccctgattaaacaaaacagaacagtatcagtttagcatgactcgaagagacattgggagtaagaagccaaaaaaaacataattgtacctgttgaagcaagagaaactttcagtgaatcaacatccatagcttctgagtaagggtccctgaaaattgcttgacaacagagattgtgaaaagaaagatccacacggagtcatggaggttccttcacaaaccagagagtgaaacattcaagactataccaatttgagggaccgcctttgaaattggcagcttcttgttgcttactgcttcttacttcctacgcagagagctttagtctttcaacatgtgctagagatatatctgcagctctgtgctgatctgaggacttcctatg

SEQ ID NO: 67165 - DNA, 1913 bp, Arabidopsis thaliana landsberg
aaaatcaaacgttgaatgtggtaggagcggagtcactataattcatgcgtcaatattgaatattggatacatgacatggtttctattaattggacccattctctgattttttggtctgtttattgaagcagaattatttattattattgttataattgatgcctttgttttgttcgaaaaatcaatgctacattaaataataagagagactagtgtgtgttgtcgtgtgtgtgcttgaccatccccatgcgttagttagataacgtgattataactccgtattactttaaactatactaacaatttgaaattttgtaacttcatctataatccacattctgatgagattttccagctctttggaattgttaagtactaatagccaaaagtcatgctaaaacaaatcatttttttaatttcaatgaaattctaaaacaaattgtattttctgtcgttaatcaaatttattaaatgagattaaaacggacacctagggtttacaataccatcgatcaataagaatcgacagttaacacttaatccaataaagttggaatacgtagttctttaattaaatagatgtccatttatagatgatacaatattcctttatttgaaataactcccaattgattgtctattaaattttatatcttacccaatggaaatactatgaaagagagtgttaatagcctatagagtgctagctctcaataccatttgttcatctctcaaccatactagtatttttctgcatttaattaagaggtaaataaagtaattttcctcaatttcactgtatattctaggaaattgtttgactaataaaattgaataatttcataattgtctagctaccaatgagaagtactagtaaagagcggagactacatagcagtgaaagttttagggtctacgatcctagctttttaggcctgcagaagctaacagttacaaatatctgtaaaaataacctcaaagtgaaaaggaaagaggaaaaaaagcagaagctagttaagagaaacgacaaaagagtctgaatttatcgaaagaacaaaaagagcagaaaaatgtcacatggcaatagtcgtggcttctgtgataacggtacagagtaatcggatgaagaaaattaccaaaaacaaacaaagagaaagctctaacgtcagttaaatctgtttcttttcaccaattttttttttttctctctcacagtttcatgaagaaaaaaataagattaacacattgaagagcgtgtaaaagaagaaactggtaaattgcattatcccaattcccaaatagagatttgtttggcttttcctctatttttcattattcggacaagccacgacacttgtcttaatgccaccaaaaaaaaaaaaaaaatcactcacatcatctctcttccctcaaagttctcaccttttgagattattacaaagaacacaaaagtacagtttctttattcccttttttgaacactttaaacatcatcactcttgaaacacttcaaatctccggtcaacaaaaaccatgacttcaatttcttaaacaaaaagtttcaatctttttccaaacaaaacccatttcagattttgttctttgagaaaccaacatgagaaagacttctgtttcatctaatagctttggtgggtttttaagtcccggagctccgagttacgctgacaacaaaggttggagctccgagagagttcctcatccttcctccactacttcctcctctgcaattaacggtggtcgtcgtcacatcggctcttcttccgctttaacgacgccgttttacagcggcagagcaattccttcgaaatgggaagatgctgagcggtggatttgtagccctgtgtcgacttacccacaaggtgtttgtttaaattccttcagtgagtctgaac

SEQ ID NO: 67166 - DNA, 649 bp, Arabidopsis thaliana landsberg
cccgacagcactgacgacggcgaagccttccgtcgccagataaaggaattcggtctcgaagaccgtgtcgaatggcatggacatgtctcgactgaaaagatgatcgagttgtacgcgggcgccaaagccgtcattttcccgccattcgatgaggacctgggttatgtgacccttgaggcgatgattgcgggaaagcctgtcataacgacaacggattcaggcggccctttggagtttatccgtcatgaaaaggaaggccttgtcgcaaaacccaacgcgcgttccctcgctcaggccctagatcgattccagtcggatccgtcacttgcgccgcgcctgggagcagccgcccacaagcggtatttggagctttccctctcttggggaaagattattgagaaactgacgcagcctggcctcccatgacccccgtcatagactgggtgtctcccgtcagaccccaaggcaccgatattgccgaatacacgagccgcgtccatgacgcgctcgcgggtcgctacgtgctcaatgtcgtggaaaacgatcgcgcacgagatctgtcggcgttcaggttcgagttcggaccgatcttcaacttgggcaatgatgcgcgctttcatggcgcaacgtttgaggcatgccgagcgac

SEQ ID NO: 67167 - DNA, 504 bp, Arabidopsis thaliana landsberg
gcggctgatcccgtcagacgccagtttggcccgcagtgcctcggcctgaaggccgttatgccccgcgatttccttgatggcatcggcgatttgcgcatcatgcacgacgatcttgttacggaggatttcctgcaagcgcagcttctcgtcgatcagctcgcgcaggatttggggcttcagacgtgccaacacgtcgggcgacagcgacagcccggtggatacagcatacagccgggcgcgattattgacgtcgtcattgctgatcacgtcgccattcaccaccgcgacgatgcgcgtggtctgcccgggggccgcgggcacggccgggtgctgtagacgcgccggcggatgggcccctggtggcgatgtatcggtcggcggcgcggtggcagccagcagcagcgccagcgctggcagtgccagagtggataagatggaccgcaccaaggatcgaaccatggaccgactggagcggcgtgaaagcagggcgagcatgatcgggtc

SEQ ID NO: 67168 - DNA, 739 bp, Arabidopsis thaliana landsberg
tggagaaggttcgtatgcaaatgcacgaggggagtcaaaaaataaaatagttctaaggttgatgtgaaaatataggtcgcccatttgagccgaagggcatctactattgaactacagaaataagggtgggtccgccctaataattgtcagcaagatttacgttaataattaatggcagggatggcgatgtgtgccatagggcctggtaagccacaaccatccatagtcgagcggcgtgctgggcagaaaagcccaggagttggccggccacactcctcctccagatagttgagataattcttcgccatacaattcatagcttcatgctccatggtttccttcctccagcttagtttctaccaagcaaatataatgccagtagatgcgtcaacaacaaattcaacactcattgcttctcttaatcgatcgctactttcattgttcattcccatcttaccttatttgacatttcaatctaggctgcctgtgcctgaaactatcaccacttggcagaatggaagttgtatatattactggaataatacttattatgagttcgctcgcgtgactgatccagcaataggagcaactggagagacagagcagtcgttttcctattctgggctgagtgaaagtcgagtggaagagtagggagacctgttagggctgtgaatggctatgagcctgttctagtattggatgacgtatttgggaggactattgaggatccagcaacaga

SEQ ID NO: 67169 - DNA, 423 bp, Arabidopsis thaliana landsberg
agtgaccctaatcacagagatgctcacatgaaacaccaagacctggaagaattttaggtatcatgagctaacagtcagaatgatggcaaaatcttctcggaagacaggaattgtcaatgcttcatagcaaatggcctatgcataaattatatcttagactagattgaaaacattgtgaaacgttctgttggtcgattgcaccaagcctctaaaattacaaccctctcaaccataacgacttcggcggcttaagatcactgaaacaagacagatgagagttttctaacaggaagaccccaaccttcttactctttggtcaacttcttggcgctactcctcatttccaacacatcaccactcaattaacttgagggaatcaacatgaaattctgttgcggtgtgcgaaaactcaccttaagaacc

SEQ ID NO: 67170 - DNA, 732 bp, Arabidopsis thaliana landsberg
ctttagagcaaaaaaaagaagtattatcatagctttgaaatatatagggtggagtagtgaaaaaaaaaatatagggtggtgaacactattgattacatgatatagattattgagaaattcccaatatatccacataaaaaaatttaatgaatgagagaatgtgaaaatgtgctatttgaacccaaaatcttaatttatttaattcaaaaaataaatgtgctatgtgataggggttataatacctcaaaaatatatttactattatgctcaagaggcattctagttaaagatttttttttatgtaacttatttaagtactatatattttaatattttgggttacaaaaaaaatatatcttacaaaggaagtaaattaaatgtgagcttgaccgaaacataacggtccatggctcccataatagtttctttacatttagatgaaatgaaattataactttggtcttgagttgaaatgtctggtaataaaagaagaaaatggaaggcaaaaatgaaggggcaaagctacgaaagtaggttacatgcaatggtacgacattaaagttgataccagaattgtcgcctctcttctaaacgcgtgggttttttctctgcacaatgcgtctctctctctctctctctctctatcaatggcaatataaacaatatattatgtttgacttttttcccacacgaacgggccatcatgttatataatgtgatatcgatcgctaa

SEQ ID NO: 67171 - DNA, 2172 bp, Arabidopsis thaliana landsberg
agggcaaaccctggctatactttatattgtaggaagttaaaatagtgccattaaagattgtggttaatgtttacctatcagtgtgggcatgtgcaactctagcgttccaattatcattggcattgacgaatgaaatagccttctcaagtgtgctacgaccacactggacaatactatctgccagctctgcacaaggcattcgaccactgaagccagcagcagtataaccataagtcacatttgctatcagctttaaagcaagctgcctcgcattaaatatctgaaagaagacactgtataccatcaaaattgcaaattttatcttcaaaccaaaaatttggactctgatcaagataaccatacccggtgaagaactgcttctgaaggagtcaactttttcattgcttttttcaccattattcttgtagacagaatctcctctagcagcctaggtaaaattcctctacgcacctatagaaagaagagaaggtgactactatgcttaagctaaataagaaaagaactcatcgatgcagaaaacaatgatgctttcgggaaataagatcattgtttgcattgattatgatgactttaaatacaagatttaatttgctcaagaaaaacaatgcacattacctctggtggcacgtacatcacactgtttggggtctgtaggatctgatttaaatcctgaagaacatcgaggtctagagagtatgagctgaccccaagggtgttcatcttcaaatgtgcaagttttccgagacatgtagaaaagcacagattatatgctataatcattgaagggtaaagagattgaaaatccaacacaataacaggatcatcgtaaaaggcagattctggttccatcacaagaggtacacattccatagctggctgagaggcaacctacatgatcacatgatttagttaggagaatactaatgagtaagaagggcgtgaaaagattatgaaagctatcatgaagacaaaacaaggcatgaccagtccattgaataaggccagacgactggttataatccaagaaacgttaaaagtaaatcacttggaagtagcagataaaacgaacctgttggtttcctggagaaatagcaagataattttgtgtatgtgctaatctcaaaagcatggattccactctgtactgtgaacctcgggagagaactgagaaaaagtctataccaaaaacacgagcaagttctgacgtacgatttatctgcaaacaatgatttagtgggatcaacaacttgcagataattcactatataaatcaagttctaaatgttacataccatgtcaagttggctcattatctcaaggttcaaatttgctcgccgaatcacatattctatgcatctatatcttgcacccgcaggaccacttgaaaaccattctgtcaataccttataggggattgatggaaccttctgcctcaaaacagcctctgacacagcttcaatcgtgtacatgttgagtttaacttccccgcgaatcaaacgccatgcattgagaacaattctacctccaacatgaacaccactagcatgtgtgcggccccactcgtcctcaattaccacttcttctacttgagcaggattagctaccaacggatctggcagcagattattaccaagttttctcttattatctgaattgtttgttgtggtcggagatggcgtcctagatatattattgagaaatcttataccaagctgtgcagctctttcagctagaaaaccaatggatccgccctgtatatcccagcccagaagaacatctggatcccatttacataaagtctcaataaaatatctgaatagttgcctctcttcaaggaatacagacaacttgcatccagataggccatcaacatttctgtagtgagacaacaataaaagcatgaatacgtcaggcgcaagatttctaagaaaccaaaaaaaaaaaaatctggtatattacctctgatcaatgctatctggactaaataaaagcacaaatacttcagctacaaaactatcgtcattctgcacgacgagagctataacattgacagaatcaaatcgtggctcaggccccaggtcccctctagactctgcatgaacctataagtttatagatattaacatgtatcaatgaaccttttcgcagaag

SEQ ID NO: 67172 - DNA, 725 bp, Arabidopsis thaliana landsberg
ttatatcacgtgtagtgttactattatgcgacttgcaaaaagttacaagttttgtgtgatatttttgttttgagagaataattaaacacacagaaaatgaaaggatccagattaagttactctgctaccaatttattaaataagttaattatatcattatcgtctttctttttcggcttcactgaaaaggctaaaacaaacaccacataaaaagatcacagccttttgaagtaggagcggtgctaatcaattaatataatactcagctaattatacattctctaattaacatactataaaacatatactttataattaaccgtagtatttctcgactttgagaacactatagaataaatgaataatacggatgattattgaagacaaatatgaaattcaatttttttttgggggtctaatgttaacttatgaaactcatgattaatacctaaatacagaaaagaggagatttcttagggctttctttctataggataataatcaaattaaaaacaagaacaatctttaatcacgggtccaccacatcaaaagctatatataaaaccccttttagtgaaattattttcaacacgttttttgtttgatatggaatttattttccaagagttctttccccacagatttttaatacggtatttaaaaccagctaagctatagcatgaaaacaaatcaacatataattaatgcaatcaacattatgtata

SEQ ID NO: 67173 - DNA, 373 bp, Arabidopsis thaliana landsberg
gtacttgatcatttttttaatacacaaggacacattattcattgtatatacacaggatatagctttcagggtatgggcaactgtgtaaccataatacacgcctgcttgcaactgtacagcatagatacaccgttaagcacgcatacataacactacgggtatataaatgcatgtggaaagtagagcctaatacgtgtactgcatgtcaactatagatagatgctcgtgggatggcctgggctttgtctaaatacaataaagtgagggtcaatatatacatggcccgaaaactaagctatcttcgactagatgaccggggagctctatccagttcggatcggagcaggcaaaaagcattacgtaaatcttactg

SEQ ID NO: 67174 - DNA, 140 bp, Arabidopsis thaliana landsberg
ggaccggctcaagggcctggacaccgtcgccgaggtcggcgtgggccttaccgacgacgccttgtccgtggccggacaggcccgcgtcgtcgccgaacgcgggcacggtccttgggcccgagccagcaaggcgcgaggag

SEQ ID NO: 67175 - DNA, 431 bp, Arabidopsis thaliana landsberg
aaagagctgctcaacctataagcatttttctgtgcagagcataacatcctgggattaagcgcgataattggaactctaaaccacagctccactctagtactgttcgtttgcactattctattatgatactgtactgcattctgttttgccgggtgtagctataaaacatgtcgagatcgtacacaagtctttatattaacagcttagctgatttgccaccctgaaccctgagaattcatagtgaatagagtgtctaaggtcgagactgcttgaatatgatctgagaatcaagtcataggagtctaacacaatttgcttgcggattcaatgaacacacaatccagatgagaacaaccatatgattctatgcgtgcagacatctcggagagagagagagagagtgaattcacggatagcagacatacatattc

SEQ ID NO: 67176 - DNA, 1488 bp, Arabidopsis thaliana landsberg
ctctttaacattataaaccttatctatttttgtactttttaatactatatatatcttagctttcccctaatttatgtaccatttaagatgatataaagaaatatcatttatgtagtatttataagttatggttatgaattgtgtttgaaataggttatgaatttgttacgaaattgactgagattttttagagtggactgactgtctacatgtcacacataaatgaaaatttccattcaatgaattttgtgaatccttgataaaaacaataaagagatattgtggtttaccaagaaaaaagaagaaattaagtgtggtttcatctaaaagtaatcataatatttttttatatacacgtaaatgccggtccaaaacttcttgggccacttaacgtattactaggattgatttctcataagctcgttgtgagataaaatacaagtgtgcatttggcccaaacagaaacaatgtcgtagtggtgatttaaacatgtgcttataaggagcaaaagatcactataaattggtaaagaaggtgccatgcaggatcatattcgccgaactaagttgacctaaattctatttcttattgtctaatcgtcttttttgtttctttcaagctaggggttaattataacatcatatgcactcgcaagaaattggttctcacttttaagccaccctgtccattttctttcatatggtctatcatgcattctaagtcgcctttttttaaaaaaggtaggagtttttcgttgttgtcgggaaagtagtagtgtaaaagaataccttatgccatatggaagactggaagtcacaatgctatcaatatcttcacgcgaccgtatcaagattttttttcctagaagtcacaatgttatcatagctttgaatgaattcgattaacttcagaaatattgaattatttcacaaaaacagtaattattttattaaaaatatctattagtttatgatatcagttattttcatcttttaatcttcctaaattttcaattcgagattatatagatcggttttattttgagattaattttttttgcctataacgtttacacatatttttttgtttttgggggccaaaaacgtttacacatatatctttctatggtttgcttataatgcgattcgaaacatacaagacgttgttgatgcagacacatagctgatttgaagtcttcttgaaagcaattgcttataagattcatcggcgtcggtttcatatccctcttgacaattacaaactcattgactttgatatataaggtaagctctaacttggcaaagttcttaacataatttcgctcatggtttggtcatgttttctaatattataaaaaattaattatcttaatataaaatattattttattttttatttagtcagtttatttcataaagaattttgatatatatatccttttgatctagctaagatatcaattcgattgtagatcaattttattcttga

SEQ ID NO: 67177 - DNA, 1085 bp, Arabidopsis thaliana landsberg
ttcgttctattgcttattcctctgtggtgttttaatgttagcagactttgtctttgcctcctgcttctccccgtgaatctcagtcgccttcaagttctaatggagctcaacaggtttgttctatctcaaactagagttttggattagaaactgaacttggtttgagtgaatactgacattacatttgggcagtcacgtggtccacttcagcacactcaatctatgtctggtttgaaggtaaatattatttccctcttccctttccctcaagtctcaaacatcagtatgggtcaaacctaacctgaaactatcttttataaacttgggtctcaggagataagcgaaaatggaacacattctggagaaactacgggaaacacgagttctggcctgtttagtatgttctcaataccaagaatagggaggactcgaagtgtggtcaacacagtgcctactaactccattggaccccaatagtcgtttgtcaatactgaagagagagtttgatcattcaaatgatcagcaagccagagatggttaagtgctagtagaggatttgaatagatcatgctgcgtctatgcttgatcccttgcttagtgtagacaatgtgataaatggtgcataatttttgtagggatgcagcttatatttaattggattatatgtcacaattaatcagtatgttgctctgccctttcgtaattcagtttatacagagaggtcgacgatggttttgtatggccgtctctacttttccttcttttttttgtattgaataaaaggctggtccatttggctatgacattatcatctcatcatcttatcatcatcatatttttttttttttttttttccattgagaaacatcatctcatcttttattaagttaaatgtgagagttatgatgtgattatgctttaaaacaagcaaagtaactgggacgatacaagaccattatagtagcaagagatatagtagccattagacatgttgaaagttgtttccagcaaccttttgggctcatgttcctgcaagttaacttataacctaaactcattatccaaaagctccttcaacagaacat

SEQ ID NO: 67178 - DNA, 865 bp, Arabidopsis thaliana landsberg
tgccactaaattacttttccaattgtctgaaatttaccctaaaataggctaatttggacggtcggaggaatctctttttgtatgtctagttaaagtaactaaagtaattaaaccctctttaataaaaaaagtaattaaacccttaattaattatttgaatttaattccaataatcacaatcaatggaacaagtatagttgctctgctttgtgttgaatagaactaaacgataatcactttgagttttgactaatctcctttttgtttattatcataatacaactcacgaagctcctccccacgtttcggaataatcattcactttgatattatacggtataattgtacacacaaaaagaaaaagaaaagaacctacgaggaaagagggggaggtcataggaataaattaaagagataataagcagagtgcattgtacaaattgcattttttggggtcctaatgtaagagaataataagcaaagtgacacaatgtcatttgtgtgtatatggtataccacaatattgtatgtattcttttgtcatcatagatatagttaagtatgttaacttattagagaaaggggtgtaattaatgtttgtttgaatgatatctcattttgcaagtagtgttaattaattatatttataaatgtgatatcatgtcacaattttgaattagacttctttctttttttttagaattcaacttcacatatatataattttaaattatataataaaaatttgaaaatatcaaataaaatgaaaaagaaaacaatcttaagaagaaaaaaaatcagtgtgaagaatattaaaatttaaaattacatatatatatatatatatatatatataaccgaaatt

SEQ ID NO: 67179 - DNA, 2030 bp, Arabidopsis thaliana landsberg
ccatgtgtttgacaactagataagaacgtcttgtttttgtggcacaatttaaccaaatgctgggtgggggtattttagcattatcgaagattactaaactaaaaaggccacgcacattgactcatcatctcgtgggcttagacatatgggccttattttaatcgggctttacaattaaaccaaacagatataaaaacaagcaaatcctgacctggcagcggatcttcatgtgtcatcctcaaaaaccatagaatctaagataagaagataagggacacgcgtcaaaaatccaacacacagaaacacattttccccgatttactaacgcacaacaaaactctttcattctcttcttacaccattaatccagagttccgacaatggcttcagcatcagcgacagctactcttctcaaacccaatcttccgccgcataaaccgaccatcatcgcctcctccgtatctccgcctcttcctcctccacgtcgcaaccacctcctccgccgcgatttcctctccctggcggcaacatccacgcttctaacacaatcgattcagtttctagctccggcgccggtctccgccgctgaagatgaagagtatatcaaagatacgtcggcagtgatcagtaaagtaaggagtacgctttcgatgcagaagacagatccgaatgtggctgatgcggtggcggagctgagagaagcgtcgaattcttgggttgccaagtaccggaaagagaaagctcttctcggaaaagcttctttccgggatatatactcggcgttgaatgctgtttcaggtcattatgtgagttttggtccgacggctccgattccggcgaagaggaaggcgaggattcttgaagagatggaaactgctgagaaagctctcacaagaggaagatgaaaaaactgcagtcaggccttcttctccattttcttgttgatgaaaattttattttcctaaaaatgccaatcgaattatatgagaagagaaacttgaattggctcgcctgcttttttttttcattcctgtaaaatacttaatgttctgcatgataattgcttaattatcattatcagagatacttatataacttatatcgaattccattttctcaatgattggagctgcttcataagttcgattaactctcttctgttgtactatatacttccctagaaaatttgtctacactttctttagtttttgatagaggagaaatgaattacaccattataaaatctccaaaactcctaagtcacatttctgcataattgcattgaatgcttatcaacctaaaatgatttcaagtctatgtaaagactttcctatgggccatcaacaaagcccacaaagtgtgtagtttggtcattttatttgtaggtgacaacaaactccacaagcattccccattccaacatattacgtgcaggtccacacacgtgaacactaacacatggctcgtatttactctatttatatattataataatatattcattcaacgcaattaacaacaacacgtgtgcactagtaatctaccattatactgctgacctttccaatacgttaaaatcaaattgatgggtgtagtaaataatgaccgtgtttgctgctgactagtgtgtttaattacgcctaatttatgtattttggtcaatagttcattagtataatcttgcaccctctttatttaacactaatcttgcaagtcaacattcgctcgcctcaccaaatgcaatatatatcgtactccatacgggttacaagattaggtttcatcggtgagtactaataatatacgttaatgaatctatattacggggacggatacgaattggataacaaattaaaagtggtcaataagttacttaaaccagtaaaccctagcttgtgataccaaatctctaatttctgaatatgattgatgcaaataatatgtaaaaaggattctaaccaataaaatgactaaactaaccaaatttctaagatcaatttacctcaagataacaaaatatttataaattt

SEQ ID NO: 67180 - DNA, 1082 bp, Arabidopsis thaliana landsberg
tataattttcattttatataatctataaatgctactatgctcattatcaaaatactttactattactttctggttttaatattcatcttaacgattttcaagtgatatacttttttttttaatttataaattatgagcaaatgataagatattttttaggatagtttcaactaaatctgtaacaaatttcaccaatctatttaaatttcaattgtctatgtatgcgaacatcaagcaataatctagtctccccttaagtatagtatgtatgtgctggatttgaatttgcctaagatattattatgtgtactttggaacggttatttttgacatctaatattcctatctatgtaaatgtggaaaatgatataattctaaatttgattagttgtttccttggaaatttgggagtaaatataggaagctttgcttacctttatcgcaccatctaaattataaagacttaactttttgcccctcaaagtcaaattatgtccactcatttttaattattacaatttgcatattaatgacctaattagtggatttcattcgtattaaaaacatacttatcgatttatctagagacaaaacagtaatttaaaagttacacatgcttcatattcccgcctggtatccattttaggtataaaagagtcacagttattgttgactctgtggacttttgatttttcccttatttttaatattaattggcatttagtttcctttttttaatttattattctccacaaaacacaatatgtaattaattgaaacattcctaatatcatttctttaatatttcgtttgccttcttctactatttttattcacactacaaatcaaatcacatctctcttcttctttttgcttttggccttcttcttcttcttcttcttcttctcctccaagaacactaaaatatttttggatgattttgatcggagaaatataaaatcttctcatctgatctatcaaaggaactcagtttctcataccaaaatgaatctggtacatgctcattttttcttattaatttctgcagtgttattttttgttgttgttgttgttggcttaga

SEQ ID NO: 67181 - DNA, 359 bp, Arabidopsis thaliana landsberg
ggaacaacataccttcttccgagatactccatcagaccataaagaacaaagtggcgatgtttcccttttcaccatcatgatcccattagcagaagaaatcaagaaaccaacaaactgatcaatgtgcaagaacaatagacattgaaatgattgcatttgataatggtttctgataactatcatgatacaaaagtaaacattggcagaagcatatagaacgtagctaaaggatcaagatttgagaagtgaaacttgcctcggagtttaacaggaggatagatttcaagggcttctaataaccttagctttaattcaacctgtgactgcttcttggaagcaaatccaattaaagaggaacc

SEQ ID NO: 67182 - DNA, 608 bp, Arabidopsis thaliana landsberg
gacttgttcttcctgatatcaattatatcaacatcatctgacattacatcttataacaaatgattgatctattttcaactacaaatacaatatgtagttggacttaatataactaatgattaacttactctttttgttgtttataaaagagatatttaataatctataacaaatcaatccagtaatatatggaactcttgtgtctttcatgatttatcgttaattgtggagctacgaatcaatttcgaaacaaatgttagaatatacctctagattgagattggccacaagactgagaacacttatctatcttgtatttttatttttggttttatatttttgtcaaatttatttttgcttttatcttacgaggcagtttaagtttaaacattaacaaacaaaaacaaaagaataaaattatggtcaatataattatatatatatatatatatatatatatatatatactatatttaatcttgcgtaaagatatggtttgattgattcaacacttaaacaaaacctttaatatgcgttgctaagctgtccctatcacaatccctatcaaattcatcaaattcatattttgtagttcctctattattatt

SEQ ID NO: 67183 - DNA, 564 bp, Arabidopsis thaliana landsberg
ttgaatgaaacagtttacaccgaaataatagatctctgtaggatatgaaaaatgcgcgtatgctcgagtgttttgttgtaagtacgcaaccctaacggccaccaagtaatctgtcactagaatattgcaacaaaataaaaaccataaatataactataatgatctactaatttattaagttaattaacatgaaaatatgacagcttttgccagaccttgctcgtataatcagtccagataacacattacaacgaaacatataaaataacttttttcaacagaaacgattataatatacatctaaaataattaacagttgaaaattttgatagacatactatggatctgaactaaaataattacccatgtatcgcataatgttaataatttactcgtaaacgcgttatttccatgaaacattaagcaaaactcaagttaatttacgcctggcattgtaacgcggataaccaaaaagcaaattacgcagagtcaaatcatatctaaagaccaatataaacataacacgtgtcaatacttaactgatctcagattaacatcgtaaga

SEQ ID NO: 67184 - DNA, 410 bp, Arabidopsis thaliana landsberg
gaagcctgcctgtcaatattacttttgtcctggtgaagtgcatagataaacttgttggtcgcatcaaaaacacctggcgttggctccgggatttgtatgaaaaagtaccgaagagccctagacgccataattgctatctcacccgtcactatctccaaaagttggcacatagctgtcatatatgagttcaccaaccttatctacggaaaccacaattgcatctacagactctttgagaatgcgtaatattgacccgagaccaccacttctgctgccgactattgttatataccgactgaatccggagttggatcaagactaaatatccatatcctttaaaaccgatgaatcattaagagctcaccggccaaacattagatacttataaagagattcgacgatggcagaag

SEQ ID NO: 67185 - DNA, 556 bp, Arabidopsis thaliana landsberg
ttatctatttgacatagatttttcagtacttaaagtcgtatctacatgtgtttctgtgtctcttctggaaacaaattagagatattaataacaataattataatacttaaaaagcataaatcacaaattattatttttctctactatatatattgagatcactcccgtctttatcaaattcttcttcctcttacattttccctatccaatcgatctcacgcagatctggtaatcttgatatttgtttgtacttcttctttattattgtcatgttttgaaattgtctatgtgttcttttatcacgcatatatgcatattaatgacatcaactcatcttatcaatttcattcttttaccttttattaattttggtagatctcgcattgtcatacaaatctggctatctttatatttactaactatatttgtcttcttttttattatatgcttagaatcgtgtatatatgcatcgatcaatatcttttaaaaaaataacttttgttgttcataaactgcagatcaaattcttatcaaatcatttagagaccaaaagaaa

SEQ ID NO: 67186 - DNA, 427 bp, Arabidopsis thaliana landsberg
cgttcttatcagcgagatctgatgaagaaacacgcgagcgattttacggcaacgtcgtgaactcgtactgctcttggaaacggtgaaggaagtatcgctaaaatgttcgatcgagttctggagaaagaattttccgaaaacgattcgcctgaaggttaggtttccttcttcttaatcgatctcttttgattgaatgtgagaaaaaagtaaacggaaacattaacaatttattctataatcatgttttcttttgcttaggatctgatggagctagctttaacagcagtgttgctgatcaacaagtaggttttagttacttgctatagtttttgatgttcttgagctctggattcagattctccctttgttgaggtttccaggctgaaatagatacctgtgcttcagtaactcatgagaagggcaaatg

SEQ ID NO: 67187 - DNA, 729 bp, Arabidopsis thaliana landsberg
aaataatatctctttgttctatttcttaaaaaagaaattagcttgtagtacttcaacgtatcttaactctttagtctttagtaggtatatatcatctatttatttatttttatattttttatattacgattatagtgtacgtacgtatttattaatcaaaaataacttggtggaagtaaaaagaaaatgattttttttttactcagtgatcagttttacgtttattcaaaaataaattgtagtttccttcttaatattcaagttatatgactaaaaattggtcggttaatttactattaagattaatcggaaactctagttagatcacgagataatcatcacgtggagaaacatttggttcttgtcacgtggagaaaacgttaagcttattttttacttctttattatatttttgaggaaatggttgaaagaaagagagtgtttaaaatgtgaatgcgctcgtagttaggtggaggttaatgggtaggaggggaggtcatatgtgtattagtgatggataaaaattaaaaacataaaaaaaacttcaagctgtaaataatctaataaaagaacatagaaatgtaatcaaggaaccatgtaactaaataaatactttcgatgcaaatagcatatttgtaagttccaagactagctatcctctatccacatgttacattgttttgtttctttttcacatgcatatagtttttaaaataattatctagatgg

SEQ ID NO: 67188 - DNA, 990 bp, Arabidopsis thaliana landsberg
ctgcgtccttctgttgctcgacccatgagaggaaggcactgtctactaggcaaaagatgttgacgtaaagcaactggtattgcacgggaacatatctgaagtttgcaatctgaagaagtggccatgctccgccttcaagagctagagccggaagaaaatctctcttgagtccttctttcacttcagctgtgttctttcctgtggcgaatcccatgtatgtgaagaacaccagtagatctataggtccaaagataagaccatccattgcaactttggcagctacaaaacgtgttgactttggtacatatcgaagcttcagttttatgaatttatccaagccttcgtacctgtgcaaccgcaaatagaacaatatcaggtttatcgatctaccaccatagacaattctttatcagtatctgattcagtgtcactagtttatgtgagaggtaacacgaggaaaagctataactaaatgatctgagatcagaaggaaacaaaccaaaagtggccaacaggtccgacaaaaccaaatccaaacatgctcgtgatagctactcgcttccagttgactttgaattctgcatctcgcttccagttgaccttgaattctgcatctgcgtcaacatctttattcgtttcctgttatattgaacatggttttagtgcttgagccaaggtaggtcaacagaatctcaatatatagcctaaactcagaaacaatataccatgacctctaaaggcaaatgaattttagggttgtctcgcagcagaagatgttataagtaaagaagtatcgcataatttcataaatggtaagcagtagactagagctgctaatccataacggcattatcatgtgttaccaatggaccaaagggcaagttatattgcaatgttaacatgcaagtaccacaccaacaacatagagagtcacaaaacacattgtccgcactagtatcttttacgtattggtatcaccataccatataa

SEQ ID NO: 67189 - DNA, 2514 bp, Arabidopsis thaliana landsberg
ttagttcaaacctttctcgaatgctctcaacattgggtctatcttaaaagtgagcaacgggtttaagtctttcttatctaaatacagttagttagctataaatagagtagtttgcttcgattaatattaccacccgtagtttatctgaagcatgcatttgcagcttactataaaactccttgtatgtgtcacacatgacttcctaatttagatgttcatcaagagaattgtgtacctgatttttcgacactgtggcggaggcccagtcttgttgaggaccttgaggttgccttggaacagtttcatagttgacataagtaatccttctggtgtcttcttgcctactcacaatgttttgagggggtaactcccgcaaaacccataaaacgaaagccaatgggacggtggaacctttaaaaagcgttcttatcagtaaccctgcatttgaaggtcttcaaaacaacaaaacgaaagaaaaaaatcttcacctatgaaatagtatatgatcagaagaaccaatgctttgatgccgtgtaatttgcttgggttccaatgataaaagagctgagatcaaagattggttttggttaaatgtatcgacgaatgttaggtttcggtttacagacatacttttttgagtgataatgacttactggaatgtgtgtgagaagagcgattaaagagctaacagtgaagcaaacaactgagactcctgctagacccgatacctataaatggttaaaatgtactttcagggtaaggattcgactgacatgtgcaaagaaagaaaagcttgttgagccaaagaatcattagttacctttcgcatctctgatgaaacttgttcagaccgcacctttcttagattaaagagcagacgcaggcctaaagaacataaaagagtttgtgaatatacgctgttcaatcatagcaataagccagtaaaccactgaccaaaacatctcacgaattgctagaagaaaaatatgaatagctgaaaccagaaaagaacttaagaaatcacttaccatagaagcagattcctcctccagtgattaggattattgcagcaaaaatatcgacatacacctatataaggaagtgagtttatcataaaaccagaaaaaatatagacaaaagtcttctatttctcgagcttaagaacttagtgaaagaggaaatatcaatgtgcagaggaataccacatacctcagccaataatgaagaattcataggattctttccggaagcgatccagataaggattgcaaatgatatcattaagatgaacacaagaataattgcctagcaaaaaagataaacatttttataaagatcatagaaatgacttggctagaggttaatgcacaaaactgaaagtatcccatgccgcatcaacaaacttctgccgggttccaacatgaataccatggaaagagcagcactttctacgatcgcttgcattcgaagaacctggcttgctcttgcttttttcaagcaacacttgttggatgctattttcttcatcatcatcatcatcctcctctccatttccctgatggcaaacatctaccctataacatgaagaagcatcattgtcttatctcagatcattattaagataaaataatcagggacaacacaatatgatcagagtattgagaatatacataccagaaagagagaagcaggagaaaagttgccagaaacagaattttgggaaaggctgcaagtacaatttgattcatcagggaattaactataagacaaatcaatgaaaaacatacacaaaccttcacaaaggaatgaaatatttacccatgagtagaaaacctaatgcgttggaccaatgatgccaccttgtgcaagtcgctataaccgcagccacgaaataaataacagaacctgccaatatatacgaatagagaccttactcactggctaaaacttcccccaattataattgttcctgaacaacaaatgactgaggatttaccagtgtttgaagaagcaatcataagatgaagtacctgcaattttcatgatggatgtgtcagatacacgccatgaaaagtaacaataactgtaaccatataacaataacatagagcctaaattggttgggatgagaagaaatactttttgccgagtccatccaacttgtttattccgcctgtgaaatcgagataactgaaagaagtaggcagccaagataaatcttataagccaaaccccacaaaaaaagaagagaataagactttttttttattacttcaccgtctaaaactacataggaacctttgaaaagaacatcttaatctacacacatagcactttaaaagaaaaaaaagattctactttctaatgctaataattcatatcagattcagattccctgaatccaaatctctcattctacacaaacacactttcagctcgtgaagtattcatagagttgaccttttaaactaatgtcaccacatgaacacagacacacactctaagactgaaatc

SEQ ID NO: 67190 - DNA, 558 bp, Arabidopsis thaliana landsberg
  unsure (1)..(558): unsure at all n locations
cgtaagcagcagattcccaagtcttcgaggtcatctcggacttctttccctttatacgcccaaggcatggccactcgtgggctgtgcgccgcaagcgatgatccaagtaaggataatcaaacccaaggaagttataaccagttataacatctggatcagtctgattgatgatctcacagaacttctcaatcatctccacttcactcttcacttgatagatggaagcagtgaacggaaccttgagcttcgttgtatccgaagttccaactacctgtgctccttcaagtgcctccactggaatatgagcacaatctccaataatcactgcatagcgcactctcgatgctggatccttgtnnnnnnnnnnnnnnnnnnnnnnnnnnnnnnnnnnnnnnnnnnnnnnnnnnnnnnnnnnnnnnnnncgatggttcttagcataacactcaatatcgaaggagaggatggaaggcttgatattccatccttggacctccttctcatcgagtcctctcacttgatcccaataagcaatgtattctgccttcagcgttgatattc

SEQ ID NO: 67191 - DNA, 368 bp, Arabidopsis thaliana landsberg
gcaggatgatcgaccacaacattgtctgcttctaggcagtacgttatgagagcagaacaaagaggaaccatttaccttgttccttagaagtccatgtgcattgctaacaattagatgattggatccaaggcgtacttgtgtgcataccgacggatcaaatagttcgtgctcatttgaatacgagggcaatcagtgagtcggctgcctataacctggatgttctagctgaatttcttctttatgataattctgaagtattgggaaacctgctgcaagattgggatatgtgtacactgctgatcctgctttgtatttagcgcggtcgggatttacatcagggatcggttcgacaaacatgttgttgatgc

SEQ ID NO: 67192 - DNA, 125 bp, Arabidopsis thaliana landsberg
attcatgtatattaagattttgtttaacatgcattattgtgtaaaatcacatgtaagtgtaatatttttcttgtttataaattagtttaaacaaaacgaggtacaaaagtgagcttatttgtaag

SEQ ID NO: 67193 - DNA, 2387 bp, Arabidopsis thaliana landsberg
ggataacatatcgtcaacgtggcagatctaaacacgcttccacacgtgacactgtctcgtgtttattaggatttgtgaacagttgtcagttacttgttccacagaagaaattggaaagtgttctcttttttctccttctccgattagtcagagtctcgtctcgcgtttactacggtttggataaagaatgttgcgatcaattcttgatttttctgttttcttctgaattcggtaacagcaaattccaaattttgaggtacggtttaagtttttctagtttggtttttgtattttaggagacttgttgaaattctagggtttaaattgttttaagaagaggaatttttggttatggaggtgaattcgatgggactaaattgtcggtgtcttgagttagaagaaagggttttaaaaggtgaagaaaggtacactcacttagaaacagagttgcagaaacgaaacaatgagtttgaatcacttgaattgaagtttaaagaattggaatcagagaagttagtagttgaagaagagtcaaggaatcttaaagaatctgaggaaggtgcattgattgagcagatgatggtgaacagagcattggaggttgagaagcagaggattggaaataaagtttgagaaacttgtggagactgttcgaaagttagatgaaattggtgggtttagatatggagaatttgaattggatgagaatgtgaagttagggttggagttagctaggatcaagaatacagaatcttgtaaagtgtttaaagatgacttgactagggaaggattaggttatcatcaaggattaggtgagaagaatcgtagatcggtttattagtataaatccgcttgtgtttcgcttttccggtgtaatggatttgattttgtttgtgtttattttgtcatgtaggctcaccttgtatgaccacaccggttaaagactatatattagggagagacagagatagagacagagacaccatgtcttctcggagacgagtgaataagatgttgtcgtttgaagatgatggtcacaaattgactgatgtagttgatttatgtgatagtgaaacagagcagagaagtgaggaggaggaatttgctgatgttatggatactatagaggaggcaaatattggtgagaattatgaagatgaagatgtggaagcttgtgatgctaacacaagtagtcctctttctaggcgtaagaggaagcgggttattgccagcgatgatgatgatgatgctgatgatgatgatgaagataatataccgatttcaatactcaagaatttgaaaccaactaaccaagagatgtcagatttgtttgatacacctaacaaaggagagagtgagtctagaagattgagtggacaacgtcgagtgtcgtcaagactgaataaaaagagagtttctgaagaggtatctgcttcaacagagagacttgtgggaatcccaacaaccgataatgccgaggatgatgagacagaagaagaaggttcagagagtgagggtaagagtttagatgggtttattatcgatgatgatgatagtcaggagtctgtcagtgaaaagtctgatgaaatcggggtagaggaatccgatggagaagttggttatgctgatgttatgtcaaggttaaggagggagaagaaacccgagaagcgtaaatgggagtatgaggcagatatgttggcagatttcggtaaagatcctgagctttgtatgagaacggtttgtgttctgtttaggtttcaatcagaagataaaaaagtggaaagatcaagtcatgtctctaatggtcgcggtttcagcaaggttgacgctgtaaggtagtaactagcaaaaccctttttgatctgctgttaaaatgttttcttgatttacgttcttgaatgatgattaggggcactagcattgcactgtttctgacggatggagattccgcaggcgatatgaagaaatccgttgaggaattgaaagtttttgactttaaaggcgtagagaaatgcgaagaattagcacgcaaatactctaaacaactcttccagatctataacaacagagaagatccattctttactcttcctccatctccatgacttggagaattagctagtagtcaacagctagtttatggttatgtttttttttttttttgtggtaaattttagtcccgtttgagatgaaaaccagagattaatctaataggattagagtctaaatttactttttaggtgtaaatggaaggatgatttggattatgatgatgactgaaacatagttttgaataatatttactgaacctatgatctttaagcttagcttctgattacttgaatgtctaacacaccatgtcttaagttttctctgttcgttaacgt

SEQ ID NO: 67194 - DNA, 436 bp, Arabidopsis thaliana landsberg
  unsure (1)..(436): unsure at all n locations
aaaaccatcgncttattaaacgcaataagtaaagtccctataacgatttcagcaagattataataaccgatcgagaatgagctacaaaaacacatgtgcaccaggatgtccccatatcgcactatatgtcaacgcatatgatgcatataaccatagaagacgagctccgtgcgggaaatcaggggaaaccaacattacaactcgagaatctcgaggaaaataattgaagaccaccttgatgtctaagtaagacgactatagctcgcggaactcgcgtgagcctacatggcaagtccatggatatataatgaaaaagaacgagagttttggtgaaacaaatgagataaaatctgtgtaaggcacagaatttaggcctagacagttaggagcgaattagctctcgtaaactacatgcgaaactaagaaaacgtctaat

SEQ ID NO: 67195 - DNA, 709 bp, Arabidopsis thaliana landsberg
cctccttgcatgcattggaggaaagtggctcggcgacgaaacgcaccggttggatgccataccatctgctttttgaggacgctcatggcgaacttgccggctgcatgcccctttacctcaaaggtcatagtcgcggcgaatatgttttcgatcatggttgggccgatgccttcgaacgtgctggcggcaactactatcccaaactgcaatcctgtgtccccttcacgcccgcaacaggtccacgcctgcttacaaagcccggagcaggacgcgacgccgccgaagaccaattgctcgccgccgcactggaagtcgcaaaccgcaccggcgtctcttcgctccacttcacgtttctgccggagcgccaatggactcgcctcggcggacacggtctcttgcaacgcaatgaccagcaattccattggcacaatcgcggctatgcaaacttcgacgaattcctggccgacctttcttcgcgcaaacgcaaaatgatccgcaaggaacgtcaaaagcatttggaaaaatgggtgtcgaaagtcgaaatgggtacaccggggtgcaagattcttcaaccgaaagcggccatttgggaatggcccttttttaccgaattttcctaccattgggaccaccccgggcccaaacggccaaaatggggggccaccggccccttattctttaacggccgccgaaaattttttttcaagcc

SEQ ID NO: 67196 - DNA, 318 bp, Arabidopsis thaliana landsberg
ccgacgtgagcctaactccacgaatcaaaaccacaacctttaagatgaagatatcaacttatctttttttataaatgaatagaaataaacaatggttcagtttgattgatatttctatccatatattctttaaaaccataaatatttatacttaaaacatgggatgaaaaataagtttcaataaggtaggaacatgtacatatattgagccgcaatgatatagattgactatatgacatatgatcgtagaaatgtgtcatttatatttattatatgtataaattgggtataataatgcggaacatgttacataaggaa

SEQ ID NO: 67197 - DNA, 502 bp, Arabidopsis thaliana landsberg
  unsure (1)..(502): unsure at all n locations
atactttccactactccctcaacggaccatgaatgtaagaaataataaggttaacattttcagcgtttgtttcgtttttccggaaagtcacagttttacctgataaaaatagtaactgtcaatctaagtttctaatttaatttctatagttaaaataattgacaccaatattagttttcctttttttttattttattatatcactacaaaattttgagtgtctaaagctctcatataatgattattattattattattatttctttntattctatttcatttttcattatgaataatcacacaattagtttatacaaacattaataatgtcgcatcattttattataaaactttttttgttttaatatattgataaatatattttatacaataggattataaatgcaagagaaatttttagtatcttcaatttatacatatattntttattacaaatacttaagtaatattatcattttttagatttcttttttttctaaat

SEQ ID NO: 67198 - DNA, 250 bp, Arabidopsis thaliana landsberg
ctttgtgtttgtgaaagaaaaaattgtggaggcctcaccgtggcatgtgtactccacacatttttgttgctctttcccgttaggtttatccaggcgtagaagtttggtaactagcgatacggtgaaacaattgaaaaactgtgatttgcttaacacgcttctttcgcatggggtcttgatcccgatgttatgagatctagatgctacaggggtaccaaacgagtaccacgaaaggagaggatccttagta

SEQ ID NO: 67199 - DNA, 609 bp, Arabidopsis thaliana landsberg
  unsure (1)..(609): unsure at all n locations
cggatctcttgtaagtgagcgtatcagcagagggttaggtttgcaattcaacgatggatgcgttaaaatcgtataacccgttgcataggccttaataaaagagccgcaaatcgcgcgttacaatggtaattaattaaccactaatatcttcatctatattatcgagttcgtcaatgacaggttgaatcaaatcctcaagcttctctttcattccatcagcaaattgaatatatacaactgatatctcgtctccgttatcggtctcagtttcaaannnnnnnnnnnnnnnnnnnnnnnnnnnggcggtgacagtcaaatctacaaaattgttgaggtcgatattatccccttgcgcgtggtcgattcctttcacatctacatttccttcaactttgagatcgataagttgaacgaatccggaaacggtctcaatattttcttcggatttatcactgctggaatataataccccaatggaagtagcaaacagcgtgtgattgtcgcgggtgaacgatgcaacagagtgttattattggtggcggttacatcgaactttaccgaagcagtgaacgggactaccgacgctgtgatgtcagcagtaagagggaa

SEQ ID NO: 67200 - DNA, 1132 bp, Arabidopsis thaliana landsberg
cctcacaggctatcggtaagacgacagaacagaaactcggctgatcaaaatggaaccaaatcccacagattaataagacaaaagcttgatcggcttaaccgaaacagctccaagagatttgtgctcattgccataggaggcactggcatattcgatgagccactggattcaggtgaaatatacgactcagcaacaaacacatggtcagaaatgcagagactcccgatgggttttggggttgtaagttgtgggattatatgcaatggaatcttctatgcttattctgagaatgataggctatcagggtatgacattgagagaggcttctggattacaatccaaacatctccagtccctcctcgggttcatgagttctaccctaaactcgtctcctgcaaccatcggttgttcatgctctctgtttcatggtgcgatgaaggagatggacagattgggaggagaaacaaggcagtgagaaagctgtgggagttggatcttgtgtacctcacatggaccgaggtttcagtacacccggacgcaccaatggattggaacgccacatatgtctcagaccagaacatactaatgggagttgagatgttcaagatatttgggcaggtattaagtttcttcactgtctgcgatgtattaactgaagaagcctcttggagacatgtttcgaggaaccaaaggagtcaaaaacttaatctatcttgtacgaacaagaccattgcattgcttcatctctgatcttcttcattctttttgttaactttcaggactcgtcgaaattgattgattcatgtattgaaaagaaatgcaatgtgctagttcctagattgatttgaaatgtaatatttatattttaatattttcgggatgtttagcaatgtgttcagatcactatcgaaacaaggaaaaaaagtaattcgtaattacatttggatttgaaaactttatagggaagacgatatttgtttggttcatttttgtgtccgttcatatctcttgacagggtacaaatgtttattaaaagttatcatttgaaaatgaaaaaaaattaataaaaacataaatataaatctacagcttagaattcatatatttttttgttgtcggacatcactaatat

SEQ ID NO: 67201 - DNA, 1231 bp, Arabidopsis thaliana landsberg
caagtgcaagcaactcctgcaaacgttagagtctagttataagccagtaaatgtgttatctgaattttgcatattgaaaattgaaatgcatgacggatcttaacactagattctaacaagtttaacaatctaattcgcattaaactacaaatcattcacaaaatcatgagagagaccgagaatccaaaaagcatagaataccacaaatgtttttatacctcatatgaaagctcatcaggatccatctcatcccaggcatcctgcaaaaattaatcgtacagaacgtaagtggaagaagattcaaatcacatcaatgaagcttaagtttctatgattctctaccctgcaattctaaatttcagtatatttttttccacaaagttcagtgtgtacagcgagggcccatacttcaaggtgtgagcataaccatctccaataccagtgaccagttaatgctaaattgattcaattaccctctggtaaatgcattttgaccttcaaacatacagacatacagttgtgaaaaattccagtagcataaaccgagaataattaggtacgcctagtaccaaataccaaacaatttcgactgagtaagactacataataattattcatgggccatggcacactattccagtgactggcttaactacaaacaataactaccccatacacagggaggataatctaactgggtctccggtctaaaatggttaacaccatggactaaactatcacgaaaacgaaacaaactaatgccacaacagaaggatagtaggtagatggagccatgtaagatgtataactagacaatggcgggttcaatgtcacgactttgtcctttggccactatatgactaaacaaactcccaaactgggggaaaaaaggttcaaactttcatattctcaagcagaaaaactgaaaaaggtttacagctcaagataattaaaggatttttctgtagtgtaaggagcctacctgagaagtatgactctcatcctctagatcttcaaccacccctgcaaccaataacagttagcataatccaaaatttattttagaacgcccctcaaagagaacttgaatgatagctataagtgtgtactcacggtttgctaacccagaggaggcggccaatctagcatcaatatccccctccccagcttcttgaagagctctagagatggaaaaatcatctgtataagcaacttcttcaatgtcagagct

SEQ ID NO: 67202 - DNA, 1515 bp, Arabidopsis thaliana landsberg
aagtcattataaaatgaaacatcttattattataacaaataatgagatttttacacgtattttcaacatttttttaatatgtgtatataattttttagtaaaacctcgttgacaaataaataaatttaaaaaaactctatgacatactaaaaataaaatatgattataaatggaaacaactgttacgatatgccataatatcttaagaaagaaactgatatagaacatacaatatttaaaaagaaaataggggaaaagaaggaaatatactaaaaagacaaagaatatatgtatattgacatgtaaatagaaacacggatgtgtatggtccatttaaattgtctccaagtcgattaagatggtacatctagaaacttcgtaatcgtcaatttctatttttgtgataattttccattttctcctataaacatatccatcagcattatcatttatcaacaccactctgttcctctattagtatttttctcagttttacataagtacaatattactttatcatgacattttacatcaaacaaatgtcttttgtaaaatctctggtttttaaacaacccaaaaaataaaatccgaaaatgctgatatcaatgctaaaataataataaggactgaagttattctcaaacgtgtactacaaagtttcactcgagcattgctaaaataaaacaagattatgaaaaaataagacacaagaggatgaatctgaaaggattcatgacttggctcttggcacatctaataaacataaggaagtattctccaggggacaagtctaagatactctgcccatatctccttgtacttctctgcacatcgaacctcgtctcttcgttctctccatatcaatagtatcagaaggtatatcgggtagaaatatggaaccggagaactgagaatacacaagacaaaatatcataaaaacagctttgggaaatgaacttgaaagctttagacttttcaaatgatggttagagatcaatatctttaagtcagccaaatcaacttcgaacgttttgatattggtattagtttctacatgacttttggtagctgtaagatgaactcaagcagaagaagttaccttattccacatggcaaactgaaggacagagcaagcatcaagtcgccaaggtaattacagtgccttgcaattcccctgtcatatatacaaaacagcacctaagttatcggaaatgtgtcattgcggaactttcaactctttattcccagcatgatgaacaatcaaacacagagatggcgaaaccaagcaaagaaacaagagaagataaatataacataccaatagcctgaaaccagtaactttccaccaactaccactggaggcttgccccatattggtgtttttgggttcttcttaaagatatgtttttgtttgttagctcctcgaaaaaccatgtacctgccaaagaagaaatagtgggtttcttagtgtagatatgtaagaatggaaaataacccaatgtctcagaacttacc

SEQ ID NO: 67203 - DNA, 750 bp, Arabidopsis thaliana landsberg
aagtttcatgtgggagacttgtgtctctattcgttcatatgtcacatttttatttatgtgttgataaaagagagaataatcactaaatagagatagtataaaaggattaatcaaatagtaacagactagcttaatcatttatcaaaacatataatttataaattatgataattgtatcgttagtgatttgattcctagctaaaattaccaatcatgcaaggaatagttataaacaaagctacttgtttgtatcattaaaatatctggagatcttaaaagaaagcaatgtagacaccttgccgacagggaaatatacaagtggaaaattaaatgttcattgtttaacataaatagttcgaagatgaatatggttaatttatttcaattggatgcggttgttgaaataatattttctaggatgcagttgctgaaaaaatttatgtttaggggttgtgacttgtgattcgatgactatacatttgaggaaacaaatgaataatctttaccaaaattcttacaatatgtcaacaagtcaatcaatttttaattaagaatttttttttacaatatgttaaaatgtttttataaggtgctattgagaaattttaaaactttaccgaatgttttggaatgagtcttaaaaacacatcttcgttaattttagcaaaaacttaaacattagaaggggaaaatattggcaaattcttacttcctatatatttgccaaaacaaaatgatggttttaaattc

SEQ ID NO: 67204 - DNA, 385 bp, Arabidopsis thaliana landsberg
  unsure (1)..(385): unsure at all n locations
tgtcacccagatcccgtcttcattttttacactctcatccaaaaagatcgggaacttcttgctgcggttgataccaatcggcgtgttggccccgtgcacgtagccagtggtcttttgcagatgcttgaggggaatcatttcacacttcttgttgccggaagccttggcaatcttcttgaggtccaagtggtcgatcaaaggcaccnnnnnnnnnnnnnnnnnnnnnnnnnnnnnnnnnnnnnnnnnnnntttggaaaccggctggtcggctaaaaccggctagaacggtcccaacctgagctagcccgtggaattgggaaaattcgctgatatgctgctcataggcaattttatgctgggtgagaatctttttcaccagggactt

SEQ ID NO: 67205 - DNA, 954 bp, Arabidopsis thaliana landsberg
agaccgaaatcagaaactaattttttttatagagaggtgcttggatgtgtaagatctacaaccaaacaaaaacatgggccaatatacatagattgaaaaatcaacaaggatccaaacaaaatgtaattatggaaccaaaattcttgacctatgattcatcagttcctccatttctctacaataattaatattcaataagaatttcacattaacatccttttaatatattttaattatttgttgatgtcactagtttgttgatgtcatcaacaaaccgatcgataatcaatggattaaaattggttcgatttcttttcacttaagtgtcttttgaagttagctaagtccagttacaatcaaattatcatgacgaaatcagaagttaaaaaaaaaaaaaaatcagaagttaaaagttgaataaataatatctagcatatgcatgtgtgagttctctgcaaccaaatacgaaaacacactaaaccataaacattctggttccaaaaataaacggaataaagctaccggaattacttttttatcagcaaatgatatacaatcccaaattatataaatgattctacatatagttagaaaatcatgattccattaccatgtgcataaaagttaataatatacatagacaacccacaaattcatctatatttactataattaatttcgtacatgccaaatatgttttagttataatacagaaaaaatataactctttaaggcactaaatcttttaaattatagaattttgctctctgataaatttgaaaatctgtgtgttagagatgtttgaaacaaaatttagaatagtatcgaaaatattttatccttatttaaaaaattcatattttatgaagaagttattattcactgcttactgtaatttagaaaattacttataatttagaagaaaaagaaaagaaaagatgaagaatgcataaa

SEQ ID NO: 67206 - DNA, 563 bp, Arabidopsis thaliana landsberg
  unsure (1)..(563): unsure at all n locations
agcccgtcggaggaatactcgccggcgcgcggcagcacgtccttgtttatttcgcgggtctggatgtcggcgcggcgcagggcgaggttgaccgcctgctcgatgtagtcgggatagccttcctcgacgatcaacacggcgcgcttgcccgcgcagaactcacgaatctgctcgggcaccagcggatagaccacgttcagcaccagcatcggcagtttcgaggtgccgaacacgtcggcaagaccgagccgctccatcgcccgcaggacgctgctggtgaggccgcccatgacgatgataccgacgtcgttcacgtcgccgtcgatcgtttcgttgagctggtgctcgcggatgaaggcgcgcgccgccggcagccgctccnnnnnnnnnnnnnnnnnnnnnnnnnnnnnnnnnnncgggtgcgccagccggctgtagttgaacttcgccggagtcttgatgcggtcgatgccggaattgacgcccttgcggttggtgctggcggcgaacgagccggtgacgtggcaggcgcggatacgcagctcgagcatcaccggcgtatg

SEQ ID NO: 67207 - DNA, 536 bp, Arabidopsis thaliana landsberg
tgcgcgatgcgtagagcaaggcgctgggtggcgcgatcaaggccgcgctggccggccattccggtggcatgacctatcgccagcagaccgatcgattgatgagtgcgcaaccctggctgatgctggcgctggacctgggcctcggcccctacgccgaccagccgctcgacgcgtggcatgaaagcttcctgcccatggagctgcaggccaacctgcgcgccgtcaccacgacagacgtccacggcaacacccgtccgctggtggaaggcgagcgccaactgtcacccaaccgcctcgacgcacccccggcacaagcacccgacctgcgcctgccgctgggcgccgccggtctgctgatcgccgccctgctgctggtgacttctcgccactggcgcctcggctacaccctgctcggctcgcttttcctggtcctcgccggactggtcgggctgctgctgctggccttgtggacgctcaccacccaccactcggcctgggccaacgccaatctgttgctgttcaacccacttcccttc

SEQ ID NO: 67208 - DNA, 580 bp, Arabidopsis thaliana landsberg
gaaactgaatccattgtggatcaggaagatctatgtggtaagacataagaaggagatgggtttttcttgaaaaggaaatcgtttaaagaacttgaaatttgtttacaagcatttgagcagatttaaatcttaagtctgaaattgaaagggtagaaagacgtgaataggaaagagagatgtgttgagagagtaatgttagattttttttatgcacacttataatgtgtggtgtaaagtggatcgagtggttaagtgagaaatgagataaggaatgcgatgaacagttttaatatcttacaatcaaagacaaaatacacgtgaattaccaattgagatgccttttcaatttttaaccgacacatatattacaaccctaataatatatgtacatttttataatattacatatagatacgtgtgttattgttgaatatagacatatagctacatgttgtggttatctttgacaattaataatgtcttatagattttataacagggatatcataacttatattaatgaatcatttttccaagacagattttaaataaccgcttgggtgttacaaaatagaaaacc

SEQ ID NO: 67209 - DNA, 731 bp, Arabidopsis thaliana landsberg
tacatatatagttgagtatcatgacttaattcttcttacctatgaagagaagattcacaaagttgaaatatgtcccgatgatggatacgatataaagcgagatcgttgtctggaaatatagtaaccaatttaagcaaaataataatgaatccaaagttatatatatatatatatatatatatataagtggaaaattattattctatataatatcttacgagaaaaaagagaggaggatctcttccacaagcaacgtcaagaagctttgtgaggatttggttgaatctaacatggaagcttcttgctaattgtttgaaagaagattcgtctagtacaacttctggtattattggtctttccctgcaattttgtttatttaattgtcgttttattggtaaggaaatcttgtaatttgtatatttttgaaccaattgatcatgagaaattgaaaaaagattaatcaagtaaagatataaacataccaattgagaaaatcagaagcagtagaccaaatgaagaaaaaaagcatggaggtcatggaagcatgacaaattagggttatgaaattgtattccactacttccattaagaaccataagatgctcactcctatcaccaatgttgctgctattttcggctctctccataacagaatatccgcaactgttaatcacgaatgcaagttgttaaaatttagtgtttgggggcgtgtccaattctggtgataattt

SEQ ID NO: 67210 - DNA, 636 bp, Arabidopsis thaliana landsberg
gagcagatggcgccgggcgacgatccgttcccggccagcctgccggatcgcagccaggcgttgttcggcctcggctaccaccaccagcgcaacgaattcttccgtaaagccgaaaataccgccgaggaggccgcataatgaccgcgctcgccaatcgctacgatatcgtcttcctgttcgacgtcaccaatggcaacccgaatggcgaccccgatgccggcaacctgccgcgcctcgatccggagaccaatcacggtctggtcagcgatgtgtcgctgaaacgcaagatccgcaactacaccgaactcgccaggggtgcgcagcccggctttcgcatctacgtgcaggagggctcgatcctcaacgagagacaccgcgaggcctacagggcgatccggcccggcaacgaaaaggtcgataaggatgccaagctcaacccgcagaacgacgatgaagccaaacgcctcaccgctttcatgtgcgagaatttctttgatgtgcgcaccttcggcgccgtgatgagcaccggcatcaatgccggtcaagtgcgcgggccggtacaggtcgccttcgccttgtcggtcgagccgatcctgccgctcgagaacttggatcacccgcatggccgccccccaa

SEQ ID NO: 67211 - DNA, 466 bp, Arabidopsis thaliana landsberg
atgggccttttttttgttttggtaaagctctttagtttacttgttgttagtaccacaccaagatgtcgataacacgagagaagataatcagcctccacaaaatataaccgtccactgctacgtccatattagatttagatatattgtagttttgttgctttgagtgtgatatattttcgtttgagtatctttacatgcatgttataaaaattatgtacatttttaaatattcattaataaacatcttaaaatgaggttacacttaaaaataagggaacacactactttagcatgtatacataaacccaacacacacagacaaaacaaatatataatcacttatttctattagcaataaaagtcgtaagagctactaaaggagcaaccttttcagaactaaacccttgaagatgctgccgtgcatctttcgtcaatcccttaacaaagtcttttgattcctccaacc

SEQ ID NO: 67212 - DNA, 550 bp, Arabidopsis thaliana landsberg
tgaacaaatgacaactggtaactttaaaacaataagataaattttcatgctttccctctttttagcaataatgggaaataatattctaaaaacgcagcaaactaccgcatattttttgacattatcaaatttgccggcgtccctttttaattgtagcgggagttccgtaggtttgcaccttgtttttaccctcaaccacaattattaagccaattgcggacgcacaacatacgcattataatagtataatatatggagcagaagttgacaagctatccaaaagaaaagatcaatatcctcttactggaaaacatcagtgatgctgctgtagccgagtttaagaatgcgggctattccaatacccgccggcttacgaaggcattgagtgaggaagagctgatcgaagaaattaaggatgtgcatttactgggtatccggtccaaaacacagattacggctaaagtgctggctgccgccaaaaagctgcaggccatcggctgtttctgtatcggcactaaccaggttgatcttaagaccgcgaaagaatatg

SEQ ID NO: 67213 - DNA, 625 bp, Arabidopsis thaliana landsberg
aaatgatagaccacaaaaagaatattcaacgtcagcagtattgacatgacacgtgttttaaaatattgatttattaaaaagcgaatcctcgttgctatattacttagtatatttttccctgctgagctaattaaggccaagacatgttccaagaatcacatgattcacgacataagtttataaacatttattgtataaaaaatgttgttacacaataatattcttttgatcgttattgaacatatctttgataggtcagttaaacaatattgaggttagaatttacacaatatcttgttgtgcttataaagtaatcataaaacttaaaagactttttgctacaaattttcatatcaaacatattaatttgaagcaacaaaacaaaaccattagaagaaatcgcttttaagtagtttgttggttacaagaacagatatatattacaacgtaacatgtttttacagtcataatttttttttttttttggaaataatagcggtcgatataacaactgggcctaatttactaaaacgatgaattctcgcttatttacaaattttttgtgaaagccttcgggacccataattcataattttgtaaaaaaaaaaaaaaaaaatgggtcata

SEQ ID NO: 67214 - DNA, 2550 bp, Arabidopsis thaliana landsberg
tggtgatcttgggccaattataaaccgactttctatccaaaaagaaacatatgaaaaaaaagtcgcaaattttcttctaaacatgttgcattttcatggtacaagggaaacccaaacatgaatcttaccttgtagatgaaaatgcatagcctaattcagtccttttgctgatcaccatgtgcagatgttaggtcttgattggtcttctggtatgggaggtctgaaatgtgttggccgtgctgacctgacccttagtggttcatttgctgatatggtcttgtctccaattgccagttcaaggcagagtggggtgtttttatttctgttgacaaatccaggacaactgcaagcatatgacgatacctctctggcttctatgatgtctcagaaagagaataagatttctgtttctccactgccatatccaatggttgtaccaacgatggatccacatatgacagtagcaacgttttctgcattaaatgtgaatgataaaacgtcattagctctttctgaggtagtctctcgacaaattttcctagttgtgcttcccattgtgaggcaattaatttatatcttattcctgatagatagtcttagctgcaaaagctcgaacccctcgtaccccatccggagaaagtgcacaatggcctctgacaggtggtgttccaagccacgttgatgactacaagcttgaaagactttacatggcaggatatcaagatgggtctatgcgaatatgggatgcaacctatccatgtctgtcccttatttatattttggagccaaaggtattaatgttataacttttcttcttttgagcttcatcttgaaaactcgtttaaacatttttttgagaaggtttgtttgcaataaataatttcatccttcaccaatgatcaggcaagtgttattgacataactggagtagatgcatctgtaacggcattttgcttctgctctaagacttcttgtttggctgttggtaacgaatgtggtatggtaagaagacctgtttctgttgatacctttttgatttcagcttagattctaatgtgcatctgattttctcgcttttctgaatctgtaggttcgcctatacaagttggtcggccatacaagtggaggaactttggaagttgttaccaacactgagaagaaaggtttggctattgttacaacgttgacactatggatttgttatgctttatctcatgctgttggttcattacttgtagctcaccatttgcatcaagaagatggtcctcaatggttggctgcgttttccttcctgagttccccagtgtgcaccctgcaatttgtacagtctacaagaaggcttgccgtgggatttaaatgtggcaaggtagggatttaacaaatgtttaagtgtcggcatacagctgttttctttagttgaaagtaaaattaagttttctttcaaaccatttcaaattttcatttcaaattacaggttgcagtgcttgacattggtgtgccgtcagtattatttgttacaaatagcttatctgactcaggttctccgatcaagtcactctatgtgaaatcctcttcagctccaacaggctcaaaaagtgatccaactgatcacaactccataaattctgaagatgatttactcttgtgtgcaatgaccaaagatggacagaccattcttttggatggcaatactgggaaaatacttgcctcttgcctgagacctctaaagaacccaactgcgatttgtatgcacattataggtattttatctgatactaacataaaagtgtgttttcttatgcatctagtattcataaaaataattctattttgcagagaactgctatgaaaactatgaaacgcccagtgaaaaaccagctgaaaatccatctgggaaggataaacatgagaacaaatctcatataatcaaagctagtgagagtcattcaccagacggtgaacagaatgctgtcacagaaacaaaacttattgatcagatatttgcgaattcattatttctcatgtgttctgaggatgcactgcgcttgtatactgtaaagtctctatctcaggtatatcacagtatttatcctttttatgatacctaaagtatcttgctggctctttctgataacaaggacttgctttcaatacctagggaagtcttgagagcattatggaggtaaatcttccaaggccgtgttgctggatgggaatcctaaaaaaagatggaagggaatgtgcagtactcctgttttaccgaacagggcatattgaaataaggtgactttcaaatatatgtcagataaaagttagttaccaaaatacaatcttgtaactatttagtctgaaggctactatagatggaccattgattgctcagaaagaatggtttcttaattgaacagatctttcccgaatcttgaagttgtgggagagagctctttgctgtcacttcttaggtggaacttcaagcctaacatggagaagacagtatgttcagataatttcggccatgtcgtcctggtgagatttcttagaagagagctt

SEQ ID NO: 67215 - DNA, 533 bp, Arabidopsis thaliana landsberg
attctcacacagcatagtttccagctcctcttcgttgaatatccgaagatgttcaatagagaaaacctgtttaaggatgcataaaagaaggagtgatttaatctatagttaaatctattggtaagagtaaagctaaagaatttacctgattaaatccagaccgaaatgcttccacttgtttttggatcccattacatactgtggcattgacaatacccttgatatattcctcgaggttatccaaatttacctagaaagaggagtaaagcaggtataaatctacatgttcaagtatcttgagaaatagatttattcacaaaactaaaacaataagtaccatatcatttgcagaatagggagcgagatcataatccgtgtagccaggcaatgcaaattcaagacaaaggtcctcaatctttgttccatggaaacttaaatcacacttggctgctccggaatcaccatgtgcttcagcgaaaagctttttcctacgtaccagagcttgcaattccaccaagtgttttacaaagttc

SEQ ID NO: 67216 - DNA, 296 bp, Arabidopsis thaliana landsberg
ttacgtgccaatggttacatctggccatatgaccgttgacagttctgtactttcatagcatctggatccgtacgttgttccgttgcatcatagatcttgtacaggtgctgtctttcactcttcatggcacacacttcctgctctgggaccatattactgtggaatgaaatactgactgtcaacaacaagatcagtaccatgggacgggtttccaatcttatactgatggatcatgttgttgtgtggtccatagccattctgaggataatcaacagcatgtgactgtctgtcctata

SEQ ID NO: 67217 - DNA, 719 bp, Arabidopsis thaliana landsberg
  unsure (1)..(719): unsure at all n locations
tgttatacattctctactttactaagaatattattgttgaagaaaccaacatgtgaagttattatttatggtcattagccttaaactatatgcatagtcttgcttatgtttcttgatacattcattaattgactatttttttttatataaattatttatatctattgatttgaataatcttgagaaaaaataagccaaagaaaaagtattggcaacattggttccaagttaaatgtatataagttatatatacaaaatgataaacatcaacttggtcttcagtgtatatataaaaaacattataagttcggccgcatatatgaaaattattttatgcaagtttcggaaatttcagaaaatgtgaataggaaagttgtgggcaaattgaaagtggaagttgcttgtaatgtgaagcaaagatgattcgacttttgcttggttttcaactctcatcataacggactacttatttcgtcttttacttttacactctttctctccacttttttctttttttaaaaaaattttcattcaaagattattttttttgtcctttcaagtcaaaaagacaaagcaacagaagaacagtattaacgtatatctatttctttaagacaagaaaaatagaatgaagaagagaaagtcacagaaattttagtaatagacaaaacgtgcctccatgatgactncatcaaattctaagtcatcatataccgaaa

SEQ ID NO: 67218 - DNA, 571 bp, Arabidopsis thaliana landsberg
acacacaaacacaagcgtctcgcactgaattgcagctctttatcattaagatcgtgtatcttaggcacctcataaggtatttcctggctgcagagaagagtaaccaaagacgcgtatgaagtaacgttgtgcttgaagtttggtatccgagagatccaatccgagaaactgagagctgtctgaggatcaagattgagtgaaaacagagaagagacatgagaaggtgtatagaaggggtaagagattttagagatggattgttctgccaatttggttcggagacaattgagagtaatcggcatggaagattagaggggttagactctgctgttgagatagtacttgtaactttgtaagcagagatgcggcggtggataatggccttcgacggagaaggtagccggaagaagtagaaggagatttggaagtagtaatctcatcgtcggttgattcgacggtaagttgtacttccagttcaagcaacagtagggtttagggtttatgaatcagtgaatgcaagcaaaacctcaaacccggtacaatgctacgtttggtattctgcattggttta

SEQ ID NO: 67219 - DNA, 2017 bp, Arabidopsis thaliana landsberg
ctttcttattttcatgcacattctctctctctctttatagacttttttttttctatacaaaacacattttgctttctcctagtatatcttcttttgcgaatacaatacgttattaaatttggagtgagccaaactaccgtggcaacgagtcgttggagcaacgaacatatttgttttcgtttattaaaaaaaagttgttaattgtgacttgtgagtaacatttacctaaacccatgatgagttgatgacccatccacacacacaatctttttttaatcattcactaatttaagaatgagacaaataagtaataacggtcacacagaaacaaataagtaaatatatgaatgggccatggtttcaataatgggtgtatcttatggggattagatagatattgatttcctccaattcactactctgaaatatataaatatacaaacgtactttggagtcttcaccgactcgggatccttttactactacacatgtttaccaattacaatagctgtctgctattgtttttagttttataatttttctctccccccatgcaattcctctactttttctttttccactaaacttttgttttcctttctcttgctctaaattaaaaagttgattcataatttcatatttttaaaagatttaagatttctgcagtaaatctatttctttactaattgctttttttttccaatataaaaaattatttaaattgaaacttttacatagattaataatagtcagcaccagtttgcaactagtgtgggtttattatatatggcctcaaaagctccgggtttactcatcgaaataagcccaatccagtttctccttttagttccaaacttcctaacaaatcgccaaactcatataaatgggctttttaattaggcctattagtgaacagaattcagggttttaggggattatggaaggaagggattcaattcaatttgactgaatttaaaaattaacaatattatttttgaatttctttcccattaggttaaatttgaatatctattcctaccagaaaaataaaaattgaatatctattgatttttaattccatttataattcaatactaagttagttttatggtaatattatttaaaataagttaaacaaaatataaaaaaaaatgtgaagaaccaatatcaacattttgaagcttttatttggatttaattcattaatttttatattttaaaagctttagaatagttctaaatttatagcttatacattgattaggcctagaattggtttttatattattccaagttcaacctcctttaaattagggtttaaggctataaataataagtactgtttcattccccgggttaataatcaggcgcggtatagaccaccgtaacagaaaacagaaacagaaactcctgtctctatcaaatgcaaaatttataaaataaaataaaataagtggctgggtctttagctagggtttaatagtgcgttgcagcttccgctctctttctctcctttcttttcacacagccgcaaaggctctcatcttcttcttcattcacacaatctctcttcccgacaatcacacggattgttgattcctctggatttggggtgaatggaggttgctacgagcagcaccgaaatcacgatccaaacggatcgggatccgtcgtcgaacaacaacggatcttgcgctgttgcttcctctaccgcttccgccgtcttcagaaagatcgagtttcaccctgcaaggaaacccttcaacggtttctctaatgggcgttccgattttaagatcgagactttgaatccttgctcctctaaccagcgactgttatctgcaccgtccgctaagaaacccgacagctccgatttgttggaacatgggttcgaacccgatcttacttttagcattaccttccgcaaaatcgtgagtgcttatcgtacaaattcttccttttagccatcctatctctattttgatcaactgattagcgtaagaatgcttccttttta

SEQ ID NO: 67220 - DNA, 1118 bp, Arabidopsis thaliana landsberg
tttttgtcccttggtttgcagccatatcttataactccctcatggatgacggggaaattgctccatcgcagaacgcatctgttgttagacaacattcccgcccgcgaggaaacaggtctgtctttccattggctgctctgttttttttttttgtcaacttcatatatggagtaatgtagtagttgtaaccatgaaatttctgaattacaatgacaccgtgattagactttttttgttttgttttttggagccaagtgatatgaacacagattcacttagaaatgaagagtgattcatatatttgatttgtctataaactcttcagggaggatgaggttgacgttgaccttgaggaattgatggtcatggaagcaatatggctctctgttcaggtaaaattatttgtttgtataacttttgatattaaatttttcagttctctcatagctttttaaactgattctaacaggaaacagggacgcagagaaattcagcttcaggggaaattacctcttctaggcagtatgtaacagataatcatagttatgtttcttcaccaccacgagtgactccaatcgtagaaccagcaacaccgtcttcatcatctggtgggctttcttgtgcaatctccgcacttgctgaacgccaaatggttggcgaatcctccagtcacaatcataatcacaatgtcaacgtttcttcatacagtatgcttcccggaaattgtgacagttactacgacatagaacaagaggtagatggcatagacaaccatcatcatcatcgtcatcattacgagatgggagaaacaggaagcagcaacagctatgtaagttcttacatgacaggcgagggcttccacaactttcctcctcctccacctctggtcattgttccagagagttttgaggaacagatgatgatggctatggctgtgtctatggcagaggttcatgccacgacgacatgtgcaccaactgaagttacctggcaataaataggataataatggaaactcatgggtctgaatctgatgatgattataacttcattcatatatgtctgttcctataggaagaaagaaaagaaacgaaatgatttccagttttaatagaaaa

SEQ ID NO: 67221 - DNA, 507 bp, Arabidopsis thaliana landsberg
atgctgactgatcctttatctgtgtcggcatttgctcttaaataccttctttactttccgggtgacatagtagcttccccctgtatgggtgtctggacattatctaaggatcgtcatgatgcgtctgactccttctcttctgtaactgactaagccaaaacaaagtgatttttctcagaatagttaagactatgatttacttccgaaatttacatatcatgcttagtactcagcatatatcgctgattgacccgtattttgcagggcccttgacacaagtatgtgcgagaatttatttatgtgtggagacaccaaccgcgctgtaatagcaagattcactcattttgaggattcccgtcttaatcacacgatgaggttagttgaacttgagtagcttcttcatatctggtgcaagcattggattgctgcaaaatatatatgtggagtccttatcagattccttctctatattgctgcaggcaacggctggagagctccccattgaat

SEQ ID NO: 67222 - DNA, 1593 bp, Arabidopsis thaliana landsberg
aaaaaaaaatgtccggggataaggattctctacgaatatacacatcccatattttgtaaattctcaagattatggactaatactcctttaacatatatattcacatatgtaactattatttaaaaacagaaatatattacatgggaaaaggaaaaatgcaaatgacaaattaaagcgattgccaaaacctttttcgaagaaagaaatggcgttgccaacttatcatgaaatacaaggtattaatatatgggattatttcattaggaaataattttgtgcctcaggattttgtaatactaaatttgattctgaaaatggaacgtataacagcaactcgtagattccttgaatattgattgaagtgtgttttttgaaaattttgtaaaatccaagacactagcatagtaccatgccatggccaaaaaagtttacattttggaagagatttatagttgttgaattttgaatataaatagggtagggttaaatagatctttttaaaggtttgatttgaatatgatataacaagcatgacctgacgtaaaagagagttttgaatattctttaccaacttccatcgttgcataattgccaatttccaatcttaggcctgaatatttatcaccgaatgagtcaaaccaaactgaagtttgcttcgatatgtggatccttaccttcttctaggtcttcatgttggtagtacgttgctctggtgtgtgattgtgtaggtttgtttcacagattgatatgatatatgaatacacgatatgctatgatgatatgaaacatgacatgctatgatgataactcgaaataattaaacgtttctataaattttgtttcacatactttacgagatagttatgttgtttttaaatgtgtatattcattcgttaatttaatatgttgaacgagatggtgtgatccaaactgggctttgtttgatctttaatgtaatttttgggccaacactagttcccatcatataaaatgtatcgacctttttaataaagtcgatctgtatgtaaaatccacatatttcgtgaagcctgcgtgtgttacggagttacgggctagcacccacggcgggatgggtgagaaaaaaatcagcacgcttcgacccgcttttacatgcgtgtaatcagtcatagactcgtacctaagaccgaatcataaacatgaataatttgccgaaaacatgaattatctacagtatccaaaaattatgagatagatagctaaatgaggtgaaaaaggcaaagaaaaaaaaaggttgaggtaataaatgcagtttccattgacattggataatgattgtagttcaaaattggggtccttttcttagctgtcgttcacaaacacactctcaatattgtcttcagagtcattttccttacctttattattacaatgcaacactaatttttagtattacatatttgattggtaggagaaccagggcctcatataatgggagtaacctagcatataaatattgttggtattaaaaaagaaaaaaaaacattcatgctcataagtttattttttcattttaaaattagacctaaaaataaaaccttttatattaactag

SEQ ID NO: 67223 - DNA, 565 bp, Arabidopsis thaliana landsberg
  unsure (1)..(565): unsure at all n locations
gaattatgttatcaaaagcagcgaagcccatcatcatatttacaactcaaatcactaatcaaggtaacctgattagccccaggaagcggccacttgtaatgacaaacatcttccatcggaagtttcctgcctcctcgacgcatagccatgggatctgaggccacaccaattttgaagggtatctgaaactcattctgagaggagatacggaccttccaaagatgaaaagaaattgcatgaaattaacaagggaaacaaaaaaaattaccagcaagcacctttaccactcagattgacttacatagacctttgttgttgttcccaaagttattatatcatcacttgcaagctcgacagggttaccccacttccggctgcctaaatcaggatgacttattgaatgagagtttacgagagttccatttaggctacccatatctaccagctcccatttaaatntctgaaatcaaaaccaggcaggtgtgacgcacagtgtaagaagtggcatgcagaagtcgtataaataaatctacatagctccttacagtagagttccatgttatct

SEQ ID NO: 67224 - DNA, 368 bp, Arabidopsis thaliana landsberg
agcacaggacgaatgcaatattacttgtttacttatcaccatttcatatgcgcgatgaatgaggaagtataatctggcttggcgcagagaaacattagtcagacgacgataccctttgccaaaggaagatttatgggcggggaagatcagaaggtgacacgttctgatgatcaagaagaggtgatgatgatgacgatgtacacaagagcctgctacgctgcgtttccggtttcaagcctcggttgagtacgagtcgtgggtgcagtaggtgctctggttttgcgaacgtgaggcattgtcagagcttggcctgtgtctccagctctctacatctgcctaattgtgatctgcttctatgtaatgcgaca

SEQ ID NO: 67225 - DNA, 515 bp, Arabidopsis thaliana landsberg
agacaaacgatagcgctgaagcgacacaagatgtttctttatcgaatgagagtcagtgagagtggggccgggtgtgttaacgaatgtgttgattgcatcacagagcgtttttgaaaaaggtttgaaactccggagtgcgaaacagaacttttcgttccagaatgtctcgtcccgtttgactgctgtcgaatttgggctcgattgaggtcaagcgcaatgggaggccacgaaacacaagttgcgaacgttggtcccagcctgaacaaagttacaaacagcacgaagcagctccgtacccttgactacaaaatcgtgcaagaaatcctcatcccgtgttgttgcgattggtttgtcgctcgagaacaatgaggcaacggtcagaatggttttcagaatctgcacgaatcaagtaacgtaacacaacacgaagggaaacacagcgttcacgatctgaatgtggaggcttgttcgcgaaacaactaacgaactgattaaacccttgcacgatctttttc

SEQ ID NO: 67226 - DNA, 457 bp, Arabidopsis thaliana landsberg
gcacgatctggacaaagcctgggatgtcctttttatcggcttcatttactgacagaagttgcgcgcgcgacgccttacgggcgtactacgcggccgtgcagcatgccgggcactttcacgttctgcatatacgtgaactggcccgtcaccttgccgggaatgtctttgcgcggtaccgaggtgccgatcacggtgtacttggagggatccttgagcttggccccaggcgccactttcatgccgaaagtcttgccgctggcgccaatggacacgtcgaggcgcttgccgcccaccagttctccgtaagtgatggatttgcccgaggcacccgtcacggagatgactcccgcgctggccgccagcttgttcaccggcacaccgaagtgcttgccggccatcgacagcagcacctggtggcctgctgccgaggtgtgctggatcttgggtccggcgtacc

SEQ ID NO: 67227 - DNA, 2126 bp, Arabidopsis thaliana landsberg
tctccttgtccaaagtctactcttctctgaaagcagcagaaatcgatgaatcacctgcgagagaacatatatgttgcttatggagagtctttttctttctgtgagatatgcgatgataatattacggaagataaaacttacttcagcaagaaagtaagacgttttctctgagccgttctctgttggaatcgcaggaggagcagattctttgtgttgtttctcggttaccatctacgcggtaagaccaaaagtgtgagcctttgatgagaaaaagatgtgggaaagattcatccaatactaacctcggcttcaatgtcactgaggatggctgctattcttaagtgataattcttctccccttcaacctagaataagcgataaggtaaatagtaatctgcataagacaaaaaaatccagtgtgtgtgtatgtaaaacataccatagccacaagcctctggaaagtgagtctatgttgctgtgattcaacagcggctaatgcagcagttgcttctttaccaaggactgccatatttgcttttagctcttgcatttttgcttccgctagttgaagctttgctacgttttctggaatcggagcttctcttacacgtgcttgccgtctagagacttccgttgcctgttttgcttttaagttttaacttacattacaaaataaaatagccaacatcatcatagaactaagatcttaagatgattacatgtgtctctgcttcttgtctcatgcggctgtaacgttgagcaagatgacgagcatcttcaagaggagaaccggcaaccatagctcttagaggatccaaaaccttaacggcatttaacaaaaaggttttctcttgttatctactagatttaattctacgtaaacatactaagattaaacacagctaatccaagccgaacctgagaagccaaaagcttgttgaagtcttcttgttctttgtctacatgtttccgtgcatcaccgtatatagctgcagccttggccagtatattctcatcaatgttctgactattttcgttcccatacctacaacagtcttcagacaacttggttcctgaaattttaaagaatattaaaagaaaactcacaaatgtatcatagtataacttaattcaatgataggtaacacaaaacagacactcataagtagttaagtacctgcttcaatgtgtctgagcccgatcgtggtaaatgcctcagctgctttaacaatatctctctggaactcctgaaagtgacaataacatatgtttgagggtattgtgctacgatgaatcatactgaaaccttctcccccaacaatgaactcatataaaatgtgacaatgccattaggtcaatatcagtcaaacctttgcagaacgagtagagcggtaaagtttatcgagttgatgatgcctttgcatttcaagctcatcaatcaccattacatctgagctttcataaccagtcccactgaattgctttatcacagcctacattccccattaccacacatcaatcaacacatcatcacaaccaagattgtgtaactctataatactcaataatatacaaatcaaaacccatcaaaaagtttccaatttttatccaaattagcaacaaagaacctaaattgagcttcgtttcgctgaatccgtaacaatgaaactagttgcggcgatgaaaaggaattaccagttgctgctttgcgacttgatctctaagcttactcgcttgtcttctaaaagcatccattgtcacttctcctcttgatttacccaaattagattcagagaaaacaaaagagacaagctttaaaggattttgagtggaattgagaaatctcaattagatcagaacagtttaaaaactgactaaacagatcagatctgattcaatagaaatgtatgttcttcttcgactcgatgtgtcactgattatccctctgagaaaatcagtcaatcacagagcacacacatcgatctaagcgggtcgggtcgattcgattgatctctgatattgaaccaaaccggtccggtccggtccggtctgattaaaaggagcgttcgcgattgaattatttggaagcagacgaggcttttttactaaaaaccttacgttacgac

SEQ ID NO: 67228 - DNA, 478 bp, Arabidopsis thaliana landsberg
atatttcctagtttcacatgaattaactaacaaaggaaaaagaagcgatttcattgtttttcctttttttttgttggcttatctgaaaggaccaaaatttaattttatcaatggagagaatgagatcaagctcaagtaataagactgggggcatttgataaattacctttagatactaaacgtagtttcgtagattagtagcagactaaagcttatttataaaattcatcacaatctagagccacaatcacagttaaaaaaaaaaatgattaatcaaatattcatctttttcacttttggttattcattctctttattaatttgtattagagttaagtcatttccacttggaaaataatcatttttagcaataatttctcgtcattttttattccttttctttgtggcatcaacactcatacaaagctatactacctcatgtgaacttggattttggttacaagcaatacttgaaaaa

SEQ ID NO: 67229 - DNA, 535 bp, Arabidopsis thaliana landsberg
agaatcgcatgcggtccatgaatttagaactggaagcccctgtcttgccgctttgcattctatcaataactgtttgtgctaatctagcttcgctggaaaggcccggttcttcaagatagatgttctcattttccagcgaataatcgggcccgtccaattccggcgttgaaatatttgttaagcttgcagcagcgcgcagtttgcgtaagcgcccggcagcggttgtatcatttgccagttctgctgtggtatcaaaatcaccgattgttctataaattaccttactgttagttacctgttggccaccacttccctgaggaagctttaagaaagcttgtaaaatagtgatattaccctctaagagtggcgcttcaaatggtccggagaacgtaaggtcttctccggtagtgctgatcctaaggggtccgtagaaactgcgcatcacactacgcgagttatccgtaagtacggtgatctcattagaacgcgcgacaagatcgaaacgcgaaatagtaaatcccttgaaggttaagct

SEQ ID NO: 67230 - DNA, 253 bp, Arabidopsis thaliana landsberg
acaagaactagaagcgcaactagaacccaaaagctaaagaaatgctcccccgccagaagagacaaagcgaaagacgcaaatggactgcgactataccataaaagctaagcaaagcaaaaagaagaccgggtagggctgcggacccaaacatgacgagacgccacgtgcaggactgagcacaagaactagaagcacaccaagaccccaaaagctaaagcagggccaccttattagaagatacaaagccaaagaa

SEQ ID NO: 67231 - DNA, 560 bp, Arabidopsis thaliana landsberg
tccaagtgtcgaactgtaaaagctgtttacatgttttttttcctctgtttctgagatcaatcaaagtcagaagatttcttacttcgttttggttactaaatcagtcaacgttttataacactcctgattgtgttttaccatggttattttcatgttaaatttattaattgcccagtctttggattacttctaagttctaagataactctaccactgaataataatttattgctcaacttgcatagaaatgaaaatgtcataattttagataacacaatacaagtaaactatagttgcaataagaaaattacaagtaaattatatatataaagataataaagtttatttttatgttactttcaatcaagcaatactgtattcatgtttacttttttgtgtcaagtgtattattttcttgcaatatatatatatatgctaagtcctttcctacaaaacacgaaaccttctttatttttgatcaaactacatacacacgaaaacttctaaatacagaaatatatgtattaaacattgccgcgaactttgaaatcgtatttgct

SEQ ID NO: 67232 - DNA, 389 bp, Arabidopsis thaliana landsberg
cacacatagtatatatatatatatattatgtgtggatttcttctttctggagattaaaattttccagagataaaaccctagagagattctcatcttcttttcttcaatctctctgagaatttctaggttttcgttaccgattgggtcaatctggtgaaactcaaggtgtgtgtgattatgagtttttttttttgtttcccttgatttttaatgcgatcatgatcgttttgttttcttctgttttgtgttgttctaagttgatcgtaatttctatttcgaatctgttatcgattgttatataatttgattcctctgctttattgatcgttctcgatagtgaagtctgtgtgtgtgtgtttgttttgattttatttttgaaattgatcggc

SEQ ID NO: 67233 - DNA, 494 bp, Arabidopsis thaliana landsberg
tctaactgtctaagggatataaaaacatttaaaataatttggattaaagaacttctgtatattgaatttttttaaaaataattacaaaatttgtgaaaacaaataatattttaatgtggaatatatgtattgttctagtaaggaatctcagacttttatctctaattcaaatcaactcacagagaattaacccccaaaaaaaaaaaaaaagaattaaaatgaccctaatatctagatctctctatatgttatctaataaacccccaacaaaaaaaaaaaaaagctacaaaaaaccatgaagcttgaatcttcttaagatttgcctaaacaacaacaagaaatcaaaccataaccgtaaccaaaacggaaacaaattaatttccgcttcattttattgaccatgattagaccaaagatgttggtacatttgcatctgatgaggatgaagaggttgttgttgctgttgttgttgagctccatatatcccattatta

SEQ ID NO: 67234 - DNA, 762 bp, Arabidopsis thaliana landsberg
ctaaatttcttttaaaagctattgataattttctttacgcaaatataaattgctttatttaaaactacttaatccataatacatattcctgactacacatttatggcataacaatagattgaccaccaaacggacacattcacttccactgtttcacctgaacaactagtgttttaaaatagtataggttcaccaactctttaacactataaaattacaatctttagtttgatacagtttaaaaaaaaggttggatattgtaacgtaaatatgatcagtagtttgcatggaaagaaatattcttttgattttattctatttcgatttggattttattaatatagctaaaaaataaaagaatctaaaccaaattaatcaatattttcataaataatagcataacaaagggaatgatagaaaaaaagtaactacacaaatttgaaaaaattcaaacgagattccaacagagaaaaagtgtctaaacatttgtcctacaattgcaatttgaccaattagatagtacaaatcagaagatgtctcgtcgacaatacgattgatagcccagtggataaactctgcttctccctctctcaatcatgccgccagatcaaaataacttaatagaccattaaaagcctaccattttttagaaattgggaacaagaagacatttaaaatggcaaaaaaccatttataaaaccaaaaattaatgaaagggaaaaaaaaaacccctaaaaaaaacttttggttcttggaaaaaaa

SEQ ID NO: 67235 - DNA, 2227 bp, Arabidopsis thaliana landsberg
  unsure (1)..(2227): unsure at all n locations
gacacgagacattatatgcaaaaacattaagatcgggataggacagagcaaaagcctaacaacttggctgaaaaaagcttctactctgattcttcttttctcttttctccttacacgttttcaatcaccttaaacgacaaatctctccacaacatgacacgacacaacaaagcttatcttctcaaaacccttcactcacactctctcatctctagggtttcactaacactagctccctttctccctctctccctctctcttttcctagtttctatagcttccatcaatggaaaagaaaaaacccactaaatctttgaacccatacgcaccggcgtttactcccccttcttgttctcctcctttgtttaacttctacaagccatttccttgttacaacaagccttgcaaagctcttaccggcgctaatgttaagccggaaaaaaaccctttcgtccgttatgggttttgtcaccggagatgtcttccaccaaggcttcttcaaaagcctttaccggaaaataagctcgccggaagaacctcggtcatggtgaagaatatacctaactgtctcgggttagattttttatctcttctcaacttttttataattttgtttttgggatggatgaattaaaataagagtttgtaagaatttgcagacgaatggatctcttgaggattttggacaatcattgtcggaaacacaacaaaaaatcttcctacgactttctttatctgcctatggattttgggtgagttaatgtttatttttctctatttttggatgaaattaaatgcttcttgcaatagcggtgatgatggacatttaatgtgtaacaggaaacgagccaatttgggttacgccttcgttaacttcacgagctctctcgcagcggagagattccggagagaatttgaaaacttctcttgggacaatatcgggttcaggaagaagatttgcgaaattactgttgctaagtatcaggtttgtgttcttttgattctttggctagtcattgttgttgttatttagagttaatctttgtttctggtctattttgttgcaagactctcttttatctttggttcattatctgttgttgctcatttagggttttattgtgcaatttggtgtttgagtctcttcttgttttggactctcaatttcttgctctttttttatttttctttgtataatttctcaaattttgttttcgtctcttattttttttttgctaaggctctctttaattcttgtataggtaactgttattgcttacttagagttgttaaattgtgcaattttgggtttgagagtctcttcttgttttgcttgttaaagactctttatattcttggtttgtaattgttttgtccttctttttatatgatttagagttgagtagtgcaattttgtgtttgagtctctatatccttgttttgtttgagaaagactcttttattgttggtttagtaactgttgttgcttatattagaattatgaaattgtgcgatttgttaaattttgggccttcttgttgtagttcttggttttgtaatggatgttgcttatttagagtcgaactcttttttcttcatttgatatgacttagagttaaattgtacaattttgtgtttgacttttgtgataggggaaagaagagctgagtcgacgtttcaagaactcaaggtttacttgccacaccgacgattatctcccggtggttctctcgcccccgagcaacggcttcacggcttacactctcacaacacttggttaccgagtcggcgtacttggtggtggttcacgtcttgcttcattgcgttaaggtttttagggtttcgtagaagagaaactgtgttttcattatctccctggatctaagactacacaagatgatgtggcgtcaccaactagggtgaaatggaaacatagctttcctcttacttctctctcgttcgctttttagttttctagtttgtgttcgttaattagttaaaggtgtgttatgaacttagttacgctactacaatggtcaagtgctcttattatattccacgtttttttaatatcctatgtctctgtgtctcattctctttctgattttttttttcatatggaaagtcttcaacataaatggatctcccatatgtcgtagctaatgtaaaaggttatagccntttacccctaaatttattcttttatcaccaccgctgaaagctttga

SEQ ID NO: 67236 - DNA, 577 bp, Arabidopsis thaliana landsberg
ccccccccccccaatggagcattcgttccacgtgccctaaagctgaagcctccgcagctgaaaccgtgttgtctctatcgcaatcagaggtgcagagtaagaaatttatgtggtggttaaaagctttgggaatatgtgcagttgctctcttgcttacgcttgttttcggaaaatggggagttccgtttgtgtttcaaaaggtaatttctttactcaaatctcaagtttctgatgattatttccttgtgatgatccatgtcacatactctgctctttggattgtaatagtttgtttctattgaaggttcttattccaattttgcaatgggaagcaactgcgtttggccgtcctatgctcgcgattgtccttgttgtttccttggctttgtttcctgtgttcttgatcccttctggtccttccatgtggttagctgggatgatttttggttatggtctcggttttgttaaatcatggttggaaccaccattgcatggttctcccttacttaatcgggcttatgttcccgtgatcgcctccatgtaagaacccttcacttctctttttctcatgtcatat

SEQ ID NO: 67237 - DNA, 1982 bp, Arabidopsis thaliana landsberg
cgacaaaaaaaaaaatgtagcttgttattgtttgttacgtcttacttattgttttgatttttttcttctaggtgagactcactgttacccccagtgaagaaggtatcctcaaaattgtcggtgtaaggtgggagttgtctggttccatcgtaggtgtgcattacttccaatctgtgtctgtcaagacaaaagctgcgagaggaagaaggaaaaacaaacttacacccactgatgccttgaaatttttagtcatcaaggtgcaaaactttcctctatggtttaattttttaatgatttgttgcgacctcttatgttaagaaattttgattgtgcagagtctacccaggcttgagggttcaattgatcatctgcctgagaaattgtatgctggagatttacgttatcttgttttagagttaagaaataagtcagattccccaacaaaggtagttttctttttctgatcaacccttatcattcatgttctctaccgtattgccagttaattcattctgttctactattgtgtggatgttacttgtctatgagtttggtttggtatggtctggtttatcatactgatttttgcttgatgacccgataatgtgatgcgataaaccgagttattcttgtgctaacaaagtctgtctgtcctcgtagaatcttaaaatgaagattagccatccaagatttgtaagtcctggaaatcatgaagaagagctgacaaccgaatttccagattgcttaaagaagggcgatgaacataattttgttcagcgtgaaactaatagaacaagtagtgtatttgcatttccacaggtctgtggcaaaccttttcttcaagcctcaaagacgaatgtgcatgttagggtattctaacatggttttgaatgctgatctctttcaggatgtatcactgcaaggagacagatcattaaggtggcctctttggcttcgagctgccatcccaggaacaatatctttgtattttacgatatactatgaaatggaaaatgtatcaagcatgaaataccgcaccctaaggatgcattataatttgcaggtgatgaattttttggctgcatttgtttttttgttaagaatttgactatggtataggcagatttgcattggctaacaagtcttaaccatttctacgtcgtactctttcatctaggttttaccgtgtctacagacctcgttcaaaatcaccccatctccatcaagattgcaagattttcttgtgcgtatggatatcgtgaaccgtgcgaagtcagattgtttccaaattcaccagttgtcaacagttgggtgccggtggggtatctcattgcttcagcctgttgatacaatcttaccttccaaatctctactcgctgggcaagctttatcttgtttcttcatgataaagggtcgtttaaacttagaaagttcaataaatgcatttctagtagcctagtttggtcgttcccttttttaagtctgaaattagaattttgctcaaactttcaggattgcagaaaatccgggactgaagactaggaaaccacgttccttcctcccagccaaactgacgtaaaattgtatactcaggatgacgatgaaaagcttttcgatatcgttagctcacctttagcaagcttccatgaaagtgaaaggtcatgtcagggaccctcggttcaggtaagcgaatatcctctttcagggacataaatcttatgtatgacttatgtgcgtgagattttttttggaaatatgtattactctcttaaacacagtacactgcactggtaacttatcatcggaactgtggtgaacttaaatttctttgatgaaacaggtaagtccaaatactgttgacttcatcctaatctctcacctggcgaaaagcagcagtccatcagcagttcccgatttaccaaagattttgtctcaccattcatgtcataacaggtaaaatacccgcaaagatatccttctgc

SEQ ID NO: 67238 - DNA, 267 bp, Arabidopsis thaliana landsberg
aaataaaaaaacgtctgcaaaattaactcaatttgcataagcataaaataaaagatgagaagaggtacaaaaagttcttatgcatggaaaataaaacgaaatgttaaagatcgtagaagattatttttggtattctttggctaatcatatgcagcaggaccctctatatatcatgtgtactcgatggattattgccaatctatacgattgttgaccaaaaattataaatcgctctttttcttagtacatttcagtagattctatgtg

SEQ ID NO: 67239 - DNA, 471 bp, Arabidopsis thaliana landsberg
tgccgcgatcgagctggaccgggatgagcaacagcggggcaaagcgaacgttctctgcgttgttgggatccacccacttgagcgcgcctagcgccagaaacagtacgttgacgccctgctcttcctacagggtattcgcgtcgagatagagctccaggaggcgcttttgcaggcccttgctagtcagtcgcgtctggagtttggcatctgcatgccggcgcaatacgccgtgcgcgtccgggctgtcgtcgtccggtcggcgcgatcttcgatctcgtcaagcgtaaccgtatgccatgcttattacgactagtctctgaacgtgtagctgggcgagccttactcgaacgcacccgaggaaagagaccggtcttttggctttggttggcccgccccggctatgaaggatgtaagttttatcccttcgctgaaccctacttggcggaaagaatattctttcgggtctttttt

SEQ ID NO: 67240 - DNA, 308 bp, Arabidopsis thaliana landsberg
aaaaagaaaaaactaaagtttctttgaaaaaaattatgcacattgcgatagatgttggaatgagagggaaattcttacaaattcccaacaaccatctacatataaatatatactatctccacatcctgaagaagaaggctaaagtggaaaatgtgaagtagaaacgggattctttcacgatttgtactatatttccaatacgagatgttaaaagctgatggatatgggtattatttatgggaatggccagatgcgagagggtcccactaacatcagtgcctatctgtgggtagggaagggcggctctt

SEQ ID NO: 67241 - DNA, 596 bp, Arabidopsis thaliana landsberg
tacttgacaaaaggacacggctcatacaaaaatcagagggcgaaatcaaatcatgtacttttgcacagagttgcttgaatttcgtgtgtaaactgtatcgacgacaatgggagtacaagaaggtggggagatttaatgcattcatgtcaaactttccagctcttgtgatggaaaatacaaaatgaaattgctaatacaaaaaccaaattgaaaatttgtgcacagaatttgagccaaatggaatgagttattcatcgactaatatctgagctttcgtaaaaaaatgcatctttaagaaaacaaatgtctaaaggaaagagagagactacctacgatatgtgtaccccgagacttctgtgaattccataacattgcatgcagattaagatacctaaattaacactagcccatcttggacctctgcaaagcaaatggaacagtattagcaaatacatacatgaaccagcattataatgctgaacattcacatcaagtagaaaactatactttgtattgcagtcagcaacattatctgttctctggatgttaaagaagccctttaagattctgcagataagtagtaccaaaatcaaatg

SEQ ID NO: 67242 - DNA, 527 bp, Arabidopsis thaliana landsberg
tgatttggatattaatcgatggcaaaatcatgcaacatatgctaaagagatcacaaattaagttcaattatagaaatgaagaaataatagagagacacaggttttagtttgtaaaacatttgaaaaactagatggtatttaatattaattattcaacctcgagagaaaaatgaactttctatctttttttataacctacaaaaaagagtaccttctatcttgtttctttttttgtcgacctatcttgtattcgttgaaacaacagataaaaggaaagagacagcttaaaggaagtattagtaatttgttagtgatttaaattattagtatgtgttaattcgaggaagcttcgttgaacagagatcactatattcgcttatctctttaatcaagatatatatagaaaaaaacaatgatctttcatgatctatatgtatattattcatccacgtgggtcaaccaatgacgatcttatatctgttgggttagacaatctcatctcataaacattaatttatttgggaact

SEQ ID NO: 67243 - DNA, 1870 bp, Arabidopsis thaliana landsberg
tatggtttaaaactcgtggagaagtcaaggcattctcaatgcataatactgagctgaggatgggaagaggatcttcgtttcattttttttgttgaatgagtcaagtcactttcgtttataatgctaattatactcctttggattgatgtaggaacgcagcgtctcccgcgtcttgttggtctcaccaaagcccttgaaatgattttggtatgtcagtgccttattcttatggtagcattagcgtgccttggttaaagtgtaatagcatctcttttgttgaaacatatagacatctaagccagttaaagctgaggaaggtcattctttgggtcttattgatgctgtggtgccacctgcggagttagtaaccactgctcgtcgctgggcccttgacatagtcgggaggagaaaaccatgggtatctagtgtttccaagactgataagttacctcctcttggagaggcaagggagatactgacgtttgccaaggcacagacactcaagcgtgcccccaatatgaaacaccctttaatgtgccttgacgctattgaagtaggtattgtttctggtccaagggctggtttagaaaaggtatgatacctatctttcttcgcttcatagtatgtcagttctttaaccttttctccccgactaatgatcaatatgaatttccaccacattgttacttacaggaagctgaagtcgcctcacaagtggtaaaactggataccaccaaaggcttgatccacgtcttcttttctcagcgaggaactgctaaggtctgtgagtctttatgcagtcatgtaatttggacttatgtgccactaaacctctggctttttctttttctttacaaggatttaactagttgcatgaaagctttccctctaatctattgtatggacaggttcctggagttactgatcgtgggttggtgccaaggaagattaagaaggtagccataattggaggcgggttgatgggatctggaatagctactgcgttgatcctaagtaactatccagtgattctcaaggaggtaaatgagaaattcctggaggctggaattggcagagttaaaggtgagggtggagttccatacattgcataccaatgaattgcaatagcttgatctgactaatttcataattggatcagctaatctccagagccgtgtaaggaagggaagcatgtctcaggaaaagtttgagaaaaccatgtctctccttaagggttctcttgattatgaaagctttagagatgtggacatggtcattgaggtaaggatgaacataacaagctgaagtgttgtttttttattgggttacatgatctaagtgaattgatttcttatgatgtctttttggtggcttgaacaggctgttattgagaatatatctttgaagcaacaaatttttgctgatctggagaaatactgtcctcagcattgtatccttgctagcaacacatcgaccattgacttgaacaaaattggggagcggaccaagtctcaggatcgaattgttggagcacattttttcaggtgattacatatatcctttggcgtttagatgaatttagtgaaaatcttatgcccagagtggttttactcactccacacataatcatgtaccttcatttttctgatgcagtccagcacatatcatgccgctacttgaaatagttcggaccaatcatacctctgcccaagtaattgttgacctgttagatgttgggaagaagattaagaaaacaccagttgtggtgggaaactgcccagggtttgcagtgaataggatgttcttccctaacacacaggcagctatgttccttgttgagtgtggagcagatccataaggaattgccagg

SEQ ID NO: 67244 - DNA, 568 bp, Arabidopsis thaliana landsberg
aacacccctaatagtcatgtctattcaaagaaaatgtttctatactagattccggaattaaaattagagtttatataagcatgatgtattgattttaaataaatatatttatgctccttgattgcatattggttattgaaattaaattgatatatttaaagtatcagctatatttgtttttgataaatagtgttagctaagttaggaatatatgggttaaattgtaggtaggcaattttggtacgcattgttagcgagatatcaacttttcttgagatacaacatattgaaggctttacatgttgacaactaaagaagaaaaagctctaaatattgatgccttatatgagaaagatataacccttcctaaagccgccacatacatcacaatgctatagatagattagagatccacagctggcgtctcaatatagatatactaacccataattaataaggtgcgtataagcaacttttaagtaacgaatccaagctattcaaactactacaatttggattatcaaaagcttgaattctagagtctaatacatgttgcaactatcataat

SEQ ID NO: 67245 - DNA, 603 bp, Arabidopsis thaliana landsberg
aaattaaatttaaaaggacttattggctaaggaagaaaagattctcaatggagggtcgtaaattttttttttttttgatatttatatcactatgattttgaaagaccaatgtttggagtccagcacatggcacatcaattgaataatgtggaaaaacgcaaccaaagttgttatagccgatccagattggtcggtcggacctgtatattactttctttcactaactttggtcttgttttatagctcaatctagcgatttatcgagttggtaatatttggacaaaaaaagctcatcaataatgccatcacttagacgccttttagtttccaacattcattaatgttaccttgtatagtaatttgtaattacataaaataagaactgaagacgcaacctcgacatgtttctcttattatgatgaacagatactatctgaatatcatgaaactttggtctcaagatagagagacacttactttgataagagtggttcgatgagtgacatcaacattgctgcattttctatggatattacatttgactagcttgcttacgaatatctatattcaagatcaaacaaagtgataacgtatcaaagttgt

SEQ ID NO: 67246 - DNA, 621 bp, Arabidopsis thaliana landsberg
cctccgttgtctgtttgacctaattgcttggccatcagtcaaatcccctattggggttttatccatcgctccatacccaccctcatttgtattggcagactcttccgcctcggtatggccatccgcctctaatgttattgcaccagtcgattcaatagagttactttccattatgctcgctcccagttgaaatgaaccgccttccaaactgtgtacttctgcatgagaactggtcgtaatcgtcttcgtcgacgtcagactcgtcgctgtcatcgatacgaattgagaacttgaccccgatactccggaagagggtggcgagctatccaatgatttctaaagtggattggctcagatgattttatatatagctggcgcgtccaagcaatgttggctcaaacaagcacgttgtcatagattaaattaaagataatcttgtcataccttgtccagttcctggaaagagaccaaagaagtgctcgccagaatctcgttctttccggttgtgacatcgacttcgtttagaaccgtatatcgtggcctatcagagtcaattccgttttcacccttgatcgcttcagccgtctccagactggacgacaaaagtgaactgcttgacat

SEQ ID NO: 67247 - DNA, 487 bp, Arabidopsis thaliana landsberg
gcgcggcgcctgcacccaagccgaaaagctggctttcggttcgccggaggcttctgcgcgatggcggaccggaactcgcgcagacgtgcctgcagtctcgcggcgttctcccgtcccatccgcagcatcgccttttgtcccgacgagcgctgctcgagttccgggtcggcgaataggtaaaggaccttgggccgcacgagcggaatcggctcggccaccacaggcgtggcgagaaggtgatcgatgatgtcgatcaaacgatcgttgaagtagcgcgcccgtggattgccgagacggtcgtacgcgtcctggaacagcgggtagtagcggcgataggccgcggcgagcttctgcatgtcgacgctgtcgaccatcttcacaatcggcgcgtatcgggccgcgttggcagcgtcgatctgcagggcctcgccttcgcccgcgatatcgaatgcgcctggcacacgtcgtatcggacgcagccacagcg

SEQ ID NO: 67248 - DNA, 572 bp, Arabidopsis thaliana landsberg
gaagtggggccagtaccatctgatcctcttcagtcttcatcggttcgcgtactgtgaattttcttcaacggaacttgaatcttctgatggaaaattagggtttttgtttttatactttttttctgactcttttgagttttgagtaattgggaattcgatttgattccgttgcaatggtggagagacggaatcctctggttctatcatccacaagaagtactctccgttcagtgctcaattcgtcacaacccagctctgccgacggcgaccgagttctgaataaagacggtgacttgttacgagggaacgctaggttgtctgcgggcattctccggtggcggaaggacggagaaaatgtttccgatgcaaaattggattctttagatgactctgcattggttggactctccactcaattgcttaagagactatctatcaactctggttctttggtatgtccttctcatcttgttcagtcaacaaagctggatcttttctggataattttgttgcttttgatgttaacaattgagtttttaaaatgcaaggttgttgtccagaacattgagata

SEQ ID NO: 67249 - DNA, 2304 bp, Arabidopsis thaliana landsberg
  unsure (1)..(2304): unsure at all n locations
tttctgtacgtcaaattcagattcctaacaatttagtatattcaccactagataagataaaagcaggtgcatttgtgttctgcatgactactcctattgtttgctcgtgagtgtaggtttttactatagttagttgttaatctctacgagattgtactgtttttttcaaggaaatggccattctagctagttaatgtgattaattgtaagattgtctaattttaagatttgtctcttagatacatggagaaaagacattgaacccattgctattgaagatgctatcaataaagatgcttctgggaagctaagggttgtatcaatctctaaggtatactctctgttcaggatggttttgtttcctgtttttagtttactggcaaaagtatgtgtaaagatacaaatacgttctaattcttttttcttggaactatgaactgaatctgcaggtttcccgttcatttcacccaaatttctcggcaaaatggaggcgctacttgtatatcttccccttggatgatgctgagccattgcgaaaaagtggcgagaatcatgagaactttatctttgatgagaacaagaaaaagcaaagaaatggactcttaagtgaagagattgctgaaaaagtaataatgagcgaggatgatgagcttgaaattgaggaaaccagcaatgcgcttgaagtagtagaaaaaccaagtgactttagtgtaagcaaggttgatcaacttttgcagcaccttcaaggaaaagtattatcctacaagatgtttgcgcgtgatacaaaagctgcaagaaacgagtaagagctcacacaaggtcattattattacgttttagcatcgcaacagttcttgatcactgttttaccagcatagaaatttacctttcttatcagcatggtgtacagtggcatagatttgtagtgtaaatggtttcttatttggattttcttgacattgcagaggtccgcctacagaatgttttatgtaccatgcacgggcagccgagattagattgtccagttctgtaagtgttcgattctgttctcacattttagctatcatttctttacttcacacccaatcactctagtatcacttgttgagttctggtacttcacgctatagttaatacataacaatttaaggcttagctcaaactcatatttttcagatatatagatatgatattaggtcgtccattttgtggcatgggtttttggtggatcaatagtacttgtaatcctggctactgaaggatcaacattagacttgacagatacaaaactgtatattgcatcttggtttttgattaaacgttcttgcgagttcttgttcattgcaagtgtgtcctaaagatgagataagctcctcatgtgaaactaaaattgacttcttttgatgaattgtaccaggactgtgtggaaggaagaagggttatgtgtgttgagcttgtggctaaccgatttctccgcaaggtgtttactttaagcctaatattagcttcaaatacacttaagttgcaagttttggttctatgtaaaaaaggtttactttaaactttaaaaaagtaaagaattacactgtattaaagacacatgtatgggaagttgtacaacagcatccccgatctcatccctaaagaggcagagtcatatttgactctcaaatctgtatctgctcgtcttgttttacattgcctaataatctacttatacgtttatacatgtctatgtaactttcagatggttcgagttcttgtggcaacatcaatccgagaagctgccgctggtgcggaagatnnnnnnnnnnnnnnnnnnctagaagcttcatgcagacgagccacagctcctccagctccatctgaaggtctctgtctattcgacgttggttatactgactttgaccctcaaacttctctcatttcctgagaatggcatgttacatttacttaatcatatattggatgaaatctgcatgatttagtatgtttagtccgcttgtcgttaaagcaagcaagacttattttattaatatctcatgattaatagtaagggtatagttatatttgcccaaagccttgagtcattgacaatgatttttatttaatgggtctattgcaagatctatttacatgccatatatgataactatgtgaagaaatcatgtcatgatctacagaaagatggaagagagaagtacaataatgagcggtattcatgcattagtgtagtcatgtctgttgcagatacattatatgctataacacggaacagctttcatctacttccattcccttagt

SEQ ID NO: 67250 - DNA, 1153 bp, Arabidopsis thaliana landsberg
tgaattgcgtacgttttgccaccggacttgcacttgatgatcccttcaacggcgatgggaatcaattttccggtctccgggtcagcttcattgccgtaataagcaactgaagatatgattagagatgagaagacgatgagagaagctgcaaatgagaggcgtgagaaagccattttttttttttgcttgctttgtttatatgttgcttaagcaagtgaagttttttgaaaactaactattgggttttatagattaattgcgttgaaaaagaaggttaattttctaattaaattatttggtttagtgtacattaactaataagaaaacgagcaacttgtaatagtaaaaccaaacaaaacttgaaataagaacaacgtgtatgcacggtagacaatagtgttattgtcccgacgtgagtcgcattatagtgtgtggattaccaattccaaagacggttctaacattatggatggacacgcatatcagttttaacttttaaaagttcggatgtctctagactaatcggaccaatttagcaacttgtgtgcttcgatgtgttggactgggctagattgggcccaaatagcctgttttaacattcccaaagatccaaacaattccttcttctttcttccgaacaattcaatgtagatccgagcgaatctcctaaattactaaaatgcacaattgtgctcagcttaccaaaaaggcccaaaagaccaaaacatattctgattttttctctttagatacaattaaagtaatttatatagattagaggcccaataaggttcacgtaggcccaaacatattaaaagtaactcagaagagatccatcaaaattttgattcacacatctgtttaggaattaaaaattttatttgatcggttattcattccttttcatgaaatcatgcaaaaaatcaaaaatcatttttttctctagaaactacgtggcgagaaagcagagcaccagttgtcttcttgctctgattatctcgttgaaaccgctttcaaagcagagcaaaagagacgacaccggagcctccgctgcttaacttttcctttaaactgtgcctgctttcccttatataataaaatacatacaatctcagagaaacatgtactctcctctaacataaacacgtcacgt

SEQ ID NO: 67251 - DNA, 680 bp, Arabidopsis thaliana landsberg
agtcttatatgtgaagctcttatatagagagattttgattcattgaattgatctctgattttcatttttttaatatgcctcattgaccatttttgttttatgtactgtacatatccagatgatcatatcgtgtttccgatctttacaaccattttttccacactaaactgttatttaaataggatgattcattgcatgatacttcaacgaacaaaatatgctactaagtcgccgttgactccaaaaataactctagcaaatttagtgaaagattaggcctttaattaatctcatttaattaggaaaaatggatgaaaccccctcttttttttatcgttttcataataaaggaggtttagaaaccaatacaaaaataaaaacagaggaaaaataatagaaacagagacaaaaccaagcctaaaaccagaggaagactaacggccatctacaaaaataattggtagaaatatttggtaagaaaatagaaggaattttttttaccaaaacatttgtaagaaataatttccaacgattttcctaaaaattatttcttactgttttttcctacaaaagtaatcaaaataataatgaaaaattatttaaatcaattttagttttttttgtattttttagatcaaaagttaaaatagaaattagataattatttattaatcaaaatc

SEQ ID NO: 67252 - DNA, 564 bp, Arabidopsis thaliana landsberg
aaacaagttttaaattaatatgttaaaactcaaaatctctaattaattccctttttttctttacaagtcctctaagaaatgaaaaaacataaagggaaaaaaaaaaaaaaaagagattagagaagactcaaaacgattagcctgcaagacatggatcattacaccacaccataagctcaaagcaacaccgtatcttcttcttatacaccaaatttcacacaacacctgacgggagacgaagaacaagctgaccacccattaaactgccacacaccaaaaacataaaatacttacaacacccttcacaatgtctttaagatcagcaatcatcacataactacaaccaatgtatcaacaaacatgacgatgactgaaagcattaatgatttacctcttgacatagtagtagcagaagtcggctagaatgaaggtttggacgatttcagagagaagaaccattataggccagaaaccatatcctaaagcagtcaataaaccgcctcgagtgtccaaaacctacaccatcatcacattatcattatatactacacaatcaaagcttct

SEQ ID NO: 67253 - DNA, 676 bp, Arabidopsis thaliana landsberg
cgtggtagtggtgaatagtctacaaaaatctgtcgattgcgtggaatcttcaaacattatgactaacggtaacgcgaatgccatgattggtcggactatggttggaatatgtgaccatgacagacactgccttgaccgggtccgaggattggaacgccaaaagcgttagctgtgcgtaaaacaacctagggttccttgctttgaagaccagacactagacttacgtgaccggctgcccatatatttcattacatacaatgcattttttatacctgcactactaattataaatcggtatctataagaactgtatttaatagcgccggcgtctcgttaggcgtttgatagtttgacggtggcagctgcgaagcgggtctgaaaatataatgacgtgggagtgtaattattttcattaaggcttttaattaaagacattaatcaatatagtgaacaacttacaagttgagggttgattatgcaagatattggccaccaaatatgtccattaccgtcgatgcgcccaccttcttcaactcgaaggttattgacattttcgaacacaatccaatgcctacggtccttgtaggctgatggattatcccatgccttaatcctttccggaatctaactcaccaaaaatgaaagttataagaggaagaaacattataacaaaaaa

SEQ ID NO: 67254 - DNA, 572 bp, Arabidopsis thaliana landsberg
tacgccgcgtttgtctagaagtcaaagaattgaccgttaaaagccgacaaggtctcctgattcaatgggggcttttaatggtctggccatggccgtaaacggaaacagtactttcagatgtacttctggtcaacgatcaattaaaaccagatcaactaatcattcatttctttttcaaattcgcatttgcatttaatgtgagacatcacataatataacaaatgcatgcatgatctttgaattattgctcaattctaaccagtaaccactagttttttttatatttgatgattattgtccaacatttctatatatttatatttgtttacaacgtttgaaaaaatcatactattttttttgttctcactactttttccacagttaggaataagagaagtgaaaaaacgacacccccagcacaaaaatcttcgagcacagttgttacatatggtgtcaagacaagagatctaaagtctaaactaatcgaaaggaataagttaaacgatttcacaatgtgttttccgcataaatagtattaatgttttaccatagttttcaattttctggtttcc

SEQ ID NO: 67255 - DNA, 218 bp, Arabidopsis thaliana landsberg
ttctctcttctgttactcatgaatctcttgtctaaactagtgatatgattcttctgataaactttcaattcctcttttgtttttttcaggatttatatatgtttgtttttgcttcatttgtgtcggcaatgaagaagtctccttattctgtttgaaaatggcgaacaaaaatacagattctggctccactccattgatttctcgcaacagacacattc

SEQ ID NO: 67256 - DNA, 421 bp, Arabidopsis thaliana landsberg
  unsure (1)..(421): unsure at all n locations
atagcatagtttgatgtaacacctcttgtatttttcganttttaatatcactttccaaaagatatcaaaagtgaaatgtgttagtttcgaatttgatcttacgaatataaactacccattcttcgtaatatttatgacgcaaaagaggtgtgacgttagacaatgcgtaagcaatgttaaggtgtcgaaaaaacttgacctagattagattttgtcatggtgaaacgaagattgatgataatgatgttaatatgtggttgtcactagcgaatataattcatatctacttatcgtgtgatagatatcaaaagaattgtttatatcaatatggttgatatctttgcgtcatgttatgttgagatatataagtaaagtactagagatgctatngttatgtagagtatgatggttgatatctcgt

SEQ ID NO: 67257 - DNA, 385 bp, Arabidopsis thaliana landsberg
ttttggaaccctacagagtatctcttgtccggttcattcttaatatcttacatcctcattatacttatagattgttaatgctttattttattaaaattagaataaatatagatagtttcacaaaggaaatagtttccttgtttcggcttattggtatagagagtctggtttatgtaatccgggaatcaagttatatttcactggttaatccggaacaatctactataattccggatttcaatgacacatactctattattcctgattaaaagttaaaaggttataaaaattacatttgatatttaattgattgaactgtatttgtgtttacatattgaataatgtaatgtatcacatttacgttttaaaaaccaattacttaaac

SEQ ID NO: 67258 - DNA, 322 bp, Arabidopsis thaliana landsberg
tgatcaccatggttgatgacacaagatcactgatccaaaccaggttttaattgtgaattttcgcttttacaacttcttcataagtaaatttgaagtgttatggttcttaatgtttttttcctcctctgtagttttgtattatacagattttgattcggaagacaattatgatgatgagtagcagcagtagcagtagcaatagtagtagtagttatacaagatgcgttaaaactcggtcatctacaaatactaacattgtgagtgaggaatctcaatcgttttgatctctctgtttttttttttgtgtttgccgcttaatgac

SEQ ID NO: 67259 - DNA, 571 bp, Arabidopsis thaliana landsberg
cctcaaatgtctttatagagacattttggagagagatgtctcaaatttaaagacccttttatatttaattattcatatcttataattataattttttaatatagctaaagaccctctccttttatatgcaatagagatgctcttaaggttctagtcttcatatatttttttaacaaacattattatacaaaatcgatttctataaaaagaaaagttcagagttgaagagtaattgagagtttaggacattttatgttggcttttcttgggggttagatgttaagaaacacttgcttccgttgaagcttccttcttcttgtatctcttcgattattgacttttttggttgcttcatttgatctttgactttatttgacgttatcgagtcacatgattttcttcctgtgtggccgcacccaaaacaaaaatgttaattcgtgatctccttgacatgtttttgatcaatatcgtaactttgttacacaatacttaattctgatcatccatggtggactggattttgtaatgcgttgggccttaagctatcatttgctctcttatcacaccccta

SEQ ID NO: 67260 - DNA, 569 bp, Arabidopsis thaliana landsberg
gcatcaaaatgtagtaatcatattgcaatcaataaaacgaattcgagagcaagatttctgtagaatcaaatcacaagccaccctaatacgatcatatacagatcctcaagtgtaaaattcagaaacaaaaattccacattttggcctaagagtgattctattacaatccacacaaagttcctctgtacctgaagaactaagtctagatcacagaaccaagtaatcaaatcagaaaactcaccttcgattgaaaatcagcttgattcgaagcagctttatacgaatcttccaagagctgtttaaaggaaggtttaaaggagagagacttatcgatccaggcgccattagccaccgagagcttaggaccaccgttagcactaccgtcagcgagaacagcggagacgatttcggaagagaatgaattaagttgatcagtggaagagaatttgagaaacgagaggatctgatctttggtagcgccggcggatccagcggcgattatactgagtacgacgttgattgaagccggggagaagatgacgttggagttttgagagacgggggtgatt

SEQ ID NO: 67261 - DNA, 1027 bp, Arabidopsis thaliana landsberg
tatctttataaaatgaaaaccctaataattgaatttcaaactcccatatatgaaataaaaatatgtaggataattttcgaaaccgtggtgcggctcaaaaagtctaggtggaagaaggttcagtatcttgatgctctagtgaagagatccatggagctccaagtatacctctacttaatttcatatatgtactacttcgattcattatgcttgcgtattacacatatgtatatacatttcatttaatgtgcagagagaggtgagtgagttgcgttcccaactagcgattaccagtgaacaaaaacgatatctagaaaatgagcaaaggcagctaaaggagtgtatctctgctcgggttcaacattgtatcaacagcgatggtatattaattatatacatgatagctaatttaacttaattaaatatatatacatatatttgggattattgatataacaataattataatgctaattaataggtgtcattgaggagtataaaacggagatagagaggctgaagacgaatctggctccactctccaatcttacttagttgatttgaaaaaacccctaccatttcttcgattcagtttattcttgagttgttttctttttttgattcatgtgtttcggtttacagtttttttttttgttttgaatgttaagtttatagaatattgttatcaaatgcatatcaaatcagtgtgcatttgtttcgtttggtcttaatttcagtttgaattatctttcttaagaaaattaaagaacattaaaaattgagtgctaatttcggaataaaagccaatttgacgaagttaatgtttaatcaattttaaacaaacgggtatatatttaataatattcttccacgtatacgcatgcatatagagccacgtcttttgaagatttaggtgtattagtgaaagatagaatagagacacttaaacggaaaaaataacgcattaggatttgtcgtttctttttattagtgtagaaaaatgccaattttgaactcaatataggtt

SEQ ID NO: 67262 - DNA, 494 bp, Arabidopsis thaliana landsberg
  unsure (1)..(494): unsure at all n locations
agatgttataaaagaagacatgtggtcttctttctttgttttctctccttttcatgagnnnnnnnnnnnnnnnnnnaacctctctctctctacttttttgaccatagtatatgtttatgtactttttttttttttgtaaataaatcatagtaacatcatgtcaaatccttaatatatctaacatactactattcttttttcttcctatatatttatgtataggcatatcagtggtcgatttattttccacatatgaacaactatcatcagaaatacctgattattttccatatacaatttgagaagttttatactactacataccaaatatgttaaacacaaacatgtgactaaaaatagagtttgaataaaatttggcaaagtatctttagacgtgaaaaggatggtgaacaataagagggatcccatgggaatatgggacctctcttgaaaaaatctttagccttttcttttgtctcaattttaaaaaatac

SEQ ID NO: 67263 - DNA, 558 bp, Arabidopsis thaliana landsberg
ttgtaggaacattctttttttaaacttttaccattttgtaccgggcacaaaaaacccgggactctgggcggtcttctgataatgcagaccgctttcagtgctgcgccatgtccagtaccacacgcccgcctgacgggcactggtccatgtagcgatgcgcctcgaccacctgctcgaacgggtacaccttgatgatctgtggtgtcagcaactggtcggcagtgaactggttgatatcgcgcagggcgcgctgcaacgccacctgatcctggctgatgcccagctccagcttgccggtgaagttaccgatgcaatgcacatagaactggatgttcttctgaaacgccgcacatgccgggaacggcgtctggttgacaccttgcaggccatacagtaccaggctgtcacgcggtgccagcacattgcccaacaacgacatctgcgtgccgcccatgccatcaaggaccatgttcacgccacggccatcggtgtacttgccgacctgcagcaacaagacctgctcttcgtgacgatcaccttgtggcgcccaggcccaca

SEQ ID NO: 67264 - DNA, 2248 bp, Arabidopsis thaliana landsberg
gcccccattacagccatcagtgatctaaaccaagattaccagaattacccacccaaccaagaagaagaagaagataccaacacatctaaagaacaccactttagagttgttataaagcatacctgagagatatggtactcaggaccattggtaagtgagaatgtaacataccctttcgatgatacagcgtcatctgcaacaatcaagtccttagtaaaaaagtccaaaataaatgatgcaaagaaaataagaaagacacataccagatagtaatgttggccaacaaggagtaagatcagtgttatcttccatccaaagtcctttactgccttcaacggttccgacaagaccatctttcacagagactttagatccttcaaattcaatatcttgtgcatctccctgagctttctcctgtacaaaaatacccaaaatgacaaagatttagagtaagattttgagttttggctacagaagtttcactattagtttacaccaaacgagatgaaatcaattatgtcctaaagatccgcagaaaaaaacagttgagtctaatttgggtttcttatgatcaatgtccaatccaacttatgatccaaaaatggaaggtcttgttttgatcaagtaaatttcacagaacaactaaattttctaactttgaattagatctaacttcaaaaggcatctaagataagaatcaacacagaacctatctgaactaagctgaaatgagtatcacattaagagtgaaaaaagtgtcggcaaagaagattacctgaagagaatcaaagtaatctctatgaagcatctgtccaagcatcacaaacatggtaatggtgagaataccagcaactacttgcctcaaatcaacacccatttcttacctttctctctaacaaaaaaaaacagaggtttctgagttaaaatagactaagggaagaagaaagaaaaagagagtccaacaaagagaggtgtttgtggggcagatagagacaagctatcttcctcaaatacgaaatctcagttctctttcaattaatgttttgtcaaaaaagctctctttttttttgttttaagggagtgttattgtcagtgtgttgattgttgaagttgaagtcttacgctatcttacacacaaaacagccaccgacacttctgtcatggattttggtataaacactaaccggtggctggtttcactaaaccggtcaaactaatacaacattctaaattatttttggtaatctttacagttacattacattttagagtttaacagtttatactttagttctttatactatgtaaagaattattagaccttacactccaaccaaatgaactatagttccaaactaagaattcatgagagtcaaaatttttgttttaaactagactaattgtaaaattcaataaattaagctgttaaataatttatataacttcgaactcacaaattgttgagctcgttcaattggtttttacatttgttagtgttacattagcaactataaaaatattattttaaacttcaaaatgtggttgatgaaaaaagataaagaactttaaatcacggactcatcactaatcgtatcaaaaagaggagttggtaatgacacaatacataaactaaaatcccctttatatataataaaaatagttatttaacaaacaaattataagcaaatgataaagcactggattacagataggttttgaaacacattttaaacatatcataatgttagacatgagactaatttagtaattatactaccccaaaagcaattgtaatgatgcataattgcatatagtttttgttagagagcccacgtacgagttcaactttttgctaatcacacattgtttactaatcatttaattatcaatgtaccgaatcattagtagtacattagtcatatcccagaaaattggtggaacatgaggaaaaacacacatgctgatcaatgattataatccatgcatgagtcgacctgttctttttttttatttcgtgtcttctaagattgtgaggggatcacaatgagcacttgattgattgttgaatggtagcgtaactgctgtgtgcaattactacaccacttcataactttttgatggaactctctacttcttctttttttacccaatgcaggcgttaatatatctatctacgcaatcatatactatcgttgtatatgatcttggaaacacatataagcaacatataaataatgaacgaaatcct

SEQ ID NO: 67265 - DNA, 564 bp, Arabidopsis thaliana landsberg
  unsure (1)..(564): unsure at all n locations
gaacgcgctgaaccgcgcaggaataatgctgccttccccatagcccgtatacactacaactctgacgccttcttctttcaccacctgaaggatcgggcctgtccagacgtcattaacggccgtggggatcaggttcacgccaaagggtttctcggtcagccgtttggttntacgaatctcctcgcgcattttttcggcggtctcttccggcgtggaaactgcggtgtccgcggttaaaccggcattgggtcccagcacgccgagcccgccagcattgctgactgcggcaactaaacgggcatccgtgagccaggataacggtccctgaataacaggtttttcgatccccacgatctgacagatacggttatttttcatagcggactctccctcttgattgaatggaggagagtgtagggcgtaaaattgttaggaaaaatagccaaaaagattcatcactgttataaaattaataacaataattttatcccgctcgcggcaagagcgtcccttatgaacantaaacctcttgagtctattcgaattttattgaaattgcgagtc

SEQ ID NO: 67266 - DNA, 2274 bp, Arabidopsis thaliana landsberg
gcagagtctacacgatcccccccattgtatatctctcaccatcctaacaaatctacactaacgagtcaccaatcaatagtcagaaaaaaaaaaaaaaaactctaatcactactagtcaatataatatgatgcaaatcaatctgaagtctctcatgaagaagagacacatccactacattccctttctcctcctttgccgccaactccgccaccggaatcgccgccaaaaagctctttatatattctctacaacactttttaccctcacaaaccaacttctccgacgattcctctttctcatacatcaaactcgaatcatcaaacttaagaatgtaagcttgcttgcatccttcaaacaatctctcccctaacgaatcaataacgcaaaaaccatctaaatctgcctttaccacgaagaaatgatcgttccagctaacaatataaaccctagtttcaccattacttgaggctaacgctacttctttctctacctcgtcccaaatctgatcaaacgacatcagaccatccaacgaagcaaatctctccgggctgaataacccggtaaacgatttatcggtacaaaccctaaccggtcgtaaatttgcggaaacgatcgtttccagatcgaaatgcctgtttggaaacaatcttagatacgattctttgtcgcaaagagattgccataaagaagaaccttgcgtgattagtgaatcgaactccgttcctgaaggatttatgagcttaggattcgcgtggaaccaatgagccaccaccaccgcaaccgcggcgcatgctgcttctccggcggcttgttcgcttctttgatcaatcgacgctaagtaaacttccgatttcagcttcgattttccatcgcggctcactaaatccttcattacccatttgtttgcctcgattggtatctccgtcgccggtttttctagttcctccgatggttttgttgatgtcttcgtaacttcatcctctctctgcaaacaataaaccggtccggttaaggacaaaatcgaaccgagtttgaaaattcagaaagtcaaatgcgtaccggttctcttctccatgtcatagaaaagcttaaccgtcttctcttccaccaattaaacccggctttttgacccggttcagactggttctcatccgggcttgaaaataacacggtttcaactacggggctacgtccgcctgaactcgacgcggtggctggggaggaaaaagagtcgaaatggctaccaccgccgcgacgactcgttgactttttcttcggaattgctgagtcaacggagatctgaccaagttgcataaagtcgtctggttcggttcttacctcagaaaaagtcacgttgacctgatttaaataaacaaccgcgtgtcttaattaattaaggatttaggataagataattaatttacttgttctttctaaggaaagtctttaaaacctttccatgatgtttccgagaataatttaataaccattgagaacaagaataattcatgaattaattaaaaatgtgtttaggttttaattgaccagattaattaccataagtgttgcttccttcgaaagtacggaaccttttgaccgtatcagaagctttctctccaccgtcgattcttgtttcgacgctaactccgataaatccaacgatgcttttccgatcaaagactttttgttttttgcgtccatattctcacccttataccaaaactagatgatttcagctaattgcattttaaacatcaaattgattatctaaaaagagaataattaagaaaactcacgtagaagacattgaaggagaggttccatgggccaacaatgcaacaaacgcgttcgaactcttcctcccattctacgtggtttgagcctaaagcaatcggtttagagctcgtgtggttaaccggtcgattagaccgatagaatgggacgaagcccaatccaaaaccggagacaggtcccttccatttcacctccaccatcgcggaaaggttctttcctgccgtttcatcaccgagaatagccggtaaaccatcaagcctcaccggcttcaccgtcacgtgaagcttcctcaccttctttgcgcatagatttcaaaagttattcctctgttttcttaagggtttttttctctgtttttttttttgggttttttcctctgtttgtttgtttcttttaggtgttgatataaatgtgtgactaaaaaggaggcgataatttgttgttttatatatagatgtatgtaaatgtggggatcctct

SEQ ID NO: 67267 - DNA, 489 bp, Arabidopsis thaliana landsberg
tagatggcaaatacaaatttataacattttatattattttaaagagacggggaacttgggacagacaaaccttcaaatcattctctaagctaaaacgaatattagagagagagatagagagaaaagaaatgcggagaagctgaccagctgacttctggaaagtgacgagcttctcgacagatccatagggagaaaaaacttgatgcaggacgtcaacagtcattggatacagcatgtgagggatagagactaagagaatacggtccaggctgtgcatccaccatcccacagcatccaccagttcgacaaaagacggaacgacgatagaaagacaagaaacgaattgaatatagaagcgacggttaacaaccagctcgaagtgtaagcacctctataacaagacaatatcacaacttgcgctgcttcttatataatcaaacgggtactgaaattacatacctcatctttccttccatgaatatttgctct

SEQ ID NO: 67268 - DNA, 650 bp, Arabidopsis thaliana landsberg
taaatctgtttgctactgttcatcaaacttttgcgaaaagatgaagtcgaactctcatactcaaaaatctgcaaataatatgtatcgtcatttattattttgtgcaagtgttaggtttcgtttcaaattttccaatgagctcattcaatgaatgtttatttctttctccgaatgatcttctttcctctcttggtacacttcatctgtatgagatttgtccataagaaaatgattaatagagttaatttggtgtatgtgtgtgtgatgaaatgagtaggtatgagagaagcaagcaatgagctgttttagttgtttcttataggtaaagaagatggaaactggatgatggttccatgtgctccaagtaacatgatttggcctaaacccatttttctccaaattattggtctcttttctctttctctcttatttcccatttttcaatttgttattatttgtgaatttgatacttgatttggcgtatcaatattttcggcgtatcaatatttaattccatcattatgaagtaattattggaaatcttaattatgtatattatgatattatcatatgtatttttcatcgtaaattcgtaaactattacaattccaaattaattttacaatcaacatatattttttttttttttt

SEQ ID NO: 67269 - DNA, 368 bp, Arabidopsis thaliana landsberg
gtgtaatgaataacacgatcagctggttaatattattcaactcacactggaataactcttgttccgtaaagtcttgatagatcgccttttttcttaacggccttctttttctttcccttctgaagttttgaactataagacgaccagagaggcctgtgctttactatggaatcacccgaaccttcacattcatcatcccagctctgactacaaaaattatggaatattagccatgaaagaaacaacacttgtgaaacacatttgcattaaaaatgttcagatttacctgccggagacaatatttactacaaagcccacagtcacacacgtctagctaaccaggagctttaacataagccaacctttac

SEQ ID NO: 67270 - DNA, 2272 bp, Arabidopsis thaliana landsberg
atagatcctttgattttgcatcaattaacagaattatgatatatgtcaagaataaatgatgttaactattttcataagttgaatgctttacttcaatttggaaattagagaaaaggcccaaatatttcagctgtaataagcccataatgaggcccaataagacactagaaaggagttgagtaataactaagcgattctcttctctccgtctgcttcaatccccttttttttttcgtttcgtcgtttgttcgttttctctatcgctctcgttcatctacgcaatctctctcactaggtgagtttcatattcttctctttgatattcttgtggtgaatttcgttttagatatgtaccgaattgaagttccctctgttttttttaatcagattcggatcgatatctctcgtttaacagttttaggttttcatttgcttatagttgtgcttttatgaaaagtgaattcctcttagggttcgtctattaatttgctaataaatcctaattctttgatttatcctcttttgaaacggattagatggtaaagaatcgaaattgatttgagaatgcatcagatttgtttatatgaataattatttactgggtttcaataaagttttgagcttgagctttttgtcaccattgtcaagtagaaaaaccctaattctggagctctgttaccagtaccagaggcctgagtttggtagttttcgaattagcttgctagataatatatgattattcgtttgataacttattggctgtttattgatgtttcatgtcaggtacagttttaaatgggtaagaagaagtcagacgagagtgctgctaccacaaaggtgaagccaagtgggaaagatgcttcgaaagattctaaaaaagagaaattgtcagtctcggctatgcttgcaggcatggatcagaaagatgataaaccgaagaagggctcatcatctagaaccaaggctgctccgaaatctacatcttacactgatggcatagatcttcctccttctgatgaagaagacgacggtgaatctgatgaggaagagagacagaaggaagcaaggaggaagctgaagagtgaacaaaggcaccttgagatatctgtgactgataaggaacaaaagaagcgagaggcgaaagaaagattagctcttcaggctgcagagtcggcaaagagggaggctatgaaggacgatcatgatgcattcacggttgttattggaagcaagacctcagtgcttgaaggagacgacatggctgatgcaaatgttaaggatattaccatagaatctttttctgtatctgctcgaggtaaagagcttttgaagaatgcttctgtcaggatttcacatggtaaaaggtatgggttgatcgggccaaacggaatgggaaagtctacactgttaaagcttttagcttggaggaagattccagtgccaaagaatattgatgttcttcttgttgagcaagaggtggttggtgatgaaaagagtgctctgaatgcagttgtctctgccaatgaagagttggttaagctacgggaagaggctgaagctctgcagaagtcgtcttctggagctgatggagaaaatgttgatggtgaggatgatgatgatactggagaaaagcttgctgaactgtatgacaggctgcagattttagggtcagatgctgctgaagcacaggcatccaaaattcttgcggggttaggtttcacaaaagatatgcaagtgcgtgcgactcagtccttcagtggtggctggaggatgcgaatatcattagctagagctctgttcgtgcaacctacccttttgctgttagatgaacccactaaccatcttgacctgagagctgttctatggttagaggagtatttgtgtcgctggaagaagacactagttgttgtttcacatgaccgggacttcctcaacacagtctgcacggagataatacatctccatgaccagaatctccacttctaccgtggtaatttcgatggttttgaaagcggatatgagcagcgtcgcaaggagatgaacaaaaaatttgatgtctacgacaaacagatgaaagcagcgaagaggactggaaaccggggtcaacaggagaaggtaaaggacagggccaagtttactgctgcaaaagaagcatccaagagtaagtcaaagggcaagacagtggatgaagaaggccccgcaccccaagctccaaggaagtggagagataacagtgaagtgttccacttcccagaaccaactgagctcactc

SEQ ID NO: 67271 - DNA, 322 bp, Arabidopsis thaliana landsberg
acgcagagatctacggcatctccccgatccttttcctttccttcgaagcgggcgaatacgggggtccgggggaccgtacgcccagagaaggctgggacaatgcccactcagccagtatgggatgctctacgccctgggtgcgggcgagcgcccagtaagcgagcggcaaggcggacgtgcccttagttcacacggcgtacgccatcttcacggtcgacgcgcgtaacaacgggcccgtcgcgatccgcgcgttcagcgctgaccgcccgaacagcaccctttctatattggcacgcgggcccgacaggtaaagccgcgggtg

SEQ ID NO: 67272 - DNA, 366 bp, Arabidopsis thaliana landsberg
ttgccggtgccggagcggccgacaaggccgaccttctcgcccgccccgatcttcatttacaggtcctcgatcacgcccttgttcttgccgtagtggaagcggacgccgtcgaagtcgattgcgccccgcgcgacgggcaaggcgggcgcctcgggatggtccttgatgtcgtgcggcttggtcatcatgcccatgccgtcatagaccgtgccgatgttcttgaaaagcgcgggcacttcccacatcacccattgtgacatgccgttgatgcgcatggcaaggcccgcagccaccgcgacggctccgaccgtcacgttgcccgccatccagaaatggatgccgaccgcggtcgttatgaacattcct

SEQ ID NO: 67273 - DNA, 778 bp, Arabidopsis thaliana landsberg
gcggcaggccacgtgcatccaccgtggcgccgctgtcgcgcagcgcgtcggcgagcaggctgaggtcgcgcgacagcccggcgccgttgtcgcgaccgagcaactggatacgggcaggttcgggcggcgacatgacgggcgggctcaggcggatttttccagcacagcgtagtacatgccgtcgagatcgccgtcgccgggcaggatctgccaacccgtggcggcggcttggccgacgggcagctcgaacgcgacggcatgcgcatccggctgtgccgccagcaactcgcccacgatcacctcgttctccgcgcgcagcagcgaacaggtgatgtagagcaaccgcccgcccggggccagcagcggccacagcgcggcgaggatgcgccgctgctgcgcctgcagcgcggcgatgtcgctggcgcgacggtgcaggcgcacgtcggggcggcggcgcagcacgccggtggccgagcagggcgcgtcgatcagaatgcgatcgaaaagctggcggttccaccaccctttcggcgcgccggcgtcgccgctcagcaggcgtgcgtccagtcgcagtcgctgcaaattctggcggatgcggtccacgcgctgcggatcggatttcagtgcggtgaggtcgatggccgcgcgttccagcaagtggcaggccttgccgcccggcgcggcgcatgcgtcgagcacgcgtttgcccgtggagcacgtcggcgaggtcggcggcgacctgtgcccggccgtcctgcaccgtgaacgcgccggcctt

SEQ ID NO: 67274 - DNA, 201 bp, Arabidopsis thaliana landsberg
gcattacatttcaagaggtcaaattgcttcccagtacgttgttgctgcagtcactggatatttttattctatagcatgtgcagcaaatgccaaaggagttgatgatagtttacaggtaaagcgtgcatgcatccatggcttttccatgttacacaaacgaaaacgtgtctttcttttcttttccatggtgcttcttttttt

SEQ ID NO: 67275 - DNA, 583 bp, Arabidopsis thaliana landsberg
  unsure (1)..(583): unsure at all n locations
ctctattgtttatccacatgatgtattttttttgcgataccatgtattttttggctattgctacttccggagagctctgtctttgtttgtgaatttgcttcatccttctggtgaaggtatacttttcatatcctctgcttcttcctaatgctgacctaactaaaccactcctttttctccacagctcatttacaagcatcctgccaaatgttggttctctcaaattctgattccaaacctgtacgcgttcgctgattcaactgtcatttcgtttcataagcctatgacctacctttaagcgttcgcattcgccagatgactcgaacctcccggaatatgaacccgtgcaaatcctctgaccagcgactagcggaacagtttggaatcacacaaactatttctacttcgactcaagaaaataagaaggagcaaagcatcaaagactagcattgcttnttgcacacaagcttaacacagagtgtaaatggatggtgtgatatttatgtaccattttcatacaaactgagactttngtgattcataagactgtttcatctaaaactctctgatgatagatcatcta

SEQ ID NO: 67276 - DNA, 170 bp, Arabidopsis thaliana landsberg
  unsure (1)..(170): unsure at all n locations
ccacccaagaaaaaacagaacacgaaaaaacaaaccaaacacaaaaaggaaaaaacaacacccccgagccgcggggaggagacaacgngcgagaaaagaaaangagaaagacaagacagccaaagacacgacccgaccnncgacgccacgccgaccagaagccgaccggg

SEQ ID NO: 67277 - DNA, 632 bp, Arabidopsis thaliana landsberg
ggtctaccatcaaaccgaaaaaacaaaaacagatgataaaaagtcattatttagaatggaaaataaaaacgggtaggtgttatagatgttcaagaaatttgtgacatgtaataactatgaagtaaaattcttttaaaaaaaagtttttccttagaatatgcaactttttgggtgtcaaaattttaaagataccccataaattcaggtagttattgaaagtgttgtttaaaaaaagaagaagatgagattcccaagcttacgaaccagggcttgtccttttaccatattaagggaagaagattcggatgtacgaaaactgtttgagacaaagatctttgaaataacgaattcactgtaagaaaacagtgaagtaaattttaacaagaagaacaattatatctaggatttaattcttgacccaaggctgtcaaagtccttggccactcatgatcatgcgcacgtggtagaagttttgatggatcaagtctttaagtgctatcattcattgaaggggcatacgagttggtggcaaagaaatgtggtggaaaaagaagtagaaaaataatggtggagtagcttattattgtttcttatagagaaatagtgctatatgatactgtaactgaatggta

SEQ ID NO: 67278 - DNA, 571 bp, Arabidopsis thaliana landsberg
  unsure (1)..(571): unsure at all n locations
caaatataaaatacgttctacatgttacatctatgtttctatttatcaataattcctacatggttagggagtgtgtaatgggccattatatgttgtggaagcgtatcccatatattgtactcgtggttatgcttttaagattcttcaacccaaaaagactaggccggcttgtgattatggtgtatcagcacaatctagtgatcttgtatactatgatatcctctacaaaatcttagaagttcgttatccaggaatgatcaatttgaggtgcattgttttctcannnnnnnnnnnnnnnnnnnnnnnnnnnnntggtgtaaaacatgacgaattcagtgttacaacaatacacatgagaaagaggctcgagggatatgatccattcatcctctcatcacaagccgatcaagtatgctcaattatgatatatttttaataagaaaattaagtaatctttccgcaataaattaaaaatattaaccaaataattttattattctaggatacaataatctctcgaaaaccctcggagatataagtcctaggatatccgtcggaaaatatgcatcaa

SEQ ID NO: 67279 - DNA, 913 bp, Arabidopsis thaliana landsberg
  unsure (1)..(913): unsure at all n locations
gaaatcgccgttaatatgtcccaagcttcttttggtgttcgagcatctttgatacgttgtagaaactcttcttctacagctacggttagagcgtacatggctttgcccgctttaaccttccacttctttaaggcgtcaggatcacccgctggtctttgagatacaacatctggtcgtaccggtgttgaggttgaggtgtcgggacttgtgtctgtgcttcttgcttcccttggtggtgtcgtctcagctccgttcacgatatcccataaatcttgtccgagcaaataaaacttcatacgggtactccatgacccataattgttgttattgagcttctcaatagaggtcgtaaaatccgccataattttaacaaaagcttccgaataacaaccaaacaaataaatataagagttcgtcggatcgacttcgctctgataccaaatgtagagaatagttggttaaatattgggttaaattataattggtatagtgtaaatacacaattaataaattaaccccaaatatataaaccaaaatattctctacactttacttcatgtaagcatcaaagattcataggtcgatttgatccttaagagatgaatagaatgtcactagattgttggtgattaataaagatgatattagtttgtacaaatccatgagaaactgagcgtacgtaataatatgtttggtgatgaaaataaaacaaaacaaataaaactaagaacttgtttatagcaagaggttgggaatttttgtggtttctgtgatttcggtatgttcttgtaataataagcatattccaaaatatgtatccggatgtagttgaagatacaataatataannttttaaccaaaaagaaaactacaattttcatgataaaattaatattttattgattgttaatat

SEQ ID NO: 67280 - DNA, 1288 bp, Arabidopsis thaliana landsberg
  unsure (1)..(1288): unsure at all n locations
tagtagagaaatcaaccaggtttgcaagttaatgttacntatcagaagttctgaccatcatatctcttttagaaaacaatagagacaaacattccttgacccaaaaatcaaagtaaaaaccattctctcacaagcaacatcgtaatgaatcgtcaatcttctaaataataaatccatgatattcagtcttcagtcaataatttaaagaaaatgtattttagtattatcttaacatagcttaaataagaaaattaagaaaaaattaaacaaaacatggtcgatatataaaactattctgtatttctacaaatcgacgacaaatccacaaccttgactaaccgtacaattcaggctttgacattcgtatttttttgacatttacatttgaacaaagaaataaacacatgacataattgagaagaaaatcgaaggcggcgtttcttacttcatggttgtgagtcttttatgacttatccaatgttaggtattcttaaatctagattagtttcaaaatgaattacacttcactacaataatttatttatttgaactataataacatatctaacccactggtctaatttatatgtgctgatgcagtaataatttaaatgaaaaaactaatgtactacaaactccaaatactatttcaacatatcaaattgtgattaatgattgatttttaatcaatgggaccttgtggactgctctctccaacactctttcgactattattttcgtaaaatcaacttttttgaataaatatctacacaaatccttaaagtcacgtttgattctctcaattatttctcctttaacactcttttaaacattattatatatttaaaacccttaaaaaccacaccacactccaaaaaaatcaaacccaccattcaaacaaaacacaaaaacaacaaaaaaaaaccatttccccaaaaaaaaaaaaaaaaaacagaggatgaaacaaaaccagagcaagttcttgagaataatctcaacacctctaagagctttaggcaaggcacgtgatttctacgtgagaagcatcaccggttgcgcagctcggactcaatattcctcctccgcctccgtctccgctccttttccaagaagccggagctcctcctccgccgccttctcctcctccgcatcatcccggagaaccaccgatttcgggatagatgaagattacagcgagctagtgagagctgcgtcggtgaggagtttagggcacaagaatgagatagacatgttgatacaagagaagctgncacagcagaagcaacag

SEQ ID NO: 67281 - DNA, 810 bp, Arabidopsis thaliana landsberg
  unsure (1)..(810): unsure at all n locations
gatttcttcttcttttttcccctcatgatctcttgtttctttctcaacaacctcttcttcctcttctctgtggggctcttctgcttcttcgttttcttcctcaggttttgtctcttctttgactccttcttctggttctgttttctcctctgttttctcttctactatcggctctttcatctcctcttcttcgtcctcttcctcgatcttcagaccggtaattcccttaactttcttaggcattgtaacagttaaagtcccatcttcttcattaaacctcgctttgatcttgtcaagaattacaatatctggaatccgaaacacttttttgaattcctttatttctgtttcctttttccattccacccactttaccaaaaccatctcttcaacctgttttcttccgctgatcttaatcagattcccttctttgtttatctcgatatcgataccatccttcttaaatcctgcatttggttttcaatctcaatctctatgctaggtaagaaaaaaaggtgaataaatatgagagggaatagaacctttgagatgaagaatgaggaagaaaacagagttggtttctcgagaaagtgaacgatgaccaaaagaatctctggcaacccgaaaatctgtagaggaagaaacatcgtctttagtccgagtgatcttcagacctaattcaagctccatcttttttagttgtgagcttcttttgatacatctggttttagtttttgctaaagtctctctctagtccacacttntctagtttttgtttaattaggctatttcatatcgtttctttgaaga

SEQ ID NO: 67282 - DNA, 585 bp, Arabidopsis thaliana landsberg
  unsure (1)..(585): unsure at all n locations
tacaaacacattttaaaataatcatacataaatgaaaaaagaatttgttttatcaaatctgttgagaaattgtggagtgggagggtgaagaataataatcactgcttattcacattttatggagaagagaagaaccaaatcaaatggttccaatcttagggagaacccataggaaatgcaagccatgtatcaaagaagaataagacttgcatttaccattagtcggtccacgcataccagtagtacaagcaaaaagcgcacattagcannnnnnnnnnnnnnnnnnaaacgagcaatctccaccaccatatggtcttcggatgatagttggatagtgtgtaaatgcaactgtgaaattgaccagaaggatgaagatgatgatgaagagaatgctacaggttgcgtataatttttctcctaaatctatgatcacccttacatttcgtaacaattaaaaaaggaaacaaaaaatcctaacatcttgttcatattgaataagagatgggaagaaacacattaatgttgctaaaagaaaacaaggacatataaactagactttgtcaattgaaccccacaactcttttt

SEQ ID NO: 67283 - DNA, 754 bp, Arabidopsis thaliana landsberg
cggcggccaataccgtgaccttcgagcccagcgctcggacggcctggcatacccatccgcttggacagatgctggacgtgccggagcccgctgcccaatgccgagcaggcgaatgcggcgatcaagcagctaaccttggccgagggcgaagatccctggcaccgtgacggctggctgtttcaggcgatatcgtggattgcggcataccagcagccttctgcctcgctcatccgcataccgcatattccacctcgggcaccgcggtcgccgttttcgaagacaaggccatcgataaggcccacgagcctcgacgggctcacaccgaacgaattcgcaaccaggtccaggtcgaaccaccacgtgaacagggctaacttataaacgcggacaaaacggggagcacgtcatcggcaacccgggcctatcaggccgatctgggatcacatttttagccaagccgccaaactgactcaccaagcaggttcacctcggcactgatgccggataccttccggcgtatcagattttttagaaactccttgctcaaccgccagggctcaccccaatcctcccggctaagtggtcgttttcgcgcgccggatcacagctcgcagcggcctctagtgatactgttgcaccacgttccaacaggcatacctgatcaaaaacatgcttcaagtgagtatcatctgatccggccaccaatgccgaaactccggagcccttgaggctatgcaggatttctgcgattcgt

SEQ ID NO: 67284 - DNA, 245 bp, Arabidopsis thaliana landsberg
aacagagacctatgaccgcctcgccgaactggtcaacgaacaccgcaccacgctgattctgtgtcaatcatttccggcaggcagaacacgttgtgcggcatcttgccgagcgcatcaggcaaggcactagaaactagacatgatcatgaggctgtccaaggagcacgagactgaatgccacacagcatcaagaaggccggccaacatgaatgcacatggacgtgaccgctcggaaaggagcttgg

SEQ ID NO: 67285 - DNA, 606 bp, Arabidopsis thaliana landsberg
ttcaattccttcatactgttcacttggccccatcatcatcatcatgaatgagaatgaccatattgtcttgatatatatcttcatctattttttataagtcttggaatgaagtttgatgaatggttaagcaggattatcagttgatatcaaatggaaatttgtaatagtaattacgcatgaaattactatttgtggattaaagtcatgataacaattgatttggttgcaatagtgacttgataaccaatactatataggctagcaacggtttacatcggacgtgaattggtgatagagattgatgaccaatttttacgtactaggaagactatatgatcacgacccaatttttttttttttttttttttacgaattagttataagtcgttcaatactattattttcttgcgtttagacttttccgctttgttaacttttgaatttaaatgcaaccaatcatgctgacttttgcttatactaatatttatccttaactcgacgacaaaaaaaagtttctgtataattctgagctaacaacaagaaataaaagcaagatcccaatttagtggagaaaactatcttaaataatggttcgtaagacacaac

SEQ ID NO: 67286 - DNA, 2512 bp, Arabidopsis thaliana landsberg
actcttgcataaggaaccgaactcctgagttccttaagggcatgtttccatagcttgaccatcttcttcccacgcatagccattccaaccgtgatgatagccaaaggcaatccaccacactcccgagaaactttttttgcaatgggtctaacacgatctgatctggtaacttctccagcgttttggcaaaacaattcccaagcttcttcttcacataagcaatccactctgaagtcaatatccgtttttatgctctggcaaacctctaagaatctagaagtcaagacaatctttgaacagttgtgtccatctgttagtggaatccccaactggtctaaatcaatgggtttccagacatcatcaagaatgagaagaaagctacttactttctcaagccttccataaatccttctcgccagattctcctcgttttcgcctaatttgatttccatttccaacctctcggcgatttgcttctggacccttcccacttcaaactctttggaaactgtagcccatatcaccataccaaaaggctgcgtagcagcttctttccatagcttattgttcagttctctgactagtgttgtcttcccaactccacccataccccatacaccgatcttttgaaccttatcgctctttaaacagcttagaactttggctaacatctctgagactattgtttgatcaggaattgagggtccaaggattttctcaactagttcagatttaccttccacagagaacatgtcgagaatctctacaccttgcttctcaagcctcttgactttcccaagaattaccacaagttttttgctcagcctgcatttcatgaatggagcacatgaaacacgcctttcctgcattgaatttgcttcagagacaatctcctccacatctcttagccatctcttcagttgcacaggcaaggattcccctttgatttccaagattttgaggtctttcttcactttgttatgaacttccataaggccattgagagcatccttcaaagtattaatgtttgacttgaaccggatggtattaactgcccgcgaataagttgatctgcacataccacgccctatctcagccaagatagtacccaaggctgtgcccagacaatccatgagagagagtttcacagtgagattaacaaaacaagaaggaaggatctcaattattcaaggaatgtctgtcacaaatgaatgatcaaaaatatcctcaagaaaaagcacaatgaggcaacaatgactttttatggtctttttagaatgaaaaggaaagaaagtttgatgttgacttttatggcctctataaataaataacaagacattgatattgatagcttaagattcgtttggtcaacgatgagttggcttttgaaatttcaaagaactagccttgaagactctttctccattttcagctaactagcaagtcttttggtatattcattgaaactttctactttaatatttcagatatctgtgagggttgactaatggtttcggttaggacatatttcaattgtcttccttcaaatgccatttttgtgaggaatcccatgtaacacaaaaattagactgatactaagtacttacaagtgagcatggaggcacttcatgataggtatcaatgatgatttgccgacttttctacattttccacatatacagaagcagttcccttagtccttagattaccctttatgtcgagtttccagctcagaagcatgataagcaccatcagctagttatgctgatgtggtcaaatgcatgcagctgatgaactcgcatgtgttccttattaacacttaccaaaaaagaaaaaaacactgtgccatgatttagctttcaggatagaaaaaggcatccctacaagatcaaacaaacaaagctgacaagcttgagctgaaaactaacggtagaaatgaaaaaggctgtgtggatatctccgcattgatctaattgcaagcaaaacgtatatatgactaacatcaatttgataaacccctgacagtatgtcagtatacagcaggacaaacgaataaagacattccatacctaactctccaattaacaagaagcaataccaaaagtgcaatctcagtctctgaaacctaattgatgtctacccacataaagtatagtccaaagcaacagatcccctagcttattccattccaaacccgaaaaggaacttgaaggaaatgtagaaacaatacgtaccatttgctcattgatccttccctgtagctggtgccatgaaattgtgtgttaaaacttaaacgaatgtctcttcttttcccaagctctccttcaatgttattactaacaacactaaagcaaccccagtttcgattatcatctttgttaacatatactgcattgcaacattcaattaaaccctacacaacagaggctctcacaatgacagaaagattatagctttttatgcaaatcatttcgcccaaatttgaagcttaaaccaaaaatcaaacgaattt

SEQ ID NO: 67287 - DNA, 221 bp, Arabidopsis thaliana landsberg
  unsure (1)..(221): unsure at all n locations
tcttcctccttttctttttcgcattttttttggctcttcaaccctgattttttttttttgctactgccgatcgacctttcctttaggggcggctaaagtgatggtccacaagaggatttcttcanttcgttttttttctttctttctttcccttaaaactgttcttaccatcaccctcttcccttctgcttttcaaactttttggtgtattactattgatt

SEQ ID NO: 67288 - DNA, 1919 bp, Arabidopsis thaliana landsberg
acactaccgctctcccaaactaaagcaaagaaacaccacaaggacacttattatgttttaaacacctagtgtaaagaaagaagtagggggcttttttaattaccatataaccaggaaccggaagagagcatacagcaggtaagaaccctttgtagatatgtctcaacagatttgagctccgagaccctataagaaagaaaacaccaataactaatctgaccacactcgacaagggaaagaacagtaatttagagttttgactccttaccacaccataaaaggaccttatttggtaacttcttgatatcatctaatgaaggaattgcatctgactcaaccgcaaaaacattctgcactgacacaccgtactcctgaaacagtacgataacacatcattaatagcaaattatctaaaacgtttataaattgcataccaggagacggagacttacaacatcagagactttcacaggctcataagtagtctcgagatacttcacaaccatcttgtaatcttcagactctttgtctaccacagatatcttgcagccaagttttttgtacctatcagacaacggatcatcgagtgtgtctcctcgcatgtcccctatcaaacgagatgctgtgtttatgtccctcaccgtctcaaaagcagaggccgcctgtcacatgaatcaaatactatataacttcagtgtattgacatacaacacataaaaacaaatagatgatagtaactttacttacatggtctgcaagttcattgacatcgtgtaatcgcatcggcctagtgctgtgcatcaaagagaaccatcgtgagctgaagtctgcccacattgcttcagctttctgacctgtctcttttgttgttttgaccttctcaacaaactcgagtaatacctcttcgcctgaaaaaaaaatacagagaccaccactcacaggtcaaaatcataatagcaaagtgataaccaaatagtttgctccaccaagccttacatcgtttcaagtggatatcagttagcattcccataggtagatcgggcggatccaatccaagctccatcaacgcgtacctgcaaagaaacgcccaagatcagaacacccacacatagagaaggattcttgatagaaatgaagaaggttacaagaatagtacttgtaaatctcttgaccacacagaactttaatgaagtttgcaacaaacgaatcaagcttgcaatgagcagaagcaacgccaagctgccttagaccaagccccccactccttacttcgattccatcatcctgcagaataaaaaaaacattaaaatactcaacaatcacatagcaaagcaagcaacaaaagaagtgacttgaggatcaaggtacgatgattagaccatatcaattgggaaaaacttatgaggcttcttttgaatcttcttctcacgttcccaaggctcgaactcattccctgttatctcctcaaaaagctttgcaaactcttttatcgcagcttcttcgtcctcccattcctttagcctctcttcggcattagggtcatctcctactttccctctcttgaagtacatgttcaggttactatcgggtaccgtgactagctgcataatacaatacctacaaaaaccaacagatcagaaaacccttcctgcctcaaaaaaaaaagagactatcttaagggtttatcagtatcatactcattacgtccttttcccaaatcgcatatcgagaaggcacagttatacaagagtccatctttctcgaagatcttccctcctctctcctgaagttttgtgtccatgtagactcctcttttcccatacattttgagctgaaaatatcaaaacacaaatcaagattttgaagctaacctatattgaaattagtattactaattgagtaatcaatacctcagcaga

SEQ ID NO: 67289 - DNA, 687 bp, Arabidopsis thaliana landsberg
  unsure (1)..(687): unsure at all n locations
cnnnnnnnnnnnnnnnnnnnnnnnnnnnnnnnnnnnnnnnnnnnnnnnnnnnnnnnnnnnnnnnnnnnnnnnnnnnnnnnnnnnnnnnnnnnnnnnnnnnnnnnnnnnnnnnnnnnnnnnnnnnnnnnnnnnnnnnnnnnnnnnnnnccacggtagtggagaaacccaatctttggagtggaaaaagaaaataccgcggctttccgatcttctttcannacataatcattcgcgccagtaaaatnncaacaaagtcccaacacgttgactttccctggtctctcttcacacgtttacctatctannctgtaccgcgcgtgaattatcgatctccactnnnnnnnnnnnnnnnnnnnnnnnnnnnnnnnnnnnnnnnnnnnnnnnnnnnnnnnnnnnnnnnnnnnnnnnnnnnnnnnnnnnnnnnnnnnnnnnnnnnnnnnnnnnnnnnnnnnnnnnnnnnnnnnnnnnnnnnnnnnnnnnnnnnnnnnnnnnnnnnnnnnnnnnnnnnnnnnnnnnnnnnnnnnnnnnnnnnnnnnnnnnnnnnnnnnnnnnnnnnnnnnnnnnnnnnnnnnnnnnnnnnnnnnnnnnnnnnnnnnnnnnnnnnnnnnnnnnnnnnnnnnnnnnnnnnnnnnnnnnnnnnnnnnnnnnnnnnnnnnnnnnnnnnnnnnnnnnnnnnnnnnnnnnnnn

SEQ ID NO: 67290 - DNA, 906 bp, Arabidopsis thaliana landsberg
caatcaccaattactttttgaatagaaaatctatgagacttattttttatatacgatatcaacgaagaaataatgggacttcttccaatatcataaaagttacataagcaagttcaaaatttaatgcttcattaaaccaaaataaaataaaaaatgcttcatgaatatatatatatatatatatatatatatatatatttgaaattatttggtaggggaagtcatgttttaaaacttgtatattataacaatgaatacacatgtaataatgtaaacatacatccaatcaacaaatgaaagaaacaatccgataatttcagtcatgttaaagcaaagggaggaaacaaaaggctatgattagtccaacaagaggggctacagaaaaagaaagccacgagacatgcaaatgcaatcacgcatcttaaaagcaagcccaagttttgactgacaagcaaccacgacgcagtaaagtggagttctcaaaattagcgcatatataaagtacttgaactatgtgtgtatctttccaataaaatgcaattctataatgactgccaaaatcagtacttcatattatttttgaggaaatatcgtatatgtgtatctttttctaacaaaagtttttttattcaatatagaaaaaaatgaggatatttacaatttatatatcataagattaaagttgcaaagaaataaagggaagatgcaaatgaaaataatggaagaaaagaggggacagagaggaggcggaggcagtaagaaaataagaaagtgaggaaattgtaatttgtagtgttgttagggaacatctctcctttatcctttttctcttgattttttttttgtttctcaatatttctctaactcaattggtccaactaattagtcattttttcaaactgaaat

SEQ ID NO: 67291 - DNA, 474 bp, Arabidopsis thaliana landsberg
  unsure (1)..(474): unsure at all n locations
ccatacaactctccggggaactgctctctccaagtgttctatttttccccctcttccttaccatacgaagggtttgggaaatatactttatgataataaaaaagattgctttatataaaccctactttttctaactctannnnnnnnnnnnnnnnnnnnnnnnnnnnnnnnnnnnnnnnnnnnnnnnnnnnnnnnnnnnnnnnnnnnnnnnnnnnnnnnnnnnnnnnnnnnnnnnnnnnnnnnnnnnnnnnnnnnnnnnnnnnnnnnnnnnnnnnnnnnnnnnnnnnnnnnnnnnnnnnnnnnnnnnnnnnnnnnnnnnnnnnnnnnnnnnnnnnnnnnnnnnnnnnnnnnnnnnnnnnnnnnnnnnnnnnnnnnnnnnnnnnnnnnnnnnnnnnnnnnnnnnnnnnnnnnnnnnnnnnnnnnnnnnnnnnnnnnnnnnnnnnnnnnnnnnnnnnnnnnnnnnnnnnnnnnnnn

SEQ ID NO: 67292 - DNA, 603 bp, Arabidopsis thaliana landsberg
tgcaattgggttgtgcattgaaaaacaaacgttacaaggacatcgacttaacagcgaacaaaaaaaaacattttccaagtatatgcatcaaattaaatcagctttatcggtagggcttgacaccgaacatgtacttttgtatttattagaccaactatttgagtgtatcctaatggaatttaattaaacaaacaaatacgtgcgtacaactaaaatagttttcctaacaactttctattatatcagactttttcttatcacttttagggaaaaatgttatgggaagaaaaatattgggataagaccagaagaagatatcaaaacgtacctttccatattttcagtgaaagcaatagcttctggaagagtacaataggcatcatataggtcatctataatggtccacaacaccaaggacttgctcagtattattctagcaactgaatattgtggctccatatacactgccattgcccagtagaggcactccacggctctaactctgtagtaattagggatctttgattccaagtcaagctctttccaccatctgcacttacgaaaatagagaattataacatgaaaatatttttttttattcta

SEQ ID NO: 67293 - DNA, 353 bp, Arabidopsis thaliana landsberg
taccgcgcgttcatagcagtgatttagaaaacctaatttcggcttccttatactttcgaacactttgcacagcctcagaatgagtgggtgcatggtgttgttgatgagagttatgttctagctgaattatcttcattgcttccaatttcatctaataaaactctcagtgtcaaagggaagacagtagctcaaagaatcaagtagctattgattcgtttctgtcagcagaggacaaacttagaggtgtgtttcttcagaaattgaaaggcaagtctgctcttcagaagagtttgagtagccattggcattggtttgagtattgacattgttgccgatgtattgaatcgagggaa

SEQ ID NO: 67294 - DNA, 1170 bp, Arabidopsis thaliana landsberg
atccccttctaactataatacgcatatttggagtttaaactctcaaaatttagatattgaattgagccttaaacctcgaaaataaagtatgtctactacaatgatataatttagatataaacttaacataacacaaattgtgggggtacaaaaaatgttagcaaaaatataaaaagtccttttggaaaataaaaagatttgagcaactacgttaagtttatgtatttttttagaatttcccggaagaataaaactactgtagtctcatgatatcaaaacgtttattggggacaagacattctcttgtcgttttgtcaattatccattagatagaaactggtcctcgaaacctagaatcatccaccccgcaaagtcgacagatttccagcgaattcaaacccgatccatcgagattctggatcaacccgattacccaagatccaatctttctaattgatgaatcaatcgatcccttctaccgtatcttcttctccgacgactgatacgatggacgcttcgccgcttcttggccggaacagacgtaaccgcccacggtcctctcagccgattcgtggcgcggcgtcgagacttctccgccgtgctagcaaccgccggatgatgctccgtgagccctccgttcgagtccgtgaggtggcggctgagcagcttgaggaacggcagagtcaatgggcttactctaaacccattatagttctcgatatactttggaatttcctatttgtgattgtttcaatcgcgattctagggtttagttctgatgaagatcctgatgttcctcttaggttgtggatcattgggtataatgttcagtgtttgtttcatgttggatgtgtcattgctgagtataaacgtcgccgtgttgctaattctcctcctcctagtggtgaagattcctccaatcacgagtctcttagcggaagtgaagatgaatctgatggctatagcattaacaacactgatgatgatgaccatggaactaggttcaatttctttcttatggctacagcattatactagcttagattcagagcaatgttggttcttgtgatagacttatactagcttagaattcagagccatgttaggttgaaggaaacttttaggattgtatagaaataaagaactgaatgagaactgtttcccattgat

SEQ ID NO: 67295 - DNA, 497 bp, Arabidopsis thaliana landsberg
atgcaatacaattcttatatccctaaattttaatacaattataatattattaaaacgtaataagtcacaagaaaaaagtattttttcacaatataaacattattacgaatttgtaacgatttgtgaatggttggaatacaatcgtcacaaattttatttgtaagaaaaacatcataaaaattgaatcaaatatatctattaaccattttcgttacaaatagttaaaacaaaaaaaaaagtttaaaaaaaactctcaataacagactaacatcgtcataatttgtgactaacatatcgacttaattttagtaactcattattacataactacagtctcaaatggtcacaagtgatgactaaaaatttgttgcatattcgtaacaatattactcaaaactaatggtattttgtgactatcataatgctccaattccatcacccactataatatattagtttcaaatagtcccaaactattactaaaaaaaatcatcgga

SEQ ID NO: 67296 - DNA, 686 bp, Arabidopsis thaliana landsberg
tccttctctctgcaacggaaatggcgacgaagagctcggattcgagccataagcaatctccttcgagttttcgtaagagcgtcgaaatcaaagccacgcatgatcaatttttcggtaagcgacgagtctctcttctcccgactcatcgtttcggtttctctttgggtttattgcggcgaaaatcgttgtggatttgattgatgatcatgatttcgcttagacgatgagttcttcttagcgaaatgttgagatttcgtctggtgattatgatgagaacacctggatcatgttttagtggcattgatttttcactttcatcggaatcgaatagttgcaagtggggtcaattagtctaacgttcaacacattgatgtagtttggagagagttcttatggggaggtattgctggagcttttggagaaggaatgatgcatcccgttgatactctcaaaactagacttcaaagtcaaattatcatgaatgcaactcagggatgattaacccgacttcactttcaggggcctttggcttaggaaatacagattagacctgattgcgtggacttaccttcatttttggagtatatcatctctaaacggggttaggttgttggatttcagagacaaaaagagtatttccacaaaatgccttccgaactgtcttgggttgggggaagggcttaaaa

SEQ ID NO: 67297 - DNA, 548 bp, Arabidopsis thaliana landsberg
acttaaaccatggtttaagtgtacttaaacttttgtatgatacgccaaattatgtgccctttcaaatatggaaactatttagttatgctttaacgagtaggttttcaatcactcataacccttgctataaaatctaaaatatatcatttttattttattttgcaaatatgaaaatctaatggtcttattagctccatagatcattcacctcctcaaagataacatagttattattattttttaaagttacttatcaaataaaagtgcaccaattcagatgtttggtatacgggtccggtaccatggacttggcccttgggtctacccatattcgactcgtacccaaacgtttattttgttcttttcaattgaactaacaaactaagcatcttaagtataaaaaaatcgttaatagtaatgtaaaagccaaaaaccaacataccatttttgattgtttgcgttggtgctcaacaataagtatttcaacggaatacaaattatgtggttctaatttgaataaacccatataccctattttttttttaaac

SEQ ID NO: 67298 - DNA, 2677 bp, Arabidopsis thaliana landsberg
agttttttatattaatggtatcatctccaaataatgacatgtcattattattcatgaccatcaaactcaaactcaccacaaaaatttataatcaaaataattggaaacatcatgtggatctaaaacacttgaatcgagaaatatctctaaaatccgatcacagagtctgtggctcctcacatttcatttcaggtcagttgcaattaaatccacaaatcaagtcacatgctttcaaaaatctaatactgttagcgttaagtaaggcccctcttgatgtttgtggatctacgccgaaacactcgtattaaaagtccacacgcttgcactacctaattatctaatgcttagttttaagtaaaatatcgacttaagggctagtttatattatacaattatatatctcttgttttcgtgatcgtggttggacaaaaatgaagtgtcgtgaacaagaaaaccgtgatgttgatcctttgatgcatagttggagctgcccttctctgacacgtaccagctcacccctcgtgcttttgttaattactagacacataatcttcagtctaacagtttattaatatgatgaaagacctgttgttattatatagattcatagtcatagatgtacattgtaagaacacaattagtatgatgtataatgagtttaaaagtcttgggtcaaattgatttgttgttatcgtcgattaaaaaacgttttcatgttattcgacgtgtatattcattaattaaacactaaatgccgttgatatcccgaatgtgctcatcttcagtcgctgatagagttaatataggacgccaataactttagattttacacgccttcttcgattgaagcagatcataaatttctaataattttatccatataagtttacatttagttgatataatagtttacttgaaagaaccaattcgctgaatgtataaaacttatatgattaaaacttataactctatatctttgtattgtatatatgttgatgatcgttcataaccatgtgaaaacaaatctgtctaacggcttaacgcgtctaaacccttataccaatataaattatagaagactcaagtatgtttatttaatacaatactaccgagtgtgaatttaattttacaaaggtgaggagttttggattggagttctagctaggttggccaacccacgtgtgtcccctctccgcttgaaatggaacatttgttatgtctcttaactcgttaaatctgattaatatactcattattcaccttacatcctatctatgatactttttattagaaaactgtcatatacgatcctttaacctttagaatctatgtagttgtttacataacattgggacatgacataggtcacatagcattgagtttggccctagtttaagtcggaaattgatctacgttcatgtaatcaaaacgtctaattaatatacagttgtatacacaatcgtgtaaaattgaaacaagaaagtactataacgtctaataaataggtgtatgctcgtgtaaaattggaagaacaaaatagatacgtataaaatgtatatcttaaccgaactaaataaaaatatagttggggaaataagaaagcaattattctaaaaaaatagcgtaactctcccacgtgcacatcatctcatacttcaattgccgaaaccccaccaacttgcgtatataaacgctccttgtacctcatctttcaccatttcaaaatcaaaccatcacaacaactctctcttctctctctctccgccgagaatggttggagttttccgacgatcactctcattccctaacaaaccttgcggccgatcatctccaccgtcaaagccacgtgtctctcaccacacaagatccatcagtctaccctgccggtctcatcccttaatctcccacgttaaccacgagatctctcagctcaaatcctggttctcattcgccggagaaactcacagccgcaccacctcttggatcaccgacggtctcagtctcctcaaggacgttcaagaaacgctcgctgatatacttcagctcccacaatctcaagaatctctacgaaaccgtcctgttttcttcgagaatcttctagaagatcttctccgattcgttgacgcttacggaatcttccgtacgtcgatcctctgcctccgtgagcaccagtccgccgctcaagtcgctctccgtaaaaaagacgacgagaaaatcgcatcttacctaaaatctcgccgatctctcgcaagagatatcgcgaaactgacgtcatcgatccgtgagccgaagacaaaacaccaacactgccacgtagacaacgttaacggaacgtacggtgacgcagagcttgcgtcagttataggtgacgtcattgaagtaactgttttggtttccgttgctctctttaacggcgtttacttatctctcagagccaccaaaacaacgccgtttatagggtttttgaaacgatccgaaaaaaaggagaaactagacgaaggaatcgtggagttgaagcaagttgaagagaaaagcttgattggtttaagcaagaagaagaacgaagaagtaaagagtttgatgaagaagatgatggaaatggagaataagatccgtgaaatcgaatgtgagagtgagaaagtgtttaggggtttgatagcactcgagtgtcattgct

SEQ ID NO: 67299 - DNA, 242 bp, Arabidopsis thaliana landsberg
cacaagtttggattgtccatgctaacattcataaacataataatatgatacaaatgtgggataaaatgatcaatgtttttactttttaccaaacaaacaaaaaaaaagaacactgttgactctcttaattttcatccccagagtgacttgtctcgttgataaccgttggatctcccgttagatcatctctctcgtagtcaaaagtcaggcaattttattagtgggctttctatttttggccc

SEQ ID NO: 67300 - DNA, 186 bp, Arabidopsis thaliana landsberg
gatcccccatattggttccaagaaactggtttctttttggctagcataaacaacttctggcggggtatgtccttatgtgcatcaccggaatcatatggtaaagtgatgacagttttatgagtatctcatcaaacaatctttaggaaggtatatcaccgacttatctgagacctcgtcgtgtgtggt

SEQ ID NO: 67301 - DNA, 323 bp, Arabidopsis thaliana landsberg
gaggctctgtcaccatccttatctcgcacttcacggtatgttaacccgtttgtttggtttaaatgttaagttacttcttccacatatatctctgtcaaaaatgaataatgatatacaaactgaaggtttatagagaatctctgtttctatttatatacaaacagaaaagatttttgtgtataaaaagcgctctccacaaccataaactgttaaaaaactagagactggagcttgctctgatcatgggctgcgttgcaacgaaagagagggaagaaatatgaaaccgatgaagctcccttgcacgacgtgctcatgggggacac

SEQ ID NO: 67302 - DNA, 1828 bp, Arabidopsis thaliana landsberg
agacaacctgagatattccacccatagaaaatccatccctgaacgcttggctaccctgaaaaggtaacctatcgcgtcatgatccggaataaaacaaaataagcgagctctaatgcttcaaaaattagatgtaaagataaaaatttgaaagagacgcgggcagtatttacatatccaggttgggatagcggaccaccaggtgaaggctggctattcggactatcaaggggaaagtttaaactagggccaatagttccaacattatgttgggtggcttgttggtgcggaaggtgccccccaactgaagttccacgaccagctccaaaaccatggtttccaggttgaggagcatgaggaacagcaccaacaggtccacgagttggaatagcgtatggctgagaaggaggaccaccaggaaagggtgaaagtggaccctaggtatcgggtaccctgccgggtgtagtccaggtctagcaccattaggtgggccagaaggaagataggaaccaccagctgaatcaatagaagaaaaggtttaaacatgcatggctaaagcacattaaaaccaaacaagacacaaaagggtactggacatttaccccttcctcgactgcctcttctgtcagcattagggttacccgaaccaaaattatcatttccaatcatgccagctccaccaccataaaatagtctccgatcattgtaaatctaacaagtaccaaagaggattaatgttcataatgcctgtcactgtaatctacattgatagacatagagattcatttggtacctttcttggtttctgaaactgtaccatgctctgctttagattattaagaggtccctcgaccaagcactcatgttcctgtcagttaaaggaaaagaaaatttagtatcatacaatcattcatattactcaatcaattctggactcaaacggataacatcccaaaacttcacaagaaaaataactcattccaggtaaaagaactcatttccactatataccttgtaatgtgtcaacaatccattccacagaggctgtttactaagaacttttgggtttccaagaataacaattccataacgagctcgcgtaagtgcaacattaagcctccgtggatcattaaggaatccaatgccctgaaaaccaaataaccagtagttacatgtcaattccaacattgattttcaggagaaaaagcaccacattaaaaaggaaatcattaaacagagtacgaactgtagagttttacagaagaaaaagcatcacacatacctgatgctcattacttctcacacaggacaatatgatgtaatctttttcccttccttgaaaagaatcaacactggcaacctgtaagttcgagagttttttaaataattgacaggatcaagtaaaccttttaaaacagaccttgataatagtacctcaatttccttgtacagttgctgtcggagagaaccatttcttgccatgtaattaacaatgtatgccctctgtccctcatatggagttataactccaatctgataacataatctgataacgtcaacagatgccaaaagaaagtatactagctattagttaagaatctcaagactctcacctgactggggacaactccactctttaagaaagcagtcacaagtttctccacattagcagcctcagttctattaagatatgatgttccactagcactgatctcctcttgtcccagctacaaattaaaaaaaaaaaaacaatagaaattaaaactcagattgagcttgctttaaatggatttgtgatggtgggtgccagatccattatggtctaaactaa

SEQ ID NO: 67303 - DNA, 613 bp, Arabidopsis thaliana landsberg
gcacatgaataatccgtttgtttgaaaaacaaatatctaattttttacaagaatctttccaaaacataaccaatccaacacttaaaccaataagcctaccagttgacacatggtcactagctagagtttataatcttttcaatgaaccaaaaaatgtttcttaacgcggttttaggtttcgaaatataatcagaatattgacaaacatatgttcttctaatagcaataaattttagtatatgctctatacaaaataaatgaaagattataagatttaaatgcttatagatatatacaacacacacgtaaacatagtttttttttttgacataatacaatgatatatatttcttttaacagaatatttatttccttaactattgggaataatttcttttgaaattgatgacaaccaaaaaaaaaatcttatttgaaatttcaaatagaaggtgctgattcttaaagatttatgaatttattaaaaataaaaaatagtaaagttgagttttttgaattaaaaaaggaagaggaaagaaaagggatgtgtccatgattgattgaatggtgtgatttagtttttgaaaaatattataataagtttagttttttagtt

SEQ ID NO: 67304 - DNA, 383 bp, Arabidopsis thaliana landsberg
  unsure (1)..(383): unsure at all n locations
nnnnnnnnnnnnnnnnnnnnnnnnnnnnnnnnnnnnnnnnnnnnnnnnnnnnnnnnnnnnnnnnnnnnnnnnnnnnnnnnnnnnnnnnnnnnnnnnnnnnnnnnnnnnnnnnnnnnnnnnnnnnnnnnnnnnnnnnnnnnnnnnnnnnnnnnnactgactcgccgatcaagcatattctgtttaagctaacctcatgaactgctacctctatttacatgccgtctagctactcaatgacctactaacacagcacgacgctgtgaaagatatacactaaagcactctggggtataactataaccacccttggtctgcacccacttcacatcaataacttggcctttaacacctatcagcgactttaaacacggaacatgtgtag

SEQ ID NO: 67305 - DNA, 1880 bp, Arabidopsis thaliana landsberg
  unsure (1)..(1880): unsure at all n locations
taaaatacagaatcaaatgcgttgaaaaaattaatccagctatatcttttaaaattttgatttgagtttaatacaaatgataatgacgtgtatagtaagcggtacacgcgctctaaatcaattccgaaccggatcgtgaaacggttagcgttcggtttgctctccaataacattttcccgccaatttctacaaagtataaaacaacccattcgtcatcatcccctaatttctcgctcaccttcaacaatggaggttcctacagagtcaaagacgacgcagatcgatgaaatctctcacaatctctcgtttaccacttctaacgccggcgattctagctgggacaagatctcattcttccgtcaccgttcacggcaaatcaaacgagacacttggcttgtctccgtcttcgttcttcttcagatcgtcctcttcgctgtaactatgggcgtcaacgattgctccgggaactctcacggtcactgctccgctaaactccttggccgattctctttccagtctctctccgagaatcctatgcttggtccctccgcctcaacgtaagtagctctctccggcggatttcgcttttggtctctgcttgtaactgattttggaatcgatctctaattgaattgttagatcctttagagatggattttggatgcttcgttgcttagacctgtaattttggatgtttcattctgctcatcttttggatcggtaacgataggttgctgaagtttgttggatttggatgatactagtttccaagattgatgagtttcagctgattcatagtgtctcaatctctgattacagtgacaaccgacaagttcttgtttacaattctgtgttgttctagtgtgtgtgtgtgtttatttgtgtggctcttggtgctacattctgttgatgaagcaatctaattcaagtggtggttcttgtgagagctctatgtttcagaaaattaagggaaataggggtaacttgagctatcaaatgactgattataagctatggactacttattttcttgtgagtttgcaggttagagcatatgggaggtctttcttggaaagctctgacggagaatcatgagatttggcgtattttgacatctccatggctgcacagtggattatttcatctattcataaatcttgggagtttgattttcgtagggatatacatggagcaacagtttggaccatgtaatttagactacttgacttttgattagtctgttttggatggaatctatcacctttctaatccacctttcttctgcttttgctttggttttgtagtgaggattgcagtcatatacttcctctctggcattatgggtagtctgtttgctgtgttgtttgttcggaacatcccatcaatctcttctggtgctgctttctttgggttgattggagccatgctttctgcacttgcaaagaactggaatctatataacagcaaggtcaaggatttcttgtggttctgttttgtctcttgttatcttcttctcatagcttttctgattgtattttcttttgcttggaannnnnnnnnnnnnnnnnnnnnatattcactatcttcactgtgagtttcctgataggctttctccctttcatagacaacgttgcaaatattggtggtttcacatcaggattcctccttggatttgtgctattgttcaaaccacaactgagacagatgcctccatctcataaggggaaattgtttgaagatgatatgaccagatccgcaaggcttgaagaacagtttgacagaccggtattaaggattatatgcctgctcgtgttataaagaatgtgagaatttacctcaaatctctttttggtcgagttttttttgttttatatacgct

SEQ ID NO: 67306 - DNA, 879 bp, Arabidopsis thaliana landsberg
ctattttctctctataccacacaattccgatgaacacacaatctggtatattgtacatttgtttataatgtttggctcgacggcatgtgataaggctttatcgtctcataaaaggaaaacgtagtcattcgatcatctcccaaagtttcaatcttctctactgtcttcgtttatttcaaatgattatgagttgattaattattcaaaacacagaagatctctctatacatatatatatatatatatatatatatatatagaaacctttcaaaccatttcgcaaattggttgtttctcactttctctagcgtaaatctcgatgagcttaagttaaaacttaccttcagggtcatttgttttgttatgtgacaatcttctagattaatattccacttactacttcctgcttaaaatatttagttacatcacatgaccatgtaattgaatttatcctctttataatataaactacgaaaatctgaagaagaaaaaaattatcgaaaagagaatcatattctggtactagcaaaataaatttggtagaagatatatatatttttctatatgtaaacttcaaaattaatgcctaagatatgctaaaaatttgcgaaggagtcagggggaaagcttgagaggaccaatgcatggcattgcttttactgacagtaaacagtgtcacgctcacgacccattcttcccgttccatttgtttttatttatttcaaagtttaatattccttttgtataacattcaaatcttcacatgattgattgtgtgaaaaccccacagattttactacaataggggtagttgacttaaaatagctattgatgtcgaaaaaatgtatttaaggtataaatattattaaagaacatttt

SEQ ID NO: 67307 - DNA, 671 bp, Arabidopsis thaliana landsberg
aagctttcccgccatagatcatctttgctcttcccgagtcgatgttctgaatgttgtattttcagggcttgttcaattcaatagcctatggtttcaacagctcagtgcgtccagcaatccatgagagactggagctgtcagtcaccaccgatctctttggttggctatattattcccaataatcaatgaagcttgatttttatgaaacccttggtctgctagattcttgccagaacggctatatcgatggcttccaagcaatttcagaccaaataaccatgtgattctacatcagcaacaacaacagcgaagcgaaatggtatcactcaagaccgaggaccagcaatgacactaactttcaactaatacattggaccgataacaagaaggcggcgatgataatagcgtttggatggagagattggcaagtttcctctatgatttttttgtctttaatttccgtttacatggatcagtcagtgtgtcctgtttcgtgatactctcttagatatggtgaaggggggtgcacaacaggttgtccatgtctatgaaacattctttgggaacacgaacttaacaatttatatatttttgtatgaattattttattgcgaggtcttctgatcttgatttgaaactaacgaacttggagttcttggacgacaatgttg

SEQ ID NO: 67308 - DNA, 744 bp, Arabidopsis thaliana landsberg
ttcttaagctttaattgttatgtcaaatatcataataaaatggagttatactccataaaaatcaaatattgatgtgatagtcgatgtttacacacgctctcgaccatatttcacacatgaaatgtatcatattatagacgagtaaacaccaaaaagggaccataaaggattttgatagatcgttaaactcaatttgtgatatgctctcaaaaggaaaatgaggcattctttggtccaaccaagttactctcttacccgaagtttctttctccattggtacgtagcaacacctatgtggtggccaggaccattcacatttactatcctctcttcttattaggaaaatttgtaatatatattgtcgttgtacaagtctcaatcaatagaatttcgacgatttaaattttattcaccaactattgatgtgtgtcctttcaatttatgatgcaaagagtaagttcaccgatcctatgccatggatacgcgttgcgtgaccttgtaatgaattcaaatgttatatacatttataaacataatacattctatataactttctcataattacctagttaaaagtagaactcacttaacttgataaatatgatgttttcttcttatataaaagctatctttctcactttgttaaactcgtgtgttcttgaaagacttaagaaaaatagaaacttgaaatgaaagaacacatgattagttaacaagtacgaatccttaaaataaatcctaaaa

SEQ ID NO: 67309 - DNA, 620 bp, Arabidopsis thaliana landsberg
atttttactttataggtatcgaacgactcggcgcggagttcaagacgtacgtcctcatagagcgacgtctcttttatttgcgaaaagtccaggttattgtacccagatacgcggaatggcatcttgcccatgtttccgtaagaccccacaggaactgcgaatgcagatggattgatcacgcattagccctttgtcccacgctgcccaaccggggtagaaccgcaactcccttgtagaggattgccgaccacatttggcctggagtagtttgcgacggatccggtattgccggagatgaatgccggatcgccgcctacattgaggttgaagggttggcctgagcgcttctggaaaaggtagttagccttccatccaccaagaatataagaagcaaatcctgtctggagccacttctgcccctttccaaagggaaacgagtagaccgtgctccacgagaagtaatgtttgatgtcgtaggaggaaactccgtaggcattgcgcgggtcgaagaagttttgcacgactgatcctccaccggttacattctcggactcaaaccacccactgctgttgtccagcgacttcgaccatgtataggacacgactgaattcatggagtt

SEQ ID NO: 67310 - DNA, 180 bp, Arabidopsis thaliana landsberg
aacaaactggagttcaccatcaaatggttttcaattttactcaccaccatttgctccacaggggtaatagatatcaacaatggtgctcatcatcaaaagtttcacaatgaaaaacctaccaaattctttacaataggctccttcggtatatgtcaacgttgatttaccatttggtacttg

SEQ ID NO: 67311 - DNA, 501 bp, Arabidopsis thaliana landsberg
tctggtgaacacgttcataaaaacagacctgcactttatcaggttgattagagtatatgatcaacggactaaaaaaccccccaagcctcactaattgtctatataataattgaataccaaaacacatgggtcacaccatccgtatataatggaagcatgccgtttgcacacgccatacaataaaacctaattagctcactaacaactaaaatatattccaatatataatgtttatgcataatattcgggtctgcccataaaacgaaattgacaagacaagaacaattatattggatatgacttttacgtcagtatttaggaaaacaacgcactctagaacaacattattgtagccgcgaaacgtgatgcgcttgtgatagagtgtgtatttcaatatgatggaaagctaccgcgtaagaaatcaattcgtgacaaatgattttgtcctacaagtcaataaaagaatgagaaacttttctattagatgatcgaaaacgacgt

SEQ ID NO: 67312 - DNA, 1593 bp, Arabidopsis thaliana landsberg
  unsure (1)..(1593): unsure at all n locations
cttgacacgagctagaagaaaacccagaaagaggaattacgaattagattctcaagctaacaacttgacccaatttaccaaatcctaagaaacccttatatcatccttatcacaattggacgaacctgaaattcacaaagagagatgatcttcgattaaaattagctgaaaccgaacaccgaaatgagataagtgtcgcaaaattaagagctttatgctctaaaacctgatctctaatcaaatcaaagacaacgatcgattccacaacagcaccagctttggtctcggcttgtcagaaaaaagttccagttctctgtaaattgtgatttaaaaaccattaaagacgccaaattagtttcgtttatagatttgggccagtattaatccattaaggcccattagatagtaattggcccattttaatagtttcccttccatgcctgtcacgtgaccttcagcttccttctctgaaagtcatcttcttctcccgacttttttgaacaagggaagaagaatccaacttcatcaattcagattcgcacgcttgaaattatctgaataaaaatcgaaagctaataatgagctgatcgctaaaaatatctctcgaattcaatcttcctgattttcgatttctgtctctagggtttcaatatccgataagtaagttttgttcttgctcttcttacctcattcacatatctctctttgattttattttttctgaaattcaaaaagctttttctgttagattctcataacctaattcgttttgaggtatttattattatttcttgatcccacatttgtttcaatcgctttaagctccaaatttgtaatttcagtgtcatcttcgtacttgtactgaaatgcattgaaaatggcagaagcgatggagacggagatggatttctcagatggtgaacaaactaatggtaattcacatgttactgcctcccaatactttgctcctccgggttataatagaagtcttgtggctgcttatgggaatggaaacacaaccattggattagaaaaaggaatagaaaggagactagatcatcatgagcaactacctggttatatctttatgtgtaatgggagaacgaaaaccgattgctaccgttaccgtgttttcgggattccaagaggaggaaaagacgttgttgagagtataaagccaggcatgaagcttttcctctatgactttgagaagagacttctttatggtgtgtatgaagctactgttggtggcaggttggatatagaacctgaagcttttgaagggaaatatccagctcaagtaagcctgtgtgtgaaacacatatgattttgtttatatggcactgcctaagattgttcttttctctattttcttacttgattctggcaggttggatttagaattgtcatgaactgtttacccttgacagaaaacactttcaagtctgctatctatgaaaattacaaaggttccaaatttaagcaagaactttctcctcaccaagtaatacactgtttcttgctatctataacacangcctttcaaagtatcaggctttccggcttggctttcaagtttcaattatgatatgc

SEQ ID NO: 67313 - DNA, 558 bp, Arabidopsis thaliana landsberg
agtttgacttaacaatcacagtgtttgttgtttgcatcccgagccatcaccacaaaagataaaaagctcgcctgtacattgtatacgaacctccttttgaactggtgtgtaattggactcaaaacggtgcaagctatctatcaagatgtttattcatgatgatgaccgaacatgatgcatataattagggtttattattagccacaggggaaataaaaactcacctataagaatcgactagtgcatgggggatacatgagctttgaaaggtccaacagaaccgaccttagtgggtcatattgatatggcgctgataccaggagaaggcccatttattgacatgggaccagtacgaattgtgactcttatgacggatgacaaaatgcgagttacaaaaagaagtcttgcggtaacaaaatagacgaaaacccaaatagttccataatatgccttcgataaatgagagtaaagcttttgagcccacgatgcaacatctattgcttcaagttgcgactgtttaaccaacttatgtacgtgagacactttgacccaaactcc

SEQ ID NO: 67314 - DNA, 382 bp, Arabidopsis thaliana landsberg
  unsure (1)..(382): unsure at all n locations
atgctgaaaaaggaaccattaaaggtgttgtttggttatgcgctgaaactgaaagaagctgcatggccgggccttaccctttattacgctctgttctatctcgccatgggcggcattaatgaattggtctggcgcactcagactgaaaatatttggtttgcctggaagatgggatccatgatcggtggnnnnnnnnnnnnnnnnnnnnnnnnnnnnnnnnnnnnnnnnnnnnnnnnnnnnnnnnnnnnnnnnnnnnataaagcacaatagtcacttcctccgtgttcggattgaattgtccggaaagctacatataatgatgacattatccctgcggttcatctgaaatcgggagggcgtcctgaagacgtcaaagtcaggc

SEQ ID NO: 67315 - DNA, 1574 bp, Arabidopsis thaliana landsberg
gttcgcctcatcaatctgaactgtcacggataccatcactacaagatataaatgtagtaaacattagtattacaatacaattctttataaccatatcattatactacaaaaacattaattttaccagtaaaagctaaaaggatgatgaaagcagacttggatgaaaattttcccatcgtcgtagaaagattatgtttcttcttgataacttttttagacttactagaaagagttggtgaagaaaacgatgtgatatagacaatgttgtataacgttttttataggacagagaaagtgtactaatttaggaagattaatatcaaattgttgctttgtggtgaaaattaaaatgatatcgataatgagataagataagatcaaatctcctaatatggtcgacaatccaattgacaattgttacctaataagatttctactattaatgagaagatcttcaaattattcgctgtattgataaaagtttttaaaaagttagtttgactcaaaagaagcccattaccaaagcccatctaagcccattatgtaatcaatcaacaagccacggtgttgcttaggatgctgctcgttgggtttttggcaacgtgtctaagatacaacggctatattttgacatggtccaagtccagctatcataagtcggtgtgttcttgtgggacctctaaaagagcgttactttcctaatttcagcggaccgttacatacacactcgcacacactagccttcgtcttcttctacatctctttcttcttctgtgtcagagacgctgtggtgaaaagaaaatgacggcggccgaagtagcttctgcgcagaccaagaagctcatgaagtttagtctttctctcttccgtcgtggctttaactcctctaaatggtactcaattttatttgatttgatgcttcttagattcctaaattcactcaatctgctacactgcgaagaaaaatcttgtattgaatgttttttccgtgtttgattttgggaagttggaaaaagttaggtttttttagtgtgttgatgcttcttagttctgggtattctcagtttcttaattttgtagaaaaaaacaaaaactttgatctgtgtttgagaaatttccgatctgggcttttctaagatgtaagtatctgattaaagtctgtttttttttcaatcggcaaaaagcaaaacggcggcgaagatggctgtggctcgtataaagcttataaggaacaagagattagttgtggtgaagcaaatgaggcgtgacatcgctgttcttcttcaatccggtcaagatgccactgctcgaatcagagtatttcactttcctggttcactttgttagagttttccctggatcgttcaattcaatgaagattttgctttttttgacaaatttaggttgagcatgtgataagggaacagaacattcaggcagcaaacgaaatcattgagcttttctgtgaacttattgtttctcgtctcactatcatcactaagcaaaagtatgttcatatctactatcagttttcatttgtctctttgctttgcttcagtttggcttcttatatg

SEQ ID NO: 67316 - DNA, 1812 bp, Arabidopsis thaliana landsberg
atccccaatcgtaaccctaatcttggccgaggattgttcgaggagtctaatcgtccgagcaaaatggccagatctcgcatcttgtctgaggtgaagagtgagactccgatggctcttgttacgacggcgcaccggaattcgaccccgaatatcatcaattcgacgaagttttcttcgccggagagttacttgtcgcctgggattagacagcctacgccttttgcggaggtttctccgtcagcgagctgtgttaagaacgatccgattaatgagatgcgacatagcttgtccggtagctttccttctgctactctgttcaaggagtaccagaatacagcaatggcggtatcatttcgattttcctctatccatttttgtttatttcggaaatgagttttgtgcactgaaaggtgttcgatgaaatgtcaagcattgttttgcttgattatttcgatcatgacttgttccttcataataatttctaaatttttctcaatacaaaaccaaagaacccaagctagatcactactcttggattcactcaaccaatatcatatttgtcattggtacatcaagtgctatcgtgaactaacaatattgcttcatcattttgcagattctagagaaatctgattacacgatgatatcagggaaggcatacatcaaaaagtcaggtgaagattatgcttgtagtctgcttattgtttcttttacattcaaaattggttttgatgctacattgtatggaaatgtgaaggttggaggaaaatatcgttttacttcaatgtgtcttatgaaataagagacaagactattgaattcgacgaaaacagaaatgtccagcgtgctgagttcatcgttcgagccattatgcagtaatgttcttctatataaacttgaatttgatggtgggtttagcaaatagtgtgtagtgattaattggtgtttaaccttttggttgatggggtctcgcagtggaggaagattcgctgacggatggggttcttgtgagcgacgtgagaagaaatttcttaaaccgaatcacgatatccctagcacagcggagaccagagccaaaaacagggcttgtcaggtaaacttccacttctaatgctccagttacttgagcaagttgctatgtcattttgtcacagactatacttgttgaatcttaaacatctgcatattcaaggaaacaaagaagcttagagaatcaagtaccttaacatgtagaggttttagcctaaaggtcctgcatatttgaaagagacaagacaacacactgatatcttgcactttaccatcaagaagctgttccctaagaagctgtttttttctttcctgcaggatcttcttggaatcggtgaatatcgagaaagcccagctgggcttccacgatgatcagacaacatcaaatgtatttcccgaccttgccaatcccaagctaaaccttatcaaacccacaccaaccgatgtcttttatgggtttttaactcttgaaatcatacgatataaacgaatagaacttggttgctgaagtatggtggattatgatttgtgtcgagtattctaaaatcaacaaatcacagataaatagtcaatcttatatgattatgttgttgaatctcagcaagcttttcccaaagcaactcaccagagttccaaagggagacttgaatcatgcggttacagtatctcattgtttttgagataaagtatctttcttaagttaaaaaggctaaaagaataaaaaccttgcagaattaatcaaaacattcctgttatagattaaaaaaaataaggagctcatcg

SEQ ID NO: 67317 - DNA, 397 bp, Arabidopsis thaliana landsberg
tgccctgtctgccatggaaggatcttgatgggttttcactctgatctccactttggctagtgatccatttcaggatgtgtgtgctgaacctgacaacctaagtggcaaaggaactccatgattgtgacaagacttgctaaggatccctcttctgttggaacagatgaaacctgacttgccaagaaccttaacagacaaagttagctttatttattaaaccatcggaggccctttagcgactgattatgtcgttctgcaggactacatacttacagatgaagctgtgttatgatatatgcaaaacttaccaacatgtcaagcatgatgctcgaagcttcaagcgagactaacttaccaaaacatatttcttctctgatcttttaacttctgatgctag

SEQ ID NO: 67318 - DNA, 386 bp, Arabidopsis thaliana landsberg
cagccctatgttgcacagatttattaggttagactggattttatatacgcaacaacattgacggtttttattatttacagtttcacacccacaaaaaattcacgaattttgtgttccaacttgattttgacgatacagtagaaggatcataatttaaccagaggagccttaaggagaaagatgtttttaaggcttgagcagagtcgagacaataaatattaagagcacagaggtttagtagagtagataaattatcaagctgtgcacaatcataatcatcataaacacttcaatcttttttcacagtttttgagcaaaggttatggggattttgagatcgatttggtggcagaaacatcgcgtaacaacccttccccccttcatct

SEQ ID NO: 67319 - DNA, 963 bp, Arabidopsis thaliana landsberg
ggggggggggggggggataatataaataatggggggggggggggggggggggggggggggaaggggctttttcacattaacccattcgagtaactcacaattatgtcaatacgaggttccactaagcagaaaccattaatggagaacatctattcacaacagcttcctagcgattttaaccatacattttgactcttgtaattttccttacaaacgatcaattacctctttaagaagtatgaaatgatttttttttttataatccttgatttatcttcattgttaagatgagctttcttttccttgggcttttattacccaaaatccgatggtcggatccaacaccaaacatttggttcgtagtagccgaattagccatcttttgtccagaacccaaacccctttcgtgcttatgaaatattccccgacaagaacaaagtgagaaaacaaataaaaacaagtagaatcatattgaacaacaaaagcaatactattataacatcaaatcataggaaaactgaattgataactcatacatgtatagaaaatgaaacgaagaccagaacgttgtgggaccagccactttctgacaactactcctcatttcaaaataacacaataagcgacgacttttcatacaacttgaaactgtcttatgccttcttccttgtcacaaacatcaaaaatatataatatatacacattagcaaatgcatatgcacatgaatgaatttttgatacagaaaaagagagaaaatgggattccgtgggaagtacttcttcccaattctcatgactctatcgttatttctaataatcagatacaactacatagtctccgatgatcctcctctccggcaagaacttcccggtcggcgatcagcttcttccggagatgacatcacatataccggcaagactccgtcaaagaagacaaagagactgtttcacaccggggggaca

SEQ ID NO: 67320 - DNA, 154 bp, Arabidopsis thaliana landsberg
ggaatcgcttagagaagggcattgagctcatgatcctatttctggtatatcgcatctatgcgcaagcatatataggtgaggtaactgataggaggactactgccatgatctcgaccaaggtggtgacatggatatttgcatcaacaccttttaa

SEQ ID NO: 67321 - DNA, 1035 bp, Arabidopsis thaliana landsberg
cgttttcatattgtatggcaatcggggaaactccaatcgacaaatccaagagttttctaactttcaactgccgggtagtggtgaaaaatcaaatcttaaggacaaaaaaaaaacgaaacaaaaaacgcaatgagttattagagagagagaagacagggaattgacgttgtttgcatgaagacacatgattaaatacaagttcaaactaattttcataaaacaaacgaaaacgtctatatattgacttttccttatatccctaaaaagaataaattcaaatacttattattgagtagaggatgcctttcccacatgaaaaaatattttaattaaaaaaagattttaataacaaatttgagggctacgtttcttaaaaaagtatgctaatattgaacaaaaaaaagttatatagtaaacagtaaaaatctaagtaattgaaatgatcaaaacagtaaaaatagataaactgatgatatctcacatctattttggttatattttctgatttttatttttttcttggttatttatatatatatatatatatatatatacattcttttatttgtgtcttgcactaattaatagactgtgaaccaattatataaaaaaaaaagacttgtgaaccgtataaaacgtgaaacatgcaaaattcgtcaagaaataataatagtataatacgactagaaatgtattgctttgaatttttgtgatgtggaatagacgaaggggtggtcatgtactactactgtaagttgaccctgtaaccaagtgattcaaagacaacaacaactgggaaaccaataattttaaaatccgtccaattgtatcatctgacatactagggagaaggacaaatatttaaaacatgttagttcgcatagttcaccgacctacattctaaaactccggataagtacacagtcccagcccaacattattaaaagccttagggcgaaaaaataattttggacctttttgtttgtttttaaaagaaaaacagaattttggcatatttaaaagtgccgggctata

SEQ ID NO: 67322 - DNA, 514 bp, Arabidopsis thaliana landsberg
tcctacctaccgggccttgacctgaactctcttgctttgcagtatagcttcttgacacagggctggacattgacgctctcacagcgtctgacgtagcactcattacactctcttcaacagccactctaccttgaaaacgctccacttgtggggcccctcccggaatctgctcgtctcaggcctagaagatgattcttgtctccaggcaagagaagacccgcaccctcgctaaaccagcatggatcacaccaggcaggcgtgaggctcctgctaccatccatagtaatctcgaagatgcacttacagctatacttgtaggaatgaaactatctccacggatatttatcacctacttgattatttacccggatcaatcattgctttgaagatgctactggatctgctaacaggattcatacctttgagatagagagagagtgtgctgtcaaatcacagcttaacaagaatattacttgacagctgcatttacattaatagacgatcaaacatctga

SEQ ID NO: 67323 - DNA, 703 bp, Arabidopsis thaliana landsberg
  unsure (1)..(703): unsure at all n locations
aatgtactggtcgtacatcgagcgcttctgcgcatcggccagcacctcgtaggcttccttggcctccttgaatttctcctgggcttgcgggtcgtccgggcaacggtccgggtggtacttcatcgccaggcggcggaaggatttcttcagttcgacctcggtaaccgtgcgttcgacacccaggacttcgtagtaatcacgcttgctcattgcttgatccgcgattcgatgcgccgatcgggaatgaaccagatcgcagccaccgtggcataaaacagacaggacacccacggcgccacaaacgccagcaggatgcccgacagatacatggcggcggcgagccagcctttccagtccgcgcccaccgcctgggccagcaacgagtcgcagccaccattggccgtgatcaggctgcgctgcagcggctgccaggccagggcgcacatcagcagcacgacgccgtacaccgccaccggcaacgcggcgaaatcattttcgcccatccagcccgtggccaccggcatcagcgacaaccagaacagcaggtgcaggttggcccacaacaccttgccattgatccgctcggcgacatgcagcangtgatggtggttgttccagtagatgccgacgtacacgaagctgagcacatagctgaggaacaccggccactgcgcgggcagcacatcccaaccgctgccgtgcg

SEQ ID NO: 67324 - DNA, 434 bp, Arabidopsis thaliana landsberg
  unsure (1)..(434): unsure at all n locations
aggccaaccgacgccttcggcgggcgaactacccgctttatttcctccttagaccgtatgtagcggcgcgtaccgggcttcggcgccggctccctgcataggnnnnnnnnnnnnnnnnnnnnnnnnnnnnnnnnnnnnnnnnnnnnnnnnnnnnnnnnnnnnnnnnnnnnnnnnnnnnnnnnnnnnnnnnnnnnnnnnnnnnnnnnnnnnnnnnnnnnnnnnnnnnnnnnnnnnnnnnnnnnnnnnnnnnnnnnnnnnnnnnnnnnnnnnnnnnnnnnnnnnnnnnnnnnnnnnnnnnnnnnnnnnnnnnnnnnnnnnnnnnnnnnnnnnnnnnnnnnnnnnnnnnnnnnnnnnnnnnnnnnnnnnnnnnnnnnnnnnnnnnnnnnnnnnnnnnnnnnnnnnnnnnnnnnnnnnnnnnnnnnnnnnnnnnnnnn

SEQ ID NO: 67325 - DNA, 592 bp, Arabidopsis thaliana landsberg
tctactatctcagtttagttggagttgttgaagttttcaatgcaactcaaggtgaaaaataatcattaacacaaaattttttatttttgtttagtttttgaagttctttttacatttattaagtgccaaaaatgtaagtaaagaactttaggggtttttgtttttccttaccttttggccaaaatatccttagttaattactacaatgttttaacgttatatcttagaaaaaagaatataaccacataccactctagtaaacaatctttgtatcttggtttttgattgtttcatttttatctaaaaaaataaaaagttcatgatgaggaagcttttgccaattgcttggcaagcctccatctacttgatctgaacagatcacagtcatatgtaaaagaaaattatttatacaaagtgtcaaagaaatcctttttgttgaaattttgttttgttgatgtggagaaaacgacatataagaaggagcagagagaataaacggacattgatgtggaagaaaagttggattgtgggagtacgtaaaagctgagaggaggaagatatgatcagatcaaggatgtgcacagaaaattag

SEQ ID NO: 67326 - DNA, 1055 bp, Arabidopsis thaliana landsberg
aggagaccaagtcagctttggggcaatgctactatcattcttataaaacttttcaacttggtatctaatataagtctctgcatcatcacaagtgttagtaagtttgtaataatgccagacaagcttcaccggagggttcaatcccgtcgcagcctctaccgtagcctttccggctaagcttatgactacgagggccaatagtgggaaaaaattcacaaactgcattatttttagtataaaaacgaaaaaatcttccaccacaaaaaaccctaggagtttgtgtttattttcttgattaaaagatcaaagtatcttagattcttattatttgtgtttagataaaagaaaagatagagggcaacatgaatgtaatgaattaagatatggattagtactcgataatgagagttatatataaggtttgacttgcatggcaagtccacgtgagtgaaccggtaatgtcgatataaaaaactattattcggttctgactttgatcggtttgatgtacagtgcaaggaagcgcgtgtaggacaaacgcggattcacatgaaacgatgttcttccacgttccaaattatggatttatgattattagtgttaattatgtgggttgcttggtaattggtataccacaaatagttcacacttaaaatattgtaatgaaatacctccttaaatttcaaaaatactatatatgtttgtagagatttcaagttatcacactttagaaagtgagtcccattaatatttttatattcttcatttacaattagatgttattatagtaaaatgacatatgaagttcatcaatacattcaaaagcatatatatttagctaagattatgtgttatttaaccaaatatatatatcttattagttaatagttaattaaattaaaaagaaattagtaaaaaaaagttctctatcttaaatatttgactcattgtaatatgtggtagttttgaaataataataaatgttgcagtcatttggggacttaggtagcgactagggagggttagttgttcacccctattcaaactcttgatgt

SEQ ID NO: 67327 - DNA, 596 bp, Arabidopsis thaliana landsberg
  unsure (1)..(596): unsure at all n locations
tatcacactcggtttgactggccgcaatcaacagctccttcaattcctttttctgcaaatcgaatggcgacgtatactccggctccaacatttcgcggagggtgattccttttttgagtaatgttccaaggatcgccatatcttgcgccagctttggtggtttaagggcctaaaataggcatgaatatcaagaataacatacacaaaatatctcaaaacttgcctccgggatgcacgttagtggccgtgagcaagactaaaagcgctgccctgatccagcaagcgtacgatgccggacagcgacatttcggagagaataaggtgcaggaactcgtgccaaagtatgagacattgcccaaagatatatgttggcacatgatcggacaccttcagtcaaacaaggtgaaatacatcgtgccctttgtacatctcattcactccatcgacagtgagcgtttattgacggaagtagacaaacaggccgcaaaagtgagtcgtaccgtgagctgcctgctgcaggtgcacattgcaagggaagatacannaattggattttcgatcgatgaattgaaagaccttctgcgctccgtaaatgc

SEQ ID NO: 67328 - DNA, 547 bp, Arabidopsis thaliana landsberg
  unsure (1)..(547): unsure at all n locations
cgcttccttgtacatgctaatcgccaggtcagtctccccgattcttatgttgagcttttcagcctctttgaacttccgctcctcttcgaactgttgtgcctgagccatatatagggcattagcttcctgatccgacatgaaggactgcgcaacacgatatgccgcgtcaagcaagttcgcgaccgtgtacatttgaacagcaagatccggacggttggctctaacataaaacttctctgcctcgcggtggttgtgggcttcctcgtaatgctgagcgatcttgaggtagtacttgtggataaactgctcatcggccccgccagcaagactgctcagaatctgaacggctttgccaaactgacgtgcgccaatcgcagactcaatagctttctgcgtctggcctgcctcaatgtaatgattgacagcgacatccaactgcctgcactcctgtgcaaggtaatcgccccatctttcctcaagctcgacgacacggagaggaaagtccttcttcgacannnnnnnnnnnnnnnnnnnnnnnnnnnnntta

SEQ ID NO: 67329 - DNA, 594 bp, Arabidopsis thaliana landsberg
tgagactaaagcttacaatgactgtggtaaccaaaactttgacatgtcccctatgtgcgttagtcagctgcataaattgcttcacaatggcatctaggttcttcagctttccattctcagctaacaaagctgttacagaaagcaaacaacttttaatatcagcacaacatggtcaatcaaaatcataaaaacaagacaggttcaaacttgaatatacatacataggaacttcttggtgggttcggcaaactttgcttgatcacaagcatccctaatagcagccaatcttgtccctctaggaacagagggatcctttgtaaactgagcaaaaataggagctgtcttcattgcctcaatcatctcagaaagatccgtctcaatcttttccaaggaattcattttcacagctgcgatgtatagccatgaagcaaagttcccattttcaccaactaaagcaataggcacctgaaacaacaaccagtgtgaatctagatacacttacattacatattatacaacatccagctatccgcggttcatcatttatgccaatcaaacaattcaagccattgtagcgattctcgcatcttcaaa

SEQ ID NO: 67330 - DNA, 595 bp, Arabidopsis thaliana landsberg
  unsure (1)..(595): unsure at all n locations
aacgcgtacaatatcggcgatcggaaaaatttcattccatcttacccttacttgcagaaagaacatatcaagactttgtgcaattcgcgtgacggtcgagaactcgtttcgatcaccgcagcagacataggaagcgtnnnnnnnnnnnnnnnnnnnnnnnnncattaaaaagcggtaggccgcgaaatcacccaattcgttaatggcgcgagtgatgcctcaccagccctcggaaagcaccttttccagcatgtctgcgaagaagtcggcactctcgatcgtcaggcagagcggcggtttgatcttcaacacgttgaggtgatcgcctgtcggctgcatgagcacaccgagatcgagcagccgctcgcagatcgccgccgtctcgccggtggccggctccagcgtcgttctgtcgcgcacgaattcgaggccgagatagaggcccatgccgtgaaccgccccggcaatcgggaatttttcgatcagcgctgccagccgtcccttaggtggtcgccgacctggcgagcgttctcctgcangttttcctcccgcaggatatcgagcaccgtcatgcccgcaacgcagctgacccggc

SEQ ID NO: 67331 - DNA, 2420 bp, Arabidopsis thaliana landsberg
ttatgcgagggtctttttttaactttttaatttctcatttggaagctttcatctataaatatatgctctattttattctatatataacataaaaccgaaaaaaaagttttgttcacgatgtggattctctgttcacgagaggttttgttgaaaaagaaagaaagaaaataattcaacttgaatttggaagtttggttacagatcacatcattcgacaataaaaataaagacatatataacaattagaacagtaactaatttgaatttcagcttcgatttcttacgaatcacatggggtcaataagggtggggctagaaaaacacgtacgtttggagagcaatgtgtgtatcattcctgcatgcgcatcagatgtgtttcactcttccgaaaaacgtttattttattttgcatgtcacagtcgtagctaattatccgtacgcatcttaattacgactccattttacacaccaatttatggatatataattcagacaagatgagttatcgtttaatttaattacttctttccatttgtggaacttcatatactattgtgaaaatttgaaaataactggtgaaagaggaaacgtccatatttgtgggctctatttataataataacaacaatattaattgtttaggtgaaaattaacagaactattttgaatttcaatcggaaaaaggtttgcgtcaaaaaagtattcatgaaccatgcatttgatataagcatttatgtttgttcaatttactattaagcaattaagtcgaattttatcgaatcattttaatttttacctttaacatttctgtgatcttgaaatctttaaattaacaatgtgagttatatacactagagaaaaataattgcattccactgaaaacctcaacatcttgggaaatttaaacttaatcaaagacatcgcaaatgttgcttatctttttatcaagcccagcccacatattcgcggccccaaagcccaaaggttaagctgactcgttacaaaataaataagtattaataaaggtttttgattggcttatttcggtttaaatttaataccatatctttcggaagatcacgtgagacacatgtgacatccaacgaatagccaatcgctgaaaagtgaagactttttgttaccccataaacaaaagcatcatctctctctcatcttttatttttcttttagaaaccaaacttttcagatttctctctctccatttggcgatagaagaagtcatgtaccaatcatcatcctccacgtcatcatcatcgcagagatcatcgcttcccggcggcggaggactgatccgttacggctcagctccgggatcgtttctaaactctgtggttgacgaagtcatcggaggaggctcatcaaacgctcgtgacttcaccggctatcaaccgtcgtcggataacttcatcggtaactttttcaccggagctgctgactcatcctcgctgagatccgattcgacgacttgtggagtcaacaactcatccgacggacagaaacagctaggcaataacaataataataatagtaataaagatatcttcctcgacagatcctacggtggattcaacgagatctcgcaacaacacaagagcaacgacatcggaggaggaaacagctcaggatcttactctctcgctagacaacgtagctctcccgccgatttcttcacctacctcgcctcagataaaaacagttagtcctttttttactcaagaatagtaactgtgatgagatatatatatttagacagacaagtttactcattttcagaccatttttccttagaatttgccaaaaatcgtaatgtagaatatgagctatatagttttcagtcattcaatcatttattgctcaactaaagatccgttttttggtgaaatgaaaatctaaccacgagggtattttcggtatttctcactgtgaagtatctagtttcttacaagttaattaacgactatgtatataaaataagttgacattgtgagctttgatatttagggtcgttgctaaattagcttggttggtacttgtgcaagacgtgatcctcgtattttcggaatgacgaaaataccatttgatccctaaccacgtgcttgaaaatacagcaaaaatgtggctcggttacccttaatttgggatattatttaaatcttcgaggattcctatatctcaagttgcatttatttatttagaggatggattttttagttgatgaccaatagtttctctgctgagatggcgaaatatcattggttgtgatgaagattattcaaatagaaagcgatgtagatctagttggtggatctgatctgtccacttattgtattattttttccttggtcctgatgattcgtgctttgcttcgttgttatctaatcataatatcttccaccgag

SEQ ID NO: 67332 - DNA, 727 bp, Arabidopsis thaliana landsberg
gagtgtctttgtattcttcgacaaatatccgtacggtctcgtttctttgcttcaaatcaaactaacccttccttcttcttctttgaatataacacaacatcatcacttaatataacacaaaatttagatgtataagattttagtatacaaatcatctagaaataaatgttcagtgaccttgtaatctaacatggcagaagagacaagactcacaaccaataaacatagtatgctataattaataatctaaccaaacatactgtaaacaagaaagagagttgggaattattttagttttgaaaaagagaaaaatatcataaattcacctaaaattagtagaaagaatttaaaacttaatttgacccacaaaaaataatatctaacacttcatatatgtttccattatacgtgatgatatttaaacagttttcctacaaaaataaaataaatgatgtttcggttttgaatatacggcaggtttaattatttcgttatatgaaaatgataatcctaagcggcgtggtctaacccacacatttctcttgcgatccagtgaaaaaaaataaaagtttcgattatcacgtaaaatttacattgtgaaatatatcgagtttctatgaacttatcgttgtctcaagaactgatgattaatgattgtgtaatgattattatttcgtggaccaacgaatttttcattatcttaataattagtggcctatattatact

SEQ ID NO: 67333 - DNA, 740 bp, Arabidopsis thaliana landsberg
ggatattttcacaaaaccatagctagatataaaagttaccagaagagttttttattttatttttatttttatatttttaaataaaaaagaaccatacatgtcgatgatgcttaaaaatggtctcggttttgaaaaaagaaaagaactgactttgttttcaccttataagtattattcaatcaatcttcagtcaagatattggtatctgcttacaaatctgaataaaatatttgtccaagtctcaagtataggaaggtttgagaaaaccgtaaagtgatataagcaagtatgaggatacgatcggtcgattagattctatgggattcaatatttgattgactcgaccgctttctcatgcgagaaaagaaaacatattaaaagtcgaagagtaataaaaaggaaaagaaactgaattgaccccaaaaaccaatgaattcctttaactcaaatcataaacagctttgcgtttatatattttgaactttttacataggtacataacagggtaatttagagtaaaatcccttaaaacgttgacccaaaaaatcccttaaaaaactggtgagtggtgactaatggacttgttgccagcactaatcaaagaatttgttgcctaccaataaggtccgactaaaaccttaaagaggttgtaacgcaacccttaaccaaaaactccgcaaaattgggcaaattcgcaattacctttttattcctagttaaagaatttattagggttaaaa

SEQ ID NO: 67334 - DNA, 179 bp, Arabidopsis thaliana landsberg
aacatatacatacagatagacacacatatacacacacacagatacacatacatacacacacatatacacagacacagacatatacagagatacatacacatagagatatatatacacatacagacatacatacatacacatagacatagacacacacacacatacatatacatagacac

SEQ ID NO: 67335 - DNA, 1923 bp, Arabidopsis thaliana landsberg
tagaatatgtgataagttccaatgtttatttttgcattatgttctgtcttgggggtcacagatctgatgttggatgcttcaactttattcttaaaaggtttccagatgattgtgataaacagcagctgcagcttatctatatttccctgtaccttttaatatggggtgaagcctcgaatgttagatttatgcccgaatgtatctgctatattttccataatgtaagttttctcatctgtagaatcagatatgcatatttttcataactttcttccggttctggatggtttaaaattcttttcctgtctgttttttttgttcttaagatggcaaatgacgtctatggaattctgtttagcaatgttgaagctgttagtggtgagacatatgaaacagaagaagttattgatgaagaatcatttctgagaactgttataactccaatctatcaggtcatacgcaacgtaagtatatcaaagtcaatcatgttgtatatatttataagtaactgtacactatcttttgaatgaaaatgataccttgaaggaagccaaaaggaacaagggaggtacagcaagccattcgcaatggagaaattacgatgatttgaatgaatacttttggtgacgttctttactatattatttgacacatgcctgcttgatctagtctctgactgctgacatctttatttatttgaaggtctaagaaatgcttcaagataggatggcctcttgaccttaaagcagactttttcctaaactctgacgagataaccccacaggacgaggtatatttcatttgcttctgagtagctgtaatcttggttaaaaatttagtagggtatgtgatacaaaattcaactaatatgatgctaatgagtctacatataacttccacaatatatgctatcaaggtgttctttaagttgtagatagctcatatatgataaaacagcattatgaacgttttgatctctctgtaagccttcccttttttgtgatactacagaaacctgatcttgtatctctaatgtattgcagaggctgaatcaagtcacttatgggaaaagcaagcctaaaaccaactttgttgaagtccgcacattctggaacctcttcagagattttgatcgaatgtggatatttcttgtcatggcttttcaggtaaatttttagtgttttaaaagagttgtgttagtctgaaaactaaataagttatattatcatacttatccttatcttttgtaggctatggtaatagttggatggcatggttctgggtcactaggtgacatatttgacaaggatgtattcaaaacggtgttaactatttttattacttcggcgtatctgactcttttacaaggttgtgatgtcctttgatatttcttgtttttagtgacacgttttttttattttgatgttctaatggtgttccttgtcctctttttccctcatgattctttacatagctgcactggatattatcctaaatttcaatgcctggaagaatttcaagttttcccagatattgcggtaccttttgaaattcgcagtagcatttatgtgggcggtactgcttccaattgcttactcgaagtctgttcaacgcccaactggagttgtaaagttcttcagtacttggactggggattggaaggatcagtccttttatacgtacgctgtttcattttatgtgttaccaaacatattggcagctctgttattcctcgttccaccattccggagagccatggagtgttcagacatgcgacctatcaaagttataatgtggtgggctcaggcaagtattaaactattcttctggttcttgagtatactggtcttcacttttcttttttgccatctttgtttccttaagcttttccatctatgtagccaaaactatcgttggaagagg

SEQ ID NO: 67336 - DNA, 647 bp, Arabidopsis thaliana landsberg
ccctgcgtctggtcctcgatcggattctccgatgattggcctgcctgcaaacacacgcatctggatcgccgccggtgtcaccgacatgcgctgtggcttcaattcacttgcggcgaaggtacagacggcgcttgagcgtgacccatatggtggccatgtttttatcttcaggggtcgtcgcggtgatttgctcaaggcgttgtactggagcgacggcggcctgtgtcttctggcaaagcgtcttgagaaggggcgatttgcatggccgcgtgccgacgccggcgtcgtgccgctcacgaccgctcaactctcgctgctgctcgaaggattcgagtggcgtcagccagtcgatgcagcacgcccgcgcagtgctttgtaaacgtctattacccggcgcctcgcgtgcggcagatgatcgtaaactgtcgcgatggatcagaccgataccgacttgcccgacgacattgatgcgctcaaggcgctggtgcgcgcgcatgcggcgtcggctcatgcgaacgcgcagcgggtcgttgagttacaggatcaactcagctcccgcgtgatcgagatcgaacatctgaagctgacgatcgcaaaactgcccccgcatgcaatttcggtcggcaagttcggagaaaactgggagc

SEQ ID NO: 67337 - DNA, 606 bp, Arabidopsis thaliana landsberg
  unsure (1)..(606): unsure at all n locations
agtcgntgtttcggatgaagtcaacaatatcagcacgtaggtgtctagattttgcgtacttctgggacttgagtagcataagacgagattgaagctgtttcaaaactttccatgtgaaagcgtttgattttctccgtcgagagaacgagaaaccaaacatgattaaaattgagtttgtgatatgtttcagcaacgagaacgatgttggttttataaggaacccccaaagcaaatccaagattgaaagggaataggaaaaatacattaccaaatcctaaaccaataaggaggcttgttttgcaagtaaggcgtattttttttaagagagagagcgtgggttatggaaatgaagagaataatggtcatggacggttattctaatctcccactcgtttttttatttaggattaagctacgattttgataatttcttgtttttactttattttaaaatatctcgtgaatcttataaattttacaaaatataaaatcacaattaacagatacgattactttgttctcctttaaagtttaaatcttctagtggcgcattgttcaaccggtaaggatatctcgaatcgtaatccaaaattaatttttaacaat

SEQ ID NO: 67338 - DNA, 498 bp, Arabidopsis thaliana landsberg
gagatctatgcctgatttagatcttcttctcttatctatgtgtttttctcatttacaaacaaccaaacgaattgggaaataagatatgggtaagtaagatcataaacgttaatgtttgatttggtatgtatgatacgattcacaatcagactcacgcgaatttacgctcccactacgctttacttagcggagatcggattcggatctctcatttgattacatttgcagctaatttttttttttattgttggtaacttaactttcattttatcacactagtctttgtttgatgtaaaacagatatcttgattcccgtattagatggcagagctcccttatttttgtcttctcccaccaatattatactatgttcaaaaaataaaataaaaaacatagttttcattagggacgatcactacaaattagcatgctttagtcgatggaaatatatccatttgggagtattatctgagaatctaacttcgagtcgtaatttta

SEQ ID NO: 67339 - DNA, 547 bp, Arabidopsis thaliana landsberg
cttctcaaaatgaaaatgaagctaaaagagtttgagaaagagagtgagaagaaaacatcattttcatccatcagcacgaatccaagttcaccaatctcaactgcttccacgggtaagcctccattgccaagaaagtcattcataaactctgtttccaagaaactcggtaagctaaacccttttagcatcacaccatacaacggtagaggcagaaccaaaccaccaaaagatcggagacactctatttcttgaataccatatctatatacacatatataaagttgaatttttgttggaacttttaagttctgattcaaggggttttcttcctgcttatcaacatttgatattttggtgtgtttatgatgtataaactttatctgtggaacttatcacttatgagtatagatcatagattcagagaatttgggattctaaagctgatgatgatcaaaccagatcgtggggtcatgtattaaaaaataatagtaacttttcaatttagttctttggaaattaggggaaaaaaaatatataaaaatcagaa

SEQ ID NO: 67340 - DNA, 551 bp, Arabidopsis thaliana landsberg
tataaaaacagcctttctgaaaattgtaaattgttatttatggaccagattaaataatatatgtgctaaatactaatgaaggcaacgaatcccacatggaaggattctcgtttccccaactatttctgctctgtgttcccacacataatgccacgcaatatttatacagagtggactgatcaagagattagttaccaaaataaataagaaattctgacttaatcaatcatcaaatttttgtatcaatccctaacaatataccaatattcaatccaaatcagaacaattaaaaatttgtaactaaaaaaatgaaaatgaaactatggttgtaacgaaaaaaatcacacaagaattaatagtcgagtattagatttttaaagataaatcttctttcttgatgacttggtcgcgatcggtcaacaaaagcggttttttaccggtcaacggactcaagatctcttcgtcgacgattggattgtgatgaaagctgagttcacgtaacgcccgtaggtttagatcgatgaatccacggtggctcctttctttcgata

SEQ ID NO: 67341 - DNA, 264 bp, Arabidopsis thaliana landsberg
agtgacagaaatcaagtccccttcaagagatcatgagaaatctttaacagcctatgagcacacaattctacaatgactccattttcaaaagttttattgtgttgcttgcatggacctgcagattatagcgatacgtggccgtgtatatatattggttgatcgatatctaatttgcctatggaaattttcttcaaatcttaaaatatttcttgattttttggataaccagtggcaatttgtattcaaaatatgtgtggtactact

SEQ ID NO: 67342 - DNA, 229 bp, Arabidopsis thaliana landsberg
ctgaagtgtaaacagactctcaaacatattgccggacaatccttatgcactgtctgtatcgagtagcctatagccctttttttgtagggcatatagcaaaccataaaacgaattcagaagctcaagaccgatcgagctcttcgaacaaatgataacagggtttatttgtacacagaatggttatacttactatgactctgttggagaagacaggacattggagatcttg

SEQ ID NO: 67343 - DNA, 1561 bp, Arabidopsis thaliana landsberg
gtaccatagctaactacattcggcattgtcccgttatcttccttttctttaagaatgtcgaagcacttatcaaaggcatagtttctcccatagcccccaatcaggatgttatatgtctccacgctaggagaaactcccttcagtttcattttgttaacctctttctcagcattctccatttcccccaattcacaaaatctcctaatcaaacaattatacgccaaatgatctggcttcatcccttgtttctccattgcttcaattttcatacgagcaccaaccagatcaccttttcgacagtatccatcaatcatagtgttataaataacctcgttcgggacaagccccttagccatctctctccccaaaatctcttccgctttctcgatctttccttctttgcacaacgcattcaacaaaatgctacaagtataagcattcattttcacgccagaatcaaccgcagtctcataaacacccaacgcagcctcagctttctcgttactcgaataaccatcaaacagaatactgaaggtgaaagcatctggtacaaaccccagatccttcatttccttcaaaacattctctgcatcttccaccattccagctttaaacagccccttaagcaaagtattaaacgtaataagactcggttcgatatgatccgctttcatacgttctctcactttaaaactcttttccggattcccagctttgcaatatccatcaatcaacgtgttatacgttatcaaagaaggtaacaatcttcttgcaagcatttcgtcgaacaactgttctgcatcattcatccttttccctttacacaatccatcaataaggacattgtagataaacacactgggatagattctatcgtgcttcatccggttaaacagctctaaacctttacctacatcgctcaatttcacagcagcttgaattgctttcccatacatgaacttactcggacgaaaatcagattcgagaatgttcaaaaacacgtttatagtcactctgaattgtttcgtcttcacaagatgatcaagcaaaagcgttaacgaatctgagctgggataaataccttcattcctcaaagcgaaaaacaaatccgcagcttcagaaatcatcttcgattcgtttagtagcacggagagaagcaagtaggagaaatcgtgtttcaacgacggagatgataacgagaaggcggagaagagctctttcggcgatgcgaaaggcgtagaatccgatcgaagcagcgaagagagaacgccacgcgccgtttcgattcgattctgctggagaagaactcggagattccgtagcttttcgtctccggtgacgggattcgtaggcggggcttgttcgggttgagattcgggttcggggtcggtggaggcagagaagagacgacgacatgagcatgctgagacagagtcagtgaacttgacggtggcgtaacgagaagatctcgaaacgagtcttaagcgagtcaccatcgttgagctgccggcgacgctctgcaaaagtgaatcttaacgaaataaccttaaaataaaacgaa

SEQ ID NO: 67344 - DNA, 467 bp, Arabidopsis thaliana landsberg
ctacacattattgttcaataatactcatatatgtatattacacttttttgcatataaatattgcattcggataagcggatctttcatgcattggagaattcattcaatgttgaagataaaggtggcctcatgctaaaatatgcatagttataacttacagtccaaacatcatgatggctccacttaccagatctccgtaaagggtcaaacttgcagttcattaaggtttgctaaaccattatataatgagaaaaaggaccatcattatgctttatggcatctgatatgagaaccttcacgttgatgattttgttgtttacttataataaataccctagtactgggattaagtcagagtatttgtaacggctagagtagatgcttctttactttctgttattaagcttactaacttagtatatagcgaagaatactcacattacgtgcggactttcactttatatatt

SEQ ID NO: 67345 - DNA, 592 bp, Arabidopsis thaliana landsberg
gcggtcttaacgagtggctggcgctatcagatggtcttgccatccttatgcactttccactgctggaactcggcccattttgccttgcgctgatcgcgctgggtcttcagctcgtcgaacttcttctgctgttcgggcgtcaggagcgcgcggatgtccttctgcgtcttgtcgtggctggccttgagctcatcctgcatggccttgcgatcggtggccgagagcttgctcaagtatttgtcggtgatgtcgtggcggctcttcatcgaggaccccatcagcttgccgacctgctggcgctgttccttgctcaagttcagctcgcgcatcgtgccgacgcggacgccgaggccgaagcgcgggccgtggccgtccatcatcgatgcgccggcgagcggcagaggagcgtttgtcggtgccggggtggcggccatggccagggtccgcagggcggcggcgaacatcagggcagtgagggtcttgcgcatgaatcttctcctttcgcggaccgtgttttgaacccggatgtgcccaggctaagggatgggcagggccaagggccggtcagggcccggttaaagccttagggaaa

SEQ ID NO: 67346 - DNA, 383 bp, Arabidopsis thaliana landsberg
acgccttggcttgatctctatcatagagcgctgtgtctaccctacattgatactcttatcatgcccctatccagcagaggagctggttgtaacttgcgctgtcttagggatgaaaatcaagcgtgggccttgcactaaccattacgacctaagtacatggcctactagattctcatacaggttctatctttggagcatagtattgcatatggaagagccatgtgagagattggctgtactctgttctctgattctatgttcgtgattgtacgcatgtgtaccattcgcactcaaactaccatctgttgctattctaaccagtatcccctacttaaaccctattactaactcattgcccgagacacgcatgccaaggaatgaga

SEQ ID NO: 67347 - DNA, 572 bp, Arabidopsis thaliana landsberg
ggcaacactggctgtgtcctccattcattgccatcggccaggtaatcgggcctttcatcggccagtccggtccccatattgtgcaggagcaaatcggtgtatggcctgatgacctggtgtgataaggaaggaatggctgcgttggcacctgtactgaaaaccggggtatggcatttggtacagccaatggagttaaaaacctgcttgcctgccagtacctgtgcatcgcttacattcctgcgttgtggcacggccagtgttcggcagtacaacactactttttcaagggtggtcaggtcaatctccggggaaccgcctgtggtggccgactgacaatcgagctgcggactggtgcaattttcatctgtaaataaccaggtagtaatgcctatgtcacccaaaaaagccccacaggtttgctggtaaagatcgggctggttggctttccatccaaagcggcccattacggtggtgccggtcctgtaattgtaaacgtagttggctttaccccaaatgccgttcccatcggcatcggaaaatattctgttggccagaacatcactttctttgat

SEQ ID NO: 67348 - DNA, 648 bp, Arabidopsis thaliana landsberg
taatggcttcttcttaattacgtctggctttttccaaattttgtttgtcaaatcagattttgacattattataagagttataaaccatcaattgtaaaactagtgtacgtcacttctttttattttttaaagaacggtttaatctcctaaatctttgatcaactagctcatgtcattattataatttagtttaggggatatttagatgaaactcatttcaacattggccacaaacgaaatatgaatatgttggacaaatcagacggccgaaatataaacgcgtaaatcgcaaatttttgacaaatccatagatttaagagctactacattcaagagtatagccatcttaaaactgttaaaacgccgaaaaatataaaataaactgttattgcgcctactgatttaatttgagaatctcatttacaaaaacagcacaagctatcacaactttacaatccaaaataacaagagatatgtcaactaacttaactgacataaactatttttacctttgaatctgatccgaacttgagttgttagccgctgatgaactagacggccgtccattttcagtccctgctttatctgaaccagctgcgacgccaacaccccatcttctataaagttctgatggcttcaatcactttt

SEQ ID NO: 67349 - DNA, 493 bp, Arabidopsis thaliana landsberg
agaaaattgcaacagagtggagatgagatcttactacagaaggtgaatatgtcgaagaaagctattgatatgttgaccaaatagtcactgcgattaagttttagcattgcttaaacttgatatacgtctttcaatgctaaaggaagaaagaaccctcagatagcaaacaagattctgaagtcgctgcagttggagcttgttctaaacttctagttgacctaaaaatcaataagcattattaggagggcctactcaaatcaaatgagcctatgaaagaattgatttaggtagaatatctctttcctatatattcataaagttagttaaaggattcttttttaaaaaataaaggattcgatatctaattaataccgttctcctgttttatgctttacgagtttattgaataagccaaaatcacaacaataaagaaataatattcattacatagaacgagatttagtcatgcagatcttaagaactcgagtagaaa

SEQ ID NO: 67350 - DNA, 99 bp, Arabidopsis thaliana landsberg
aaagtcggttgtaatggtaaccaagagctggtttactttttcgcggaacagaaactgaaatggggatgtgctggcacaggacaaatggacatctaaagt

SEQ ID NO: 67351 - DNA, 549 bp, Arabidopsis thaliana landsberg
  unsure (1)..(549): unsure at all n locations
aacgcgtgccaaacgtggcttggttaatttaagganccggatcgttccctctcccgggacgggcgctactggcgcatctgcgcggcacggcgcgcgacttcttcctcgctgacttctccggcagcaatcaacgcattgaggcagcggggcgacaacttctcgccagccgctcgcatgcattggcggacttccggactgtcggacgcatactgcccgcacagcgcgcgataatcgcttacgcatgcgagcttgacgcggagactcaccgcctcggcttggctcacccaaacgccgaatgctgccgcaatcgtggctatagccaagatgccggatcgaaaaccgaaccttgtcttcggcataagcgctcgcatgttgcacccttcgtcaggatgatttgttgatatgctgacgatgaaatttcgcgagtcctagcaggctcggctatgaaattaaagacgaagcgcgaatggccccagcatcgaaaccgatacgattaaaattcttttaccaagcataattgggattagcggatggcgccggccagattga

SEQ ID NO: 67352 - DNA, 584 bp, Arabidopsis thaliana landsberg
ctcctaggagagggcccttatgagggacagacaaatcagattgattttcccgttgcagtgtacgcgcttattgctttggccacacgccgtgcttggggaaggttgccagtcaaaggagagattggtggaagtttagctagcattcggcagagttctgatgaaccatatcaggattttgtggacaggctattgatttcagttagtagaatccttgggaatccggacacgggaagtcctttcgttatgcaattggcttatgagaatgctaatgcaatttgccgagctgcgattcaaccgcataagggaacgacagatttggcgggatatgtccgcctttgcgcagacatcgggccttcctgcaagaccttgcagggaacccacacgcaggcaatgttctcaaggaaacgagggaaaaatgtatgctttaagtgtggaagtttagatcattttagaattgattgtccttagaacaagggtgccgaggttagacaaacaggccgtggcccatgaatatgttccctgtgtgggtagggccgtcactgggcacaagattgtatgcataaaacgagggttttgagccgccc

SEQ ID NO: 67353 - DNA, 445 bp, Arabidopsis thaliana landsberg
  unsure (1)..(445): unsure at all n locations
nnnnnnnnnnnnnnnnnnnnnnnnnnnnnnnnnnnnnnnnnnnnnnnnnnnnnnnnnnnnnnnnnnnnnnnnnnnnnnnnnnnnnnnnnnnnnnnnnnnnnnnnnnnnnnnnnnnnnnnnnnnnnnnnnnnnnnnnnnnnnnnnnnnnnnnnnnnnnnnnnnnnnnnnnnnnnnnnnnnnnnnnnnnnnnnnnnnnnnnnnnnnnnnnnnnnnnnnnnnnnnnnnnnnnnnnnngtaaccacccggatcaccagattacgaccgtaaatgaccgatcagtgattaaggcggatagggtgccgacacagccaggaggatatgctcgactcatgccacacacataaagagctcgctgacaganactgatcgagacccacacgcacgcaatggaacgaaggtaaccgagctgccaaggctgctggatgtgaaaatgcatagatcaggg

SEQ ID NO: 67354 - DNA, 841 bp, Arabidopsis thaliana landsberg
tttatttttgattagggggagtcttttcaaaatggtggagagtacgaatcagccattggacaagaaacgccgtttaagaatggcccttgatgttgtaagactctgatcttccaaaaacctcctcacaatgaaagaaaaacatatgaaaggctgagcatattcgggttctctgttgttgttgcaggctaggggaatgaattacttacaccgcagaaatccgccaatagtacatagagacttgaaatcttccaatctactcgtggacaaaaactggaatgtgaaggtacaaacagtttcctcaagttacatttatgaagacttgtaatatgagtttattactacatttactttctactctttcttccctaggttggagactttgggttgtcaaagtggaagaacgcaaccttcttgagtactaaatccgggaaaggaactgtaatgtttaacaaaagccatttctgattcttataatccacaaaacagtcttgcatttctgttactaaacgttgttcaacttttttctatgtgcagccgcagtggatggctcctgaagttctcagaagtgaaccttcgaatgagaagtacgttcgatataatattaaccctttcttgttctctcttcgaagacactattcaaaaacttgaacatttttttggactaaaagctcaatactttcgttgtaataggtgtgatgtgttcagctttggagtcatcttatgggagctaatgactacgttagtaccatgggaccgtttgaactctattcaggtaactctcaaattctgttcttatgagattatagcttgatcataagattgtagtaatctgatcaacttt

SEQ ID NO: 67355 - DNA, 425 bp, Arabidopsis thaliana landsberg
cttttgtccacttattttcgattcttattttctagaaaatttcttttaactaagtttattcaaataagcatatttattatatataaattgattacctgcaagaatgagataatcaggaaaatctataatctaaaatggtctctttgaagttttttcatgtgtttatgtcaactaaatgaaaaatatttaggaggaagctacatggcataagacaaattgcaatcacatcttctcttgattctttttattcaacaaaaacaatcatgtgtcatccttcaatcctagcatatattgccatgtcatgacgattctacacaaattgtcgtgttagagcaggtccattggggcatcttgaaaatttcttaattaaaaagaatccttatcaaaataagaacaaattttaaatgaaccatgtgatatagtcc

SEQ ID NO: 67356 - DNA, 172 bp, Arabidopsis thaliana landsberg
taaaaggttttaatctatctacaacgaatttcaaaaggttctcaaatatctacaaaggattttaaaggtctttaattgatctacaaaggtcattaaaagattcttaaagggtttaaaagcgttttaaaggattcaccacacaccttaaaacggttttaaacatttacactcc

SEQ ID NO: 67357 - DNA, 485 bp, Arabidopsis thaliana landsberg
ggctgagcttcgcagcttccttcgaggccaagttcgtacttcatgaaacattgctgtggactattgccggggctgcggtgaaggcgaggatttaaaagctatacaggaaatagatagcttttcagaagttggtgatcagatcaaccgcctagaccaaacaatcagagatcttttacagtcggtgagtatttttactatgccttcccaacatttgcccgagctgatgtttttacaggagcttgcctgggtgtcgatcaatggggctcacagatcgacgagcatcgctgctagtatgaaacgcctcagctggatcactgtatgttatcttcggagccttgtatcattttcagctaaagctaatattttaagttcatctttctaccagctatgtttgcgtcggtaagatttacaagattcttgatcttaaacgattacccgcgacaaatcaacgaacgatttcagagtctattcggtatgaacgtgga

SEQ ID NO: 67358 - DNA, 561 bp, Arabidopsis thaliana landsberg
  unsure (1)..(561): unsure at all n locations
aaattgcatacacacagtcaagnnnnnnnnnnnnnnnnnnnnnnnnnnnnnnnnnnnnnnnnnnnnnnnnnnnnnnnnnnnnnnnnnnnnnnnnnnnnnnnnnnnnnnnnnnnnnnnnnnnnnnnnnnnnnnnnnnnnnnnnnnnnnnnnnnnnnnnnnnnnnnnnnnnnnnnnnnnnnnnnnnnnnnnnnnnnnnnnnnnnnnnnnnnnnnnnnnnnnnnnnnnnnnnnnnnnnnnnnnnnnnnnnnnnnnnnnnnnnnnnnnnnnnnnnnnnnnnnnnnnnnnnnnnnnnnnnnnnnnnnnnnnnnnnnnnnnnnnnnnnnnnnnnnnnnnnnnnnnnnnnnnnnnnnnnnnnnnnnnnnnnnnnnnnnnnnnnnnnnnnnnnnnnnnnnnnnnnnnnnnnnnnnnnnnnnnnnnnnnnnnnnnnnnnnnnnnnnnnnnnnnnnnnnnnnnnnnnnnnnnnnntcccgtgacttctctcgtgagtatattctgatcagttaccgagcatctataagacatcaaattacggaggtcttcaacagatataccatgaaaatc

SEQ ID NO: 67359 - DNA, 499 bp, Arabidopsis thaliana landsberg
tcacatgtaggtactacagtttcatttatagatgaaggaacaaagaattgtgtgagattgtaggcgtcactcatcagtacattcagctaaaagcctaaaagtttttcttgaatagagagataaatttccatttccattttacttttaagtctttaactaacattgttatgattagttatttaattatgctcctttgctttgtcggaagcctttattcctttcccgaaatgtgcaaaggaaaaaaagatagtcagaaaaaatgttgtgaacttaagggaaaaaaacaaataacattttttctgcagaaatatgttcccctgctctatttttttggccaatcaaagacaattttgtaagttacaactttcttctgcagaaataaattcacatccgtataaaaaaaaagaaggaaaattatgacttattaactctgttttcggttttagaacagtcagaacgacagcgtatcaaaaccagttcacttctgttaacagttggg

SEQ ID NO: 67360 - DNA, 400 bp, Arabidopsis thaliana landsberg
tggggggatctggttttattgaagctttcaatttcgggcttattctaattcttgggttaagttatggatggggaaaaggaacattggaatgggcttaagttggttaacggattcctggttccattattaaaaaaaaaaaaaaggtaaaaaaacccttggaaccattaatgatttcatttaggtttccaatactggatggaccaccaaaaaattcggttatttaacctacgttaaaggatctttaaaatgggccagaattttccagcttatggccgtttttttatggaaccagtggtggttcaatggaattggcctaattaataggctcccgattggactttgatcgttatgggttagtaccaagatcgagtcctagacaggcggaccttattttaacagc

SEQ ID NO: 67361 - DNA, 558 bp, Arabidopsis thaliana landsberg
ggtgtgtgccgactagagtagagctatagagagtgaattcatatatacgtgggtaggtgccttgcttacgagctaattatatgttaaaagaagaatgtgtggatatataaaatccatcattggtagacaacgtgaagagtacgagaatcgatactgcctgtgagatatatacatatttgaatctccaaatatgtttagctgtttatccactgattatactataactatgacagatcatttcaaatgttttattggtcttcacctgcacattacaaactgctgtatatattataagttcaataatcttgtgcttattacatatagaattgaaaggaaagaattcaaacctaggacaggttgcgcatattgatcatgaaacatctaactaatcagggttccttcattgaatactgaccaaccaatagattcgacatttggatttactgacatggaaaaatatatggaatgttctctctctcacatgatgtgccctgctttgggtgggggtaaaaaaacaccttatttatgacatattttcacgatcactggttctacaaa

SEQ ID NO: 67362 - DNA, 611 bp, Arabidopsis thaliana landsberg
ggtgccaagttagcaaagtcaggctaactgcaggttcaccggaccagtcatcggaccaggcatgcaaagaagatgtaattcggacttcgacagattggcaaccggatcaaacctagtgtgcgccggactttactctattttgggcacacagagagcatgtttttggtacatcaggtggtgagccaccagacctgttcggtgtgccactagaccaataatgtatccgatggtcggatggaaaagtccaacgatctactgacatggcaatgaacaaggcgaggtccgatgcgcaccagactgatctggtgcacactgactctagagggattgtagaaagatataaagatagacttgtggctaataggtttacacacacacacagagagagagagagagggagagagagaatagattataatgaaaccttctcaccagtctcaaccaaagactcgttcaaaataatcatggaattaattactcactatgatttagaactccatcaaatggatgtaaatcaacactcttgaatggagagttgctagaaaatgtttacatgacacatcctatgggtgttgtccaagaggaaagaaaatatgggatccacttaagga

SEQ ID NO: 67363 - DNA, 1518 bp, Arabidopsis thaliana landsberg
acttaccaatgaaatctgatctgaggacttacaagtccgttgtacttgctcgatgcaaggtgagaaagagcatagaactccatcctgctttaacatctttgctgcagaaggaaccgcaagccaaggctgtggaaggtctagaaacacagaatcagccaaacctgacagtttctcaggaaaaccctctccttgaatgtctctaacctctacggttactaaactacttatgcccgtcttctcaaaatcttccctgttgcaaagtaaagtaaaggatgaataaatactatagcttcaaaagaaaagcacaacgagatagctaaagaaaacgaaagtttctaccttgcagagacagctcgctgctcatggaaatcaaatgaataaacatgtccagttggagccacagctcgagcaagtgaggtcgaaagcgaaccactacctgtgcctgactcaagaacaacacagccaggcacgacttctagatacataaccacaaagctaatatccgcaatgtaaagaatttgagtcctgtggcttaaaaccaatgtccatagttcaggagtaggagccaacaggtacacaaatttacccttgttgctgaatactttcgtccctaatggtttcccaatccaatccgagtgcttatacacaccaaaacggttctgaagcacaccgtctttacttactttaactggtttcatcacatcatgtctttcgtaaacaataactaagtccccatcttcaatacaccttttgaatgaaaaggctttctttgactcagttggtaacatcttgagattatgaaatcacttgtagattgagttccagcttctgctctgcaattccaagtctcattgttaattactaaacaacacactttttaactcagaaaacaatgaattctcacaaatcacgatatatattcccaatctagctatcaatccaaagctacgcattctacgcaatattgcacagccaatcaaacacattgagattcaaaatcattgtaatgaattagcttagatgcacagaagaaaaacaatttaaagtttgattaagttaaaatttaagaaaaaagctagaaaaatcccattcacggatccaaaagtcctaacttcaacgaagagacacaattttttaatacaagcgggtaaaaaactggaaccaaacacaattaccagcttctataagataaaaagctgaaagaaacagtttaacaatagcgaaaaacgacagaaatactcacagaggaataatcacgaagaaagctaagaacttgagctgataatggagtttgggtaataatgttttgtgagaaggaagaacaataaatctgaccagacaaagaaataaaacctctaagtagggttttcgctttccttttttcaaatcaaatcggacattgagaccaaccggaccatattacagatttggtaccttcgaaccggcaaatccggtttgggtttatatagacagaaaaatttactgggccttatgttgggcctactgaaataatctata

SEQ ID NO: 67364 - DNA, 589 bp, Arabidopsis thaliana landsberg
  unsure (1)..(589): unsure at all n locations
gtattttatagtaacaaagttgtgaannnnnnnnnnnnnnnnnnnnnngaaaaaaaaaacgagtacaacgttacaatcgcgtccctaactctctctctctctctctgtgtgtgtgtgggggggggtgtgtgtctctctctctctgagaataattcgaacagacataaaataaaattgcgtgagaataaatacacaaacgaaaaacaaaaatccaaaaaagaaaaaaaactgtgaagttgctccaaaggagagagagaagagagctcaccaaaaaaaaaaaagagaggaatcttccatcttcgcaggggggagagaaaccaatcaaatcaatcaagggagcttcctcctccaggggaaagatccaaacgcctccataacttcaccttaccttatctgcgagggggtgagcaaagattcctggggtgcgtcaagcttcctcaacaaaagcgagtctcttcttttccttcttcttcttcttctccttctcgcgatcatagatctcacaagggaggactttcaggtgagctcaggctcgatctcgtctaagatgccaagagacctaagctctgtgttttgggcaatggaggtg

SEQ ID NO: 67365 - DNA, 710 bp, Arabidopsis thaliana landsberg
ctggcgcatcttcaccgcatggccgcggggcagcgtgcgcggcccgtcgaccaacctggccggctcgaatccgaggtgctggccgggctcgccagcgaggtgcttgcacgcgcggggctgccgccggacgcgccggcgtgcctggtcagcgacaccgacatgcgcgccagccgcacggccgaggccatgcacctggtcggacaggtgctgcccgatcgcgacccggccgacaccttgctggggctcggcatcgccaacggaacgtgcggggccgcgctgatgctggccgcggtggccgtcgccgtgcagcaggtggcggaatcacgacagcccgggctggtgttcacccaccacgacgccagcgtgcgcgcggtggtgctcgtctcgccgcccccggaatccggaaccccggacgaccctccgtcgatggactgacaggaacgctatccaatgagctttttccgctacatgttctcgagctggctcggtcgcctccgctacctgctgaccgaccctcgcaccttgctggtcatcggcatcgcgatcgtcggcgcgctgttcctgcttggcgggaacaccctcaagatgatcgcattctgggtcggcgtggtgctggcggcagcgctgatcgtgctgctcgcgttgtggatcatcaagcgcgtgcgcgcgcgccacgcgttcggcgagctgggcgaaagcgctggtcgagc

SEQ ID NO: 67366 - DNA, 225 bp, Arabidopsis thaliana landsberg
  unsure (1)..(225): unsure at all n locations
aaaaaaaaacacccccaccacacaggaaccaaaccaggcgaggaaacagcacaggggacccaagcccaaccaccagagaggaaggaacnccgcaacaacaccaaacgcaaccgcagagacgccggcgagagcagacggngcacccancccccncgcagacgaccatgaccaggcacgagccacaacgccngccaaaggcggagcaggagagaacggagaggccaa

SEQ ID NO: 67367 - DNA, 471 bp, Arabidopsis thaliana landsberg
acggccgacggccgtgggaccatcgattcgcgggccggtttcgggctgtcgggcctgcgcacttgccactgcggtcagcaccatgaacagggtcatcagaccggtcaggcccggcgtgatcgaacggcgtattcgcggggcgccgagccagcctggacggatcttcgggagcaatttcaatcgatctaaaaacgagtggaattttgtcgtcgaatgcatgatcggaagctctcctcgtgggaatacccgggaaagggatggaggctggattgccccatctttccatggccagatcagtggcttggcgccatgctggtctggaaaagtgcacgtgtggcgcagtcttcagggcacaagtcgacgaagctggcaggcccgtgcgcccgatcgagtattgccggaggatcttcccaatagtgagaaccacgccacggactgctcatcgatgggccttgggtgcactatgaatag

SEQ ID NO: 67368 - DNA, 500 bp, Arabidopsis thaliana landsberg
atcgccggcatacctaaaaacattaaagctgactgtataaaacattataagttgagatcccaccaagaattgacgcgggcggctattccatcaatcatctgaagcatgtgcccatactcacatggcaccgaaaagaaataaagtcctattcttgggttgggaaacacctcaaccaattttataattgagattctttcgtattaccttatcaaaggggtagatttatacttccgcttctgaacgggtcatattacatctgaagtccgggacggcaaattttgctagtaactagctaagcagaattcaacctactgaggttgctagaacgctactcatggagaatatcctgctgatctctggtagaagccagcctccatggattcgaaccatcagcatcgcctacaaagatatgctctcccaattgagaagtggaaaatacaacaacacatttcgacagaacataattattattatataattgaataaaattctcagggaaa

SEQ ID NO: 67369 - DNA, 562 bp, Arabidopsis thaliana landsberg
  unsure (1)..(562): unsure at all n locations
tcccaggcttccagtgtcatttcggtctcagataggggctcgaagtctgggtggaggatcttcacaagctccaatggcgtgcacccttctctggccttgatattgagaaggttgaggaacatgcgccaccagcgtaaccgcgcttggacctcctccttgcgctccgtggcgtggatataggaatagagataatccgtggcgacgagatcgaagaagccttgcgggttcaccaggaactcccggccgcgtctggttggcagcagcacatcctttttccggcgaagaagcttcagatgacgggtcatgtcgcgcacgacccagagcggtggcatgtcnnnnnnnnnnnnnnnnnnnnnnntgctgtagagatcctcagctgtgaaccctggccagagaaagtgcacagcggcccaatgcacgaacttgcggttcatggcgccggtggctgttaatccgatgccaccctcaccgtcagcataggcaacggaaagaagcatacctcgaagaagtggtgacagcgcggcgacatcgacttcacgctgcaatttgatttccggaagca

SEQ ID NO: 67370 - DNA, 515 bp, Arabidopsis thaliana landsberg
gatctgggcgaggaaggcgtcgacctcgggaaactgtacgattatctacatcatcctgctggacctggggctccgggacatgtcgggttttgaggtgctgcggtccctgcgggtgtccaaggtcaaaacgccgattctgatcctttccggcctggccggcatcgaggacaaggtccgcggtctcggcttcggcgccgacgactacatgaccaagcccttccacaaggacgagctgatcgcgcgcatccacgcgatcgtgcgccgctccaagggccacgcccagtcggtcatcaacaccggcgatctcgtcgtcaacctcgacaccaagacggtcgaagtcgacggccagcgcgtgcacctgacgggcaaggaataccagatgctcgagctgctctcgctccgcaagggcaccacgctgaccaaggagatgttcctcaatcatctctacggcggcatggacgagccggagctgaagatcatcgacgtcttcatctgcaagctgcgcaagaagctcg

SEQ ID NO: 67371 - DNA, 450 bp, Arabidopsis thaliana landsberg
gggttttggttctggtaccataggctggagtctggtgtctctgtttggctgggttgttttacatgttaatttctatgtgttggtggaagtcactatttgcaacggatttttggtagctaggctgcatgtgtgtagaatatgattgcagaaaaaccattgacattttgtgttacgtttttctgaactggctaagcggctagtagatgctttctcacatatgttaacacctccatatctaccttttttgttttagccagaaagtagccatccttgaagcaaaacatagcccagacgctggggattgctcaaattcggagaatttcgtcggcattgagactttggtcattagaaaaattgaatgataaggatacacgacaggcatggagtgcaacaaagacgaggcgacgagggcgaaagaaattgcagagaacaagttcaaaatgaaagaca

SEQ ID NO: 67372 - DNA, 203 bp, Arabidopsis thaliana landsberg
  unsure (1)..(203): unsure at all n locations
gcaaaccccgaacgaaacaagagggagaccaccgaagaagacgacccaggcagagaaccccaccgagacgcncggcaacgaacgacacaccaacggcacagaaccgaccgaacaaaagaaacgcccccaagaccagaacccgcacaccaacgaccggggcaaaaccagccgagncccccctgcgaccaagaaacaaacccaag
